United States Patent Application Publication US 2026/0103690 A1 - sequence listing, part 33

SEQ ID NO: 152175 - protein, 426 aa, unidentified
MLNPVSLQLRVGVDVGSRCHSVAIGLSDGSLLAEFDIPHTKEGFRAFFARVEACARCYGVPVAVAMEGTNGHVRPLDSLVRARGWQLFNVNNLKLARFKEIFPAAAKSDRIDAAKALELFQLRDHLPMARDVLQEVMATPQENDVLKRLSRRRRRLVKERGRVANALQADLQAVAPGLLEITLDVGNLWFLNFLTCRKGLAKLARLRRAGLLKVPGIGPTYADRIQAWQKRACFSHDARLVGDMIQQDAARILELKQQIEALEDQMAEIAERSSIACRLASIPGCGPICSAELAGEIGTLERFRGEASLALYLGMATLDNSSGKSRGSKPPRHVNTRAKAAMMIAVDHHRKLVPQSQRYYERKRAEGKKHNQAIRALGRHLCRVIFKMLSQERPYRIDPRRKNAKLFSDSLFQFPAGCSDPDIRRR

SEQ ID NO: 152176 - protein, 392 aa, unidentified
MDPRVAASPTATAPQSATLLVSFELSQSKWVLTIQSPHSAKPSHFNVRARDTEHVLALLSSHRAQAERRSGGRVQVVSIYEAGLDGFWLHRWLLAQGVESHVVDPASILGPQRRRQAKTDRIDGAKLLHSLAAWLGGDRRMCSMVVVPSTEQEDQRRLSRERSELVAQRTQLTNRIGGLLANQGIAGFMPLRRGAQEALEALRTGDGRALPGHLKASIGRMLSQLRLLTEQIKQVEAERDALLRAVPAETAQETPCDPRIGLLLLQLRGIGPEFATVLLRECLYRHFANRRQLAAYAGLAPSPWASGGVEHEQGISKAGNRRLRKTLVELAWSWTLHQPGSALTQWFRGKVKGQGRRMRRIAIVALARKLLVALWRYTQDGVVPEGAVLKAA

SEQ ID NO: 152177 - protein, 378 aa, unidentified
MAQPGWPPELGRRSIGSMPTEALRAVWRSEIAIGTSSGPEWLNELKVRITREGSTKMAKHITICAGIDTGKRKLDVAIEGRGEQLQVENTPEGHEVLLAWLRQHRVKRVGIEASGGYEQPVVAELRRKRFVVVVFQPAQVRAYAKFHLQRAKNDKIDAALIAACTAAVRKIHLAPDARLLPFAEQLTMIDQIGEDIARLKNRIESCRNAQIKEVWKEDIARLEKREKVELKALIASIRKHSDLAKRLDLINSIDGIGPPTAVAILVRMPEIGQITREQAVALAGLAPYDDDSGDQVGVRHIEGGRKRLRRALFAASLAASFRWNKQLIQLYQRLTAAGKEHKRALVACARKMLIFANTVVARGTPWCDEPPVGSSSVS

SEQ ID NO: 152178 - protein, 328 aa, unidentified
MQGKVSSERTAMATVYVGIDVCKEWLDIHLHPLGRSFRVTNDTAGLRRLKRELDALGQMPRSALHIVMEATGKWHRAVQRSLHADGFYVSVVDPLRARLFAKACGFLAKTDRLDARLLAIMGEALKPAQTPPQDQALEALQELVNARSAANGERTALSNRMKTAVTAFLRKELTRRLAALDTHIARLDAEIERSIGAEPEMRRRLDILISIPGIGAVTAASLIAGLCELGACSGKQAAMLAGLAPLACESGERAGHRAIRGGRPAPRNAIYMAALSASRHNPDLAHFAERLKKAGKPNKVVLVAVMRKLIVLANTLITKNRIWTPNPP

SEQ ID NO: 152179 - protein, 312 aa, unidentified
MIITPVCVGIDVSKLVLDIFDPRHGPLRIANEAEAIETLVTGLGADVFVVFEATGRYDGRLRRALEAAGIRFARVNPEHARAFARATGRRAETDAVDARMLADLGRRLAPRPAEAEDPRRAALARLDRRRAQLVAMRATERVRLADATADDDEGARRDLEAHIAFLDQAITAIEERITTTVKADADLTRLARRLRSVPGVGPVVATRLLAALPELGHRSPKVIASLAGLAPHADDSGGRRGKRVVAGGRRRIREVLYMAAVAAARGTTRLAAFYRSLRDAGKPPKLALLALARKLLVVLNAVARDDQDFRAA

SEQ ID NO: 152180 - protein, 271 aa, unidentified
MDVHKDTVSVAVMNAAGKVVMESILETKAATLLQFIRGLRGTLLVTLEEGTWAAWLYELLKPHVTQVTVCNPRKNALLRWGNKGDRIDAQKLAELLRQGSLSSVYHGEKGLRTLRELSRSYLTITKDLTRVMNRLKALYQSWGIGCSGTQVYAPRHRAEWLSRIKEAGVRSRAEFTYHQLDGLQALRQAVRRELLAESRKHRATKLLRQIPGIGPIRAALVVALLQTPDRFRTRRQLWAYSGLAIETHGSGEYCYVEGQLRRSQKRWRCVV

SEQ ID NO: 152181 - protein, 359 aa, unidentified
MTVTVGLDVHARSIRLAAVRADELLEERTLPYDEEAVERALRRWPGVRCCYEAGPTGFGLYRHLIERGIDCAVVAPGLVPQRPGDRVKTDPRDARKLARLLAGGLLGPIHVPSPELEAARDLVRAREDARLDRMRDRHRLSKFCLRHGRRLPGLSWSVVRRKWLGEQRFAHAAEQITFDTYLHTVDLVDRRIEALERAIRETAEHAPWRELVARLRCLRGIDTLTALALVAEIGDFGRFTCAQELMAFVGLVPSEHSSGEHRRQASITKVGNAHVRRLLVEAAWHARRRPKVGYELARRQRGQDAIVVERAWRCQQRLYQRWQRMAGRGKPQQKIVVACARELAGFVWAIATDQPLRTS

SEQ ID NO: 152182 - protein, 391 aa, unidentified
MIYVGIDVAKDKHDCFITNSDGEVLFKAFTIANNLNGFNDLYQKIESVMEDITKVKVGLEATGHYSYNLLGYLIDKGLAAYVINPLHTNLYRKSLSLRQTKTDKVDARTIASMLMSDVNLKSYSDTSYHNEELKSLTRYRFDKVQERAKLKTSVSRLVCILFPELEKLVPTLHMASVYALLSEFPSAHAVASAHLTRLANLLSENSHGRYNKDTAILFRETARNSIGSNMPAKSLELKHTIKLIHELTSEIDEIEAEIKSIMDTINSPILTIPGISYRMGAMIIAEIGDFSRFDSPDKILAYAGASPSTYQSGQLDGAYSHMEKRGSRYLRYALYNAAKYVCHWDPTFAEYLAKKQSEGKHYNVAISHAVKKLVRVIYHLEKTNQQYIKAA

SEQ ID NO: 152183 - protein, 318 aa, unidentified
MDAVTLIGVDLGKHTFHLHGQDKHGKAVFRKKLSRRQLIEFFATFHTCTVAMEACAGAHHMARMLATFGHRVKLISPQFVRPFVKSNKNDFVDAEAICEAACRPAMRFVTPKTESQQTLSTLHRVRESLVRDRTKAVNQIHGFLLEFGVSLAIGPAAIRRLPKYLDEQIGQLERDITRQLSDDEIGQRLLTIPGVGVITASVLASEMGDGKQYRCGRDFAAAIGLVPRQHSTGGRANLLGISRRGDKNIRRLLVTCARAYMIRLDKKTGRLADWVRAMMTRRHSNVVACALANKLARTAWAIATHHTVFDARSSGVAA

SEQ ID NO: 152184 - protein, 361 aa, unidentified
MAGTMTWVGLDVHARSTHAAAVDVMSGELTRMRFGPGVDGPVAWLGSLPGPVWACYEAGPTGYGLYRAAVAAGIRIDVIAPGKTPRGPSDRVKTDRRDAELLARCLLAGSLKPVTVPPAGVEAARELTRADDACRRDLMNARHRVSKMLLRHGRVYPKDNTWGQEHLRWLSRQQFEQEVSAFVFADLVARVDGLTARKAVLAERISRLAVEPEFWSTVSRLRAFKGVDTLTALSIHLELGADWQRFEKPTRLGSWLGLTPSLTQSGESSRQGAITKTGSGLARRLLVESAWHYCREPRIGATLENRQQGQPEHVLQISNTAQQRIHRVYRRMKARGKPHHVTVVACARELACFLWAAATAP

SEQ ID NO: 152185 - protein, 407 aa, unidentified
MQIVYSRCCGLDVHKETVVACLLIREEGTIHKEIRTFQTMTSDLLVLHDWLLTHQVTDVAMESTGVYWKPIFNLLEGSFKVLLVNAAHIKAVPGRKTDVKDCEWIADLLCHGLLKGSFIPPEPIRDLRDLTRYRKSLSDERVREVNRLQKLLESANIKLCCVATDVMGVSGRAMMEALLGGKTDPGALADLARGKLRKKLPLLKEALRGRFRSHHQFLLGEILSHIDFLDEAIESVSQEVENRMAPFSKEVGLLQTMTGVKQTVAENVISEIGVDMSCFPTHRHAASWAGLCPGNNESAGKRKSGKTRKGDRWLRRFLMESAWAISRSEGTYLGALYHRLARRRGKKKAVVGVAHAILVIAYHILRDKVPYHELGPNHFDRLNIRHMKRHLVQRLEGLGFKVVLEPV

SEQ ID NO: 152186 - protein, 423 aa, unidentified
MNTLFVGIDVSTKNNQVCAVNLNQDVFFNLSFPNNPDGCDLLITTVLAFVDKEKFDSIIIVTESTSIYDYHVCAYLSSQLSIVGTSIIIYSVNAKSIANYKKSYIEMEKTDPRDAFLIADFARVGRCKNLRPFKAAQHIALKRLTRERYHLAEQLTREKNYILNNIYLKVSGLMTLPHKDLPFSDNFSASNTKFLTDYTSPFDLAERPLDEIIEYFKSTSQNRCDDYGKIASLFDKAIRSSYRLDKTAYDPITISITASINLIQCIESQIKMVDKAIEKEMKGLYPNGYQSLMSITGIGPVFAAGILSEIGDISYFKSDASLAKYAGFHWKKNDSGNFTADEKHSANSCNKYLKYYITQATQMSVMLGFDYTTSFYHKKYNEASTHKHRRALVLTSRKLVRLIYVLLRDSKLYVSVSHDTVIE

SEQ ID NO: 152187 - protein, 405 aa, unidentified
MQNVYERCCGIDVHKKLIVACFRNGKKAELRKFDTLTSSIKELGNWLLDNECQMVAMESTGAYWKPIYNILELLNLDVMVVNAHHMKNVPGRKTDVKDAEWIAELLQHGLLKASYIPDREQRELREIVRYRKNLVEERSREINRLEKTLEGANIKLSSFVSDLTGVSSRNILQLALTGEVNEENIENLMHPSMKATKEQLFHAMDGVLSPVQKKLVSAILDHIDDMTRRIQDLDEIIDDQIKDHENAFKNIDELPGIGKRSAEVILAEIGTDMNRFPSAGHLASWSGLCPGNNESAGKRKSGRTTKGNKYLKSTLIQCAKAAIKNKDSFFHAQYQRLVVRRGANRATVAVAHSMLIAIYHVLKDGVPFKDLTSDYYTKFNTEAKARYYLRKLQDLGMSIPVSLAT

SEQ ID NO: 152188 - protein, 442 aa, unidentified
MRTIGLDLSIKQPSEAIVAGHDGSFIGSSFKVDETAAGLQALMERACEGMPDDESLRVIMEPTANAWLPIAIYMSHREVVCHLVQSEKAADLRKFYRKHAKSDRIDTRVLVKIPFVDEEGLNSLYLPTAEEQALRRLCRQREKLVSQATAIKNRLHDLDRLAGWDKVLGSAFGNAFSEAARSFRRDFYDPWQVRELGVAGLKEYLVKLTGEEDCQSTAEKLYRASLAIIELYSPPEEDTSPHLDFEMLCFEAQIKQEHLDKLEELQEKVKSQIQRISQGSRSVELARSLMGIGETGGPVLASYVGDPHRFNQNTFRGWHGMIPGSKQSSSKDQKGVSMTKAGPNLVKKFAYLCADIARQWDPQIGRIYWDQMVNKGKHHTQAVCACATHLLDRLLAVLKEDRLYELRDCAGNPITNAEGRKIIQEKYQVPKAVRRSRRARNP

SEQ ID NO: 152189 - protein, 353 aa, unidentified
MMFHVGLDLSRSRVDVCVLDAATGVVAYTAAVPDADGLRGLVGRVQEMGSPPVRVRAAIESMTGARYVRDVLTDHGWEVLVADAAKVKGLAPLACKTDRIDAAVLAELSARDLVPAIWLPPLLVRQRREQTRYRTHLVKHRSMYKHRIHSTLMTLGVPVKVSDLFGVAGRARLAELDLPEPWAGHITTSLALIDGLGRDIDGCEAAIAGWAHTDPAVRRLRTLPGVGDILGATIAAEIGDITRFATPARLVSYTGLCPRVYQSGRKDRRGPISKTGPEQLRWALIEATTHACRHPAFAARYQRTKTRLGRHRGARIARVQLARELATAIWYMLTREEDFDPKPAAGAAIDLAA

SEQ ID NO: 152190 - protein, 421 aa, unidentified
MFLFKIFRKNCCGLDVHKTWIFACIGITDTSGRTEYKQARFSSFSKGLRELADWLARYDCKEICMESSGKYWIPVFNILEKTCLVTLAHPKYTKPQKGNKTDRKDAKWICDLFMCDMIKPSFIPPPDIRQLRDLIRYRFKLTNILTGEKNRAHNCLTVSNLKLDDVFSDIFGKSARSLTGYILEHPGEQFDVAPFIDGRCKRSIEEIQAAVDGSISREQAAKLKEIISHIDELEAHKRKIETEILLLAEPYKPILELIRTAPGLSSDPMTAILILSEIGADMSVFPTAKNLSSWAGCCPRNDQSGGKRKSSRISRAGVYLKPLLVQVANAVVKSDKYPECKERYRRIKARRGHKKAIIAICRMLLTAIWNILSKSEPYSDKGYLADRKPIGNQILTTAQALKLLRSRGYIIKDEPVMSSTA

SEQ ID NO: 152191 - protein, 325 aa, unidentified
MFVGLDLHKKYSEFAVMDVAGKLVRQGRIENDLEKMREFSESIPAKSSLVIESSSTWYWAHRLLSERHDVTLSNPIKNKAIASAKVKTDKIDSVMLATLLRGGFVAECYVPSSETIDLRELVRFRANLVRERTKMKNQIHAYLLQNNVSIGSSPFSKEFVAGLRKVDDARVQSYLRLIDGLNAEIRSASKAVEERAKENEDAKLLMTIPGISFYSALLIISEVGEISRFEESSSLVAYAGLAPSTHSSGGKTYHGPIMKSGSKYLRWAMGQCARAHMRAQPDGTVAAFYARIRRKKGDQKAIVAASAKLLKVVYWVLKEKRAYHG

SEQ ID NO: 152192 - protein, 338 aa, unidentified
MKSNIGTPVSVGIDVAKATLSVSICDHDGHEQALAIRNTDTDITTKVLPYLRHYSGKVVMESTGHYHWTPALVLREAGIDIRIVNPLLAKQYTSGTIRKVKTDPADARGLARMAMVCDNLPETFTVSRARLIIRKKLATISTMSRHLQALKANLASLREGQALLNEPDTTVVMELAESIKQLGLSIKHLENECVRLTTSDTNSRETMERLETIPGVSEFCAALATNWFDINTATSAKSFIGYAGLDVSSRESGTWRGHCRLTKRGNPFLRKRLYSAGWGAAMNYPEYRLYYDQLKASGRGHKEAVVIIARKLVRTMYCLLRDGVSYDSVKVSFPNRII

SEQ ID NO: 152193 - protein, 418 aa, unidentified
MEQDDVIYRRCAGIDVHKRMIVVCLRIGRKAELRTFGTLTRELREMTSWLKTNGCEMAAMESTGSYWKPLYNIFEMEGLPAMVVNAQHMKALPGRKTDMKDAEWIAKLLSQGLLRASFIPGREQRDMRDLTRFRKSQIEERARNLNRLQKMLEGANIKLASFVSEIEGKSATELLGLVIGKPDFTMEDVSAHRHGGLKASAEELFQALEGIISPMQRELFQHVMQVIREQTAQIERTDAMIQAHMGDAYKKAAQALTAIPGIGPISAQQIVAEIGYDMSRFPSAGHLCKWAGVCPGNNESAGKRKSGKTGYANKTLKSTLAQCAQSAKKNKKSYFSAQYQRLVVRRGKNRANLAVAHSILIAIYHVLQGAQFRDLGADYYTQFNREKKINSYVKQLEKLGVCIPDDVLRTAIAERAFA

SEQ ID NO: 152194 - protein, 427 aa, unidentified
MELTSTFRQCTDGRTRLSKVFCGIDWAENHHDIALVDQDGTQLAKLRVSDDSAGFHALLELLARHGDTPEHPIPVAIETPRGLLVACLRATGRKIYAINPLAAARYRDRSSVARAKSDAADARVLANILRTDVATHRPLPADSELAQAVAVLARAHQDAVWDKTQMVNRLRSHLREYYPAALAAFHGSGTLGLDSAHARAVLAAAPTPAAAARLTRSQLQALLKRAGRLRRGIEAEAERLREVFRREHLHQLPQVEQAMGKQTQALVQQLDAACRSVDDLAAATEEAFLTHPDAAIITSFPGLSVMSGARVLAEVGDDRDRFADARALKAYAGAAPVTRASGRSHVVVARAVKNQRLASVGYMWAFAALRSAEPREHYDRRRAGGERHTAALRNLFNKLLGCLYHCLQNRTIYDPERAFPLPVALAA

SEQ ID NO: 152195 - protein, 357 aa, unidentified
MVEGSWVGLDVHARKVVAGVLDAGSGELSTVRVAAGGDATVAWLRTLPGPVRVAYEAGPTGYGLARACAAAGIACTVAAPSKINRPAGDRVKTDRRDAERLARLLRLGELVAVRVPEPHEEAARDLVRAREDLRGDLMRVRHRLSKLLLRHGLVYDARAWTLAHDAWLRRQRFESRPLALAFDDCYAAVVQTRARREALDAAIAELAAEPPFAEVVGRLCCLRGVSTLTALGLTVELGDWTRFRPQSLGPFLGLTPSEDSSGERRRLGGITKTGNTHARRLLVEAAWHQRRPPRPSAALERRRHGQPAAVCARADQSARRLHARWQALEARGKRRTIVAVAVARELAAHCWALATME

SEQ ID NO: 152196 - protein, 485 aa, unidentified
MKNKSIFTRQNQTLINLFRDARHPDKVLCVPIDYAKQTHMALFCNGSGEQLKKPFPVKNNPEGMAFLLDATEKICRKHHIKPGHVFFGGEDCGTFADNFIYALRKEGFVVMGVNARDAAKQRENMQASTDKLDLLGIAKMLLGKRGSIAGGEIGKERALRSLTRHRNSQVRMRTATGNRIHKIVDQLFPGFLDEKYSSIPPFSEASLYLMGDRFSPAQIAKRHDKALLRQLKTRGLQHAEAALGKLKAHARQVLEHPPELIGMLQTSLAGEIALYRCIGNNIGQINREVARQLAQTPGAMLTTIRGIGITLAAGVVAETGPPDSQPSTRRLTSYSGIVPRVKQTGGPEKGAKTGSVSRRCNHLLKNCVVQCGNHLGQHGPDALKEDHRRRSANSQHADFGMARRFLRMGMRLMRNGESYVPPELREGATIEELQTYYLQLWPKLLDKWVKAGAVHTAFHEDNPLGQWRGRIEAIYEITLPLPKKK

SEQ ID NO: 152197 - protein, 344 aa, unidentified
MEHYVGLDVSLRSCAVCVVDSRGTILHERDLPCEIEEIAGYLTALPVSIERVGFESGTLSQHLFYGLKAEGFDVVCMEARQVSAALSAMRNKTDRNDARGIAQILRTGWFSTVHMKSREAHGARALLSTRKALLSKTIDLANEVRGLLKIFGIRLPKTVKHGSFDGVVRPMIEMDEVLAHAMLPLLDARLVLYQHFLELDRRVKRAASQDGVCMRMMTVPGVGPIAALTFKAAVDDPARFKRSRTVAAHFGLTPRRYQSGEHDNPGRISKAGDRDVRATLYAAANALLMRTMAGSQIKSWGMRLMRTKGRRRAVVAVARKLAVLLHRMWVDGTEFRSEKVEGMA

SEQ ID NO: 152198 - protein, 403 aa, unidentified
MAHRKGRKIPAQLVEDEDYQLRHERVAGIDIAKDKGDVSVRLPAAREGGRRRSRVEADVPARARDILELGARLAADGVELVVMESTSDYWRIWYYLLESLGLAVALVNSSHARQLAGRPKTDRLDCQWLARLAEMGLLRPSFVPPPEIRALRDLARARQQLVRDRARCWQRLEKLLEGALVKLSSELSSLAKVKTARLILDALAGGERDPRALSALALGSLAGRRGDLEAAMEGMAAGPHHSLLIRLHLDHVALLDRSVSAVEAEIAAALEAVPAAWGVNAGGEPSPAPGPGALLLPADARLAEVPGITLNLARAIIAETGLDMSAFPTAAHLVSWAGLAPVARQSGPRSRRRARATPTSRTCAPRPPTAPQAPGPSSASATAASPGAWDRARPSAPSPAPSS

SEQ ID NO: 152199 - protein, 326 aa, unidentified
MTSLCGLDNSFIGIDVGGASFEAAWHRGGCTQYANRPDAIAAFVERLCAGPRVERIVIEPTGGHEKSLVRALRRAGFRVELVHTSRFKAYRALVGAHAKSDTSDARLLAAYAAAPDEVRGRAGQHVELPDDEQREELAELASRRDQLKQMIHAESCRLTTVRSEQVRREIEFHLETLQASARDTATAMSRLVRARADLSNAKKLLRSIKSIGDTSALTLLALLPELGRIDNKAAAALVGVAPFVRKSGTMNAPARIAGGRAAVRNVIYMAAVTASRHNPVLKSFYERLIAAGKPTKVALIAVMRRLVVFANAVLKSGQPWRGALAA

SEQ ID NO: 152200 - protein, 388 aa, unidentified
MQTVADRPEAPTAIRTDLGAIFVSLELSRSTWLITSLWPGGGEKMSKQVVHGGDVAELLERFARLREKARARTGKVFPFVVIQEAGLDGFWIDRALQNEGIESHVVDPASIATSRRRRRAKTDGIDGEALVRALLAYKRGEPRVCAMVKAPTPEEEDRRRLCRERKVLIGERVQHVNRVKGLLFSQGISGYEPLRRDRREQLDTLQTGDGRLLPDHLKAQVCRELDRLELLLEQIKAVEAERDVLLAAQQVAAPAPAAMLLDIKGIGPEFAAILWSEGLFRHFDNRRQVASYAGLAPTPWQSGSVDREQGVSKTGNPRLRTTLIQLAWLWLRHQPQSALTLWFEERVRRNGGRLKKTTIVALARKLLVALWKYVTAGIVIEGAVMKRT

SEQ ID NO: 152201 - protein, 354 aa, unidentified
MKKARRELQSGDTVFVGIDMHKLKWHVTVRTADFELFSGSIPGKWEALQRILERYKGHQIHTVYEAGYFGFWLHDDLVEYGAECIVTPPSLIPQEYGNKVKTDRRDSRKLAHFLAKGMLKRVWVPTEKERYHRQVIRRRRQLIGDRIRTQSRIKAELQLHGLNLSAPHGKWTKIFLGNLGRIRFNNRWMQESFKRLLEQYHFLDEQIAKQTDLLRELSEIELYKERVEILMTIPGIGMIAAMELLLELQDVHRFQRADQLAAYVGLTPSQYSSADKIRMGRITCVGKNSLRAMLIQASWALIRKDGVMREKYDRLKSRSGGKRAIVAVARTLLIRMRRMLLDNNPYVVGLVATN

SEQ ID NO: 152202 - protein, 476 aa, unidentified
MGKGSGTTRGDRRRNARRERLRGLLPRDGAVIGIDLAEDKQALAVTDHDVRVLARKTVRVKAFRLGEALDWAVAQARVKGFTHVAVACEPTGPRWLQVQRLCAGRGLPLVCIQPLVSHIARQQQDYTTHKTDEADCVMIARLAFELHCYIPEELDEAWAQLRHLGRRRAQLITSATASVQRVRDFLSVAWPVAPEACAHPFESVTWLAAMQVVTSRCGGQPEKLAAVGLAEFTALVRQAVAGWGGQRPASVVCRAVFAALTSTEGVVVSHRRGLLRRCADELGDLQRTRAQLRAVEADMAAVLGELGLSRLADIPGLTAVGAAAILAETGDPRRYDSSSSLVKHAGLSPSGNASGAFEGQAHISRRGRPGLRLTVWRAIWPLLIHNSVMAAKYAAMIAAADAAAAQAAQAQSGTRSRQASAAAAARARRAKARVACAASLLRWIYSIVVHDTGWDPDVASGAASCQHALRCQAEAA

SEQ ID NO: 152203 - protein, 338 aa, unidentified
MMCYVGIDLHATNSVVVVIDDADRMLYQKRLRNDLALIRTALEPYRATVQGVAVESTYNWYWLVDGLMEAGYRVHLAHAPALPQYSGLKHIDDQHDAQWLAHLLRLGLLPTGYIYPKAERAIRDLLRKRSQLVRHKTMVVLSLQSLLTRLTGHRLSLPRLRQLTPKGVQALVPFPEQVQAVMSSLAVLACLEQEIRAIESTVREAEQTQPGYALLQTVPGIGPILAGTILLEVGDIQRFATVGHFASYCRCVGSEHVSNGKRKGAGNTKNGNRYLSWAFIEAAHFAIRYEAVIRTYDQRKQARTHPLVALKTVAHKLARACYHMLREQVPFDLARAFG

SEQ ID NO: 152204 - protein, 325 aa, unidentified
MQTQTNYTGIDISKLFFDVAFMQADRYTYHKFSNDRDGFKALLKVLPSDSHIVMEASGPYYLQLASYLYDAGLAVSVVNPLVIRRFCQMRMSRAKTDKKDAMMIAEYGKTEKPVLWKIPEQHVITLQQMEALLSSLGKERTALNNQLESFTHSGMLDKALKKEIVKELEHKDRLIKKLNKAMEILAAEHYAEMLSNLESIPGMGPKTAMALLVLSGGFNRFDDYRKLSSYIGICPRIFESGTSVKGKARICKMGMSRIRAMLYVCSWSAIRCNKACRDLYHRLVAKGKAKKSALIAVANKLLKQAFAIATQKTKYNENYSNSICF

SEQ ID NO: 152205 - protein, 342 aa, unidentified
MGEVATVGLDIAKSVFQVHGVDAEGTVVVQRRLTRGRVLLFFEKLAPCVVGIEACASAHHWARQLRVFGHEVRLMPPAYVKPYVKRQKNDAADAEAICEAITRPNMRFVAVKTPEQESVLVLHRTRQVLIRQRTQISNAIRGHMSEFGLVAPIGRRGLQILTEIIGHEADQRVPEAARTCLAMLVDQLRLVNGQILETDRRIMASARATEVGRRLMGIPGVGPLLASALVATVPDPHAFRSGRNLAAWIGLVPKQNSSGGKERLGGISKQGDRYLRQMLVVGALAVIRHAERHGSRRSWLVQLMARRTTKVAAVALANKTARMVWAIMTSGQPYREPQLVTA

SEQ ID NO: 152206 - protein, 313 aa, unidentified
MKAVPSNVFIGVDVSKERLDVAVAPSGESMSFANSEDGIALLADFVKPRNPELVLFEATGGWEMNAVNQLATHRLPLVVLNPRHVRDFAKATGQLAKTDAIDARILARFGQAVRPEVRSLKPLELRKLDALNTRRRQIVEMLTAEQNRLVSAPEWVRPDIEELIAILKKRLAAINRDLNKLIRKSPLWREKDKILQSFPGVGPVTASTIIAALPELGSLNRRQIATLVGVAPLNCDSGTHKGKRKIWGGRADIRSVLYMCAMTAARCNPVIRPFYQKLLRAGKPNKVARTACMRRVLVILNAMMRSHTCWQPT

SEQ ID NO: 152207 - protein, 345 aa, unidentified
MKKVMAGIDLHSNNLVIGIVDLEGKRLGQRKVDCELKKVVEFLAPYKKRLEAVAVESTYNWYWLVDGLAAAGYPVALANPAGMQQYSGLKHSDDTSDAFFLAELLRLNILPTGHIYPAELRPVRDLLRRRLSLVHQRTALMLSFKSLFTRTTGQEMSLSRLKGLSGEEVKKLYEHPANELIAQVQHRHIGALDESIGQVERAVLKVAKALPSYRRLQSLPGVGIILGLTITLETGKISRFAGPGEYASYCRAVDATRFSNGKKKADNNQKCGNKYLGWAWVEAANFARRYDEPCRKWFDRKAARTSRVIATKALACKLAKAGWHVMAQDTVYDEKRVFPELAMKK

SEQ ID NO: 152208 - protein, 338 aa, unidentified
MSLYSAIDLHSNNGVLSIIDGDDRVQYERRLPNELPAVLGALEPFREQISAIAIESTYNWYWLVDGLMEHGYDVRLVNTAAVPQYDGLKHGNDHTDARHLAHLLRLGILPEGFIYPREQRGVRDLLRRRFHLVRHAASLVHAMQAAWSRRSGHGISVNTLNKITDEAIDETFADPMERLAVLTQLKVWRVIEQQVEQLEKWVLEAIKPSPGLKALRTTPGIGVVLGSTILLETGPINRFAEVGDYASYCRMVESKRMSNGKQKGRGNAKCGNRYLCWAFIEAANYAIRYSEDVRRWYDRKSSKKLRVVAIKATAHKLARSSYFLLRDGGAFDVKRAFG

SEQ ID NO: 152209 - protein, 449 aa, unidentified
MMEPQEIEDEGHEQILERVAAVDVAKASGMVCVRVPREDQPGRRRTRVWQVEATSGAVLELADHLVRERVQKVTLESTSDYWRIWYYLLEAAGLDVQLVRAQDVKQAPGRPKTDKLDCVWQAKCTERGMLRPSFVPPAEIRQLRDYTRLRADLTGERTRHYSRLEKLLEDALIKVSAVASKLDTLSVRDMLEALIAGERDPKVLAGLARGKMKAKHDRLVEALTGKFDDHHAELARMLLDQIDALTAQIGKLTARIEELIAAIPAAQGIDADGTTGPAAGRGEGAPVLPAVDRLDEVTGIGRGGALVILAEIGLDMTRFPSPAHLVSWAKLSPRTIQSGARSRAGRTGKGNPYLKGILGEAAAAAGKTDTFLGERYRRLVKRRGKLKALVAVARSILVIIWHLLTDPTTRYHDLGPDYYTSRLDNNRKTRNHIRGLQALGYTVTLTPAA

SEQ ID NO: 152210 - protein, 413 aa, unidentified
MRVIRKRCVGLDLHKKQNTAHLRVHQGSDCEPLGVTETFGTMPEELERLRRWIIENQVTDVVMESTGVYWIHLYEMLEGVTQPAVVNASHVKKVPGRKTDVIDAAWLAELHAHGLLRVSFVPPKDIRELRALTRYRAKLVAIRTAARNRTIKLIEMAGVKLSSVVSDSFGMTGRLILDGLCKENSNPAELARQAKGKLRDKIPALERALLHPLSAQQRELLRMHLQVHDSIDAQVAETELKITQRAQAYAAAIAKLDAIPGINPLGAIALLAETGVDMGVYRSDRHLSAMAGLAPGNAISSEKRRRISVRKGNLHLKRICVQIAWAASRTKDTFLRTRFLRLQNRIGRNKAIVALARQILVIVYHVLSSEGPYKDLGPNFHDTRNKERTVQRHLKKLSALGFMVTLTKKTETD

SEQ ID NO: 152211 - protein, 337 aa, unidentified
MTRYVGVDLHRRRSVIVVLDSDGTELWTKRIDNDPLTLGMEVEKAGPEPEVVLEATWGWYWAADVITEAGGRVHLAHLLGIAGFENRRVKTDRVDARLLADLLRMGMLPESWIAPEDIRYQRGLVRYRRKLSQLRAGLKAQVHAVLGKEGLMAPLTHMWGPGGSAWLDETEMADAYETRVRSLRRLIKLYDTEITKLDSRIAEVFGDDEGYRVIQQLNGVGPVIAAIFCAELGDVDRFRSAKAVCSWAGLTPRHRESDTTVHRGSITKQGSGLVRWAAVEAISKNHGDDPIKEHYRRVSERRGRNKGRVAAARKLLTLVYYGLRDGEIRSLVPPEAT

SEQ ID NO: 152212 - protein, 351 aa, unidentified
MPKTASAQIAVIGIDIGKNSFHVVGHDSRGAIILRQKWSRGQIEARLANLPPCLIGMEACVGAHHLARKLTAFGHDARLMPAKYVRPYAKGQKNDFNDAEAIAEAVQRPTMKFVAVKTTDQLDLQALHRVRERLVSQRTGIINQIRAFMLERGIAVRQGIRFLRTELPIILASRTDMLSPRMLHVIEDLAGDWRRLDERIETLSREIETIARQDAGCDRLMSVPGIGPIISSAVVAAIGSGDVFSKGRDFAAWLGLVPKQISTGDRMILGQDIEARKSLSARAVRASSVGRSRQAGKLGTSRPQVVDRGRQETTAPQCAGDRTRQQARAHRLGGARQGTRLRSDEDNRWFD

SEQ ID NO: 152213 - protein, 345 aa, unidentified
MEQISRIGMDTSKRFFQLHGVNAAEKVVLRKKLRRKEMVAFFKALAPTVIGIEACGASHHWARILRSFGHEVKLIAPQLVKPYVKRGKNDTADAEALCEAMSRPTMRFVPVKTAEQQAALMMVALRDRLIRNRTQLSNAIRGYAAEFGFTAARGMAHIDPLLDRIQADESVPVLARELFAAQAEEYAQLQAQIAEVDAKLMAWHKADECSRRLAKIPGVGPIGAALLMMKTPAPEMFRSGRQFAAWIGLTPKDHSTAGKVRLGVITRAGDEALRSVLVVGATAVVQHVRRGGRGSPWIVDLLKRKPPKLAAVALANKMARIAWKLMVTGNSYAAKSAPATLMGAA

SEQ ID NO: 152214 - protein, 406 aa, unidentified
MKQIVSVGIDVSKGKSTVCAMIHPNTIIKESFEVLHTVEEMSMLADYIGSLDGEIRIVMESTGHYHLPVAQFLYQKGFFVCVENAYIIRQFSRIMLHGAKTDPLDAKKLAKYGLAYWSELKPYKFHPSCYTELSLLSKQYQTYIKLLIAAKQNVIHLMDEMLPGFKEALDTASSVQFSKVKYVDFAKEFYHVDMIKSMGKEIFRENYKQWCKEKGYRFQSEKADELFHLAEDGIPTLPTEFPSTRLCMEVATEQVSQLGYALEQILSQMQNLAKTLTEYQTIRQMGGMGEKLCVRFIADIGDVRRFHNGKALVAYAGIDAPPYQSGQYTGTKRRISKRGNSALRKTGYEVMKSLKSHPPKTDTRVYDFIIKKENEGKSKKQAKIAGLNKFLQIYYARVMEIYKNIV

SEQ ID NO: 152215 - protein, 341 aa, unidentified
MTAIGIDTHKATLAACAVDGLGLALDERTFRNDPAGHRALAVWATEVAAGALIGIEGSSTYGAALARFLVTAGFAVCEVPPQLTRRSRTESRRPGKSDPGDALTIARVTAREPALPPVRLADRTRELGLLLDTREALVHEATQRRNRLHAHLQVLVPGYGDRVHRLVSSAALDRAGRLLRGLTGLEPELARGLVGDLRRLDRQIDGLTGRIATVLGDDPLLRLPGIGVVTAARLIAETGDVSRFRSADAFAALAGVAPIPASSGQVQRVRLSRGGNRQLNRALYVIALTQVWHHPPAKVYVARKRAEGKTWREAIRCLKRQLVRPVFRLLQEGQLGLKAAA

SEQ ID NO: 152216 - protein, 353 aa, unidentified
MGVYVGVDFHVKTQTVCWMDTADGEIHQRTLDHQHEDVGGFYAQWTTPVTVGVEALGYTGWFHRLVEQHGHHLLVGDAYAIRQFARRRQKNDRRDAELLLDLLRRGDFPAVHRPSPASREVLDLLHHRERLVRLRTVLKNSLQAVALNHGLARQRGLFTAQGRAALAALPLSPAEDWQRRDSLELLDQMGERVAALDRELEQRAGADPRVQRIRTHPGVGRLTALAAVHTLTPVTRFGHGRQVAAYCGLDPREHSSGETIRHGRISKQGNRLLRALLVEAAWSAIRPGQCDDLRRFYFHLAAHKSSGVAIVAVARKLAVRLYRMLREEIDYEEFRRRGRDARRARPVDEAVKA

SEQ ID NO: 152217 - protein, 324 aa, unidentified
MTEPVLGIDIAKLKFNVCLINLEGKLRHKLFSNTAPGFEQLKQWLSKQRVERVHACLEATGTYGEALALFLHEAGHTVSVINPAAIKAFAQSRLSRTKTDRVDAELIARFCLAQAPPSWTPPPPEVRELQALVRRLESLIEMRVMEENRLSSGITVGVVRESVEELLKHLNELIRRTEKLIGEHLNNHPRLKRQSELLDSIPGIAETTAAHLLSEIVDISQYRSARQVAAYAGLVPSERQSGTSVRGRTKLSKIGNARLRRALYFPAITALRCSPFFQQWAKGLQERGKSKMSVICAVMRKLVHLAYGVLKSGKPFDPEWAKTA

SEQ ID NO: 152218 - protein, 392 aa, unidentified
MYYVGVDIAKRAHVIGAVDERGKAACRAMQFDNSGEGFGRCVEWLEGLAGEPDDVLVGMEATGHYWMALFSHLVAAGYRACVINPSQVRAVRKLKGLERVKNDRVDAGLIAETLRIGQYDPSRLADDRVQSLRVLTRYHQSIKGDVAEAKTQLTCILDAYFPEYERLFSDPMCESSLALLELAPLPADLARRRTSTVARTLREASRGRLGDARADEVMAAARASVGHRIGSEAASMQARSLVRTIEFLQKEADKVAAQVSALLHEVEPLVLTIPGVGEVTGAQIVAEIGDVSRFPNAKALVRYAGLDSSVSQSGEFDSGGGPISKGGDPYLRRAVWLAASRAWQYDPRLNEFYRKKRSEGKPHRVAVTAVARKLCHIVYAVMRDHEEYDPDR

SEQ ID NO: 152219 - protein, 419 aa, unidentified
MSFKILKNNCCGLDVHKTWIFACIGITDSHRRTEYKQARFSSFTKGLQELCDWLAKYNCTDVCMESTGKYWIPVFNVLEKNNIWVTLSHPKYTKPQKGNKTDRKDAKWICDLYMCGMVKPSFIPPADIRQLRDLVRYRFKRTCMITSEKNRAHNCLTISNFKLDEVFSDIFGKSSRSITEQILQHPGETFDVAQFVDGRCKTPIEEIQAAVDGAISTEQAVKLRQCLNHIDELEKHQAEIEREIFRLSDKYEEVLNLIRTVPGFDKNPMTAIQVLSEIGGDMSVFPTAKNLVSWAGCCPRNDQSNQKIKSTRISRSGSYFKPVLVQVANALIKSKKHPEFTTRYRRIKARRGHKKAIIAICRMILTAIWHILTDLKPYTTEGFLESRPVNDSKILTTSQALNLLKQRGYVIKDDIVSVP

SEQ ID NO: 152220 - protein, 358 aa, unidentified
MNLNKSSKLDFTGQHIYVGLDVHKKSWSVSILSQHCEHKTFTQPPEVEKLVSYLRRYFPGASYHSVYEAGYCGFWVHDQLKEQGIDSMVVNPADVPTKNKERRGKRDPVDCRKLARTLRGGEIEGIYVPSRLQLEDRSLIRTRMRMVRKQTRCKNQIKSMFLFYGIHLPEELLNSHWSRRFIRWIESIRMQRASGEMALKIHLEELKHLRQIIASLNRAILALSRTEQYRTAVRLLKTVPGISTLTAMTLLTELSDIARFPSLDELSCYIGLIPDIHDSGEKEHTGEITQRRHRQLRCLLIEASWVAVRKDSAMLMAFIQYCKRMRKNRAIVKIARKLLNRIRYVLKNQTEYVPAVVE

SEQ ID NO: 152221 - protein, 353 aa, unidentified
MVYLGVDLHRKLSHVVALDEGGTVVLERRFDHSPDAFARVFGELAPEPVSVVFEATYGWGWFADLLTDAGIEAHMAHPLATKAISSGRVKNDAVDARTLAHLLRTNLLPEAWIAPPEVRDARRLVRMRVSLVRMRSRLKSQVHAICADAGIPVSVTDLFGRAGREQLAALSLRPVVASRLAANLRLIDELGVEIVRADRELQALFRGDDRVRRLMPIPGIGFLTAVTIIAEVGEVERFGSADKLCSWTGLTPTERSSADHTRRGHISKQGSRQLRWTMVEAATKIGRAPSLHRFADPIAERRGNKIARVALARRLLTLAFYALRDPDGCRAYPPLRRTSRSLPARSLSVMASR

SEQ ID NO: 152222 - protein, 447 aa, unidentified
MQVVTANWKLPREELQLTHPGGHMQPQKSTACGIDIHKDFFVAAIISRDGSTKIEKFDHTQDGLLSLKSWILAAKCPLVAMESTGNYWRPLYLTLEGYVELILSNAYVIKRIPGRKTDIIDAQWIAELALNGLLTPSRVFPKDVREIRELTRARERLVDQRTGCKAIVHDVFDAACIKLSSVITDIFGKSGRYLIHGLLQGKTIDELIEGIPSKRVQHKEKLLKNAIKSALSTSQVIVIEQNLRLIDQITEQVTQLDNEIIGRMKNREDDVQIAMSLPGIGMTAAVTILAELGDYHDFKSPDSLASWAGMVPSVYQSANKLRTGSITKHGSKHLRRILTEAAQSAARTKNTRFSVYFRKLKNRVGYQKAIIALARKILCILWHLLMNREQYIDAQNVRPESKNLIQKPVSPHSIERSIEILVKAGYCVQKSDVLMNMRRFQGAADPP

SEQ ID NO: 152223 - protein, 402 aa, unidentified
MEKYAGIDIAKRTHWMCVTDGEGHFLMEPRPYDNDADGLSRMVADLDLCGGDVAVGMESTGCYWRSCYKVLAEGGYPVSVINPVVTCAERKSGNLGRAKTDRVDCLVVADALRKQGIAPTPSPDADAAQLRDLCRFRRAVSESMSRAKIQAVALLDQVWPEYGKLFSDKFGDSSRSVLRRFALDEMDADGLADDLRGASRNRFGAAKASDVLQSLRSTCGVPATDALRLQLRLLLDQLDFCAAQLAEIDAEADSLLDAVAPTLPTVPGIGRATAAQIAAEVGDVTRFRDAKALVAYAGLDPTRRQSGGFDPDRNRISKRGSAHLRRSLYIAAQASLRADCEFRDFYDRLRGRGYSHRYAVCAVARKMLCVCWALMRSGEEYSRDRHRARGKAPEGASPVDAG

SEQ ID NO: 152224 - protein, 328 aa, unidentified
MNEATLPTLGIDISKDSFHLELSCNNKLRHRKFTNRQEGFAELCVWLVKHKVQQVHACLEATGPYSEDLALYLYQHGHRVSVVNPAQIKAFGQSELRRNKDDQPDAGLIRRFCEKQQPAAWTPLPAPVRELQALTRHLENLHETRQQQLNRLEGNKTKGVVKSLRKLVAYLDTEIARTEKQIEDHIDNHPDLQGRCQLLESIPGIGKRTAAKLLAEIDDISQYKSARQVAAYAGLTPKNNRSGTIRGKTRLSKTGNARVRKALFLPAMTAKRYNPIVRSFCLRLASHGKSKMQIIGAAMRKLIHIVFGVLKSGQNFDPNHELLLNSAP

SEQ ID NO: 152225 - protein, 411 aa, unidentified
MKAAVITAVGIDVSKSKSTVAVRRPGGEIVLRPFDIHHTSSDLKKLISTLKKLGGDIRVVMEHTSMYWRPIALTLKEAGFFVSVVNAMLIHDFSDNTIRKLKTDRADALKIANYALTFWDTLPPFNNEEETRLLLKMQSRANERITATATALRNGLIALADQTFAGVNIAFDPNTKNANGHEKWVDFFLRYWHKDCVCQYSMEAFTESYRGWCRRKNYKFRTDTAHKIYLLAQEGVATLPKCESTKVLITQACKSLNAVCEAKQSTQLEMQRLAALLPEYEVVMQMEGAGPVTGPALMAEIGDVRRFKNKKALVAFAGIDAPPFQSGAFESKSRHVSKRGSPHLRRTIFIVSNIILTHSNPENAVYCFMDKKRSEGKHYYVYTVAGSAKFLRVYYARVTEFLRSLPSSDAC

SEQ ID NO: 152226 - protein, 408 aa, unidentified
MEVLHARCCGLDVHKKTVVACLLTPGLGGRPVREVRTYGTTTSELLALMDWLVGNGCTHVGMESTGSYWKPVYNVLEGTFELLIANAHHLKAVPGRKTDVRDSEWIADLLQHGLIRPSFIPSRPERELRELTRYRTTLIRERASEVNRIQKVLEGANIKLASVASNVVGVSGRAMLSAMVAGVVDAEAIADMARGRLRNKIGALKEALEGRLGSHQRFLLAAQLRHVDELGKLIDEVSVEIEERLRPFEEDLARLTTIPGVGHRTAETLLSELGADIGRFPSARHLASWAGICPGNHVSAGKSGTGRTRKGSPWLRSALVEAARAAARSRTYLGAQYHRIAARRGGNRAAVSVAHSILVIVYHMLSAQRDYHDLGGNYFDERHREQVSRRLTRRLEALGYSVSLSPAA

SEQ ID NO: 152227 - protein, 364 aa, unidentified
MKKISTAKIKSQAAKKKVTVGIDLGDRTSRYCLLDEEGVVIGEASTPTTKAGVAKVFGAMARCRIALEAGGHSPWVSRQLEAHGHEVIVANPRNVRLIGESTRKDDRLDARTLARLARIDPMLLSPVRHRGAEAQVDLAVIRARRALVRARTMLINAARGLTKSFGERLRKCGAGQAGPTLAAELSPEIRAAVVPLLAEVEALNQRIAAYDRQLEQLVKEHYPEVERLKQVKGVGTLIALTFVLTVDDPNRFQRSRDVGCYMGLRPGRRNSGKSEPQLHISKEGDCYMRSLLVQGAHHILGPFGIDCDLRRWGLKMSERGGKRAKKRAVVAVARKLAVLLHKLWVSGEAYDPFRNSRPLVARAA

SEQ ID NO: 152228 - protein, 414 aa, unidentified
MSLALREAKFFTGIDWAAEIHAVCVMDATGKIVAQFTIAHSADGIATLIRRLARFGDPAEMQVAIERPNGRLVDLLPEAGHPVVPVKPNAIKAWREGEVLPGAKSDAGDAAVIAEYLRLRQHKLTVAVPYSGRTRALRTVVRTRGDLVQTRVATANQLTALLEDSWPGAAVIFADIDSPIALGFLARYPTPASAAHLGEKRMAAFCSGHGYTGRRTAAELLERLRSAPAGTTDQAVTIGLADAVLALVTVLTALGAAIKNLDRPAAARLGEHPDGEIFTSLPRSGQISAAQMLAEWGDCRQACEHPDSVAALAGVTPVTKESGKHRSVQFRWACNKRFRQAVTAFADNSRHASPWAAQIYHDAIAGGKDHSHATRILARAWIRVIYRCWLDGVPYDPAKHGAAATLANQIAARG

SEQ ID NO: 152229 - protein, 410 aa, unidentified
MRRVIGMDIHRTFAEVVFWEAGKLRPAGRVGMTRAGLEGFGRSLHKDDEVVIEATGNAMAVVRVLSPYVGRVIVANPLQVKAIAHAHGETDKIDAGVLASLRAANFLPEIWLPDADTERLRRLVARRSQVVRHRTRIKNEVHAILHAHLIPSCPHAELFGRLGRIWLSRQDVPDDERAAIDRHLRELDRLGEDLAALDREIAQAAVDDPAVKRLLTITGVNLIVAAGLVAAIGDVGRFPDPEKLVSYVGLNPRVRQSGLGLAQHGRISKRGRSHARAMLVEAAWAAKAPGPLRAFFLRIRARRGHQIAAVAVARKLAVLCWHLLTKKTDYQWARPALVANKLRTMELQAGQPSSKGNKRGAAYAYNVKELRDREIELARHAEQAYERFVSQWQRRGNPKQRTGAAKEERR

SEQ ID NO: 152230 - protein, 301 aa, unidentified
MKKNPAPVYVGMDVAKATLQVHLNGHQFEFKNDAKGHVQLSKKLAKLTLPHVVCEATGGYERPVVEACHKAKILVSVLNPAHTLAASQAQGKRAKTDPCDAAALTEYGQRFQPEPTAALPPAIRAITELTLWLKQLIDNRAVVKTQAEHHANSFVGQRHEELLAHYQSQIETVEKEIKKMVQAQASFQQRVDCLTQIEGVGFRTALLTLVFLPELGSMNRGGTAALAGLAPWTRDSGTMKGKRCIGGGRAQVRPVLYMAALSASRCNPVLAPFYQGLKKREKPGKVALTARHAEIAHSYEQ

SEQ ID NO: 152231 - protein, 354 aa, unidentified
MAGKVTETAVVGGVDTHKDLHVAAVVDQNNKVLGTQFFSTTRQMLAWMTSFGALKRIGVECTGTYGSGLLRYLQNAGLDVLEVTAPDRMERRKRGKSDTIDAECAAHAAFSGIRTVTPKTRNGMIESLRVLKTCRKTAISARRVALQIIHSNIISAPDELREQLRNMTRMQLIRTLGSWRPDASEYRNVTNVYRISLKSLARRYLELHDEIADLDVMIAAIVDELAPELIKRNAIGYESASQLLITAGDNPQRLRSESGFAALCGVSPVPVSSGKTNRYRLNRGGDRAANSALHIIAIGRLRTDDKTKEYVARRVAEGHTKMEAIRCLKRYISREVYTLLRNQNRQINSIPITA

SEQ ID NO: 152232 - protein, 390 aa, unidentified
MFYAGIDVAMDKHDCVVLDSDGNVVFEVFTFENNRNGFKTLKKVLRSCSKNPKKIKVGLESTGHYSDNLLAFLNSIGYDPVLFNPLHTNLFRKGQSLRKTKTDHVDAHTIATMLRTEDLKSYSQPSYHLSELKSLTRYRSTLVSDCSRRKISLVRLCQILFPELKNLVPSLHMSSVYTLLSELPSADKVAKCNLMHLTSLLSSASKGHYGRDKAVEIREQARTSIGIRSIVKELELQQTIELIRILQQQIEAVENEINELMEDIDSPIISIPGIANRMAAVIIAETNNFKDFERAEQVLAFAGLDPSVYQSGQLTSTHSKMVKRGSKYLRYAIFNATKYVCHWDPTFNAYLAKKRAEGKPYNVAVSHAAKKLTRVMFHLVKTNKEFVPQA

SEQ ID NO: 152233 - protein, 324 aa, unidentified
MEKLYAGLDIHKEKLAGCIMDKDGTITREHTFPSSKKALERFLNGIPSSEITITIEACGLWRGAHRLLTDMGYQVKLANPKKTHDIACQKKTDKVDARILADLLRTHYLPEVWIPDEQTLHFRDLTRHKATLTRLKTQVQGKIRGYLLRKGAKYGKLSKEETLATLTDDPDINNLIQVYHSVKQEENEVMRRIKKIARNKKETTMLMSMPGIAEFSSLMILAEIGDIRRFSSPKELVSYSGLCRGIYQSASTERSAPNTAVNKWLKWIIYECSGRATMLDPRFQDYYYKIEQRKGFKTARRATARKMLTIIWHMLANEEPYHVA

SEQ ID NO: 152234 - protein, 353 aa, unidentified
MAEDRSGVSAVIGIDIGKNTFHVVGLDGGGAIVLRQKWSRGQVEARFANMPPCLVGMEACVGAHHLSRRLRALGHDARLMPAKYVRPYSKGQKNDFRDAEAIAEAVQRPTMKFVATKSAEQLDLQALHRVRARLVRQRTGISNQIRAFLLERGVAVRQGLRFLRAELPAILAKRCDALSPRMVRLIEDLAGDWRRLDERIESLSREIDALARLDSGCERLMSVPGIGPIISSAMVAAIGTGDAFEKGRDFAAWLGLVPKQISTGDRTILGKISKCGNRYLRALFVQAAWVVLIKPKSWERYGLKPWIEAAKRRLHHNVLAIALANKLARIAWSVLARGRGFEARLIASAAQPV

SEQ ID NO: 152235 - protein, 362 aa, unidentified
MAQVCSWVALDVHARSVLAVSVDASTGEMGTRRLPATTSEVVAFCASLRGPTRAAYEAGPTGYGLARALEAAGIGCIVAAPGKIERPSSDRVKTDERDARRVLRLLMIDGLHPVRVPSSQEEGLRDLVRAREALRGDLMRARQRLSKLLLRHDIVYEDSASTWGPRHRAWLTKIDLGRQGAQATLLDYLGAIDALVIRRDGLEAQIGELVAASPWAQTAARLRCLRGIDTLSAVGLCVEVGDFERFDRAGRLMSYLGLVPSENSSGESRRQGAITKTGSRHARRLLVEAAWHYRKTPARGKTLQRRQDGHSAVVVAIAWQAQQRLHRVWRRLDGERAKRRTIVAVAVARELAGFCWAIARAD

SEQ ID NO: 152236 - protein, 369 aa, unidentified
MKAQGKRGVGIDAGKGTMVVRIGEDTNSGTKIIRWHGKTDAQGRAMLKGMLQDGDVVGIEAGEPGFTIARELREKPGVKVLVLNPGNLAMIFKSHRKTDAEDALKLMRLVMRTPENELPVVQIPDEKERLQRAIVSEDGFLTVTRTRLILRLHSVYLRAGITTLSRKDLKTPEKRAEAMKLFEGKAEYFMKEAKRLERLLEPVEDELEEVKSAAKAELEKEPLTPVLMSVPGVGPSLALTFLANVGNGNRFDTAAQLSNFVGFVPRLYISGKSVKLGHITKCGNTHLRRVAVQAAWALVRAKEGGALKQKYQDLRERRGKKIAIVAVARKLVEIMWVLARKQILYKYATPQMLKRKYSFYKLGNKGSVA

SEQ ID NO: 152237 - protein, 378 aa, unidentified
MNRIIKIGMDVHTTNYTLCIFEPSFEHGGTVHCITQVKPEIKNIIHVIETFKKKHENEEFNIVCGYEAGCLGYSLYHELKEKGIECVILAPTTMKTEKGGRKLKNDYRDAKMIAECLAYGGYSAVHVPTELDNSVKEFIRMRDDIKENLKSIKQQIIAFLTRNGKQFEGKSFWTRKHIDWINTVSFSEPLLQDTLKEYMIEYNHLCNRVETLDRQIEEISLKEEYVEKVQQLQCLIGIKTHTALSLIVETSDFNRFKKGNMYSAYLGLIPGDDSSGGHENKLGITKAGNSRLRRLLVEAAQGYTRGRVGFKSKDLKSRQEKCSSEVVAYADRANERLRRKYYRMTLRGKKHNVAKTAIARELACFVWGIMTDHIDLCS

SEQ ID NO: 152238 - protein, 338 aa, unidentified
MEPTTIAIDLATRVFQVHFVDPETGAIHSKVLKRAQLVPFFSNRTRSRVVMEACGSAHHWARQLAKLGHDVRLIAAQFVRPFVKSNKNDAADAAAIWEASQRPGMRFVAVKTEDQQAMLALHRMRQQLVRFRVMQVNQLRGLLYEFGVVLPQGRRASIEAAKGAIASLADQLPSMLTDSLQDQLSRLLALDEQIQRIEQHITDWRRGDEACRRISEIPGVGLLTATAAVAVIGNAQAFRSGREFAAYLGLVPRQNSSGGRVKLGGISKRGDVYLRTLLIHGARAVISSSKHLPERLRNMLIRRPTNVVAVALANKLARTIWALLAYGRPYQIPAPMRA

SEQ ID NO: 152239 - protein, 389 aa, unidentified
MIYVGIDVAKDKHDCCILESEADKLYPVFTIPNNKAGFDELYEKIFTVTDDKTKIKVGLEATGHYSLNLLGSLIDKGLPTCVINPLHTNLYRKGLSLRKTKTDKVDARSIAMMLMTNKTLKPYSDTSYHSEELKSLTRYRFDKVQERAKLKSSVARLVNILFPELEKLVPSLHMASVYALLSKLPGASYITECHLTHLKNLLETASKGHYGRDMAITLRNTARDSIGSVIPAKSMELKHTIHLIEVMTEEIDEIEDSIKSIMDTCNSPIMTIPGISYRMGAMILAEIGDFTRFNYADQILAFAGLSPSTYQSGQLDSSYSHMEKRGSRYLRYALFNAAKFVCKWDENFGAYLSKKIGEGKHYNVAIGHATKKLVRTIYQMELTGEAYRR

SEQ ID NO: 152240 - protein, 370 aa, unidentified
MSVRRILAKTIDTDLEYEAIGIDLAKNCVSAALLTTDGEVVCIDRLDYSELEKSAQALSSTTFAMEPCTEMNYLVQKLEAWGHRCLVIGGKNVQNYVENHFSGQKTDLNDAQALAFLAQDTQLRTIKAKDIEQQKYASLTTLREQYIKQYRQTIVSLKGICQAWGLNISKGISGKARLKDLIENHAAFPEELKESLVDMVTHAQTAQKALNKITKTLEELAKSDKVCQLIQTIPGLGSICSCRLRATVGDIKRFKSPKDFPAYYGLVPRSIATGHNERKGKITHRGDRTMRSLMVQAAGSLVNMATKGKLKSKQLTKWILKKQKEKMPWGKLVCAVAAKLLRIVRAVLISNKPYNSKIAGVAKCSLPKGS

SEQ ID NO: 152241 - protein, 429 aa, unidentified
MDTSRVVVAFDELTHCAGFDWASEKHDVVVVDRQGAVVLQWCFDDTAQGWASLREKLVGFSKVAVAVETCRGPAVERLLAMGLTVYPLNPKAAERYRDRKAPSGVKDDQLDAWSFADALRTDGHGWRPLLPEDQATALLRMLCRDEIGLIEQRTALVLQLREALHEYYPAAREAFDDWTLPAAWEFVLRFPTPTELAQAGKRKWEKFLHTHRLGRQDTATRRMEIFARAMQFVNPSPAVTTAKSLLAVTIAKQLRTLQTQLDEYRQRIQKSFDQHPDHDLFGSLPGAGPKLAPRLLGELGANRQVFESAEALQCYGGTAPVTQKSGKWSLVKIRRACNMVLRATVHLWADQSRHHCAWAQAYYQHKREQGKSHAQALRCLGQRWLKILWTMWQNRTPYHEAKHLLDQTQHGSWVIALLPKPPQTMPAVS

SEQ ID NO: 152242 - protein, 423 aa, unidentified
MTSMTLDPPLTNPLPPGSELVAGVDTHKNTHHVAILDLVGRPVADREFRADGRGYAQIVAFLHAHGDVVRIGVEGTGSYGAGLSRALTTAGLTVIEVARQDRQARRRRGKSDPLDAHQAAVAVLAGTDTAIPKSGDGAVESMRILLAERRSAAKARAQVMNQIHALLITAPELVRQAFRALSGQRLVNTLAKTRPGTVSSTDPEVVVRQTLRRFAVRHRTMQAEIDLIEQQLDFLVRQVNPTLLSLSGVGPVTAATLLVAAGDNPERLGSRASFAALAGVAPIPASSGQRTRHRLSRGGNRHANAALHRIVLLRMRHREPRTMAYFERRRAEQLTDRDIMRCLKRHVANEVYAALLNPATDHPVGRELRARRQAIGIPISVLATTLGVPYQRLRRLEIGTRADPELEARAATVLEQISPTLTA

SEQ ID NO: 152243 - protein, 390 aa, unidentified
MERPMQKLNDLSRSLTALDPDGTLIAVIEMSLSSWLVAGIVPGVERQPLKKLAVDENTLLKLLHRWQEEAKKAGRKIERIVVAFEAGRDGFWLARWLKARGIEAHVMHAASVAVSREHRRAKTDRLDAELLKRAFLGWLRGERDHCKMVAIPTIKDEDAKRPNREHESLVGEQSRIVNRMKAALIRLGIRGFNPKLKRAAGRLDGLHTPEGEPIPPNTLAELRRDMERRRLVRDQIRQIEAARLERLEDAPCAGPHAMVRLLARVIGVGIETADMLVHEVLSRNMRDRRAVARYAGLTGSPDESGRKRREKGLARSGNGRVRRGMVQLAWRFLMYQKDSALAQWFRARTENARGTRKPMIVALARKLLIALWRLVREGVVPNGVVLRPVQ

SEQ ID NO: 152244 - protein, 461 aa, unidentified
MSKKKPGGRQKGSAQKKVDWKALEIVHPDAAGIDVGGSEHWVAVRPDRDAEPVRRFGPFTADLHEMARWLVEKGVRSVAMQSTGVYWMPVFEILEQHGLEVYLVNAQHTKNVPGRKSDVEECQWLLKLHAFGLLHNSFQPTDEIRIARTLWRQRGNLVAEASSAIQCMQKVLTEMNVQLSNVLSDIRGVSGMKIIGAILKGERDPQTLASLARPEVKATPRDIAKSLEGNWREELLFVLRQQVELYRIYQEKIADCDLQLRKHLESFGSKVDLQKQPIGPKPKGKKGGRNTPQFDLRTELYRITGIDWAQINGIDVLTAQTVIAEAGADLSAFPSEKQFASWLGLCPTNEQSGGKILSRRTRKVVNRATVAFRNAASTLLRSQSYLGAQYRRLRTRLGAPKAVTAMARKLACLFYRLVQHGQQYVDKGTEYYESRYREQQIRSLAKRAQKLGLQLVIPKTA

SEQ ID NO: 152245 - protein, 465 aa, unidentified
MNLPNFSDCGNLIYGLDLAKKDSQMAVLSSEGKQMTNCRFPSTRENYLEVAKNLRPGDTIALEVSTSANAVMSIFKLNSSAKSLLSNPMQTKLIAAGRIKTDKVDARVLAELARVDYLPTVWSPDADTLRLRHFVTDRESLVHYKTKLKNQVHSILHRNLVTYEFSDLFGVEGSLWLDNLLASDELDVFERDRLRFDLREIERQKTLVDDLDSTIAAFICSREVLKHQLDLLVSIPGVSLASGATILAAIGDVSRFRSKEKLASYMGLTSRVKQSGETCRMGRISKQGNAYARFMLVESADWLRKSVPIYSRFYNRIKKKKNHNVAKVATARKLAELCWILLTRSQEFIYARPRNTDEKRAAIRKLASDKASLKSSRKPTNTILYGTNLRGREIKQELQKRANDEAARIKDLLELGKSLADISPSGFDPRKPNLTDWQKLLTHLAKDYSKELAALSQNNGGSANN

SEQ ID NO: 152246 - protein, 338 aa, unidentified
MSKITTIGLDLAKNVFHVVCCDEHGKVVKKKMLKRFQVLNYFANLPTCLVGMEACASAHHWARELGALGHQVKLIPPQYVKPYVRGNKNDYNDALAIAEAVIRPEMHFVAVKTPEQQDIQALHRLREKRLQERTALCNQLRGLLAEYGLILPKGVNILRRRLPELLEDGENGLSDLFRRLLAQSYQQLQELDGYIDFYTQEMKRQSQQDEACQRLQTIPGYGPIVASVFHSVVGNGEAYRRGRDVSASLGLVPRQHSSGGKEVLLGISKRGDRYLRSLLVHGARSVVIQATKKDDRLSRWINKVKAERGFNKAVVALANKMARIGWAVLVNKNVYQIA

SEQ ID NO: 152247 - protein, 391 aa, unidentified
MVFVGIDVAKDKHDCFILNSEGTVLADVFTIANNRIGFETLLSRIQSCSQGESKIKVGLEATGHYSYNLLGFLLDSGLATYVINPLHTNLYRKSLSLRRTKTDRIDARTIAMMLMSDVDLKSYSNTAYHNEELKSLTRYRFDKVKERAKLKSSVARLVNILFPELEKLVSSLHIAVVYALLSNYPGASYIANANTEELAETLCTASKGRYTKSKTAEIQVAAGVSIGSKMPAKSMELKHTIALIRELDKEISEVESAIDKITSQMDSPIFTIPGIGRHMGAMILAEVGDFSNFASADKLLAYAGLSPSTYQSGQLQNCYAHMEKRGSRYLRYALFNAAKYVCLWCPTFSAYLEKKRSEGKHYNVAISHAAKKLVRLIFAMQRSGKAFLADY

SEQ ID NO: 152248 - protein, 338 aa, unidentified
MKFSGIDLHSNNSVVVVSDEEDRIVYQKRLPNNLEQIQAALAPHREELVGVVIESTFNWYWLVDGLMDAGYRVHLAHPSAIKKYEGLKYSGDFADAAYLGQLLRLGLLAEGYIYPRAERAARDLSRKRMQLVRYRTAQILAIENILARQTGARLSGEAVKRLTAEQVEELGFVPDVALAVEANRAVSQTLGQQIEALEKRLKERVRLGGEFKLLKTAPGIGETLATTIMLETGTVAHFAKVGNFSSYCRCVDSLRESNDKKKGEGNTKNGNKYLAWAYVEAANFAIRFSAKIKSFYQRKKSKTNGIVAIKAVAHKLARACYHVMRDQVAFDVTKAFSG

SEQ ID NO: 152249 - protein, 443 aa, unidentified
MDQQNLLVGLDISKGYADIQILNQSGHQPLLPCFKLYDTEKGRNKLLKKLQVYLDAGVANIFCGMESTGGYENNWYTLLAEFDSRVQVSRINPKGVKSFGEAGLQRSSNDQTAAKLIASYLNCYQHKLVFHSSDHPFDPRFFEGRKLVKTHSLITKQITQCQNQLEKLIYQYLPQLVQFIRKGMPKWMLEVLSKYPCGAAISKAGLKRLIKIKGLSKSKAQKLLEALDTAKAVSPSIKMNIEILVGQIIQQQHTKEKLDKELTKNYSQLDGVDLVKSVIGIGKPSAVRLILEIENIDRFESVKNLVSYFGMDPVLKQSGDGTKKCQISKKGRSQVRATLYMCAISSLKWNKELKALYSKHRKKSKNHYQAICVVMHKLLRIIFGVLKSKQPYDIDFETKTIKAKTQKVNKKKENQPKKIVEKNAPISKRKLKAIEKQEDVLIE

SEQ ID NO: 152250 - protein, 270 aa, unidentified
MTFRPHALHLKAELFVKSSRVHVRDDGFTRCNFHLKFFIMVYRGIDISKSSFVAAYPSTNGNPTKTFPNTTARMRELIGTLAVAEHHCVMEATSNYGCCCTCYIRTVLPSVLPPPKKKQIKHFSRMMMPVTKTDEKDAYMIAMYGEKMNPPIYKMPSQATIRILTTEGFTYFDNAKQLSRFIGICPTYQQSRTSVNIREHINRNDDERLRSLLYIAFWTALRYNSRECYIRLKANEKPFKVALIAVTNKLVRPVLTITTINSIYRWICPG

SEQ ID NO: 152251 - protein, 348 aa, unidentified
MILVGCDLHSRTHQVAVLDTRTGELVEQALAHEGDAVERFYRALPPPVTIGIETTGYTQWFHALMHQLGHPVVVGEAAKIRAMVVRKTKTDRRDARHLLDLLQHDRFPTVWIPDPDTRDRRALIAHRVRLVRMRTMVKNGLQAIALNQRLALRSALWTQRGLTQLKALALPPHTTRRRDDSLALLAWLTTRIDQLDEHIAAVASADPRVQLLLTHPGVGPLTALTTVLVLGPLARFPDSKHVVSYVGLAPAVHASADKQRLGKITKQGNALLRWVLGQAAPLAARKDDDLRRRYFSVMHRRGRPKAKVALARKLLVRLYIMLRDQIDYEEFRRRGRAPRPQQLPVAVM

SEQ ID NO: 152252 - protein, 411 aa, unidentified
MDALIERVAGLDVHQGSVVACIILGPAGRRPIKEVRSFGTMRQDLAALRAWLLENGVTHVGMEGTGVYWQPVHAALENDFTVIVGNASHMRNVPGRKTDVKDAEWIADLVRHGLVRASFVPPPAIRVLRELVRHRKALVGTMAAERNRTLKLLESAGIKLAGVMSSVFGVSGMLMLRALAEGSAAPAAVADLAKRRLRSKIDRLALALDGPLAEHQRLLLRMHIRRLEEIGRDLAEVEAAIAAAMRPFAAQQALLVTIPGVDALTAAAIVAEIGVDMTVFGTAQRLAAWAGLCPANHESAGKQKRRGTRKGNSYLKATLVTAAVCGARTKGTYLRDKFHRLRARMGTKKAAVAVAHKILVAAFHMLQRAVAFADLGADYLDRVDKHRIAKRLVRRLDALGYAVMLRPKPAN

SEQ ID NO: 152253 - protein, 449 aa, unidentified
MVKQRVRRREEMSVVNERAAGIDIGSRTHVVAVDADLDDEPVRTFQTFTDDLHAMAKWLVEVGVTTVAMESTGVYWIPAFEILEGMGLDVILVNARESRSVPGRKTDVNDAQWIQRLHRYGLLRASFQPPLMIAALRSYLRQRDRLVDYASAHTQHMQKALMLMNLQLHHVVSDITGTTGMRIIRDILAGERDPQKLAGHRDSRCKSPMETIRAALVGNYEPQHLFALAQAVELRDFCQRQIERCDEVIEETLTALRAEAATVPASPMRHIRRSRQANEPRFDVRSALHALIGVDLTEIDGIGPSVALKLVAECGIDLSSWPTAKHFASWLALCPANKVSGGRVLSSRTRKSSSRVAAILRMAAVAVGRTDTALGAFYRRLSARIGKSKAVTATARKIAVLFYNTLRYGMSYEDAGASYYEDRYRQRVVDNLRRRAAAFGYTLQEAVAV

SEQ ID NO: 152254 - protein, 376 aa, unidentified
MREKLRFLGMDVHAETIAVAVAEPDGEVRSLGTIANREESIRKFIRKLGPVEYLRACYEAGRTGFVHYWQLAQLGVDCAVVAPTLVPKKPGDRVKTDRRDALKLARSHRSGDLTAVWVPDEGSEALRDLVRAREAAKQDQLRARHRLTKFLLRTGRRPLPGVKAWTVRYVTWLEQIHYTQPAQEATYEDCLHEVQHMDERVRRLEQVIVEVMKVAPQPMQELIRGLQALRGVAHISAVTIAVELGNISSRFENARKLMGYCGAIPSEDSSGKRKRKGSITKAGNAHLRRIVIESAWSYRHRPSIGAGLRKRQEGVPAEIQEIAWKAQNRLHKRYMKMVLAGKEQRKIITAIGRELLGFIWAIGIKTEAACTQQIAA

SEQ ID NO: 152255 - protein, 406 aa, unidentified
MNMNAVGIDVSKRKSTVAILRPGGKAVVKPFDVPHLSSDFQSLINQIREFDGQTRIVMECTGRYYEPVARQLSHAGFFVSTVNPQIIRNFQGQDNPLRKVKTDKADSVKIARYALDSWDKLKQYTLMDELRSQLKTMNRQFDFYMKHKTAMKNNLIGLIDQTYPGANTYFDSPAREDGSQKWVDFLDTYWHVDCVRKMSLNAFTDHYQKWCARKKYNFSKSKAEEICGKAKELIPVLPKDHFTKRIIKQAIEQLNTASQTVEQLRSLMDETASRLPEYPVVMAMKGVGPSLGPQLMAEIGDVTRFTHKGAITAFAGVDPGVNDSGDYSQKSVHASKHGSPVLRKTLFQVMDVLIKTKPDDPVYLFMDKKRAQGKPYYVYMTAGANKFLRIYYGRVKEYLAALPASD

SEQ ID NO: 152256 - protein, 419 aa, unidentified
MSKSLFCGCDVASDNNTIWLMLDDGSQPVKLFGVDNNQLGAEVLVERVYSIAEEHCVSDILIGTEATSMYDWHLLEYLAESKLALEFNLKLYRFNAKWIKNFKKSLAPRGKTDPIDSFAIAERLRMGRLPKEYVPDVKYQPLRKLTRFRYHLMQQITREKDFFLANLFLKASAYSSVKPFGSTFSATSLAVINDFFSVDELAAMPIEELTEFILEKGKAHFSKPDEIVDNLKRVARESYRLKPELTPTVNLILASTFNNIHCYKEQVKLVDSAIAENLKAFKHTLESISGIGPVYAAGILAEIGDVHRFPNDSALAQFTGLTWPKHQSGKFQAEETRMSHTGNQYLRYYLVEAANSVKRYDATYKAFYEKKYKEATKHHHKRALVLTARKLVRLVWTLLTRQALYQPGYCSFEDLSKIG

SEQ ID NO: 152257 - protein, 343 aa, unidentified
MEKLYYIGLDIHKKTIAYCIKLQDGTVFRHGEISADRKSLRQWLSELPGPWKGAMEATIFTGWVYDFLKPHALELKVAHPEMLKAITAAKKKNDRADSERITDLLRVNLLPECHMASEEIRELRRILRYRNLIVRTAVKMKNKVSGLLMEVGAEYNKKRLHGGKYFNELLGKVEDVPPSVINLLTLSRASLEMFQGVQKRLLDTLHNNELISERVKRLMSIPGVGEVTALTWVLEIGEVERFSSIREAVSYCGLCSAQRESAGKEHRGPISKKRNKHLQTVLIEAAKLSPRWNPQLAALYTKEAARGNRNRATLAVARKLVAYMMAVDKRSADFSLEMKTEAA

SEQ ID NO: 152258 - protein, 411 aa, unidentified
MENVFACCAGLDIHQKSVEACVRRLEPTGPLHQQTRHWGTMTRDLFAMADWMAAQGVTHVAMESTGVYWKPIYNILESRFTVLLVNARHLKQVPGRKSDVRDCQWIAQLLQHGLLKGSFVPPRAQRELRDLTRHRAQLVEEKTRTVNRLHKVLEDGNIKLASVATDILGVSGRAMLEALMEGQEDPVKLADFAQRQLRGKIPELEKALEGHLTEHHRFMLRLLWKELAQQEELIAELDRKIEEHTRPFANEIERLDAVPGVDRRVAEVALAEVGSDVKPFPTHSHVASWAGMCPGNEESAGKRQRQRLTPGNRWLKRSLVQAAWAASHTKHTYLASQYRRLAGRRGRKRALVAVGHSMLVIFYHMLKDRTTYKDLGGDFFDRLEPERLTRYYVKRLEDLGHKVTLESSVPA

SEQ ID NO: 152259 - protein, 355 aa, unidentified
MNDAKYIGFDVHQATISVAVLDSTGKLVMEAILETKTETILQFLRGLRGSLHVTFEEGTWAAWLHDLLKPHVTRVVVCDPRKTGVGKLRNKNDRSDARELADLLYRDRLEPVYHGEHGLRTLRELARSYLSLTRDLTRVMARLKAIYRSWGISCAGQQVYALRHREEWLVKLTEGGVRRRAEFYYQQFDTLAILRQQARQELLVESHKHPVVKLLQQIPAIGPIRAALLLALMQTPHRFRTKRQLWAYIGLALRTYTSGDYCIERGQLRRSKKAVAIRGLNRNYNRDLKNIFKGAATWAASNQGPFLSFYEACVAGGMKPHMARLTLARKIAAITLVVWKKGVRFDAKHLNVQAA

SEQ ID NO: 152260 - protein, 355 aa, unidentified
MDSLKYVGLDVHQATISAAVLDAEGKLVMQTVLATRAGAILDFLQGLRGTVHLTFEEGTHSAWLYDLLVRRVTRVVVCDPRKNALLKSGNKSDTVDARKLAELLRAGLVWPVYHGEKSMIGIQQLSRSYAALTEDTTRVMARLKAVYRGRAIACAGKKLYGQKHRGEWLAQLGEPGLRRRAELLYLQLDALQPLRRQARQELIVESRKHEEVKRLRTVPFLGPIRAALLVGKVQTPHRFRTKRQFWAYCGLALETRSSADYRFDNGQLVRTRKPIFVRGLNFNHSHELKNLFKGAATTASAREGPLRIFYQGLLDKGMLPAMARLTLARKIAAITLTIWKKGEAFDAEHLKTQAA

SEQ ID NO: 152261 - protein, 466 aa, unidentified
MKGLQIFNDKAVGIDVGSESLHTSIAGDTPKVFGTMTADLYALRDHLVANGVQTVAMEATGIYWLCVFEVLEAAGIEVIMVNGRHVQNVPGRKTDMADCQWLATLHAHGLLRAGFVPEADIRCLQDYMRLRTDHISMAASHVQHMQKALDRMNIKIHEVISSLTGVSGLAIVRAIVGGERDVETLLALCDVQIRRAKAERMRAALQGSWREEHLFALSQALSGWDFYQAQIAQCDARVGQALRARSAQDNGTSEDGGGDTHGPAGCDTGSGNGIATIPVVGIKKKSVKATSQNAPRIADMHPLVVALNGGRDASVLPGLTDYSILQLASEVGTDLARWPTAKHFTAWLGLAPGAHQSGKRRGRQARQRNRAGRIFCTVARSLANSTDKALGGFYRRIRARRGGLLANQALARKIATLYWNVMVKGIQFVEKGLAYYEQKFAQTEQRLLRKLASKHNLVLMPNPLPA

SEQ ID NO: 152262 - protein, 389 aa, unidentified
MILVGIDVAKDKHDCFIQIANGKVLFKAFSFANNYEGFEELYAKILSCNDSEIRIGLESTGHYSYNLLGFLLSKELPTFLFNPLQTNQFRKGLSLRKTKTDKVDAKTIALMLATESDENAYSLQAYQNEELKSLTRYRADKVSQRSKLKQSLSRLVTILFPELESVVSTLHSNSIYAMLLKYPSAKDVAKSQFHSLVNLLESTSRGKIDKDKAKEIRNLARKSVGVYVSAKVLELRHTIKLIQILDEEVAEIEKRIQNHMQELHSPIESIPGISTRLAAVIESEVGDFQRFSSPDKILAFAGLSPTTYQSGKYTSQNATMEKRGSRYLRCALFLAAHLVSRYSKTFAAYLKKKRDEGKHYFVALSHVAKKLVRVIFHLQRTGESFSDFA

SEQ ID NO: 152263 - protein, 351 aa, unidentified
MPHKLNSAIAVIGIDIGKNSFHVVGHDKRGAIMLRQKWSRGQVEARLANLPPCLIGMEACVGAHHLSRKLQMLGHDARLMPAKYVRPYSKGQKNDFRDAEAITEAVQRPTMKFVATKTAEQLDLQALHRVRERLVSQRTGIINQIRAFLLERGVAVRQGLRFLRNELPHILAAPCDALSPRMLRVIEDLAGDWRRLDERIEGLSGEIEARARQDKGCERLMTVPGIGPIISSAMVAAIGTGDAFSKGRDFGAWLGLVPKQISTGDRTILGSISKRGNRYLRALFVQAAWVVLVKVGPKHWARYGLKSWIEAAKKRLHHNVLAIALANKLARIAWSVLAHGRTFEASKIQAA

SEQ ID NO: 152264 - protein, 359 aa, unidentified
MRTSGKNIFEGQLTIGLDLGDRSSAYCVLNAAGEIVLEHKLATTPEAMKQVFGSLPRCRIAMETGTHSPWVSRLLMALGHEVIVGHAQKVRLITKSRRKDDRLDARTLARLARIDPELLSPVKHRSAQAQLHLTEIRARAALVSTRTALVNAVRGLVKSYGERLRKCHTQQVGREMTRELSMGLREALKPLLQEVESLNERIKEYDRRIEKMAKEMYPETALLKQVKGVGDLIATAYVLTIEDPHRFRKSRDAGCFLGLQPGRRNSGESEPQMRISKEGDEYLRTLLVQGAHYILGPFGEDSDLRRWGQKLSARGGKNAKKRAVVAVARKLAVLLHRLWVSGEVYEPLRNSQKPMSTAA

SEQ ID NO: 152265 - protein, 409 aa, unidentified
MDVIVERPAALDVHKEQVTACVRVPGPGGVRSEEVVQFQTTVRGLLTLHDWLAAHGVRQVAMEATGVYWKPVWAILEDEFECLLCNARHVKQVPGRKTDVSDAAWLCQLLEAGLLRASFVPPKPIRALRNLTRYRKTQIAERQREANRLHKALEDTGIKLDCVASDILGVSGRAMLDALVAGTTDPDVLAELARGRLRQKLPALREALEGRFDPLHAVLIGAILAHLDFLDEQIERLSEAIQDQLRPFAPAVELLRSIPGVETRTAQTIIAEIGLDMSVFASERQLASWAGQCPGNDQSAGKRRSGRTRKGSKWLDQALKDAAMAALRTNDSYLQAQYQRLRPRIGHGRALGAVKHTIICACWHMLTTGELYRDLGGDYFRRRDPERQTRRLVAQLEALGHTVSLQEAA

SEQ ID NO: 152266 - protein, 350 aa, unidentified
MDYFAGLDVSLETVSICIVNAAGDILLEKKIEAEPAAIGGVLKHFGHPLKRIGLEAGPTSSWLYSELRGIGYPAICLECRHVKAGLSAMRNKTDRNDARGIAQLVRLGWFRQVHVKSEEAQRVRMLLVNRQQLLTKAMDLENSVRGSLKVFGLRVGTVTRRTFDARVLELVAEYRGLLAITEPMLRVRRALIEEFERLDRLCRQLARRDPVCHRLMTVPGVGTVVALTYRTGVDAPERFSRSRDVGAHFGLTPRRYSSGQTDYDGHISRCGDAMVRTALYQAANVLLHHGRWSSLRSWAMRIAKRGSVKAAKVALARRLAVVMHRMWVDGTDFRWSAVAAAMPAATAIAR

SEQ ID NO: 152267 - protein, 381 aa, unidentified
MTTPATRNVQERPTEGTLFVAFELSEKTWKLGCTTGHGQKPRERTVPARQQERVLDEIAHAKRRMGLPDTAPVVSCYEAGREGFWLHRFLQGHGITNHVVDSSSIEVNRRRRRAKSDGLDVRKLLSMLLRYAHGERQVWQVVKVPSVEAEDQRHLHRDLETLKQERASTMTRIEGLLSSQGLRVTSLTKLPEQLEALRLWDGSPMPPGLRRRVMRVYAHYTFLSEQIAAVEVERRAQLQTSADASLDKIRQLMQLKGIGINGAWLLVMEFFGWRACKNRREVGGLAGFTPTPYQSGESAREQGITKSGNRHVRWMTTELAWSWLRFQPDSALSVWFRERFGSGGKRLRRIGIVAVARKLLIALWRFLETGVLPAGAVLKEA

SEQ ID NO: 152268 - protein, 324 aa, unidentified
MLSFCGIDVSKDRLDVMVLPEEQCCSVPNDARGWAALVERLRNFSIAAIGLEASGGYERGVARALLAAGISVRQVNPFKLRQFARASGVLAKNDPLDARMIASFVGIMPTRPAQRPTPAAEQLAEMLAVRRQLSAEKVAAENASRLLEDAMLQRLSRRRIRRLAADIELLAERLVEIVTSKVALAHRYRLLTSMPGVGPVLACTLIALLPELGGMTRKQVAALVGVAPYAFESGALKGRRCIWGGRANVRQALYMAAMSASNWNPELKAFHDRLAAAGKKPKVIIVAVMRKMITTLNAMVRDDVVWADRLSSRHTVPTAREPLR

SEQ ID NO: 152269 - protein, 392 aa, unidentified
MKGQRRHVRSAHSPSRAWRSATEESSKTLYVGLDVHKDSIAVAYAPEDRGAEVVSLGAIGTRQCDIDKLIRKLQAKGAALVFVYEAGPCGYWLYRYLTRKGLRCDVVAPSLIPRKPGDRVKTDRRDAIMLARLMRSGDLSSIYVPGVEDEALRDLSRGREDAMQDLKRSKRRLKSFLLRQDIRYEGRANWTAAHLRWLSEVVCPTPPQQIVFQEYVRAVTEQQERLQRLERELHEAVQGWRLYPVVQAIQALRGVELTGAVILMTELGDITRFDNPRKLMSYLGLTPSEYSAGERRRQGGITKAGNSHARRALVEGAWAYRYPAKVSRHLQLRLEKLPAEVQAISWKAQVRLCKRYRQLTARGKHVNQVVVAIAREMAAFAWAIARTVSPTS

SEQ ID NO: 152270 - protein, 418 aa, unidentified
MTYRIAGIDVHKRMLAVVIADVAAEGEYQFERRKVGTSPSELCRLADWLVAEHVEEVVMESTAQYWRPVWATLEQRWRPKRLQQGMGSGKLHLAQAQSNRGASGRKKDFPDAERLVKRLVAQELKLSFIPDGEQRLWRTVMRRKHQLTRNRVQFQNRLECLLEEAHIKLSCLVSDLLGKSARRMLQAVADGATSPEAIAARADHRLRATAPQLCDALGACRDLHPVYRHLLKMALEELKLMEEQIDKLEQEMASLLSAHQDVVQRLAEVPGLGVDSAQQILAEVGPTAAAFPSAKHLASWVGVCPGEEESAGINYSHRSPKGNRQMKGLLNQASHAAVKTKGSIFEFLYRRLVPRLGHAQAIGAIAHRLCRLIWMILHQAIRYEERGPAVSRAKTERRAAKMIRDRVEPRAYQTGVAL

SEQ ID NO: 152271 - protein, 506 aa, unidentified
MKVQASKPTFTIDYNPIGQYGSNICRQDIGRKRPYRSLLRQRYWAWSFTSKLITMAKVAKRKQTSKGLRLEVVNPNAAGIDISPKEMQVCVPSDRDGECNRTFGVYTEDLHYIAEWLKACCIDTVAMESTGIYWLPVFRILKESGFDVILVNASDVKNFSGRKTDASDAEWLMMLHSYGLLKPCFQPENIARTMRNLVRHRDNLIRSASREVLHLQKAMEQMNLKLDNVFSDILGKSGQSVIKAILNGERDPKVLSDLADPRCRTSKEEIEKSLQATWDEEHLFEMRQSDSLYQFYQQLIAECDAKINEIAMQYSATVDAPKTELLRSGKYNAKKNRIGFDVEKVAFELWGVNVMRIPGMSRGAILRLVGELGAGFTTKFVDVKHFVSWANLVPNNKISGGALLSSKVPKKKNPVGIIFRQAANTLKAAKNPLGNYFRHMRAKGGHLQAMVATGKKLASIFYCMVQRKVEYNEKVYCNHRKQELQNKVAYLHKRLQRMESELANCG

SEQ ID NO: 152272 - protein, 322 aa, unidentified
MEAQAKFVGIDVSKARLDVGVWPGAESFSTGNDERGIAQLVERVLRLAPQAVVLEASGGLESVAAGELLAAELKVAVVNPRQVREFARSLGRLAKTDRLDALVLAQFAQSADSNGRLAPMRMLDPAQAELKALVARRRQLMQMLVAETNRRERAPKIIRKSVVQSIKGLKRAIAVVEKQVAEVIANSPVQQAKAQLLRAVPGVGPELTAGLLADLPELGELGRRAIASLVGVAPHAHESGSFRGRRMIWGGRAHVRTKLYMAALSAVRFNPLLRAHYVALLERGKARKLALVACMRKLLLILNAMLRDQQPWRPPLELQHSR

SEQ ID NO: 152273 - protein, 399 aa, unidentified
MNAVGIDVSKGKSMVAIMRPFGEIVSSPFEIKHTTSDINSLVELINSIEGESRIVMEHTGRYYEVLAHQLSEANLFVSAINPKLIKDFDNNSLRKVKSDKADAVKIARYALDKWQNLKQYSVMDELRNQLKTMNRQFGFYMKHKTAMKNNFIGILDQTYPGVNTYFDSPARSDGSQKWVDFASTYWHVDCVRKMSLNAFIDHYQNWCKRKKYNFSQSKAEEIYGKAKELVPVLPKDDITKLIIKQAVDQLNSASATVESLRTLMNETASKLPEYPIVMAMKGVGASLGPQLMAEIGDVSRFTHKGAITAFAGVDPGVNESKKYEQKSVPTSKRGSSDLRKTLFQIMDVLIKTHPKDDPVYQFLDKKRAQGKPYYVYMTAGANKFLRIYYGRVKEYLSSL

SEQ ID NO: 152274 - protein, 388 aa, unidentified
MPRQRKPNDFSRSLIALDMDTTLIAVVELSLSSWLVAGIVPGVERQPLKKLRTDENALLTLLNRWRDEAVRSGHKISRIAVAFEAGRDGFWLARWLNARGIEAHVIHASSVAVSREHRRAKTDRLDTELLKRAFVGWLRGERDHCKTAAIPSLREEDAKRPSRERESLVGEQSRLVNRMKATLIRLGIRGFNPKLRHAEQRLETLRTPEGEPIPANTLAELKRDMQRRRFICDQIRSIEQERLERLERTPDTEPHAMVRLLARVTGIGIETADLLVHEVLLRNMRDRRAVARYGGLTGSPARSGGTNREKGMARSGNARVRRGMIQLAWRFLLFQKDSALAQWYRQRTEHAPKARKTMIVALARKLLIALWRLVREGVVPEGVTMRPA

SEQ ID NO: 152275 - protein, 370 aa, unidentified
MKSIIYVGMDVHKASFTISCFSVTTQETFTTVKISPDAKAIKKYLDGVSLSRSEECEFVCGYEAGCLGYTLYHQLTAMNIRCVIMAPTTILRNSKRIKTDRIDAENLARCLAYGGYKSVYIPTAQDEAVRDYLRMRDDHKLMLKKIKQQINAFCLKHNKIYPGNKSKWTQAHVKWLNALEFDGYLQDAFNEYMITYRELTDKVERLESQIEQLAELEEYRDKVKKLICIKGIKTHTALSLIVETGDFSRFQSAERYASYIGLVPGEHSSSEDQNRLGITKAGNRHMRMLLIEAAQCYSRGVPAKKSKDLKSRQKGASPEVIAYADKASIRLRRKYIRMELVNKKKANVAKTAVARELACFIWGMMTDNIA

SEQ ID NO: 152276 - protein, 368 aa, unidentified
MSKAEENGRLCVGIDLHKTQFTTCALTEEGECFLEKKYPTIEEGYKEFIQEMHNQEQEGLSIEVAVETTGNARFFKNQMEKEGFLVKVVNTNKFKVITLSTKKTDANDAATLAYYLMKGMLPEAHLCSQTSEEIRRMLKTRSILVQSTVKIKNQIHGMMLGYGIETKAAQFQSKKKRQELINDLADHNYSDYTASSLKVMLDILDEISEKIKEVEKHLEEMVRANEDVELLMSVPGIGINTATTIAAYTADLERFGGDYKKFASYVGIVPSVHNSNESNHYGRITKHGPQELRTAFVQAALGMIRLTKVTSEWRIIKEYQRRKADKGSGRAIIALARKITRIIFVMLTKRERFNPDLMRCEDNVQQTA

SEQ ID NO: 152277 - protein, 371 aa, unidentified
MDQHTLFVGLDVHKETIAVAIADGHRDGEVRFMGTILNKPDAVVRLMTKLAKRQERLRFCYEAGPCGYVLYRQITKRGQDCTVVAPSLTPTRPGDRVKTDRRDAVTLARLHRAGELAAVWVPDESHEAMRDLVRARTAAMENLRRARQQLQGFLLRQNRIFTGGRNWSKKHRRWLATIGFDHPAQQIVLQEYIDLVDNAGIRLARLEAQIAELLPRWSLAPVVKAIQAMRGVSFVSAVTVAAETGDLRRFDTPRQFMSYLGLVPSEHSSGPRTQRGGITRAGNKSARRMLIEGAWAYRTQARIGPAHQLRLDGLPKAVHDIAWKAQVRLCSRYRRLAARGKPQTLVTTAIAREMAAFIWAIARHVQPIEAA

SEQ ID NO: 152278 - protein, 290 aa, unidentified
MIKYHKHIGIDIGKYNFVVGIEGIKDTKEYENTSSGIFEFINDNKDILANSLTVVETTGGYELELLYSLCERGYVVHRADARKVKNFIRSYGNSAKTDKLDAKALGLYGKERADKLEVFKPESKQNIQLFRLVQRRNDLKQMLVAEKNRLQQANTDKFVKNSCINMIDVLSNQITEITNQVEVIISSDQLLKAKHEILKEINGIGNIVAFELLILLPELGKLTRRQIASLAGLAPKANDSGKYQGYRKVGHGRAGVKPILFLAAMSARNSKTSGLRLFYERLINNHLLES

SEQ ID NO: 152279 - protein, 412 aa, unidentified
MCERVALVGVDWGDKQHAYEVRGIDGTRRCDMFESRPEAVHAWVSGLRAEYPSGTIAVAVEQSRGALIYALSRYEFIEVIPVQPTRTAAYRGVARPSGAKSDPIDAGLICDYVEKHGETIRALSPTDAVTRELMILVEWRRKLVDQRVTFSHQLRDTLKQYFPQALDWSGELGSPMSLAFLEQWPTLEVVKRSRPATIRSFYARHRCRSGELIEARLSEMAAAVALHSDSAVIGALSTVAAAFVASIRSISEQIAKLDHRIDQLWSTHPDRMIFESFPGAGKALAPRLAVALGTDRSRWTASAMQTFSGIAPVLQQSGSKRWVHSRWSCPKFVRQTFHEFAEWSIPQCRWAAAFYRLQRSRGKGHHAAIRALAFRWIRVIVRCWLDRKPYDDAQYTNRLVAAGSPVASTLAA

SEQ ID NO: 152280 - protein, 319 aa, unidentified
MLYLGIDQHARQITVSLRDENGDVLLARQVSTEPERINAFFQQLTRECLRKGESFVAVLEVCGFNDWLLRMLHDYRCHKVILIQPDDRKKRKTDRRDAAGLSELLWVNRARLLHGKPVRGLRQVDIASTTDQENRRLTTLRKDAGADLARVINKIKQILRRHNLHWEMPTKTFPTVAAIAWLKALVLPEIDQLEMRHLLLNLEQVQQRLKELEQVIAQRARASTEAAILSSMPGMGGGFTAMALACRVGRVERFPRAHSLANYWGLTPGCRNSGENDQRLGSITKAGRRRQAPCANRPLPLRPHSHAHCRERQTRYEWR

SEQ ID NO: 152281 - protein, 317 aa, unidentified
MDKHSTFCAGIDIGKRKLDAALNGSKARLEVDNASAGHQKMIAWLKRHKVERIGVEATGGYEKDIVRALRCAGFIVVVLQPLQVRAYAQFRLKLAKNDKIDAAIIADCTASVDEIRMPPDPRFEAFAAAQTLIDQLNDDIVVYKTRLEMARDEISRTFWRREIAARTVQARSARKTLRAEMRAHADLAAKLDLIISIQGIAEKSAMAILIRMPEIGLLSREEVAALAGLAPYDHDSGTRTGHRHIKGGRTRLRTSIYAAAFAATFHWNPQLKTFYQRLRANGKTHKMALVACARKLLIFANTVVARGTPWQPSPATI

SEQ ID NO: 152282 - protein, 456 aa, unidentified
MGHARARKIPAQLVEDEEYQLRHERVAGIDIAKAKADVCTRLPPARDGRRRASRLEEVPATAREILALAGRLLADGVELVVMEATSDYWRIWYYLLEAAGLTVQLVNPAHARQLAGRPKTDRLDAQWIARLAEMGLLRPSFVPPPEIRALRDLTRTRVQMVRDRTREWQRLEKLLEGALIKLSSVVSRLARAKTARGILEALADGQRDPKTLAAMAAGQVKGGRAAVEQALEGMLLGDHHPRLIRVHLDHITFLDRAVAAIEDQIEAALDAIPAAWGISADGVPSPDPGPDAAALTAVQRLAEIPGVSPGLGMAIIAETGLDMTRFPTADCLVSWAGLAPVARQSGPRNRKPKKGQGDAYLKGYCTQAANGAARTETFLGERLRRLSRRLGGNRAKCAVGRSILVIIWHLLADPGARFTDLGPGWHERKTDRDRKIRTHLRQLRALGLDVTIAPAA

SEQ ID NO: 152283 - protein, 391 aa, unidentified
MFAGIDVAAERHMLARLDDDGMPMGRPTAFAEDAAGYRTLLEALGPPPVLVVMEATGHYWKNLYATLTAAGHDAVLLNPLVARRFQEAQLERTKTDAVDAIALARLGFEKRPAPTRLFDQAAEALRELVRHRDRLRQDFDDRVRQLHRLVDLGFPEFTRYVKGLDSMLATALIAEYPTAAAFARAQPRRLAKLRYDGCHKVGEDLAEALVAAAKRSVGQHHGPVYEMQARHICQDLDLWRRRLKEIEGDIDRLLDAHEIGRLLTSIDGIGPHSAARIIATVGDPARFRSPAAFAAYVGVVPGLRQSGKRTGSRAATSPFGNARLRRALWMAVLSAVRRNDWLKPFYERLRAAGKPPKLALVAAMRKLLHAVYSVARNRKPFTVTTEQARAA

SEQ ID NO: 152284 - protein, 402 aa, unidentified
MNCVGIDVSKGKSMIAVMRPFGEVVVSPFEVLHTNSELSELARLLKSLDGETRVVMESTGNYHAPVAWLLHDAGLYVSVVNAMLVHDYGNNSLRRAKTDKKDAVKLANYGLDHWLTLPRYVPEENTRIMLKTCYRQYQQYSKVQTMLKNNLISLLDTTFPNANRLFTSPPRADGSEKWVDFVAAFWHCECVCGLSEKAFTAKYQKWCRKLGYNFSEDKALDIYTFACGQFGVMPKTDTAKFLVEQAISQLRTTSAALAALKQEMQSLAASLPEYPVVMEMFGVGPTLGPQLIAEIGDVRRFHSKKALVAFAGIDAPPYQSGQMDVRSRSISKRGSASLRRTLFLVMGVLLQCAPVDEPVYQFMNKKRSEGKPYRVYMMASANKFLRIYYASVKTHLDSLEHD

SEQ ID NO: 152285 - protein, 437 aa, unidentified
MTKNKNQAKKTVCLQSLPMIHPNAAGIDVGAREHVVAVPADRDPEPVRSFKAFTPDLYELADWLKGCGVETVALESTGIYWITLYEILEERGFQVRVVNARHVKNVPGRTKTDVLDCQWIQKLHSFGLLSGSFRPDQQIRTLRSLMRLRDNLVVNSTQSVHHMQKALFEMNVQLSNVISDIVGESGMRILEAILAGERDPEALARLCSTRIKASRQTVAKSLHGNWREELLFALRVAMDSYRFAQSKIAECDERIGQHLAQFEDRAALDTPPASLKSELHRICGVDLTKIPGIKEQAAQIIISEVGLDMTRWNTEKQFASFLGLCPNNAISGGKVLRRSTRKVYNRAADALRLCSQSLTHSKTALGAKYRRLKGRLGAPKAIVAMAHHLARLVYRMLRYGRHYVEKGMAEYDIRFRLQRLKWLKREAKSLDMQLLPA

SEQ ID NO: 152286 - protein, 340 aa, unidentified
MNATTYGLDIAKSVFQMYWVDPASGKIQNRTFTRPQLIEFLSTCAAGKVVLEACGGAHWWARKIQSLGHAATLIHPGYVRAFVRTNKTDAADARAIWTAAQQPDMPVVPVKTEDQQALLSLHRIREELVDTRTRQSNQLRGLLGEYGLHFPQGRKVFLTSLRLRRDEIDKTVPPFLLYALERQLEGLKQLDEQINLIECDMATWMQSQPAAQTVETIPGIGALTATALVATMGSAQAFRSGRAFAASLGLVPTQSGSGGNVHLGHISKRGDSYLRRLLVHGARVVLTRSKHPPAWAQALQTRRPKNVVVVALANKMARIAWALLAHGRHYDAQYVSRPPA

SEQ ID NO: 152287 - protein, 408 aa, unidentified
MQVTFGIDVSKSTSTVCELIGESKNELTITNNRPGFIQLLHELTAFSKHPQIIFEATGVYSRTLQSFLEDYGYDYVILNPLKAKKEMDMGLRHNKTDKTDAYHLALIQRLYHHPINQLQSQTYKQLNALSRFYDQLTADLVMAKNRLYQALQSTFPEIENLFSSAKGKNYWQIVVRYPHCDLVRREDKKQLINWLMSLKGIAFKHALRTADKLIELAYQAYPVVSCSSIEVEQVQYYAHRLLNLSDQRENLIARMVKLAKSLPNHDLENLESIPGFAQTTAVRVLAELGDLRRFSNPNKINAFIGIDPGRYQSGEMDSNLSITKHGNAVARKLLYRAIGQIDNAAKTNPCHIADYYESKKLSSQTKGFKKIAIASIHKLIRTIYALIINDQLYDYNVATHNQKDFSCN

SEQ ID NO: 152288 - protein, 355 aa, unidentified
MTSTKYIGMDVHKESISIAVRNAAGKIVMECVIETKASTILQFIDGRCGEVHLTFEEGTWAAWLHDLLKPHVTKVVVCDPRRNALWQEGNQNDRVDARKLAELLHNNQLRSVYHGDHGLRTLKELVRSYLTITQDLSRVMTRVKALYRSWAIPCSGKQVYAPRHRAEWLGKITEPGVRRRAQFCYQQLDALPGVRQEVRLELLAEAKKHPAWKQLCQIPSIGPIRAAVLLGILQTPHRFRTKRQLWTYSGVGIEISSSADHQVVKGQLERKKKHVEIRGLNRNYNHDLKNLFKGAAIGAATKPGPCAEFYAELLAKGMRPEMARLTLARKIATIVLIVWKTGVCFDAQHLKPQTA

SEQ ID NO: 152289 - protein, 331 aa, unidentified
MNYSHFVGLDVGKKTFDASLMSADEKELSHKSFDNTPEGIQSLLDWIAGYHLSLSKLLFCAENMGSYVTELSVSSISMGFSLALVCPLTIKKSIGLQRGKNDRIDAKRIANYAVLHSRKLELYKLPDKDLVRLRGWIIIRDNLVKQKVSSIKLLETFSQMAKLADVTESISFLEEQLKSIKEKILEVEENMEQLIAASTSLYTNYLLLRSIKGIEIINAIVLLCVTDNFQRFDNPRKFACYCGVAPFEHTSGISIRGKTQTSSLANKEVKVYLTRAAITAISWDPQLKAYYKRKIAEGKHKASVINAVRAKIIARSFAVIRRQTPFVTLAV

SEQ ID NO: 152290 - protein, 336 aa, unidentified
MNRSTGRWVGIDVSKGKLDAAVLDERDKIKSHVFANDGKGHAALKTWLELRGCGAQLAQVCLEATGCYSESIATALVDAGWQVSVVNPARVKGFAQSELVRNKTDRADAALLARFGQALQPEQWTAPPLEVRALRALVDRVQSLKEMHQQEVNRLEGATNQAGTRESIESHLQWLQQSIQQLERQINDHIDGHPGLRDDAKLIASIPGVGSATAAKVIAYLGDVRRFRNAKALAAFIGVTPRLRLSGSSVRGRSTISRSGHAEMRRSLYMPALVALKHNPIIKTFGARLRATGLAPKAVVAASMHKLVHLIYGILKSGTPFKANFSVATLAIQEGI

SEQ ID NO: 152291 - protein, 343 aa, unidentified
MNQIIRIGMDTSKHFFQLHGVDAAERPVLRRKLRRNEVLAFFAKLPPTVIGMEACGAAHYWARELRKLGHEVKLMAPQHVKAYVKRNKNDGRDAEALCEAMSRPTMQFVPVKTEEQQAALMLAGVRQQLIARRTQLSNAIRGYAAEFGLTAAKGLDKIEPLLARIALDESLPALARELLAMQGHDYARLQAELKAIEARLMAWHRANADSRRLAQIPGIGLIGATTLVMKTPDPRAFASGRHFAAWLGLTPKDHSTAGKTRLGKITRAGDEMLRSLLVAGATAVIQQMRRGRGRPSPWLVALLARKPPKLAAVALANKIARIAWKLMTTGESYDGARMHGAAA

SEQ ID NO: 152292 - protein, 418 aa, unidentified
MTKTTTDSCPTIDRTNFIGIDLHSNNIFVCVLVNTIDPQSGQLGCRAIYKRKIPLEPGLQHVAEALEPYCSVPHVATVESTYNWYGLADLFESRGGILKLADPTTVKKFKAKFSDDRSDAEFLADRLRLNDLKTTEIIPRNVRSFKDLVRLRNSLIQDRSRYAVILINMINNQCCERINRTAIVHWAEELQRSGQLPEKLTAALHNDCILRKVEVNLRMFTSCSEEIKRIEAAIVETARKAPQHCHQYLKILQSIKGCGEVISTVLASEIHDIRRFRNAKNFVSYCRLAPTERLSNGKVKGEGNAKNDNAYLSWAFTELANLVVRFNPPAKKKFDRLLSKRNGLRCRAIRPIAAMLARAVYYMLRDKKDFQLEMLFGSSGSKVKRTRPLAEPESQNKEFTEKLQTRGGGMRLSVNEPI

SEQ ID NO: 152293 - protein, 312 aa, unidentified
MPHVTSIGLDVHARSVAAAAFNPFTGEVVHRDFGTDAAEIAEWALGFEEPRACYESGPTGFHMARELRALGLDCAVAAVSKMQRPAADARRKNDRRDAEFIARMLATHNIVEVPLPDAAVEAARDLDRALDDATAEYRRARQRLNMFLIRLGHVWDERNSDGTRKGSWTRAHWRWISGIRLEGPQRDVLEYYVTAARCAESDRRQLEKKVLALARTDRWRPAVEALSCIKGIDTLTAFRLAAEAGSFTRFRTAPAFASWCGLVPSERSSGETERRGGITKTGNRLARTALVESAWHYLTCTPRPKAPAPGAC

SEQ ID NO: 152294 - protein, 408 aa, unidentified
MNTLYVGIDVSSKSNVVYLMLPNGDKHSNFSVANSHEGSTLLVKKIYSALTSHSLDTVLIGLEATSVYGDNLVYFLREDATLAPFNRKIHVLNPKQVKKFHDTYNDLPKNDYVDSFVIADCLRFGRINKEVYMGDYRYKALQNLTRARFFAVQNLVKEKQRFMNVLFKKYSTMTQEKVFSDTFSTTALAVYDEFESAEALANMDLHELTDFIIEKGKNRFPDPDAVAKAIQKAARSSYRLPKTVNDSVNQVLSISITSMKALESQIKEFDKAIKAQMELLPNVLISIPGIGPVYSAGIMAEIGDINRFNSQAALAKYAGLAWKQHQSGGFESEVTRLIPSGNRFLKYYLCEAAFSLVRCDKEYSDFYHLKYKEVNRCQHKRALALTARKFVRLVFRLLKDNRLYCPAK

SEQ ID NO: 152295 - protein, 332 aa, unidentified
MINFTQVCGIDVSKDTLDYCLIPSSPNEPISDCFSNDSTSIRAQFSGSAFDSTLFVVEPTGNYSAKLLHELSQMGRHISLVSPYQSKSYMTFLGQTNKTDKQAAYALGMMGRNNVHLRPYRAPSEQMQKRRQILSAVKALEKQQRMLKNQLHALAELPLIEQTTKMALETVLETVQEQIDQLQAQLYQPDQDPQFNQKMKWATSVKGIGPVIATNILIASNGLQDFDNADQLSKFFGLTPFSHHSGISIHQKGRITKFGNSNVRSSLYMGARSAIKYNHACKNLYERMRRNGKPHKVAMVAVMHKLVKQVFACVTKETLFDNDFETKIKKKD

SEQ ID NO: 152296 - protein, 415 aa, unidentified
MTKIIRIGMDTSKSVFVLHGVDAAEQPILRRKLRRRQVLEFFAQLEPTKIGLEACGAAHYWARELAALGHEAVLLPPQYVKAYVKRNKNDAADAEAICEAMSRPTMRFVPVKTAEQQAALMLVGMRNGLVRRRTQLTNAIRGYAAEFGLTAAKGLDKIEPLLARIADAALPGLAKELFAAYAHEYAQLKVQIAKIEARLMAWHKHNELSRRLVEVPGVGPIGAALTAMKVPDPHAFRCGRDFSAWIGLTPKDHSTAGKTRLGVITRAGDEALRSVLVVGATSVIQKVKQGKGHPSPWLVELLRRKPPKLAAIALANKNARIIWKLMVSGERYNPARAAAAKGEGVEVPSCTSGTPCSPPSRTLRAAAGGGPRGPSLTAAALGVTGPQQVGTEKRPSGRTKKLTLKKPENVAPAAV

SEQ ID NO: 152297 - protein, 339 aa, unidentified
MKVYTLGIDLAKNVFQLHGVGCNGQTVLKKKLTRDKFLPFLMQLEPCLIGMEACASSHHFARVLRQYGHEVKLIPPQYVKPYVKTNKTDAADAEAICEAVARPNMRFVQIKTAEQQAILVLHTERNILIRERTACANSMRAILAEFGIIMPRTLSQLYKKIPEILEEYDNELSPFVRCSVARQLEHLQGVEDQITLIEQELSRWAKTQPACQRVMKVPGVGLMTATYLVASVGNGQQFHSAKQFAAWLGLVPREFSSGGKQRLGRISKRGDRYFRYLLVHGARAVAAVIERHKDNMPWLYRLLNKKAYNVAVVAQANKTARILWSMLVHHTEYRTLSAV

SEQ ID NO: 152298 - protein, 451 aa, unidentified
MRSYLSYQAKRSSVTDKTIIGIDPGKSRHQAVIIDANGIPKGKTFSFSVNYKGYHEKLWNEINKQIPDHSTSNLLFAVEVSCNLWQTISNYLRKEGYEVVLVSPMCTKQSRVMLNNDFSKTDPKDALLIALNTQRGYYNEMRIYPQDSNNMHALSIAYNKLRKDHSSYRGRLRAAIELIFPEFLEVITLGTQTSFYLLGKYLFPKDYINMNIDFESLQIGRISRSKYGMKHLHKLQDLAKYTIGISSNNELYDRTIVLTWLEGMKEIGFRMKVILDQLIKSASTMKEFSILTNLMGISSETASLFLAEIRDISAFDNYKEIEKFAGYNLRLTQSGKHIGSRRISHIGNCRLRWVLYRMTEETMKYIPEVRIKYLKRQLKKQIYRKNLISCVPQLLKLVFSLLKENRFYEYNEERIAEMKKLDIQYQVVKAERAAKHRKHRSIIKEELRKTA

SEQ ID NO: 152299 - protein, 424 aa, unidentified
MLSNLRYLGLDVHAETIAIAVAEPDGEVRSLGIIPNRPEAVAKLIRKLGPREQLHVCYEAGPCGYVLYWQLTRLGVDCDVVAPTLVPTKPGDRVKTDRRDAEKLARCHRAGDLTRVWVSDAAHEALRDLVRAREAAKQDQLRARHRLGKFLLRHGIRPPAGAKPWTQRHRRWLDTLTLALPALDATLGDYLHEIDHAAARLERLETALDAAIDTAPAALRTVIAALQCLRGIRQVTAATIVSEVGPLSRFTHPRQLMGYSGTVPSEHSSGRSIHRGAITKTGNAHLRRVLVEAAWAYRFPPKCTKALRTRQRGQPDTITAIAWQAQQRLSTRYRRPPWAGGTHAPCDHCRRPRARRLHLGDRRRGRKRAGHGCVTHWGSAVAGHGKGESSNALGDQASAELAPASPRQLPTDHDYAGALRAIRE

SEQ ID NO: 152300 - protein, 369 aa, unidentified
MITIGVDAHKKTHTLVAVDQVGHRLAEVTLAATTAGHLRAVQWADAVAGGDGDRQPVRFAVEDCRHLTRRLEADLLGSGQQVARVHTHLMAAARRGSRRPGKSDPIDAEAVALAALREPDLPVAQLDGPSREVKLLTDARADLVVQRTQAASRLRWFLHELNPELVVPPRGLRRTVVVAALATWLADAEGVVARLARDLLSRIAELNNQIKQLEREVRGRVRALAPSLLEVPGCGETTAAVLLGETADVRRFRSADGYARFTGTAPIPVWSGNTERVRLNRGGNRTTNCALHTIAITQAARGIGGGKDYVDKQLTRGKTRTEALRLLRRRLSDRVYAALRADAPSLAADSPQPAQQHAGGRSSGVDRAA

SEQ ID NO: 152301 - protein, 343 aa, unidentified
MKVTTIGLDLAKNVIQVHGTDERGKAVLKKQLKRERVALFFAKLPPCLVGMEACGGAHYWARKLEKLGHQVKLMAPQFVRPYVKTNKHDAADAEAFCEAVSRPNMRFVPIKNGEQQAVLALHRARGGFVKARTAQANQIRGLLGEYGIVLPRGIGHITQRLPAILEDGENELPGVFRQLLARLADHLRHLDRQVDELEQQIQLWHGENDASRRLAQIPGIGALTASALVATIGDAKQFKNARQLAAWLGLVPRQHSSGGKPMLLGISKRGDAYLRTLLIHGARSVVRVTERKSGEAQRWLTQLIDRRPPNVATVALANKNARIVWALLVKGQDYQFDYTPSAA

SEQ ID NO: 152302 - protein, 367 aa, unidentified
MKEYIGCDAHKKYSVFVAVNELGQHGPTHRVSHDRDEYRQFLASLPGNSPIALEATGHWYWLADEIEAAGHQVHLANAGEAKKRMGKTNKTDKLDACGLGMLLRNGTLPEVWIPPTELRDQRALLRTRMKLVRIGTGVKNRVHGALDRYGLQSEGYSDLFGKSGRQHLAGCLNYLPEHTRHSVERELALLDYLQPQIATLEEHIARVVQPSREIAWLRTLPGVGEILAPLIAWEVGQVKRFPGPGNLAGYAGVVARTISSGGRTWHGRVSSAVNHYLKWAFLEAANAVVRHQQKYDGWHVVNLYQRLHGPKGHAKAATAVGRHLAEATYWILQRGEAYRDPARRTLEAAARAAGSSCPGKRDVALAH

SEQ ID NO: 152303 - protein, 364 aa, unidentified
MTNNITWVGMDDSAKTINLAIFKGQEINPREELVVINDSTGLGRMAKKLKTLPGEVRCVYEAGINGYYLQRYLAKHEIACDVAAPSLTPRRVGNRVKTDKLDAKALARLYRAGELTCIVIPQHEQESLRDLIRAREDALEDQLRARHRLARFLMRRGWRYRDGKNWSQGHLRWVKSIRFEDDRDQMVLDEYRLTLSEQTERLDRLNKKIEEVAKHPTYNTRVRYLMALKGIRVLTAMTIIAEALDLRRFTDAPAFMAAIGVVPSEESSGEVERRGRITRTGNSHIRRVMIESAWTYQHSSVSGKTVQNRRKGLPAEVLDIARQCDKRLHQKFRRMASRGKDRQKIAVAVSRELAGFVWAIGKVA

SEQ ID NO: 152304 - protein, 427 aa, unidentified
MSYKIAGIDVHKRMLAVVVSEVEVYGEYAFERRPFGTSPAQLQALAAWLLEQQVEEVVMESTAQYWRPVWGALERYWQPGCRKREEAGPTSGGLHLAQAQSNRGPRGRKNDFADAERLVRRLVANELRLSFVPDPEQRLWRTVMRTKYQLRCNQVQLHNRLEALLEEAQIKLSSLVSDLLGTSGRRMLQALAEGESDPAALVALADRRLRATREQRCDALGACRDLHPLYRKLLKAALEEWQRIETQIRQLEEEMATLLSKQQDQVRRLAEVPGLGVDSAQQIMAEVGAQAAAFPSAGDLSSWVGACPGKNQSAGVNTSSRSPKGNRHMRRILNQAANAAAKLKGSIFALLYRRYVTRLGHNQTIGILAHRLCRLLWKILHQGVRYQERGPAVSQKSAQSRAKRMIRELRSLGYRIELVTSPAGAAP

SEQ ID NO: 152305 - protein, 327 aa, unidentified
MKKLHPVGIDVSAKELVVASDRHREARFDNDPAGHKKLIRVLTKGGRCARVVLEATGVYSLDLAFALHRSARIEVMVANPRAVANFAKAYLQRSKTDPLDATVLLEFARRMPFTRWVPPAPEHLDLRALSRRIAALVKVLQQEKNRLHAASQSIEITALVREDVEANIHHLASRIDHLRDQALAAIGNHPPLREAFEHLVSIKGIADASAISILGELVVLPADMTVRQWVAHAGLDPRHVKSGTSIHKPARISKAGNKYLRAALYMPALVAIQHEPNVAAFYDKLVARGKTKMQAIIAVMRKLLHAIFGMLKHGADFDGKKFYAINP

SEQ ID NO: 152306 - protein, 310 aa, unidentified
MIHPDVIGCDIAKAHLDFFDSGLERHFRIDNTPAAISAWLDGLDGRGVHIVFEATGRYDRQLRIALETPELPYSRVNPARARDFAKAIGLLAKTDAIDARLLARMGQSLPLSTQAPDDPARHVLARLHTRRDQLVAMRQQERTRLHETEGIERDSAESHMAWLDAEVARIEMACRDVLKAEKTLQEQEARLRSIPGIGPVAALTLIAHMPELGNRSAKAIAALAGLAPFNVDSGTSRGKRHIRGGRKRIRDALYMAALTASRMPRAFKSHADQMKEAGKPFKVVIIALARKLLAIANAIIRDKTTFRRTT

SEQ ID NO: 152307 - protein, 339 aa, unidentified
MQLYAGIDLHSNNSYLAISDEEDKRHYKKRLPNQADTILAELEPYRNDLAGIVVESTFNWYWLVDVLMDNGYKVHLANPAGIQKDKGLKYSGDKHDAFWLARLLRLGILAEGYIYPKEWRPVRDLLRKRGHLIRLRTSLINSLQGIISRNCGCQLPGKKIKQVRTNHVAPLLEANEDLALSGVVSKECIDYISQRIRDIEVSVENRVELLAPFRGLQTIPGIGRIISLTIMLETGDIGRFEKVGNFSSYCRKVPSSWTSNGKKKGKGNSKNGNKYLAWAFSEAAEFFRRYDPLARAFYNRKTAKKNFMVAHAALAHKLCRATYFIIRDGVEYDPNKLFA

SEQ ID NO: 152308 - protein, 421 aa, unidentified
MPHLAPEAFAAFVGIDWADAQHDVCLQAVGSTTQECSPLDHTPEAIDAWARALQERFAGRPVAVGLELNKGPLVYALRKYDFFVLFPINPGALAKYRAAFTPSHAKNDPTDAELQLELLLKHRDKLQPLNPQSPAMRALAQLVEHRRRVIGDKVRVTNRLTSTLKNYFPHGLQWFEDKDTLLFCDFLAQWPALKAAQLARRTTLADFFRTHHVRYSNVIDRCIQAIKRATPLTTDEGVIVPHALLVQALVAQLRVILQAITDFDHAIAPRAQSHPDFSLFAALPGAGAVFAPRLLVAFGEHRERYASAEERQKYAGIAPVTERSGNKTWVHWRWQCPTFLRQTFVEWAAASMRHSFWARVYYQQQREKGKSHQAAVRALAFKWIRILYRCWQERTSYDESVYLQALHHRGSSLIQKLAQAS

SEQ ID NO: 152309 - protein, 394 aa, unidentified
MILVGIDIGKNQHTFSIVDMNTGEILSNPSPFNNNQEGFLFLIKKLNIYSKSDLLIGMEDTGHYHFALLKYLLDIRYTVALINPTTTDLTRKLQGGITKNDPLDSLTICDVIGSNQRKKPYRVTKVNRFDLYEQKQLTRHHHNLKEELNTYKNRLQKCIDIVFPEFNSLFRSKYGIVYMNVLKTFASAQKIANSDIRTIRKCFEYDGRGKRITLSADQLKAAAKTSIGIPSVAEEIQIRHLVCQIEMIEEQLSEIDKKIEEFSLQNNSPILSIPGISHFSGTSILAELGNICNYTKASQIIKFAGVAPYHYESSQFTAQHTAITKKGSRYLRKTLYQIILPVINHNTVFTAYYNKKLAEGKGHRCAQGHCIRKLLRIIYHLLSTEQTFDPALLI

SEQ ID NO: 152310 - protein, 315 aa, unidentified
MSEVDCFAADVSKRELVIAVYPGEVGVKRIANQDAAISAWLDTLPAGSVIAMEATGTYHRRLADLAHGRGLVVYVVNPRNVYYYVRGMGARGKTDPSDAKLLARYVAHERAQLHPYVPPSALCERLTTLLERRAVLVRSRQALTQSLAELPALGREKRNLFKAIATLLSGIDRELAALTSSDASTATLVTRLKTISGVGPLVASLLCALFKRFAFRHADALIAYLGLDPRPDESGQHRGRRRLSKRGHPEWRRLLIAAAMSAARTKVWRDYVTLQRAKALPATAVHVILARKMLRTAFALFKNGQEFIPPRVRPT

SEQ ID NO: 152311 - protein, 329 aa, unidentified
MKTNSKFIGIDVSKDTLDVCVLSGDCESMAIKNTERAISSFFKRLLRDSTCQYHVCIENTGKYSWELMRILPEMECLFYVVNPLHLKKSLGLVRGKNDVVDAIRIARFIKKNSDELCPYIPRREEVESLQVLLAERKFRVGQRKQLRTKNKEMSVLGGSRLARSMTSKNDRLIRELNGQIKEIEAEMNRIIASDEQLKDLADRLKSIPGVGDVLCGNLLVRTNEFRTITSPRKLACYAGVAPFSNTSGISVFGRNRVSNLADKGLKKLLHLGALSAIRLDNDLAAYYHRKIREGKNKMSVLNAVRNKIIHIAFSLIKNQTLFENRLVSS

SEQ ID NO: 152312 - protein, 486 aa, unidentified
MDERRVVGLDLGIASAHTAVVLRADGTEVCRRRCSPTVDSFTELEAAALEGAPENTRLEIVVEPTGPAWLPVAVFFGQRSHSVYRVPSAKASDLRRFLSRHAKSNSIDAVTLARLALMDPDGLRPVELPGVDRASLDRRVRAADRLTRAGAQHKRRIKDLVRTLMPMSPLTGDITRADLAVLERYADPNALLRVGKARLTAVIARASHNHLGAERAKQWLVAARASVALYAGDGAVALSDLAAEVVTEVRLLRAVETELARHAEARERAYQKVDPDGLARSLPGIAEVGGPVLQATIGRAHRFGNGSQFKSFTGLTPKASETGEVDRKGQPMSKAGSSLLRTQLLRSADVARTIDPQLAAIYYTQMVERGANHLKALCVVAAHLAERAWAVLARGTPYELRDIDDRPVSRKEARAIIAECWTVPEEVRRRRRSKKVGKTPHQVLVGQVQVSARGATTRRPSPPPMLGHQPTMVKPAGGRDLTHRPA

SEQ ID NO: 152313 - protein, 350 aa, unidentified
MKKNIRVAERHPAETIGIDLGDKMSRYLILNEEGLAVEEGSFRNTGESIAKHFANRGRARVAIEVGTQSAWIAREFAKLGHEVIVANARELKWITSADDKNDRNDARKLARLARADRNLLAPVEHRTAEQQRELAVIRARDALVRSRSLLVNTARSVAKGFGLRLPASVTPTFGRRALAGLADHLRAALSGLLEQVDALGAQIRDYDCRIEDAAAAHPEIARLASVPGVGTLTAAAFVLTLGRRERFVHSRDVGSFLGLRPRQRQSGERDPQLGISKSGDKYLRKLLVQCAHHILGHWGKDSALRQWGLSKGGGGATKKRAVVAVARKLAVVLHRLWMTGEVFKPFPKMA

SEQ ID NO: 152314 - protein, 412 aa, unidentified
MSYERNAVGIDVSNGRSTVSVLRPFGEVVLLPFEVKHTTEELSALADKLTAINGETRVVMEHTGRYYESIEKVLHEKGLFVSSVNPLLIKQYGNNSLRNVKTDKADSMKIARYALDNWADLRDYTPMDKIRYDLKTLHRQFNLASKQKTATNNNLVSLTEQVFPGIRKIFESPVRRDGTQKWVDFIFTFWHADCVRKHSLKAFTERYQKWCKRHGYNFNAVKAEEVYAHAKTVVVLIPKDSITKTIVQEAARQLTSLSRSVETYRAEMNRLASMLPEYEVVMKMYGAGESTGPQLMAEIGDVTRFERKQSLVAFAGVDPVPKDSGDKTSRSNKSSKRGSPYLRKTLFIVMSTILQNMPEDEPVYQFLDKKRAEGKPYYVYMTAGANKFLRRYYAKVMEYLKEKEKAETDSTQ

SEQ ID NO: 152315 - protein, 460 aa, unidentified
MTHKRSHSTSPKTAKTLEVTLPLVHPHAAGLDIGASEIWACAPTTATTLTVQSFGTFTPDLEALAKWLKAAGVDTVAMESTGVYWIPAFEILEAAGLEVYLVNARHLQNVPGRKSDVQDCQWLQRLHRHGLLRASFHPEAEMRALRAYLRQRAMLVEYRAAHIQHMQKALHQMNVQLTQVLSDITGVTGLAIIRAIVAGERNPVTLAQWRHPRCQSSTDDIAKALTGNYRAEHVFALQQALALYDFYTQQMHTCDQQIEQQYSVLKPSREAELPPLPPDPKVNSHSKNAPDFDVRGHLYRLTGVDLTQVDGLDDSSVQTILAEIGTSMSKWPTVKHFCSWLGLAPHHTITGGKVLQSHTLPVHNRAAQALRLAAQSLHRSQSALGAFYRRMRARLGGEQAIVATAHKLARIIYYLLKHQVAYQPLSAEAYQQRQHDHELKALQRKASHLGYSLTQLPAQS

SEQ ID NO: 152316 - protein, 336 aa, unidentified
MLYAGLDIHKNFSQAVVCRENGNVLKEGRVPTTKESISEFFSEFKEELKIAIEAGINSEYIFDFLEEQGHKVTLAHPLKTRMIAESRVKTDKIDANILAYLLRTNLLPTSYMPPKDIREIRQLVRQRIFLGRFSAKLKNRIHAELIRKGIRYERKGLIFTSDGKNWLHSLNMPFMESYLIMLGSIEDQIKKHNKKINQGGRKYEEVKLLTSIPGIGVYSALVIFSEIGNIERFNTEEKLFSYSGLIPSVNQSGNHRYYGRITKQGSKNLRWILTENVRVHLNWARANDVETKLLKYYLRLCKKGKPKNKAVIATARKLLQVIYWMLKNKTEYCVKG

SEQ ID NO: 152317 - protein, 385 aa, unidentified
MNQTSCFATSTHALHCALELSKKSWLLAIQFPDREQPSVYSIKGGDTEKLMAKLTAARDCWAKVSGSLPVITVCYEVGYDAFCLARFLKARGIECLVIDPGSLQVNRRGRRVKTDRVDVKMLLRTLIAWCRGERHVWSLVRIPSVDEEDLRRSHRERSRLVRERTAHINRIKGLLFAQGIRDVKVKSQYKTLAVDKLLTADGHRLPPRLASEIARELQRLAMVQEQIAEIERERDTAPTPCEATERKRQLLLQLKSIGPAISALLSREVYYRQFANRRQVGSFLGLTPSPYSSGEEERCQGISRAGSGQVRAIMIETAWLWIRHQPKSALTRWFVERTAGQSTRMRKIMIVAVARKLSIALWRYVEQGLVPQGAILNPPTTGRAR

SEQ ID NO: 152318 - protein, 355 aa, unidentified
MNDAKYIGLDVHQATISVAVLDSAGKLVMEAILETKAETVLQFLRGLRGSLHVTLEEGTWAAWLHDLLQPHVTRVLVCDPRKNALLKAGNKSDRIDARKLAELLYMNKLNPVYHGEQGIRTLKELARSYLTITRDLTRVMSRLKAIYRSWAIPCAGQQVYAPRYRAEWLAKISEAGVRRRAELYYQQFDSLAALRQDARRELLAEGRKHLNTRLLQQIPSIGPIRAVLLLALMQTPNRFRTKRQLWAYCGLALRTYTSGEYRIVGGQLKRSKKVLAIRGLNRNHNHDLKNIFKGAATRAASTAGPFQDFYEACVARGVKPHLARLTLARKIAAITLLVWKKGVRFDAEHLKQQAA

SEQ ID NO: 152319 - protein, 343 aa, unidentified
MYYIGLDVHKKTISYCVKDSTGRVHIEGKIGSTRRELDNWIPMLPQPRMIAMEATIFTGWIYDHLLPHAEKVKVAHPLMLRAIAAAKKKNDRIDAGKIADCLRCDFLPECHMATTEIRDRRRTLRYRNLVLRQMVQMKNRVSGLLMESGVTYDKQRLHKVGYFTDLLSASEEINESIRPLLKLSREHILRSQRLDRALTSSLERDPLLSERLRRLQTIPGVGPITALTWALEIGDYTRFPSVKEAISYCGLCSAEKRSADKVMRTPISKQRNKHIQHVLVEAAKMAPRYSHELALVREKEMQKGNKNRATLAVARKMVAYMLAVERRKQDFVPAEQLAGKAVA

SEQ ID NO: 152320 - protein, 341 aa, unidentified
MGQASTIGLDIAKWVFQAHGADATGRVVFRKRLVRAKVLEFFAGQPPCLVALEACGGAHYWARELGKLGHTVRLIPPAYVKPFVKRQKNDVADAEAICEAAQRPGMRFVPVKDEAQQANTVVFRARDLLVRQRTQCINALRGHLAEYSHVVPQGPAHVDSLVALVEDPKSSVPESARGILQVLIRTLNALEEQLKELDGEIARRAKADPVARRLMTIPGIGPIAATAITALVPAPEGFRAGRDFAAWLGLTPLQRSTGGKHKLGAISKMGERTIRRLLILGASAVVRWASQRGAAAGSWLARMLARKPRMLVTTALANKMARIVWALLVKGGTYRAPAVAA

SEQ ID NO: 152321 - protein, 370 aa, unidentified
MKEYSEAFIGFDTAKKKHAVAIADVGREGEIRYLGEIDSSPLTIERMIRKLAGRYEKLHFCYEAGPTGYGLYRQVRALGHNCSVVAPSLIPKKSGERVKTNRRDAVSLARLFRAGELTSVWVPDAIHEAIRDLVRARETASQDLRRKRQQLLSFLLRHGRIFSGRQHWSRIHLHWLAQQKFDHPAQQIVFQDGVDAIDDAATRLRRLDEQVATIVPSWSMAPVVDAYQAMRDVSFIVAVTFVAEIGDLRRFDNPRQLMAFLGLVPSERSTGERVRRAGLTLAGNRRARRVLIEGAWSYRYPARVSQTLQARLEGLPKAVREIAWKAQMRLCGRYRRLTAAGKKLPVVIAAIAREMAAFLWAIARHVAPAA

SEQ ID NO: 152322 - protein, 342 aa, unidentified
MKQYVGLDVSQKETSVCVVDEVGQVLFEGKAKSDPGALTALLRKRAPQAERIGFETGAMASWLWHELRRVDLPVVCIDARHAHAALSVRMNKSDQNDARGLAELVRVGWYREVRVKSEESQKIRAILVARSRLVAMRRDIENQVRSLIKEYGLLLPRAIGLRFRNQVCELLGKEHQLLGVIAPLLSIHEQICKQQSNFDNEVRQLAKSDETTRRLMTVPGVGVVTALTFRHTIDDPSRFRSASSVGAYLGLTPRRNQSGETDINGKISRWGDRLLRTYLFEAATVLLYRTKKWSSLKAWGMKLAKRIGMRKAKVAIARKIAVVLHCIWVDGTSFDWGQAKEA

SEQ ID NO: 152323 - protein, 341 aa, unidentified
MLIIGCDYHPSMQQIAWVDRETGECGERRLTHCEEAEQFYRELKEKGVSVRVGMEATGHSRWFHRLLGELNHELWVGDPAQIRAKRVRKQRNDRMDARHILKLLLEDNFPRIWVPTPENRDVRQLVMHRHRLVGMRTRVMNQLHAIAMNEGVRRKKGLWTEKGRVQLESLRLPLWTSRRRQELLELLHRFDPSIDQLNQAIEQEAERWPDVQRLQTHPGVGPITALAFVLVLGTPDRFRCGKQVASYVGLIPCEDSSADSWRLGHISKQGNALLRHLLGQAAQSVARCDPEWRGQYAHLALRRNKAIAKVAMARKLAVRLYWMWRRGWDYQQLKKFGSHVG

SEQ ID NO: 152324 - protein, 304 aa, unidentified
MKLMRIGVDLAKNVFQIHGVDCHEKPIWRQRLPRDRWLQTVLEKVEPGCEIGMESCGGAHHWARQLQAHGFRVRLIAPQFVKPYVKSNKNDANDAEAICEAMSRPSMRFVAVKTIEQQDIQATHRIRAGLVEQRTAKANQIRGLVAEYGLVAPKELLMLRRAIPCWLEDADNGLTARFRRLLDGLWDDLRALDGRVCKLDGEITAIATNEPSAVRLQQLRGVGPMIATALVVALGDARQYANGRQFAASLGLTPRQHSSGGKDRLLGISKRGDTYLRTLMVMAHARRYAQPNPKRIGSASGPFV

SEQ ID NO: 152325 - protein, 342 aa, unidentified
MKITTIGIDLAKSVFQIHGVDEQGKVVVRKRLRRPQVLTYFAQHTACLVGMEACGGAHYWARKLQAQGHTVKLMAPQFVKPYVKANKTDAADAEAICEAVTRPSMRFVPIKNADQQAILSLHRARQGFVRARTAQANQIRGLLAEYGITLAQGISHVANRLPEIIEDAENELPGLFRALLQRLVVHLKELNCQVQELEDQIEAWHRSNGASQKLAGIPGIGPLTASALSASIGDAKTFRNGRELAAWLGLVPRQHSSGGKPLLLGISKRGDAYLRTLMIHGARSVVRVAERKSTPTDRWSTDLLERRHMNVVAVARANKNARIVWALLARDRDYRVDYVSAA

SEQ ID NO: 152326 - protein, 376 aa, unidentified
MNPVIGLDISKGESQVQAFLDKGKPYRKSFKVSHTLEGLNDLVIFLEDVKNEAGMKPTIILEATGHYGAPVIHYLEERGYLLIIINPLISYKARGSSLRKVKTDAIDAYLLCELFYKEELEPYKKRGVQLLNLRNLTRQHENITGVMIQTKLQFQAVLEQIFPEYKGVFGDLYSNVSLLTLSDFPSSEDILKASEESITDKINELCKSRSIRWANEKALQLKAAAARNPFEKTVYQSHILSLDMYIKILLQYKEHLSKLESEIDTLAKEIEEYSIIKSIPGIGEKIAATIISEIGEIDRFNNSKKLVAFAGVDPSVFESGKFSATKNRITKRGSSRLRHALFMAVRCAIRDCRKTRTDDKIIPRNKKLREFYDKKT

SEQ ID NO: 152327 - protein, 318 aa, unidentified
MVREVFVGIDVAKAQLEVALRPGGVRFTAENSAAGIAALVERLSAHEPSLIVLEATGGLEQPLSIALAEQGLPVVVVNARQVRDFAKALGKLAKTDRLDAQVLAEFAERIRPQVRDVSDARARALEALVTRRRQVVEMMVTERNRLHATYAAAVRGDIEAHLLYLQGRKDSLEQELMVLVQANPDWLSKAQLLRSVPGVGPVLTVTLLAELPELGCLSHKQVAALVGVAPLNRDSGLLRGQRGTWGGRATVRTTLYMAALVARRSNPVIAAFYERLLAQGKAKKVALVACMRKLLVILNAMLRSHTPWQHPLVPTPAT

SEQ ID NO: 152328 - protein, 330 aa, unidentified
MGRLLGTERFPTSADGFGQLEGWLRSYGELGLVGIEGTGSWGADLSRFLLRQHVDVREVNRPNRQRRRKGKSDPADAISAARSVQSGEAGGLPKAGQGPVESIRVLRMTRLSAVKARTQALNQMKAIIDPAPDELREQSIRLWNRQLITTIRRFRTSGSSELAIAKTSLKLLAGRTVELGEEIVYLDELLDGLLHSTAPTLLSIRGVGPESAGALLVAAGDNPERLRSEPSFAALCGASPLDASSGRQQRHRLNRGGDRQANCALFRIVLCRLAWDHQTKAYMARRVAEGKTKKEVIRCLKRYVSREVYVALQSDFGSQLPGSPAARVAA

SEQ ID NO: 152329 - protein, 352 aa, unidentified
MIIIGVDFHPEFQQIASVDTDTGEFLEKRLAHPEEAEKFYRGLTGKKVRVGMEASGHARWFERLLAELQFELWIGDAAVIRTKRVRKQKTDRQDAQLMLGLLLEDRFPRIWVPSGENRDLRQLLWHRHRMVQARTRIMNQLQAVALNEGLRCKKRLWRERGRQQLESFPLAPQANRRRHDLLELLDRLSPTIAELSQAIEQEVEKCPAAQRLMTHPGVGALTALAFVLILGDANRFHCGKQVASYLGLVPLEDSSGNRRRLGHITKQGSSILRFLLVEAAQVTVRSLPEWRSKYFHLTLRRGRKIAKVAMARKLAVCLYWMWRKGWNYEQVRKFGSHAGQPGNRHGVQSNTE

SEQ ID NO: 152330 - protein, 364 aa, unidentified
MHGINNIELSSLEETRCQFNGGTGAIKLGIDVHQDFYVVVEQVGGSNPKPPQRLAKEAFLHWATRLKQKSSAEVYAVYEACGFGFSLQRKLSALSINCYVVCPQKLDEQNRRVKTDGLDAKALCLKLDRFVQGNRDALAIVRVPTEEHEQLRAIHRQREQLVGARKRLEAQGRSLMVNHGVEPVQNWWKPRTFAALPAPQWMKELLANSQPILVALQQKISALTVQLQSAASPDQPRGLGKMTSVLIDREIGDWNRFNNRRQIASYTGLCPGEYSSGNTRLQSCVTKHGNPRLRAALVELAWRLVRFQRDYKAVRKWRQILAKGALATGAARKKAIVAVARQLAVDLWRIKTGRLSAEELGLIN

SEQ ID NO: 152331 - protein, 412 aa, unidentified
MSVLQVALEPSTLVVAVDPGKVTNRVWVSDGSGLLTGPVSLPVSREGIACVEGLVTVHGRDSAARVFAIETTGSLHRAWAHELERRHPGEVRLFAPSETKAARVQLGSGRFKTDDRDCAALTYLVRQGAGRLVVDELEVETLRAVVRHRRGLVADRKVAQQRLHDQLNVLVPGLSAPAGHGRSLAVERTSGQAVLACAAAFAGRPPTVRSLLARAPGRWTKADAQYWADRWRGCLAPPHDAEQRAQRLNRDLQRYRVLCTDIAALEGDIEQVLAGTDGQVLTTLPGVAAIRAAAFAAHSLPIDRFPDAEHLYSATGLVPALYQSATLRRRGRISRQGLAEHRDALMGIAWGLSVFSPSFAERDREYRARGMAPIQARVALARHACRLAYRLLKTQQPFDEEAYRQGRHSRGR

SEQ ID NO: 152332 - protein, 320 aa, unidentified
MAMSVSRSVVGVDVAKAEVVVYQADTDLLLPVSNDKPSLTKWLKTLPANSAIAIEATNIYHLDTVELAHAMGHVVYVIDGFRLSNYRKGVGGRAKTDASDARLLARYLKNEEEELRPWSPPPKVYTKLQSLLRRRATLVQARVSLTQSWNDEPLLKAAFKQQIAAMGRLDLLIQKKLLEVVKEAGLLDQVKRCQAVEGVGFLTATALTMAFQRGDFASGDAYIAFLGMDLRVSDSGQMNGRRKLTKKGDSEIRRLLHNAAMAASRSKTWKPFYERYLERGLKTTQVLVILARKLARVAFALMKNQSEYQPNPVLGASPQT

SEQ ID NO: 152333 - protein, 321 aa, unidentified
MAIPVQPLLIGVDVSKATLAICLGPDQPVQSLDNDRKSITRWLATLPAGPACIAAEATNTFHLDLVDLAHHAGHAVYLVDGYRLSRYRDSIGTRAKTDASDAQLLQRYLAHERDSLRPWIPPPKGYRTLQQLLQRRATLVRARVALQQSLADLPGLKQAAATLFRQLKRIDQKIQQGLIDTLAQLDWDADFKRCQGIEGVGPLTAAALTMSFHRGAFRSSDAFVAFLGLDVRVRDSGQLRGRRRLTKKGNPELRRLLFLAAMQAARSRSWKDFYQRHLDRGFSRIQALVVLARKLARVAFALLKNQTDYHPRYLKEACMET

SEQ ID NO: 152334 - protein, 335 aa, unidentified
MNKICIGVDISMDEFHACIKVRFTDGSVKVKGTRTFKNTSKGHLEFFEWSLKTYKTKLPVWYVMEATGVYFENLAYFLYKKNQQVSVVLANKIKNYIKSLNIKTKTDKVDSIHIAGYGIERELDIWKPMSTQYKKLRDLCRELLSFKKELQRSKCQLHAMNSSHEKLDKIVALKEEQIEFYKKAIDTIKQEIKEAVNQDEELKERIVKLETVPGLGFETIVILIAETNGFALINNVRQLVSYAGLDITLNESGKYRGKSRISKRGNSRIRQALYMPSMTATRANESIKNLYERVCERNPEVKRKGIVAGMRKLLILAYSLWKNDQVYNKEYQWGL

SEQ ID NO: 152335 - protein, 345 aa, unidentified
MTTMNYIGLDVHKKTISYCVKDVSGRIQQEGKIGSTRRELDCWMKTLPQPWTVAMEATIFSGWIYDHLLPHATQIKVAHPLMLRAIAAAKKKNDQIDASKLADCLRCDFLPECHMMPAAIRDRRRTLRYRHLLVRQMVQMKNRVSGLLMETGVEYNKQRLHKVSYFRELLSENEEVHPSIRPLLKLSRETIERCQKTEYALVSSLQRDPVLADRIKRLRTVPGVGPITALTWALEIGDASRFHSIKQAISYCGLCGDERSSADKAMRMPLSKQRNKHIQRALVEAAKLAPRQSHELAMIHDREKQKGNGNRATLAVARKMVAYLLAVDRQQRDFVPAEERRTAAA

SEQ ID NO: 152336 - protein, 353 aa, unidentified
MQIVSALDVHRRQITYKTLDLGSGEVRRGRVSPATRESVREWLERFAGLDAHFALEGTTGWRFVVEEIERAGHRAHLADPAETAAKRGRKRRAKTDNADCDLQLKLLLAGELPESWIPPAHILELRTRVRMRKTLIDQRTAWQQRLQAQLFHQGIPTGLKPRTRAGRDALAKAELSAAGRELVALALRMLDTIDRELVPLDRDLRAFARRHPGCRALISNLYGVGAITATAILAELGDARRFTSSDDAVRHSGLDVTVYQSDSKRAPGHLSHEGPELLRWALFEAAQSAARQTSPDHAYFLQVKQRIDHNRACLSVARKLCRRAHHILRQLGNDALAPLEELPAEKEIVRPAA

SEQ ID NO: 152337 - protein, 347 aa, unidentified
MRFYTQRRMFYCGVDLHARWMYLCILSHEGEILFHKNLPAGPEPFLKAIAPFRDGIVVGAECIFTWYWLADLCEREGIEFVLGHALYMRAIHGAKVKNDKVDSQKIAALLRGGTFPMAFVYPREMRATRDLLRRRTHLVRRRADLLAHIQNTNSQYNLPEFGQKIATPGHRTGIADAFPEPAVRRSIAIDVELIDHLDLMLERRKKEIERTARHHDPQALFLLRTVHGIGATLGLVILYEIQSIDRFERVQDFCSYARLVKCLHESSGKRSGKSWSKIGNVHLKWAFSEAAVLFLRANPEGMKYKKRLERKHGKAKALSILAHRLGRAVYYILKRRKAFDMKIFLAS

SEQ ID NO: 152338 - protein, 345 aa, unidentified
MGPMYYIGLDVHKQKISYCIKDSSGKIYAEGWIPATRHDLDCWMKNLPQPWSAAMEATMFSGWIYDHLKPHATELKVAHPLMLRAIAAAKKKNDRIDANKICDCLRCDFLPECYMAPAAIRERRRTLRFRNLLVRQMVQMKNKIGMLLMEAGVSYNKQKLHKAGYFRELLASSPDINESLRALLRQCRETVVRLGKMEAALTHSLKQDRLLVERMERLMSIPAVGLITALTWALEIGEVQRFTSIKKAISYCGLCGDQRSSADHTQRMPLSKQRNKHLQTTLIEAAKMAPRYSPTLALLYDKERQKGNANRATLAVARKLVAYLMAVDRGQTHFLVLDRDTCAAA

SEQ ID NO: 152339 - protein, 485 aa, unidentified
MAKRKMSTFERLQRGKWSREQRKELAQKLEAADLTIVHPDAAGIDVGNESHFVAVPAGRDAQPVQEFGSWTADLQRMAAWLKACGIRTVAMQSTGVYWIAVQEVLEQAGLKVFLVNARGTKNLPGRKSDVQECQWLMKLHTYGLLANSFRPPEEIRAVRTIWRQRDRLVQDAGRAIQQIQKALTTMNIRLANAISDVSGVTGLAIIRAILKGERDPRELAKLRHPCIQASEEEVVRSLEGHWRDDVLFELKQVVEGYDFYQRQMGACDEELQKYLAVLPDRRRESAAVGADPGPTKGTKQRHRSKAERKGKTRRKNQPGFDLQAELHRTFGVDLTRIDGIDIMTGQVILSEVGPDLSDFPDEDHFASWLELAPRRNITGGKVISQKSRESRNRVANALRLAAESLSRSDSYLGARYRRLRGRKEGKKAVKAMARHLACLVYRLLTKGQDYVDRGAAYFEKKRTEREMIGLHRKAAEHGMRLVPMA

SEQ ID NO: 152340 - protein, 353 aa, unidentified
MRQIANRQRIYCGIDTHADTHHAAVITDTGILLEHRQFDTTAIGYDDLTLWIRELGEPIAVGIEGTSSYGAGIARHLRHLKITVVEVPRPNRKLRRSVGKSDPIDAEAAARAVLARHQLSEPKHGDGPIEAIRALRVARSSAVKAATASMNAIRAMLVTAPDTLRARLRGRSTTALLDACTALDADVAQLADPVNATILALRSLANRTRQLRREANELKKHLAKLVNEVAPTTSAVFGLGPDTTAALLVTVGDNPGRLKSESSFAHLCGVAPIPASSGKTTRHRLHRGGDRRANQALHTGVIVRLRYSDNARSYAQRRTSEGKSMPEIIRCQKRYLAREVFTALRRDYRALTT

SEQ ID NO: 152341 - protein, 506 aa, unidentified
MKVQASKPTFTIGYNPIGQYGSNICRQDIGRRRPYRSLLRQRYWAWSFTSKLITMAKVAKRKQTSKGLRLEVVNPNAAGIDISPKEMQVCVPSDRDGECNRTFGVYTEDLHYIAEWLKACCIDTIAMESTGIYWLPVFRILKESGFDVILVNASDVKNFSGRKTDASDAEWLMMLHSYGLLKPCFQPENIARTMRNLVRHRDNLIRSASREVLHLQKAMEQINLKLDNVFSDILGKSGQSVIKAILNGERDPKVLSDLADPRCRTSKEEIEKSLQATWDEEHLFEMRQSDSLYQFYQQLIAECDAKINEIAMQYSATVDAPKTELLRSGKYNAKKNRIGFDVEKVAFELWGVNVMRIPGMSRGALLRLVGELGADFTTKFVDVKHFVSWANLVPNNKISGGALLSSKVPKKKNPVGIIFRQAANTLKAAKNPLGDYFRHMRAKGGHLQAMVATGKKLASIFYCMVQRKVEYNEKVYCNHRKQELQNKVAYLHKRLQRMESELANCG

SEQ ID NO: 152342 - protein, 425 aa, unidentified
MSEKIVVGIDVSKAFSDICILSPNNDIIKRLKISNDINGMKSLIYVLEKVEDEYEDRAVIIMEATAHYHQILANFFRKHNYEVIVINPIQSGALKNINIRKIKSDKTDAYNIALLYRIKNYNETITHSDTVNSIKKLCRQHKELTDEIVEHINRLIAFLDISFPDFKKVFTDLQGKTPLSLLEKYSTIQEVLSPENKQDIIQLIKENSHKSSSYAGVKYEKLFKAAEKSIEVCIVSLSSAVLIQTTVRVIFSLQEALKAIDNEIKRLSLLDEKFHKEIVLLQSIPGVGEYTACVVLSELGDISNFSKPKELVAFFGLDPGVTQSGTYNRKNNKISKRGSPHVRSILHMLAKSNVYPNRNREYLNPVMRAYFEKKIAEKPYKVVMCAIMRKMVQIIFAVLRNQKSFELRTPEEHQKLIREKSKLVA

SEQ ID NO: 152343 - protein, 348 aa, unidentified
MNTVHYIGLDVHKKSVSYCTKLADGTIVAEGKVAARREDLRQWAKQLPQPWEGAMEATLFSGWIYDTLKPYAAKLEMAHPRMLEAITAAKKKSDGIDASKLSDLLRVNLLPSCYVATPQIRELRRMLRYRNLVISEAVRMKNRISGLLMETGVEYNQQRLHGKAYFAELMKNLAEVPESVRQLLRLSRAALEMFEVTQLGLLKALRTNALLAKRVERLASIPGVGEVTALTWALEIADPSRFPSIGQAQSYCGLTTALNSSADKQKRGPISKQRNPHLQTVLIEAAKLAPRWNSALAVVHEKELAGGNPNRATLEVARKLVAYLLAVDRSGRPFQMPAVATTASAAQA

SEQ ID NO: 152344 - protein, 395 aa, unidentified
MPSKTGSERVVIAVDPHKASWTAAAVGSALAPLATLRTPVSRQGYRQLRRFAAQWPDAEWAIEGATGLGAPLAAWLSGDGIEAVDVPAKLATRVRMLSTGHGRKNDDADAVSVGIAALTAPGLRSAAVEDAVITLRALVEHRDDIVRTRTQTINRLHVLLTGLLPGGAPRQLDADTAARLLRTVRPRASGPATLRRLAAELIGEVRHLDRRIATANTQISDAVTASGTTLTQLRGIGDLTAGKILGRVGDITRFRSPAAFASYTGTAPIEVSSGDVVRHRLSRAGDRQLNYCLHVVAITQLRHDCPGRDYYLRKRASGKGHKEALRCLKRRLSDVVYRQLLRDAQASQAASPRGQQGATTNSRAAGSTPNTSSSDKSLPGPAGTDPTTPNEDRLD

SEQ ID NO: 152345 - protein, 333 aa, unidentified
MNDRLTPGQFEQTKVKSTISNSVVYLGADVAKDSIEIFSGHLKLPTSVSNSSKGIASFLKRLRKAPSTPVHIVCEATGVYHKALVRALQHEGFPVSVLNPRQARDFARACGTLAKTDKIDARILADFGARMQPAATPSPDPINEELAVLTARRQSLIQTRADEVKRLGQTEHRFCVASIRTHIEHLKKQIERCQEEIEKLLARSERLQKALEHLTSVKGVGRLSATLLLAACPELGTLSKSEVAALAGLAPVCRDSGKFRGQRTIHGGRLSIRSALYMAAVSASRFNPVLSTFYKRLINQGKPFKVAITAVMRKLVIALNSIAKKCPHFSPAS

SEQ ID NO: 152346 - protein, 410 aa, unidentified
METLVERCAGLDVHKNTVVACLRLPGGKGRRQVVHRRFGTTTPQLLALRDWLTAEQIQLVGIESTADYWKPVYYLLEEVTECWLLNANHLKHVPGRKTDMNDAAWIADLLAHGLIRSSFVPPAPIQELRDLTRTRKQLVREISQHTLRIQKTLEDANLKLSSVLSSVVGSSGRAILNALIAGESDPERLAELAQGTARKKRAALIEALHGRITPHHRRLLKLHLDLIGALEAALAEVDADVGKLLAPIRKSARLLTTMPGISELTAQVVLAEVGVDMRRFPTPAHLLSWATMCPRNDESAGKRRSTRTRQGSPWLKTALVTAAWAAVRAKDTYLQAQFLRLRARRGAKKAILAVAASMLTAIWHLLKNGVEYRDLGADHFSRRNHLQQIQRLVRRLNDLGCEVQLTTQAA

SEQ ID NO: 152347 - protein, 316 aa, unidentified
MFVGIDVAKAELVVSILPSAERFTVANDERGVRTLVERLRSVPPTLIVLEATGGYELLAVAALAAAALPVAVVNPRQVRDFAKATGQLAKTDRIDADILARFADVVRPAVRPIADEDAQELEALLTRRRQLLEMLQAERNRTGQVFGKGKRVVKKSLKNHISYLERELRMTDTDLGAMIKASPVWRERDELLQSVPGVGPVLSRTLLADLPELGQLSRRAIAKLVGVAPLSRDSGTLRGRRFVQGGRATVRAVLYMAALVATKRNAVIRAFYRRLVAAGKPKKLALVACMRKLLTILNVMVRTSQPWTLNAALIPA

SEQ ID NO: 152348 - protein, 385 aa, unidentified
MAPIRMPEAVIGLDVGKSSHWACVATRDGEVLLSAPVANREDDLDSLFGRFPDALVVVDQSRNIGALALARARAAGMSAAYLPGLAAHGAARLFAGDAKTDERDAMVIAKTALGIPDALLPVGDPGPTIAAARALAAQRNFLTCENTRNKNRLRSILLESCPAFEALVDLSDGPQLRLMASLGGAWSVADAGPRRAAALTRGAARGKIEALVRSTTSSTRPDASVVAAEDRAVKLLARRISENSVEIEAITAEISALLEGDDTYRCLLTVPGIGPKTASELAISIDIEDFPSHDRLASYCGLAPRNRQSGTSISSVTASRQGNKRLKNLLIFSCNCLTRTEGRWGDYYTRCRERGMSHGKALKALARKRLKVIYAVMRDRVPYAA

SEQ ID NO: 152349 - protein, 412 aa, unidentified
MKQIRDKVGGLDVHRDTVVACARIVQPDRSVEVTKRSFSTTSAGLGELASWLEGTGVSTVVMEATGVYWRPVYYALEGLFAELWLCNAGHVKNVPGRKTDLSDAEWLADVAAHGMVRPSFVPPPEIRELRELPRYRKTQVDARVKELQRLEKTLQDAGIKLTSVASSVWSLSSREMIEAMIAGERDPKVLAQMARSRLRAKLPELEEAFSGRVGSHHAVVCRQIIDHVDFLDRSIAALTAQVAERLAPFESAVTLLCSITGVARTTAEVMIAEMGADMTRFPTAGHLCAWAGVAPASHESAGRSRPAGSRHGDPWLRRALVEAAKAAARTKGTYLSAQYSRIARRRGANKATIAVAHSILAVAWHLLTTGAIYEDPGAEYFDRHHDPDREAQRLQRKIEALGYQVTITGQAA

SEQ ID NO: 152350 - protein, 384 aa, unidentified
MRQIEQMPSARDDAAVFVAMELSKSAWLLAAQGSPSGKASSHRLESSDIAGLLGLLRRRQAREQQACGRPVQIILGYEAGYDGFWLQRRLAAEGITCWVMDPGSLQVDRRARRAKTDRLDAAMLLRALMAWWRGDRAACHLVQVPSVEREDARRTHRERQRLITERVQHVNRIKGLLATQGVYDFQPLRRDRWERLQGLRTGDDRELPLHLCREIEREFKRLELVLEQIAATEAERDAAVAVPAADDADAAMVVQLAKLGGIGPELATVLVCEALYRPFANRKEVAAYAGLTPNPYASGDRHRDQGISKAGNPLLRKAMVELAWLWLRYQPDSALARWFTERVGAVRGRMRKITAVALARKLLVALWRDVRTGLVPEGDRLKVV

SEQ ID NO: 152351 - protein, 363 aa, unidentified
MHYIGIDAHKESCQATVMDDDGRTIERKKIPTDMTELKKFFSRYRKSRAVVEACPVWEVVYEAGRQAGVEVVLANPGQVKAISQARVKTDKVDSETLAHLLRTDMVPESYIAPAWVRELRRDLRGRMHLQKTVVAIRNQLYSEMMRKGIKYKRECLKTKKGRDALRETLPIPRVLRRLDILEALEKELKDYNAELLMPAYIENEKAQFLATIDGVGFYTSLTVVAELGDVHRFPDSDSVVSYTGLAPWIRQSGSVTRLGHITKAGPHNLRWVLIEATHSHLRFCKAKEECRLCQFYQRLEKKRGGNIAIVATAAKLLRIMYWMLKLNRPYQPQGLDPGRTHEGEPRWSEWGKAPGRQGADWPP

SEQ ID NO: 152352 - protein, 407 aa, unidentified
MQVYIGIDWSEEKHDIDFMNEAGADLACLCIEHKLEGFVQFDAARRKLGVASQDCVVGLETAHTLFIDYLWSQDYQNLYVVPPNQVHSNQGRFRQSGAKDDRADARLIADILRTDRGRLQRWYPDSLLTRQMRAQLSWVLQLNTQVIRLANRLRAILMRYYPAAVEVFSSLTTQIAPEFVRAYPNPQAARALSYSEFQAFARQHRYRKPRLLPGCYARLQDDYPDTNPETVLIYQSQAVQLAGLLLETMRTRIQNMAQLQVWYRQHPKHAVFASLPGTGELIGPALLAKFGDDPQRFSHPSAVQALAGTAPITRRSGKQKTVRFRSACDKEWRYICQQWAMGLVNQARSPIASAYYAKIRPHCHSNEHAYRCVANRWLAVAWKLWQTDQPYDEKYHFQQRALRSKPR

SEQ ID NO: 152353 - protein, 428 aa, unidentified
MTNRQPIPTDALLVAIDIAKVRNEVLIEAPNHKRRRRLSVLNTRAEHDRLIETLRAYGKPVICAFEATGNYHRPIAWRLIEAGFDVRLVSSMALARTREALHNGWDKNDPRDAQVILHMLRIGATQRYHDPLRAGINDVQELSKTHEAIAKAKTEIQHRILTHYLPLYFPEIERFRGNSRSDWFFAFLDAFPTPASITALSKEAFIEAAWDVVGRKVSKERLLADIYETARTSIGLPLPIDAPAIRMFRMVIAEARSLIRQRNEIEDMADAMLRDSADYKALRKVPGIGPVIALTILAEGGDLRRFRHHRQFLKFCGLDLSTQQSGQHRGQTRLSKFGNARLRRTLWIAGQVAIRQRENGFRHKFERYIAKDRDNPDLRRKALTAITAKMARVVHAIIKSGSDYRPFVEGRVPGGRISFCGAVRAPKG

SEQ ID NO: 152354 - protein, 389 aa, unidentified
MIYVGIDVAKDKHDCCILGSEADKLFPVFTIPNNKAGFDELYEKMFSVTDDKTKIKIGLEATGHYSLNLLGSLIDKGLPTCVINPLHTNLYRKGLSLRKTKTDKVDARSIAMMLMTNKTLKPYSDISYHNEELKSLTRYRFDKVQERAKLKSSVARLVNILFPELEKLVPSLHMASVYSLLSKLPGASYITECHLTHLKNLLETASKGHYGRDMAITLRNTARDSIGSVIPEKSMELKHTIHLIKVMTEEIDEIEDSIKSIMDTCNSPIMTIPGISYRMGAMILAEIGDFTRFNYADQILAFAGLSPSTYQSGQLDSSYSHMEKRGSRYLRYALFNAAKFVCKWDENFGAYLSKKIGEGKHYNVAIGHATKKLVRTIYRMELTGEAYRR

SEQ ID NO: 152355 - protein, 403 aa, unidentified
MIFVGNDWADDHHDVCVMDAGGTVLAERRFVEGLAGMSQMQELIAAHADDPSEVLIGSETDQGMWVEYLLAAGFGVVAVNPKSVARYRERIRPGGGKSDRSDARLLADMVRVDGHLHRQVAGNTEDASAVRVLARAHQTLIWERTRHGNRLRATLKGFYPAAVATFSSLTGRDALAILAAAPTPSQGRRLTVSQIRRILEKAGRQRYLEVRAVEYQQGLKTEHLAVGPKIENAHGVIVASQVAILAELNRQISGLETELTAYFEQHPDADIYLSLPGPGVILSARMLGEFGDDPDRYADVKSRRNAAATSPLTIESGKTRIVTSRWVKNERLHGALIAWAFHALSASPGARLFYDQKRDAGNEHHQALRAVANRLVGILHGCLQHRTLYDEDTAWGHRQTQAA

SEQ ID NO: 152356 - protein, 338 aa, unidentified
MKLYGGMDLHSTNVVTQLINEEDKVIYRKKLGCDLNQILKGLEPFKDSIEGLAVESTYNWYWLVDGLMEAGYRVHLVNTAAVKQYEGLKYTDDDSDAFWLAHLLRLGLLPTGYIYPKQSRAVRDLLRKRGQLVRQRTAHILSIENLYARNTGNRLSCNAIKRLTQEQIQQQFADPNVALAIDSNRSLMNALDEQINVLEQAILKQAKLDPRYRCLLSIGGIGEILALTIMLETGDIGRFQQVGNFTSYCRCVGSEHLSNGKKKGQGNTKNGNKYLAWAFIEAANFAIRFNDQAKRFYQRKATKGNRIVAIKAVAHKLARASFYVMRDQVPFDSAKLFA

SEQ ID NO: 152357 - protein, 315 aa, unidentified
MDREKLTVGIDVSKEQLEVAFDETHQTQCIENSTTPIAELTQKLLPLQPKLIVVEATGGLERLLVLHLAEAKLPVVVVNPRQVRHFAKALGILAKTDSIDARLLVRFGISVNPPVRIIKAEEQQQLADQVSRRRQIVTMITQEKNRSKRATGQVLRDIQEHLAYLEKRLSRLDDQIQKALEASPIYKATAALLISVPGVGQGTASVLISHLPELGHISGKQASALVGAAPFNRDSGGRRGPRLVWGGRKMVRCQLYMATVAATRCNPVIRCFYRRLIESGKKPKVAMTACMRKLVVILNAMLRDNRSWDAQLLKT

SEQ ID NO: 152358 - protein, 310 aa, unidentified
MDKFAGIDISKDSLDLCIEPDNEVLHVAYDDKGIAQVVKRLAQVAPTLIVMEATGGLEMRLASELAAKGLPVAVINPRQARDFAKATGQLAKTDLVDAAVLAAFARAIRPAVRPIKDVDTRELDDLVTRRRQLIDMRVQETLRLGTASKVQRKSLAGHIAWLDKRIVKLDDDLSKRLRASDAWRTKDDLLQGIPGVGAVTTLTLLAKCPELGALNRRQIAALVGVAPRANDSGKHRGKRFVWGGRADVRAVLYMATISAIRCNNDINAFAQRLKQAGKPAKVVIVACMRKLLTIMNAMVKNNAQWTPKTA

SEQ ID NO: 152359 - protein, 482 aa, unidentified
MQSKTAKQAERPKRLTRRRRKELARRIWSDRPGLDVVHRDAAGIDIGSREHYVAVGPDRDAEAVRVFGCFTTDLRRMAEWLQRCGIKSVVLQSTGVYWIPVYDVLEQYGLEVWLVNAQDTKNLPGRKSDVQESQWLLKLHTYGLLRRSFRPAPEIRGLRTCWRERGEYVQQAGSCIQRMQKALTEMNIQLATVLSDLSGETGMSIVRSIVAGERDGKRLAEFRDPRVKASKQTIAKSLEGTWLPEQLAVLQRQLGDWDHIQRQIAACDVDLQAMLQQIPAAKVQQQQSLTPAAAPAGKRKRKKNGKSSKNEPKFNLAAELQRVTGVDLSRIDGIKAMTIMTVISEAGLDMSKWATEDHFVSWIGLSPRNDVSGGKVLKRKTRKVKSRLATALRTSATTLRQSDSYLGAQFRRLRSRLGPPKAITAMAARQARLVYRMLKYGQEYVDKGAVIYEQKYREQQIRFLEKRAAQNGFALVPLHQNA

SEQ ID NO: 152360 - protein, 371 aa, unidentified
MNSIVYVGMDVHKESYTVCCYSFDKDEVLYKQKLPADYKLILKYLEQFRKRFTDEIEFVCGYEAGCLGYSLYHQLTDHGVKCIILAPTTMAITNTNRVKTDKRDAGNIARCLAFHTYSEVHVPTDEDNSIKEFIRMRDDQKINLKKTKQQILALVLRLGKKFEGGKTYWTMAHMKWLKSLKLGGVYQETLEEYLITYEYFTEKIERLDQRIEELASGEKYEEKVKKLGCLMGVKTHTALSMIVEVGDFDRFAKPEKFAAFLGLVPSEETSDEKQKRYGITKAGNSHLRRLLVEAAQAYTRGNIGHKSIALKKRQQGNPPQVIAYADRANERLRRRFYKMTLNKRLNRNVAATAIARELACFMWGMMTDHVA

SEQ ID NO: 152361 - protein, 477 aa, unidentified
MGNRKMSTFERLNRRQRRKLERQLGLPDPGLTIVHPNAGGIDVGNESHFVAVPADRDPNPVQEFGCWTADLVRMAKWLKSCRIDSVAVQATGVYWIAMYDVLTQHRIGVTLVNAQHTCNVPGRKSDVQESQWLMKLHTYGLLRDSFHLDEQVQKVRTIWRLRDRHVKEASEAVQHMQKALTKMNVQLANVISDISGVSGRAIIAAILKGERDPYQLADLKHERVQASREEVARSLEGNWREDVLFELQQAVEAYEFAHWQMGECDRKLELYLTSLPTRSPTGNEPVEPPAENKAKRKVKPKGNAPVFDLKTELRRIAGVDLTTIDGIDVMTAQTIVAEVGADLSAFRNEDHFASWLGLTPGKDVTGGKVIGRGRRKVKNRVGQALRMAASTLRKSQSYLGARYRHLRNRFDVKAAAVKAMARYLATLVYRLLTHGQTWVDAGAARFEQKQEQSELSRLTAKAAARGLRLVPIAAELN

SEQ ID NO: 152362 - protein, 354 aa, unidentified
MLIIGCDFHTRYQQIAMAREETGELLVERRLDHASGEAHAFYRSLQSSQEPVRVGIEATGPIHWFERLLADLGHELWIGDSAKIRASEVRKQKTDERDAALILDLLLAKRFPRIWVPTPAQRDLRQLLWHRHKLVSMRTMLGNQLHALAMSQGLCRKKKLFTKKGRVELVSLGLAPWASRRREELLKLLDQLEPPIAELDRAVLEEAKRHADAVRLMTHPGIGPVTALAFVLAIGPITRFRCSKKIASYLGLNPSEESSGGRRRLGAISKQGNTMVRWLLIETVHHAVRQDPELRQDYQRLKFRRGHAVAKVAIARKLAVRMYWMLRSGADYAQLVRRQGSPRGTLVGASPSLA

SEQ ID NO: 152363 - protein, 406 aa, unidentified
MNAVGIDVSKGKSTVAILRPGGEVVASPFEVSHNPRKLNELVTLIKSLNGDSKILMEYTGNYYLPVALFLQKSGLFVSVVNPILVKDYNNKSLSVRKGKTDKKESLKLAAFALDRWHELPLFSPQSDSRTLLKAFNRQYNQYIKLKVMLKNNLFSILDQTFPGANTLFTTPARKADGHEKWIDFVLKFPHCECVSKKSFSAFSKSYLSWCRKFGYLFSEAKAKEIYAFACNCTPSLADSEAVRALVSIAVSQLNTLNETLASLQKEMDLLACSLPEYDTVLSLYGVGSVLGAQLIAEIGDVSRFSDKKALVGFAGIDAPPFQSGNFNPQSRNISKRGSAALRKTLFQVMSVILQKAPANDPVFLFMDKKRSEGKHFYVYMMAGANKFLRIYYARVMEHLNSLQEAA

SEQ ID NO: 152364 - protein, 342 aa, unidentified
MKDMIIGVDLAKRVFQIHGASTSGEVRFRKKLTREQFRVFMAKQAPGVVVFEACGSASYWAREMGSLGHEVRLIAPQYVRPFVKRQKNDAADAEAIVIAARQPEMRFVAPKTVEQQARAALFRGRERLVQQRTEEVNALRAVLYEHGHVFPIGVGHLKRMEALVEAETCDLPAMIREECRDLLEQIAEKTARIAARDKKLKELAAQSDAARRLQTMPGVGPLTSLAIEAFGPEMAQFKTGRDFAAWLGLVPRQHSSGGKERLGRISKAGQADIRRLLIIGAMSRLNWMGQRTIFEGSWLAKMLARKPKLLVAIALANKMARQIWAMMTKNEDYRDPALTAAA

SEQ ID NO: 152365 - protein, 412 aa, unidentified
MNNPQDYLFVGVDTHKAQHTAVVINCFHQKIGFAQTPNNTTDFDSFLSKLKSLIHNDEKLVFGLEDTQGLGHSLAQWLIKKGYIVKEVNPVQTKRERKQSTSPDKSDKVDAEAIANVLLAEYDKLPTIKNDANFKAIRQLNNQRKNLVKEQTRVKNRLHNLIHQQYPEYKKFFSDTFGKTALAFWKKYPHPGKLKHIGEKRLNNFLKKQAKSISNDKASNILSLVDKDKPQDISTETRESLIPMLINQLKLVKQNLEEINKLLKKSVENSQYKLTTMPGIDFKLAALFISNIKNIDRFDSADQLARYAGLAPVEYSSGKSQKLTSKKYGCRDLNHTFYILSLQQIGSYKNGRIKNPVAYNYYQKKLKEGKSKKAALTCLQRRLVDIIYAMMRDRSVYKLPEIPNYEILNKAI

SEQ ID NO: 152366 - protein, 345 aa, unidentified
MGVTIIGIDLAKNLFRLHGCDEQGRAVLRKRLTRGQLLGFIAQVPACTVAMEACASAHYWAREIEQLGHRVRLVNPRFVKPYVKANKNDASDAEAICEAASRASMRFVPVKTAAQLEVQALHRVRQQLVKSRTALINQVRGLLAEHGIVIPQGRAQLQHGLALILEDTDQRLSGLMREILSESSERLNFIEARLHQYELQIERLFRQDPRCRRLAQVAGVGPLIATALVAAVGNAAEFKHGRELAAYLGLVPRHRATGGRTIIQGISKRGDRYLRSLLIHGARAALWTKVARSDQPSAWAQRLKLRRGANVAAVALAHKNARVLWALLRSGECYRPAPLSLQAAG

SEQ ID NO: 152367 - protein, 409 aa, unidentified
MKDLLEISCGLDIHKEKIVACILTGPLGKPTHSEIREFTTLIPDMLALRDWIISENCHHIAMESTGIYWIPIYEILEDAFSGDITLLVVNARHMKNVPGKKTDMRDSEWISTLLRAGLLNASFIPEKRIREFRDLNRYRKSIIRDITSQKNRVEKFLQSSGFRLSSFISDIFGASGRNIILHLMEHGQIDKMSLDSYLKTKTRKRIDEILMSVNGTLSEHQKSFLKILMCHYDSMKEHLIEIETHLQEDMLPFALQIEQLNTIYGISTTASCAEIGTDMKPFKTAEHICSWAGLCPGNNESAGKRKSTSITKGNPYIKSMLCEIAWVIAGKRNTYLSAWYWRIKQKKGARKAIVALARKLLVIIYTMLKQGTNFDENCFEVRRKNCEQKQLSRYIRELEKHGYTVEAQV

SEQ ID NO: 152368 - protein, 347 aa, unidentified
MVTIGIDPHKASHTAVALDPSGEMLGELRVVADASMLRRLRRWASSWPQRVWAIEGATGLGRLLAQQLVAAGERVVDVPSALAARARVLARGHGRKTDGIDARSVALVAQHRSDLLTVAADDHTTVLRLLSDRRDELTGERRRTVNRLHRVLRDLRPGGAPRQLSADRATRLLTAIRPASAVDLERKAIARQLIADIRRLDRALLENRRRCEQAVASSGSTLTDIFGISDVLAAKILGHTGDITRFASAHHYASYTGTAPVEASSGEQTRHRLSRAGNRSLNHALHMAARVQTMHPGPGRKHYQRKRAEQKTPTEALRSLKRQLAKVVYRQLRNDHTSQPLTQSGLT

SEQ ID NO: 152369 - protein, 342 aa, unidentified
MGEVSTIGLDIAKSIFQIHGVDADGVVMIRKRIRRAKLLEFFAALPACLVGIEACPTAHYWSRRLQILGHTVKLMPPSYVKAYLKRSKNDANDAAAICEAVTRPSMRFVATKSEEQQSGLMLHRSRQLLVCQRTMLSNAIRGHMAELGIICAKGRNGTAELLRIIADEHDDRIPAVARLSLDVLARQYTVVRAEIVAIEKRIHAWHRSREESRRLEEIPGVGPIVATALVAEVGDWKEFTSGRSLAAWIGLVPRQHSSGGKERLGRISKQGNRHLRWLLVAGAMAVIRYARQHGTKRLWLARLMERRPIKVAAVALANKIARMAWAMMVRGERFKEPKLLPA

SEQ ID NO: 152370 - protein, 389 aa, unidentified
MIYLGIDVSKFKHNCYLADEDDFDKGCHFEIKNSKDGFEYLLRKLSDFDKDKIRIGLESTGHYHLNLSRFLLDLNFNIHFFNPYQTNLYRKADSFRNTKTDKVDAFFIAKLLRATDSNPIHNELYHNYELKSLTRYKSSLKNDRVKLKNTIVGHLDLIFPELAEVCKDIFCKYTLEVLIEYPSADKIAKANLTSLTNLIKKASNGSHSKEKAMEIRDAARISIGINSPAVSFRLVQDIKALEFLIDQIDEVNEQIKLLLDCLDSPIMSIPGVGIEIGPSLIAEIGYIENFESPSKLLAYAGLDPSINQSGTMNSSYSNMSKRGSSYLRQALFLAAFLICQNDEVFRQYYEKKKSEGKHHYVALTHVSRKLTRVIFHLLKTNQKFVSQKN

SEQ ID NO: 152371 - protein, 344 aa, unidentified
MEHFAGLDVSVKETSVCIVDDAGRIVREAKVASEPEALLAVLNNPRYRFRRIGLEAGPLSQWLYSALGEANLPVICVETRHMRAVLKAQINKTDRNDARGIARMIRAGLYRPVHVKTLRSQKLRMLLTHRKLLQSKAIAIENDLRGTLRNFGLKVGVVGAAKFEARIKQLVDNLPDLALLVEPLLVVRRVLREQIAILHRRLLDIVRDDEVCRRLMTIPGVGPVVALTFRATVDVPARFRNSRAVGAVLGLTPCRHQSGESDRTGAISKCGDEMMRVMLYEAAQILLVRSTRWSWLKAWAMQIARRRGLKKAIVALARRLAVIMHRIWVDGTEFRWARQEAAAA

SEQ ID NO: 152372 - protein, 340 aa, unidentified
MNEITTVGLDLAKHVFQVHAVDAEGDTVLRKQLRRGQVLAFFSRLPRCLVGMEACATAHYWARELRALGHEVRLMPAQYVKAYVKRNKNDAADAEAICEAVGRPTMRFVPVKTAEQQAAVLLHRGRERLVRQRTMLVNALRAHLAEFGVIAPQGLRNVGRLIAIIRDDDDAHLPGLARQVLQVLAVQIEQLEAAIAALEKRLMGWHKSNPVSQRLATVPGIGPIIATAIAAMVAEPSGFRSGREFAAWLGLVPRQNSTGGKNRLGGISKRGNQYLRRLLINGASANLLRSKATNADPWVIGLRRRRPSLVVAVALANKTARIAWAVMHRQENYQRMATAA

SEQ ID NO: 152373 - protein, 312 aa, unidentified
MHIVSNEVGIDVCKDWLDVSLEGARTFRASNTLAGIDQLEGRIPSGSVIHMESSGGYERLAHRELRSRGHLVRVHNPRKVRRLADVRGLSAKTDDLDARHLSTCGKVLPVRPDKSSQRESLCDISRAIQTLKADSSAYKKRIQTPELEPAVVGVYKELVKALELEIRELEKTFVQRVKGSSLKTKYAHALSVPGIGPVAARVLVSELHEELSGIGSRQVCSYAGLAPMDEASGKTIRASRLRKGNSHLKAAMYMPALTAIAKHQWAKDLYAGLRAKGRNHEQAIVPVMRRMLVRVVVVLKRGSPWQVEPPRG

SEQ ID NO: 152374 - protein, 314 aa, unidentified
MNENIPTNIGIDASKAQLDIYVRGQDVFFSVSNDAAGIRAAIKQIKSYQPERVIIEATGRIELAFVVAGHKAGLPLVVSNPFYIRRFAGAVGRLAKSDKLDAQVIAHYGEAVKPRLTELKPEKARLISDLLARRSQLLDMSTQEKNRLSILPKALHVSLKRILRHLKAEIERVEKRLDKLIDELPDWQEKRDVLMSVNGVGKVLAYTLLSDLPELGMLNRKEIAALVGVAPMNRDSGNYKGKRHIRGGRAKVRRVLFMAIMSAVQSNPKLKKKYQALKAAGKPPKVALVACMRTLLTILNVMVRNGEKWNPEYA

SEQ ID NO: 152375 - protein, 444 aa, unidentified
MHSQKLLKTLQSIPYLSVGLDVGADFSWMSIMLPNATLIGKPFKIVHSDPQSRELAVTKIKEAQETYSLKSRCFLESTGIYHIPLLCFLRDKGFDCSVINPIITKNSTNLNVRKLHNDKFDSKKAAKVGLDASLKTSIVPDDSIIDLRNLVRDYYYFKDLQSAIVLKLHAELKVSFPAYLKVFSKLTTQTSLKLLEAYPLAADMLSSPKDKLVKTIRCTARFGETYALAKYDAICTAAKDASVFGRSLPSSSLRIRLYIKTYREYQEHLDSILKELHKAVNKLEGTPVYDRILLLQSLRGIGFLSAVVLIAEMGSFDLFSSPKKLYAYFGLDPAVKQSGKFNGDNVHMSKRGSSLARRILHMVALNNLKVDKGTKTPVNPVIHSYYADKCKSKKKNVAVGAVMHKICNIIFAMLRDNKPFTLITPQEHCEQYFAAHPDKAPNAA

SEQ ID NO: 152376 - protein, 345 aa, unidentified
MDHFAGLDVSVKETSVCIVDDTGKIVREVKVASEPEALLAVLKNPAYHFKRIGLEAGPLSQWLFSALAEAGLPVVCVETRHMQAVLKAQINKTDRNDARGIAQMMRVGIYRPVHVKTLRSQKLRMLLTHRKLLQSKAIAIENDLRGTLRNFGLKVGIVGRVRFEARIKELVENLPDLAVLVEPLLLVRRTLREQTIILHRRLLAVVRDDEVCRRLMTIPGVGPVVALTYRATVDVPARFRKSRAVGAVFGLTCSKYQSGEIDMSGRISRCGDEMMRVMLYEAAQSMLRSKKWSWLKAWAMQIARRRGMKKAIVALARRLAVIMHRIWVDGSEFRWTREQAAAAAA

SEQ ID NO: 152377 - protein, 358 aa, unidentified
MAKPTQTTPVVGGVDTHKDLHVAAVVDQSDRVLGTQSFATTRQGYKLMLTWMRSLGDLQRIGVECTGSYGAGLLRYMQAAGVEVLEVTAPDKLDRRRRGKNDDFDAESAAHAAFAKRRTVTPRSRDGMVESLRVLKVCRKTAVQARRIALQLIQSTIVCAPDQLRDTLRKMTRMQLIRTLAAWRPDLTVYRDVEEAYRIAFKSLARRYLELHDEVADLDTMIQAIVADLAPELIARNSIGVNSAAQLLLTAGDNPERLRSEASFAALCGVSPVPASSGKTIRHRLNRGGDRAANSALHIIAIGRLRLDPTTQEYVARRIAQGHSKLEAIRCLKRYIAREVFTIITRSHKQINQTQIAA

SEQ ID NO: 152378 - protein, 411 aa, unidentified
MTVFVGIDWGGGSHAACVIDATGTIADRIEVGHDRDGLAKLVAWLARHGKPGDIRIAIERPSGLLVDTLVEAGFVVVPIHPNVVKACRPRYRAVSAKSDPGDAYILADILRTDGHRLLALKPQSDAIKALRGLVRGRDDLVATRVALANQLTALLDSFWPGAAAIFADVASPIALAFIERYPNPESAARLGPKRLAGFLAQHHYFGRRSPEALLERLHAAPRGDPGEAESDAKGELVRALARILHSLVTEIGKITGRIEHMVADLPDGKIVMSFPRASKICAAQILAELGSVRGRFQTEDQLASEAGVAPVTYQSGKSRGVGWRWACNKRLRAAITCFADNSRHQSPWAADIYKRASARGCDHPHAVRILARAWIRVLWRAWSNGETYDPTSHAGATPFLADNQNDHIAAA

SEQ ID NO: 152379 - protein, 398 aa, unidentified
MTESSDYESVQVFIGVDVGKDTHHAVAINRSGKRLFDKALPNDENKLRSLISDLKQHGQILLVVDQPATIGALPVAVARSEGVLAGYLPGLAMRRIADLHAGEAKTDARDAAIIAEAARTLPHALRTLKLADEQIAELSMLCGFDDDLAAQTTQASNRIRGLLTQIHPALERVLGPRLDHPAVLDLLQRYPSPEKLASLGEKKLAAQLCKLAPRLGKRLAADIAQALAEQTVVVPGTNAAAVVLPRLALQLITLRKQRDEVALAVEQRVLAHPLYPVLTSMPGVGVRTAARLLTEVACRAFASVAHLAAYAGLAPVTRRSGSSIRGEHPSRRGNKALKRALFLSAFAALRDPLSRAYYTRKMSQGKRHNQALIALARRRCDVLFAMMRDGTFYTPQAS

SEQ ID NO: 152380 - protein, 377 aa, unidentified
MSKLRWVGLDVHAETIAVAVAEGAGEVRSMGVIPNRPESVRRLVKKLGCVKELRVCYEAGPTGYVLYWQLTALDVACEVVAPTLVPVKPGDRVKTDRRDAMKLARSYRAGDLTPVWVPDAAHEALRDLVRAREAAKKDQLRARHRLGKFLLRHGRRPPQGVRPWTQRWLAWVQRDVHFTQAAQEVVLLEYVHEVEHVAGRLERLESAIDEAVQGAPSRMHAVIGAVQAMRGIAQISAVTIVAELGDISRFATPRQLMGYSGLVSREHSSGERTQRGAITKTGNAHVRRIVVEASWAYRYRPRIGNVLARRQVGASESVKEIAWKAQHRLHQRYRTLLGRGKSKQQAVTAIGRELLGFIWAIGMQVDSELRDQKRRAA

SEQ ID NO: 152381 - protein, 341 aa, unidentified
MKNLFIGVDFSKEKVDVAIIFADGLTETAARVFNEFKTTVSGYKQLVKWVEQNSYGIDSSLWLFCGENTGDYSKGLCNFLYGKGYDMWLENAKSIKDASGLRRLKSDRADASMIAEYAMRNYDKAIMYEPLSESLAQLRELFLYRQMVIRHRCSFQVRRGEKKLTMEKSPIKTMISQSGRHIVSELNKEVEKIDKRIAELIKSDEELTEVFTIVTSVPGIGTQNAVCLMVYTDNFRRFNYDSRKIACYYGIAPFGKDSGTSVHSDPHVHFMANRQIKAMLTQAALAAVNFNPIMARYYMRLVERGKKKQVALNNVKNKLVHLITAMVRNRQLFSPEYKISA

SEQ ID NO: 152382 - protein, 340 aa, unidentified
MSEYAALVAIDWADQKHAVCLYDQRTGKREHTIVKHTPAALQEWALGLHERFSGGPIAVCLEQSRGPLIYFLLQYEFFVLYPINPATLAKYRQAFSTAGGKDDPSDAEYLLDLLQHHRDRLRLWRPDDQKTRTLRLLVEQRRRLVNDRTRFSNRLTALLKGYFPQVLDWFDEIATILVCDFLERWPELSQLQRAQPATVNKFLRSHHSTSIPTNQRRLAEIKTAVPLTRDPAVLTSSVLNLKALVSQLRTTIKAIAEYDRHLEALCLTHEDYELFAALPGAGLIHAARLTAALGSDRSRWQSVDELLRFSGIAPIIERSGKQFRIRWRYFCPKVFSPDLS

SEQ ID NO: 152383 - protein, 520 aa, unidentified
MRQTKYRGIITEAGSLTFPPWEPAEPLLAKPPGKSVSPFGGDLCFGWLGSPRLYLYKPLGCVSTLWKWIPARKDKTMQYQKVLKMLECIPYLSVGLDVGADFTWMSIMLPNGTLAGKPFKIVHSDPQSRELAVAKIKEAQEAYSLKSRCFLESTGIYHIPLLCFLRDKGLDCSVINPIITKNSTNMNVRKLHNDKFDSKKAAKVGQDASLKTSIVPDDAVIDLRNLVRDYYYFKDLQSAIVLKLNAELKVSFPAYLNVFSKVTTQTSLKLLEAYPLAADMLAAPRDELVESIRQTARFGEKYAISKHDAICAAAKDAAIFGRALPSNALRIRLYIKTYREYQAHLDSILEELHKTVDNLQGDPVYDRICLLQSLQGVGFLSAVVLIAEMGSFDLFSSPKKLYAYFGLDPGVNDSGKFHGDRVHMSKRGSSLARRILHMIAINNLKVDKAAKAPVNPVIYDYYIRKCASKKKIVAVGAVMHKICNIIFAMLRDNKPFELITPEEHCERYAAEHPESVSIVA

SEQ ID NO: 152384 - protein, 429 aa, unidentified
MKIIYPRVCGIDVHKKFIVAVICISESVEPVYLKKRFSTFHNDLIRFRDWLIQSDCQNVCMESTGKYYIPVYNILESHISNIVVANPKWVRAVKGEKDDDKDAKWIADLFKLGIVKSSFIPQKDFRILRELTRYKYKLVNMRSSEKNRYQNALTSGNCKLDMVFTDVFGKSASNIIDLILSDNPYTDEDILSKVHKNCKASPDMILNSINGTDLTPVQKSRIELVNNHIKQLSSNIQRLDKLIDLMIEPYEDYISFLCQIPGVSRNSAITILSEIGVDMNQFTSTRRLTSWAGLTPSSNQSAGKKKSVRISRAGVYLKPCLVEVAHAAVKDTNHPYYANKFNKISKRRGKKRAYIAIARKILVAAYHMLLTGEIWNPADLAEVETPVEQRIKYVKNNLKSDIKQLLDIGLTVEELTLMIQQNANNIATQ

SEQ ID NO: 152385 - protein, 455 aa, unidentified
MSRQRRSVPKIKPIEDLKIMHPHAAGLDIGAREIWACVPSASTAENVRAFGTFTIDLQALADWLVACGVDTVALESTGVYWIPVFDLLEARGLKVYLVNSWHLKHVPGRKSDVLDCQWIQQLHSLGLLRASFRPDAEMITLRSYLRHRATLIEHRAPHILHMQKALQQMNLQLPLVLSDIMGETGQKIIRAIVAGERDPLKLAQFRSPNCKSSKDEIVKALTGTWLPEHLFALKQSLELVDFYTRQLAECDAELDRQFAAVKPRWESPAELPALPKAKAGSRSKNGPTYNARSELFRITGVDLVAIKGISASLAQTIITEVGTDMSRFPTEKHFCSWRGLSPHHEISGGKILRNRTLPTDNRAGQAFRQAAACVMRSDSVFGAFYRRKKTQLGPMQAWVATAHKIARAVYHLLKYKTPYQDSGAEAYEQKYQERELAHLRKKAAKLGYTLAATEV

SEQ ID NO: 152386 - protein, 400 aa, unidentified
MRSIGMDVHRSFAQVAVLDRGKVTEEFRVELDYDAVVAFGQKLRKDDEVILEATGNTSAIVRLLTPFVAKVVIANPLQVKAIAHARVKTDKVDARILAQLHAAGFLPEVWAADDDTLNLRRLVSERAALVRSVRRVKSRVQAVLHANLVPKYSGHLFGKGGRDWLSTAPLPKAELDLLARHLDELDWLKGKLEKLDGSMARIALDDSRTRKLMTIAGINSVVATAVIAAIGDISRFPTPDRLASYFGLTPRVRQSGDRGAIHGRISKQGNATARTMLIEAAWSAASVPGPLRAFFLRIKDRKGLNVAAVATARKIANLIWQLLTKEAPYRWARPAFVAMKMRKLELRAGAAKAHGPAGPARDYWIKEIRHREMELVAQAEAAYAAMVEAWRDRPPKPQKG

SEQ ID NO: 152387 - protein, 423 aa, unidentified
MRQAKETSADPSPLCANVGRTTKTWNHRRGNTDDGVAKMPQPKFNPSRSLVALDQHKTVIAVVELSLASWLVGGIVPGIARDPLKKLSAPDPEALLRLLYRWRDEAVRAGQAVTRIVVGYEAGRDGFWLARWLHAHGIEAHVMHPTSIAVSREHRRAKTDRLDIGLLKRALLGWLRGEEQHCSMVAIPTTEEEDAKRPHREREQLVGKCTGITNRIKAICIRHGIRGFNPKLRRAAERVSVLHTAEGKPLPPNTLAELGRELEHLRFIKEQIKQIENTRLAQLEQAPREGLNATIRDLSRVRGLGIETADMLASEVFIREYRHQRAIGRYVGLTGAPDESGTRRHEKGLAKAGNARVRRALIQLAWRFRKHQTDCGLVQWYEARVAAGKKPKTMIVALARRLLIALWRFVTLGEVPEGVILVN

SEQ ID NO: 152388 - protein, 416 aa, unidentified
MQQILGISCGLDIHKDIIEACILTANGIGEPDVVRETFTTMRGDLIRLREWLAMQGCSNVAMESTGVYWKPVYEVLEDADGINLYLVNAQHMRNVPGRKSDKADAEWIASLFMCGLLDNSFVPERGIRDLREYTRYYVKLTQERTRLINRIEKLLQTHGFKLSSVLSSIVGVSGLRILEILRERGEVSAASVRSVLARGVKKSAEEIAYAVNGRLAENSRALLGIMLSSLRSYDAQLECVRIEMQYVAEPYWSQIHLLATIPGIDVLSATYIIGEIGVDMSMFIKGASSLCKWAGLSPRDDESAGKIKSNKILKGNPYVKSVLCQCAWATTMTRDTRLSNWYWRNVKRLGQKKTIIAVSRRLLEYAFSMLNTGEIYDTQLDVYDTERLKALKLDSAKKQIYMLERVAPDAAAAAPY

SEQ ID NO: 152389 - protein, 375 aa, unidentified
MDVLYHRCAGLDVHAETIVVCTLLGEEEHIQKEIETFPTFTKDLFRLLKWLEDRGVTHIAMESTGVYWKPVFNILEDYFDITLANARRIKNVPGRKTDVSDAEWIAKLLRYGLIEKSFVPPENIRELRDLTRLRKKWIGQLTAEKNRIQKVLECSNIKLSSVISDVFGVSGRKLLERLMKQGYIEETEVDACIHRSMKRKRQQIQDSLFGTLTNHQLFMIRQSWKHIESLESLLRDIEERIDQLLQVYKQEMELLVTIPGVKKETAAVIIAEIGVDMGQFPTSQHLVSWAGVAPGNHKSAGKRKSTRTTKGNPHIKSALCEAAWALSRCRNQRLAAKYWSLAARRGKKKALVAIAHRMLTIIYCIISRKEPFREQ

SEQ ID NO: 152390 - protein, 346 aa, unidentified
MKIVTIGIDLAKEVFAVHGVDASGHAVLRRQIKRSDMPKFFANLEPCLIGMEACGSAHHWARKLESFGHTVKLMAPQFVKPYVKTNKNDMADAEAICEAVGRPNMRFVANKTVEQQAILAVHRARQGFVKARTAQANKIRGLLSEFGLVLPQGIHVITKRVPEILEDGENGLPSAFRQLIERLTNNLKEMDRQVGELESEILLWHQNNEASKKLATIPGLGPITASAIVATVGNAKEFENGRQLAAWLGLVPKQHSSGGKQVLLGISKRGDSYLRTLLIHGARAVIRFAKTKAEPDVWINKLLDRRNKNVAAVALANKNARIVWALLTKNTVLKTGYSPDPVAAGA

SEQ ID NO: 152391 - protein, 411 aa, unidentified
MKLFVGIDVSSKDLQVAIMSSQTAQELLFSGSVLNDLNGISELKQKILTLNQQNHYEKIVIGMESTSIYSFHPAMFFQLDDDLNQFNLETVVLNPTEVKRFKNIFEENKNDTIDAFYIADFLRLERYSVGIVKEEQYIALQRLTRSRFQLAANLTESKQHFIENLYYKLNKLVVDKLDTSIFGATMMNLLSDEFTNDDLNAIPVEDLAAYLNKQGHGRFADPQKLAKAIKKAVRGSYRLGKVMQNSVDIVLSIYTSEIKTFTKLIKQLDDEITKMMTVIPEAAILQSIPGIGPVYSAGIIAEIGQIDRFDNQAKLAKYAGLTWKQYQSGNFTGQVTRMTHSGDVYLRYYLIEATNSIIRYDETFNRYFTKKQHEVARTPRKRALALTARKLVRVIDKLLRDHQIYRKEEMV

SEQ ID NO: 152392 - protein, 418 aa, unidentified
MKSIKAEKIKTINEKTLVVALDVGKKVHYGYFRTPKNQDVKPFPFYNTGQSFNKFWQKLCRFKEKHMLDEVVIGFESTGPYAEPIANYLRKKPVKLVQVNPMHTKRIKELTGNSPNKTDKKDPRVIADVISLGHSLTVVVPEGAAAQLRRLTHARERAMERRTAMNNQLQDLVFVIFPELGDIIKPSTKTGMYLIKNYPDPEGVVSIGNETLCNIVRKISRGKFGIDRAEKLYNAAKESVGITEGKESILLETSHLVSNIEAENRYIESLEEQMVVYLNQIPYSHSILSIKGIGNITVAGLIGEVGDFRKFKTISEVMKLAGLDLFEVSSGKHKGKHRISKRGRALMRKLLFFAAINAVKSHGIMHARYQKMLNNGTPKIKALIAVSRKLLRIIFALARDNAQYEENYNRKHDFKLAA

SEQ ID NO: 152393 - protein, 431 aa, unidentified
MGTVSDRETIFARCAFLDVHKKTVEATVRLLQGQQVQAETRRWGTMTGQIQALAEWLETQGVTHVGMESTGVFWKPIYNILETRFTVVLTNPGHMKQVPGRKSDVRDSQWGAYLLQYGLLRGSFIPARWQRELRDFTRYRAQLEAERTRVANRLHKHLEDANIKLGSVATDILGMSGRAMIKALMEGEQDAAQLADMAQGKLRTKLPELQLALEGKVTPHHRLMLRLLWKELEAVEELMAEVDRQVQEVTRPYTPQIEQMDPVPGVDRRVAEVVLAEVGPNVDPFPSDQHLSSWAGMCPGNEESAGKRRTGRTTKGNRWLRAALVQAAWAASHTKRSYLGAQYRRLAGRRGKKRALVAVGHSILVILYHLLKDDRPYSDLGRDFFDRMNHDRLIRYYSRRLAELGQKVTVEPLPEVTPGEGMVNVPSPCQS

SEQ ID NO: 152394 - protein, 325 aa, unidentified
MAILFADGLVETASRVFNEFKTTVSGYKQLVKWVEQNSYGIDSSLWLFCGENTGDYSKGLCNFLYGKGYDMWLENAKSIKDASGLRRVKSDRADASMIAEYAMRNYDKAIMYEPLSESLAQLRELFLYRQMVVRHRCSFQVRRGEKRLTMEKSSVKTMISQSGRHIVSELNKEIEKIDKRIAELIKSDEELIEVFNIVTSVPGIGTQNAVCLMVYTDNFRRFNYDSRKIACYYGIAPFGKDSGTSVHSDPRVHYMANRQIKAMLTQAALAAVNFNPIMARYYMRLVERGKKKQVALNNVKNKLIHLVTAMVRNRQLFSPEYKISA

SEQ ID NO: 152395 - protein, 414 aa, unidentified
MPETAYVLYVGIDWGTATHQVAVLDAQRVPLGERAIAHEAVALQTLTEWLTELAGGDPARVAVALEAPRGAVVDTLLERGFHVFALNPKQLDRFRDRYTVAGAKDDRRDAFVLAAALATDQPAFRALAPEDPLIIELREWSRVEDELREEWGRLASRLREQLHRFYPQGLALCPAADEAWFWALLRLAPTPAAAQRLRRAAVVTLLREHRIRRLTADPVLAALQSPPLRVAPGTVKAASGHVALLISRLELVNRQRRDCARRIERLLDALATTGEHQGHRDVTILRSLPGVGRVVAATMLAEASRLLAARDYHALRTQAGVAPVTRQSGKRLLVGMRYACNPRLRNALYYWGFISVRHDPHSRQHYQFLRGRGHSHGRALRGVVDRLLTVLMAMLSAQTTYDPARRPPILAFAP

SEQ ID NO: 152396 - protein, 482 aa, unidentified
MKKRNIYQNRSQELLGLFEEAGNSAKVMCIPMDYAKKDHVVMFCNGYGDILRKPFSVKNSPDGVKYLVDQVTRSCRQRGIKKDHVFFGGEDANSYSENFVSTLRSKGWIVAGVNAHDAKKQRANLQASTDQLDLMGIATMLLNCRANCCSAQSGIYRNLRTLVRHRRKLVVMSTEVKNRIHGVVDRLFPGFLNEGKTGIVPFTSSSLYLMEDRFSPKQIRRRKREKLIEILKRFGTSKAEETADRLQQYASKVLYTSADYVDTLQLSLAQHVKHLRCLHQSVEQLEREIAVNLAQTQGAFLTSVRGIGIVLAAGVTAEIGDPNEQKPLNNLVSYSGIIPRVKQTGGADGKTYTGKVAKRCNRILKDYVVKSALHIGLHGPDDLMADYKRRDTSGQHADFSMGRRYLRMAMSLMQASQIYLPHRLRKAEAKMEERAGYYLTTWPYLRCKWKKPGALEAAFAKDRPLGQWRQIVQELYDIRLKL

SEQ ID NO: 152397 - protein, 350 aa, unidentified
MIIIGVDFHPEFQQIASVDSDTGELQEKRLGHREDAEKFYRELVTQRVKVRVGMEASGHARWFERLLAELQFELWIGDAAEIRTKRVRKQKTDRQDAQLILRLLLEDRFPRIWVPNWENRDLRQLLWHRHRMVQARTRIMNQLQAVALNEGLRCKKRLWRDKGREQLESFPLAPWASRRRRDLLELMDRLNPTIAELTQAIEQEVEKCPQAQRLMTHPGVGALTALAFVLIIGNAERFGSGKQIASYLGLVPLEESSGNRRRLGHITKQGSSMLRFLLVEAAQVTVRSVPEWRSKYLHLMMRRGRKTAKVAMARRLAVRLYWMMRQEWDYQQWSKFGSHAGQPGHRAGVQ

SEQ ID NO: 152398 - protein, 330 aa, unidentified
MHFYLGIDVSKAKLDCALRLSNGKYRNKVIDNNPVGFKDLQTWLHKHKVQPVNAIHVCMEATNIYWEAIALHLANLDMKVSVVNPAQIKAFGASRLVRTKTDKVDAQLIAEFAAERDPKAWEAPSKSEQQLRALVLRRDALQAMRTQESNRLGVAQEAVRSGIEEHLLWLEEEIKAINKKIRDHINKDPDLKAKQDLLEGIPGIGKYSSASLLSFYADTKRFDNARKAVAFAGLDPRQHESGSSVRGKAKLSKVGHSFIRKAMYMPAVVALYKTAWGKAFCARLKTSGKCNMVIIGAMMRKLIHVVFGVLKSGTPFDVSKHMKVSEKALA

SEQ ID NO: 152399 - protein, 337 aa, unidentified
MIAVGVDTHKHEHLARALDGLGQLVGGVTVKADPAGYLELADWLSALGEDLVVGVEGTGTYGAGLCEFLLASGIRVVEVERPRREDRRRGKSDAIDALLAARKVLAGDGLSTPRAGGTRQALSALLVAYRSCVAERTRVLNQLQALHTSAPVALRERIGPGNGTKLVARLHRVRARAGAPEAEQLIFSVLGDLGSRARQLEVQARAYKRELSRLIGSLDPTLLDEPGIGPVSAAKLIVCDPARLKGEAAFARCNGTAPKPASSGQTIRHRLSRGGDRQANNALHTIALNRSIHDERTRVYLKRRTSEGKTSREAMRALKRHLSRSLYKRLVTVPLTS

SEQ ID NO: 152400 - protein, 367 aa, unidentified
MNSITYIGLDVHTTNYTICAYNIENDKTFAETTINPDIRELDKYLKKIQELQGGCKLVCGYEAGCLGYSLYQQLTAKGYECIILAPTTMPKTAKEIKTDKRDARKIAKCLAFGTYSKVFVPDDDDVAVKEYIRMRDDAKIMLKQTKQQIIAFCTRHNMRYDGKSNWTQRHLHWLSTLDLGSVMLNETLAEYLITFVQLTEKIERFDKRIEEIAAQVRYSENAKKLQCFKGIKTYIALSFLTEIGDFKRFPTAEQFASFLGLVPGEHSSGEGQYRLSITKAGNTHLRQLLVEAANCYNRGTTGKKSKKITQRQQGNTPEVVAYADRANDRLRRKYIKLTLKRNSNIAKTAVARELACFIWGMMNGRIS

SEQ ID NO: 152401 - protein, 384 aa, unidentified
MKRVSGLDVHKDSVFMCILLESGEKIEGKYGTLSPELNKLRETLLLHKVEEVCMESTGVYWIPVWNVLVDFFELKLVNPYFIKQLPGRKTDVKDAEWIATVLQKELVRGSYVPCGIIQEMRQYERGQADLRKRIVYLEQRIDMQLQRCNIRLSNYVTDIGGVSMRKVVKAIIQGEIRPEVLSVLVHGRITNKHGQQTITDSLSGIINSVDVFMLKQYMDQLELLEKQERECLEALSSISDRYFKNEIALLMTIPGVQKQSAMTILAELGADLKMFATAAALVGWAGLRPRNEESAGKIKSRKILHGNKFLRIILVQCAWAASRTKKGRLGDKYRQLASRMKAQKALVAIARKLLVIIWNVLSKKEEFDPNRGMSSRTRIKTSLS

SEQ ID NO: 152402 - protein, 345 aa, unidentified
MQITTVSVDLAKAVFQLHAIDQQGKTALRKQLKREQVVPFFANLEPCLVGMEACGGAHYWARKLQALGHTVKLMAPQFVKPYVKSNKNDVADAEAICEAVTRPNMRFVPIKTVEQQAILAVHRARQGFVKARTAQANSIRGLLGEFGVVLPQGIRHIVERLPDILEDHENALPGSLRQLMQRLVEHFKELDRQVVELEREIQQWHRSNEDSCRLAEIPGVGPLTATALVASVGDAKNFSNGRQMAAWLGLVPRQHSSGGKPTLLGISKRGDGYLRTLLIHGSRSMVRVVESKTDPSADWLKGLLARRHTNVAVVAQANKTARIAWALLAHGGKFRPDYTPDVTVA

SEQ ID NO: 152403 - protein, 424 aa, unidentified
MKPEPATEFAAFIGIDWADAKHDICLQAASTETREFAVLPHRPDAIEQWARSLKERFQGRPVAVCLELSKGPIVYALQKYDFLVLFPVNPATLAKYREAFTPSHAKDDPTDAEYQLELLVKHRDKLKALRPQSAPMRTLESLVEQRRCLVDDSKRITNRLTSALKQYYPQAVQWFEEKDTALFCDFLSRWPTFKQVKQARRATLEGFFHDHHVRSAKLLEERLSAIKNATSLTEDIAVITPHRLLAQALVDQLRVTLQAIERFDAEISAISQTLPDYPLFRALPGAGAALAPRLLTAFGEQREHYESAAGVQKYTGIAPVTERSGKQRWVHWRLQCSTFLRQTFVEWAAETITRSFWAGAYYRQQRDKGCTHQAAVRALAFKWIRILYRCWQNRTPYDESKYLNALKRRGSPLLNSIAEAAKNT

SEQ ID NO: 152404 - protein, 402 aa, unidentified
MQQLEQVVIGVDPHKLSATIEVVDGHERMLGSGRFTTDRAGYSAMRKYVKAWPGRVWAVEGANGVGRPLAQRLLESGEQVVDVPAKLAARVRLFDTGHNRKTDAHDAHSIAMVAVRTRGLRALRVDGQLEALRMLVDRREALTRRRIQTVDRLQALLAELLPGQAKKDISTGQAKRMLATVRPRDVAGKTRRRIAAEELAELVAVEAKMKKATAELKAIVLARGSRLMDLCGVGPVVAARVLADVGDVARFADRNRFASWTGTAPLDASSGEQNRHRLSRAGNRRMNHMIHIAAISQLRVDSEGRAYYRRKRSEGKKPLEAIRCLKRRISDAIYRQLVADDQRAGGTGPGGHCGATRTSSAAGFHPHTDTSDQPLPGPAQPTLREPSSTRKNNHRRALQTTR

SEQ ID NO: 152405 - protein, 405 aa, unidentified
MIMNKTPQIYVSVDIGCRQHSVAIDLSNGDVLDEFAILHRPEGFKQFFERIEHHRQHHGGAVAVAMEGYNGYARPLDSLVKVRGYQLYNINNLKLARFKEIFPAAAKNDRIDACKGLELFQLRDHLPLAKDVLQEIMPAPRENDMLKRLSRRRRALVDEKSRLQSRLQGDLHAVCPGLLDITKDADNLWFLRFITSVDELTKLSRLRLSTLLKIPGVGRKYVSDISAWQSHASLSHEVEWVGEMIIEDARRILALKNDIQALELRCKTLMQESQAAQLIDSIPGFAVICASELAGEIGTIDRFASERSLALYLGMANLDNSSGKFRGSKAPKHVNKRAKGAMMSAVDKHRKCVPESQRYYEKKRIEGKSHNQAIRALGRQLCRIIFRMLKQNRAYEMRKKINENT

SEQ ID NO: 152406 - protein, 350 aa, unidentified
MRRPKEKLIAGLDLHSNNIMIGVINQDGKRVAHKKVGCDLAEVVAFLKPMKSQLQSMAVESTFNWYWLVDGLRAQGYSIDLANPAKIEQYSGLKHADDKDDAFHLAELQRLNILPKAHVYDPQLRPVRDLLRRRTFLVQQRTALLLSFKSLHVRTTGRPVDLGDAKKMEPAEAAKLYEHPANQLAARLEAEQIQSLAKSVSRLEKAVLDCAREIPLYDKLLTIPGIGKILGMTITMEVGDIKRFKTDGQFASYCRMVDATRLSNGKLKGENNQKCGNAYLSWAFVEAANFARRYDENCRRWHDRKAAKTSKTLATKALGCKLAKAAWHVMAGPGGYDEKRMFPELATRKK

SEQ ID NO: 152407 - protein, 353 aa, unidentified
MTSDKYVGLDVHKATIVAAVHDKAGKCLMTSIIETKAETIRAFIKGLSGTVHVTFEEGTHATWLFDLIKPLVYEVVVCNPRHNMLLQSGNKSDKIDANKLAELLRTGMLKKVYHESHGTQSLKQLAQCYETLVSDNIRVMNRIKALYRGRGIDCSGTGVYSESQRKDWLAKLKEPGTNSRAQLLYTQLESIKKLRRQACKELLQESRRQPASKLLTPVPGLGPVRVALIVATVVTPHRFRTKRQLWTYVGLAVVTKSSAEYELVGGQVRRRIKQTSTRGLNRNYNRRLKKVFKSAALDATRTEPFASYYRDLIQKGTSPEIARVNIARKLAAIVLALWKRGEVYDQQRLKKSA

SEQ ID NO: 152408 - protein, 405 aa, unidentified
MRCEEERVSKRQVWAGIDAGKGHHWAAVVNETGATLWSKKIENDESAILTALGEILELADEVHWAVDISGTSSALLLALLAAHGQQAVYVPGRTVNRMAGAYRGEAKTDARDAYVIAETARHRRDFAAIDVPAQLAADLALLTAHRSDLVADRVRMINRLRDVLTGIFPALERAFDYSAHKGALVLLTGHQTPAAIRRRGRARLTAWLANRGVRGADAVAATALDAAQAQQTALPGEDIAAQIVADLAAQILALDDRLKRIDKQIRETFQSHPQAEIIESLPGMGPILGAEFVVAAGDLTAYADAGHLASAAGLVPVPRDSGRRTGNLHRPKRYSRRLRRVFYMSAQTSIIREGPNRDFYLKKRSEGCKHVQAIIALARRRASVLWVLLRDNRVFTPAPPVTQAA

SEQ ID NO: 152409 - protein, 411 aa, unidentified
MENVFPCCAGLDIHQKSVEACVRRLEPTGQLHHQTRHWGTMTRDLLAMADWMAAQGVTHVAMESTGVYWKPIYNILESRFTVLLVNARHLKQVPGHKSDVRDCQWIAQLLQHGLLKGSFIPPRTQRELRDLTRHRTQLVEEKTRTVNRLHKVLEDGNIKLASVATDILGVSGRAMLEALMEGQEDPVQLADLAQRQLRGKIPELEKALEGHLTEHHRFLLRLLWKELAQQEELIAELDRKIEEHTRPFANEIERLDAVPGVDRRVAEVVLAEVGSDVKPFPTHSHVASWAGICPGNEESAGKRRRQRITPGNRWLKRSLVQAAWAASHTKNTYLASQYRRLAGRRGKKRALVAVGHSMLVIFYHMLKERTTYKNLGGDFFDRLEPERLTRYYVKRLKDLGHKVTLEPGVAA

SEQ ID NO: 152410 - protein, 417 aa, unidentified
MFKIFRKNCCGLDVHKTWIYACIGITDTNGLTEYKQARFSSFSKGLRELSDWLAKYSCTEVCMESSGKYWIPVFNILEKTCFVTLAHPKYTKPQKGNKTDRKDAKWICDLFMCDMIKPSFIPSPEIRQLRDLMRYRFKLTNMLSGEKNRAQNCLTVSNLKLDDVFSDVFGKSSRAITNYMLDHPGESFDVAPFVDGRCKTPIDEIQDAVDGAISHEQAVKLRQCLSHIDQLEAHKREIEQEILLIVEPFSAVLDLLYTLPGLDSNPMTAIAILSEIGPDMSVFPSSKNLVSWAGCCPRNDQSAGKVKSTRISRAGCYLKPLLVQIANALLKSKKHPEFKERYHRIKSHRGHKKAIIAVCKMLLTAIWNVLSKLEPYNPEGFLEHRPMNESKVLTTSQALELFRKRGYTIIEDSTIIS

SEQ ID NO: 152411 - protein, 342 aa, unidentified
MSRYFGVDLHRNCLTACMRLENGRQYMKTLKLEALPKFVSKLRVDDEIAVEVTGNTRLFYDAVSSYVKRVVVVNPSQFHVIRKSVKKTDAHDARALALFLSKDMLPEVRMKDREHAEMASLVQTRDTLVKSRTALKNKVNNLLSARGINLSKESLASEKGLREVLGMYFGSTVDVELQVLVDQIRSLNQSIDKIEKTITEQGPKLPGYENLKSIKGIGDVGASVLLSVIGDVNDFADEGKLAAYFGIVPRISNSNETEHSGRITKRGSKLGRTVLIQCALIAKRYSAYLQRYYERIKSRRGVGKAIVALARKFLGVIYRTLRDDLIWEDFPNGVVRDPEAST

SEQ ID NO: 152412 - protein, 335 aa, unidentified
MSLYCGIDLHSNNHVVVVIDGKAKRLVERRVPNDLGETLSVLEPFREDVLAVAVESTYNWYWLVDGLADHGYSTRLVNTAAVQQYSGLKYSGDRHDAFWLAHLMRLGILPTGYICPREIREVRDLLRKRLGLVRERARNLTSVQNILARELGHRVATAQVRNILHADEQFRPAVRTAIAANLAVIETLDTVIAGIQAQVLEVIKPTPRHQQLKTLCGVGDVLAPTIALETGEIERFKSVGNYSSYCRVVESRRESNERKKGEGNKKCGNRYLAWAFSEAAHFAVRYNDRARRFFDRKAARRNRMVAIRAVAHKLARAAYFVQRDKVPFDAMKLFG

SEQ ID NO: 152413 - protein, 374 aa, unidentified
MIPSYFLGLDVAKQKVRAALRGPGERFLCERALPVTAAGLHALRALLGHHVPQPERVLVVLEATGVLHLHWAAALTRAGYPVLVLNPLMARRLHTVKNSIRDNKTDPVDARALCAVGAAHGEELRAKYRFTPHPEQLALQRLHTVRKALRSALTNLKKTYGSLLELSFPELDRLLEIDGAGIRALLAEAPTPQAIARKRLGTLQKDWRLRGKAAELHALAADSMADPDLAEANAPALQAILQSLAAVEAQLHAVDQQIDRLTTQSIDPKHQELIQTIPGFGPIIGARVLAYLPAELLSSGRRRTAAIRLQAFMGNDPRLQQSGQWTGHVKMSKRGVEPLRTAFFQAAFNASQHDPELKTFYQRKRAAGKSTKSP

SEQ ID NO: 152414 - protein, 323 aa, unidentified
MQKQFYGIDISKDKLQIATKSVDGQWQDSQITNKIDSIESWLLSISSENIHLVYEYTGTYTHRLTYCCELLSIHFTIITSKQSKGFALSEKMSSKTDKLDARMLYLYGQQKQPLTTAIVDESIHQKRQTYQYFITLKSEKQAFNNRLHALSFDPKAAPKVVESIEKMIQTLQDEIVLLQSQIYNIDEDENQRLQALITSVVGIGQASAQAIIVATNGLKEFHSSKAVAKFLGVCPSDNDSGTTVKGSRAIVKSGNTFVRTTLYMAAWSAKTYNNACKDIYTRLRAKGKPHKVAMMAVVHKLITQIFAVVKSNTLFDNNLALAK

SEQ ID NO: 152415 - protein, 345 aa, unidentified
MKIVGCDLHTRYQQIAMLDTETGELVERRLEHESGEARAFYAALSSPVRVGIEATGHTRWFERLLAELGHELWIGDAAEIRASMVRRQKTDARDAAHVLDLLLSERFPRIWRPTMAERDLRQLVWHRQKLVWMRNAIGNQLHALAMGEGVCRKKKLFTKKGRVELESLALGPWASHRRQELLTILDQLDTSLQELDQAVAEQAGQNQAAVLLMTHPGVGPVTSLAFMLTIGPVERFARSKQVVSYLGLNPREHSSGGRQRLGAISKQGNPMMRSLLVEAGHTAARLDTELRQDYQRLKLRRGSGVAKVAMARKLAVRMYWMLRRQAGYAQLVRMQGSPWATLVKE

SEQ ID NO: 152416 - protein, 399 aa, unidentified
MLAVGIDISKSKSVAAILNQDGSMHTSPFEFHHTQPELDAFIKYILNSKQSATILMENTGHYHYPVLKAFREAGLPVCMVNAYQIKKFGDMDLRKAKTDKKDAVRIARYALEKSYSLVPYTSMEQKYEDLKFLARQYNQRMLTLKTNKVFLLNLLDETMPGITNILPLTTRTPETSLSVLFINRFKSYDRIKKMGKSRFLDAFEKIARKSRNRQTKTYGLAIYEAALRNITTRGENEYTLAAQDQCLELVCESQKAADSIILKMKTLAETLPEYAVLRSMAGVGNRLGPLILAEIGDIRRFHSGKALNAYAGNDAPPYQSGTFESHNRHISKRGNAALRKYCFEVMQALKLTRPQNDPVYLFLLKKEQEGKPYNVAKMAGVNKFLRIYYARAMETLKQQ

SEQ ID NO: 152417 - protein, 401 aa, unidentified
MWRCGSTGLPSWTVTVKVGPSFTIAASPDGVTTLLRTLAARDATTAQTLIGLEASGHLWENLEAALGGAGYRVLVLNPLQTRRYRDVVRRKAKTDDIDAHVIAGLLRSGAAQASYVPDEQIQSLRELARLRARLLADRQDYQRQLIAQLDVVLPEHRVVLGDLLTARARGILAQFPTAQHLAHASPRAIRRAAEDAGARGFSLDDATGVRDHARRSLYSGKAAVARAHVVRTLVSQLERLTSAMDEVDHAATTLLPPSEPGTSPSDAELLQTIPGIGPQTAATLLGEFGALTRFTDARALVAYVGFYPVISESGDRAAPPRLSRVGPRIARHSLYLAAVNAVRHSREWRTIYLRKKAQGKTAKQALVVVAVKLLHAVYAMLKHREPYNPSRLLVAPATIGT

SEQ ID NO: 152418 - protein, 366 aa, unidentified
MKKISIEQTFRDDILKEQKLTIGMDLGDHWSCYCVLDEAGKIILEQKVAMTPEAMKQTFAKIPPSLIALETGTHSPWVSRVLTELGYKVIVAHAQKVQLITKSNRKDDRHDARTLARLARIDPELLGPVRHRSAQAQIHLTVIRARAELVSARTALVNAARGLVKSYGQRLPKCGTQQVSRELGAGLHAELREVLEPLLQEVESLNERIQEYEVRMEKIAKESYPHVELLKQVKGVGTQIALTYVLTLDDPQRFPKSREVGCFLGLCPGRRDSGESQPQMRISKEGDRYLRTMLVQGAHYILGPFGEDSDLRRWGLKLAARGGKNAKKRAVVAVARKLAVLLHRLWVSGEVYEPLRNSQKAMRTAA

SEQ ID NO: 152419 - protein, 373 aa, unidentified
MPKYSTAFGMDVHLRSTTVCALDADTGEAVTRRFRGNPWGEVAEWMSGFPGPSLAAYESGYLGFAPQRELSGLGVDCVVAAVSRVPRSAADLSSKNDRNDAARMAKAILAHDISPVWVPSPEVEGIRDLAGAYDGATARLATAKQRLLAFLARRGFVYGGTTPAGNPRKYWTYDFLRWLDKVRPEDDGGVRTLAALRNEVEAAAEARADLLSEYRAAVDASPIAAEVAALQSIKGCAFALAAAFSAEVGDFTRFRSGRQVTAYFGLAPSQRSSGDSVRLGGISGAGNALVRKLAVEGSWCYAAARHQPKLMPRDTGVPLEIRMHGRKGSERLLRRREEMLARGMPQAKANAATAAELVRWLWALGMMCREGAE

SEQ ID NO: 152420 - protein, 368 aa, unidentified
MKNVYHVGLDVHKETVEISVYMNNEQQPMLEKRLNNDPARIIQELKKLQHSGRVTVCYEAGCMGFTLHRALSETGIVCQVLSPGHVPRKPGDKIKTDKRDARNLAKYLRTGEAEGIYIPSVEDEATRDYIRARDDVKLDLKRTKQQLLKFLLRLGHRYKTTSYWTGKHVRWMKSIEFTQPMHTETFHTYFARVRELEERLVLMDVRIVEIAQEERYRDVVNILRCFKGVDYLIALAFVCEVGNFRRFSNAPSFMAYLGLIPREHSSGEKRRQGGITKSGNAHLRRLLVEAGWHYRYASPPSRRLTARRIGQSTEVVAYADRALRRLQKKFTKMLFKGKTKNAAVIAVSRELAGFIWGVMNNKISVPVA

SEQ ID NO: 152421 - protein, 459 aa, unidentified
MGMTLGIDLACRAAHVASLAGPDGALVWRGRSFFTRPADLEKLWRDVGCVAAELTVVMEPTRNAWIPVAAWFRRRGAKVVLVPTTQSADLRAYYSKHTKNDRLDSAILARLPLLHPEGLREHVGDGPADPLRRVVKQRSSIAKRRSAIFHRLDAQLELLGPAWYDALGTDYGKATLQFLAHYADPATVIRLGQARLARFLQRYSHGHWREGKAAELIAAAKQSLQLWDTDGMDFAELAADIAVEAEQAMMLTAQLADLDERIANLYAEADPAGIIRSAPGVGPVIAGIIAGRLGDPHRFTSLAAVRSYSGLVPKINQSGKAEHVGGLTKAGDPLLREAMWMAAEQARKLDPQLAAKYKRLMDSERHHGTAVCHIATTLLTRIATSWRNNEPYQIRDLNGTPLTQDEGKRIVQEQCQVKKNPKKQYKRATNHKAGREPQESPSAPTSRPATTKPTSPRAA

SEQ ID NO: 152422 - protein, 354 aa, unidentified
MIIIGVDFHPEFQQIASVDTDTGEFQEKRLTHREDAETFYRGLAAAGRKVRVGMEASGHARWFERLVAELQFELWIGDAAEIRTKRVRKQKTDRQDAQLILRLLLEDRFPQIWVPNWENRDLRQLLWHRHRMVQARTRIMNQLQAVALNEGLRCKKRLWRERGRQQLESFQLAPWANRRRRDLLELMDRLNPTITELTQAIEQEVEKYPEAQRLRTHPGVGALTALAFVLIIGKAERFGCGKQVASYLGLVPLEDSSGNRRRLGHITKQGNSLLRFLLVEAAQVTVRSDQEWRSKFFHLALRRGRKIAKVAMARRLAVRLYWMWRKGWNYEQMKKIGSHAGQPGHRHGVQQNTE

SEQ ID NO: 152423 - protein, 411 aa, unidentified
MRVMIERCAGLDVHQASVVACLLTCASGRVSKQVRSFGTMSRDLEELRAWLSDAGVTQVGMESTGIYWRPVYAVLEEEFEVIVGNAWHMRNVPGRKTDLKDAEWIAELVSHGLIRPSFVPSKPLRELRELLRYRRKLVESQAAERNRLLKLLETANIKLASVATDVFGVSGRAILRALIEGATSAEAMADLARRRLRRKRDQLILALEARTEQHQRFLLAMQLRRLESTEQDIDALDQYLTEKLLPYAEELALLKTIPGVDWLTAANLIAEIGIDMSVFLSAQHLAAWAGVCPGSHQTGGKQKAVRARKGNMHLRTTLFAAASSAARTKGTYLKDKYYRLKARRGAMRAMLAIAHKMLIAAYHMLATRVPYQELGAAYLDRIDQSRTVANLKRRIERLGYSVTIQPITAAA

SEQ ID NO: 152424 - protein, 354 aa, unidentified
MQRYIGLDVHAASTTMAVVGPSGKRLGQEVSETTAQALIERLKAVAGERYVCMEEGTQSSWLYELLSPHAAEVVVVMRSERTRGPKQNKNDEHDAYLLAEMLRTGQAQPRVFKEQGSFQRLRELARVYTMVMRDVVRVQNRIKALYRSRGVSTSGKSVYSADHREAWVAKLPEMARTAASTLHTQYEVLEAVRRQAEKDLVHEAHQHPAARLLESCPGLGPIRVAQLLPIVVTPWRFRTKRQFWSYCGLGIVMRSSSDWVQRTDGGWTRAQVQQTRGLSRRHNTTLKGIFKGAATTVVTQQHADPLHQDYQRIVTAGTKPNLAKLTLARKIAATALAMWKQQEVYAPNKHRSQD

SEQ ID NO: 152425 - protein, 329 aa, unidentified
MDRTADRTATVTFVGIDVAKATLDVALRPGARAFAVGNDDAGVRDLVARLRAAAPALVVLEATGGYELGAVAALAAAGLPVVVANPRQVRDFARSTGQLAKTDRIDAGVLALFAERVRPAPRPLADEAAQALDALLARRRQLLEMRTAEHNRLALAIGAVRRPVKKSLRAHIAYLERELRITDTELGRMVRGSPAWRERDDLLQSAPGVGPVLSMTLLADLPELGTLTRKQIAKLAGVAPLNRDSGTLRGRRSVHGGRASVRAVLYMAALAAARHNAVIRAFYVRLLAAGKPRKVALVACMRKLLTILNAMAKAHARWTAPEPRIEHSC

SEQ ID NO: 152426 - protein, 373 aa, unidentified
MPRYSTAFGMDVHLRSTTVCALDAETGEAVTRRFRGNPWGEVAEWMSGFPGPSLAAYESGYLGFAPQRELSGLGVDCVVAAVSKVPRSAADLSSKNDRNDAARMAKAILSHDISPVWVPSPEIEGLRDLAGAHDAATARLAAAKQRLLAFLARRGYAYGGTTPAGNPRRYWTYDFLRWLDKVRPADDGGIRALAALRNEVEAAAETRDDLLAEYRAAVAAGPLSAEVEALQSIKGCGFALAAAFASEVGDFSRFRSGRQVTAYFGLAPKQRSSADSVRLGGISGAGNALVRRLAVEGSWSYVQASHQPKLMPKGSGVPLGVRMHGRKGSERLLRRREEMLARGMPQAKANAATAAELVRWLWALGAMCREATE

SEQ ID NO: 152427 - protein, 517 aa, unidentified
MVCKVIHQRGRRSGRGARIPKVVNNFAAGYSGAGEQLATAETRLFEPSPARADRRLPTPPPAPGPSAERTPPLEGSNIRSRPSQVPAPLRAARIMNTKWNEQPYFAALDWAKDHHDVIVVDRVGTIIADFQFAHTAPGWEEFNGHMQPFGKCPVTLETSVGMAADQLLQRGYTLYPINPLAAKEYRRRKAPSGSKTDRHDAWCLTDALRTDGQAWRPLRPQDEATATLRLLCRDEIGLIETRTALVNQLQATLGDYYPLALDSFDDWASPGSWAFVRTFPTAADLAKAGQRKWQNFLHQHKLWRPETAPQRLERWAQGQQLNASAATVNAKSLLALSLVKVLEALQRQIQEYRSRITQAFKQHPDHDLFGSLPGAKQTLGPRLLSLIGARRDIFPDADSLMCQAGVSPVAYQSGKLCKARLRYACDHFLRHTVHLWVDQSRKKCEWAQTYYQAKRDKGHDHASALRCLGKRWLKVLWRMWQDHTPYDEAKHLGSLQQHGSFVWQALQDAVTPQPACE

SEQ ID NO: 152428 - protein, 394 aa, unidentified
MKLVGIDVGKNSHHFCVMDKETGEFNVTPSSFSNNKEGFDFLINSLKPYSKKSILLGMEDTGHYHVALLKFLLSNGYTVALINPKTTDLTRKMEGGITKNDKLDTITICDVLDTPERKKQYRITKVDRFDLYEQRQLTRHHHNLKEELNIYCNRLQKSIDLVFPEFNTLFGSKYGVVYMNLLKTFGSAEAIASTDIRTIRKCFEIKGRGGRISLTAEKLKECAKNSIGISSEVETIQIKHLVSQITLIKEQIAEIDKKIEEFSIKNNSPILSIPGISHFSGTSILAELGDIGNYSKPSRIIKFAGVAPYHYESSQYNAQHTAITKKGSKYLRKTLYQVILPVINNNPVFKKYYRLKISQGKGHRCAQGHCIRKLLRVIYHLLETGQSFDPALLR

SEQ ID NO: 152429 - protein, 350 aa, unidentified
MLIIGCDYHPGFQQIACVDTDSGELSERRLAHREQAEQFYRELKQRDGTVRVGMEASGHARWFERLLAELQFELWIGDAAEIRTKRVRKQKTDRQDAQLLLRLMMEDRFPRIWVPDAANRDMRQLLWHRHRLVQMRTRVMNQLHVVALNEGLRRKKALWRPAGRNELESLKLAPWASRRRQDLLDLLDQLTPKIQDLTRELEEEVEKRPVARRLATHPGVGPLTALAYELVIGRPERFHCGKQIASYVGLVPTEESSGDRRRLGHISKQGNALLRFLLVEAAQVTVRSLPEWRGKFFHLALRRGRKIAKVAMARKLAVHLYWMWRQGLDYGQFEKLGSHAGEPGNRHGEQ

SEQ ID NO: 152430 - protein, 473 aa, unidentified
MKEHKKTKAKTKSQATKALREHEPNAGGIDLGAEEIWVAVPAERDPNPVRRFEAFTQDLKAIVQWLIGCGVHSVAMEATGLYWIPLYQLLEDAGLKVCLVNARHVKNVPGRKSDVRDCPWLQYLHSVGLLLGWFRPAQAICATRSIYRYRQNLISMATEHVQHMQGALDQMNIKLHYVIDDLTGFTGQAIIEAILSGHRDPVQLAKLRDKRIQASEEKIVKSLQGDWRKEHLFVLAKAWAQYQEVQKQIQDCDRELLQYTQQLEACTTVVKPVKVMCLRPELVGCEPIAKLPTKKARRKTSKNQPQGPWHQELERFFGTDLTLIPGISVLSGLTLMTELGNDLRAFKTQHHFASWLCLCPDNETSASKVLRRRTRRSQNRVRQALRMAASSLHHDKSYLGDKYRRLRARLTPPKAVTAMAHQLARIIWTLITRKVPFDMSLFSEQEKLNEQRRLKRLAASARHMGYQLTPLTA

SEQ ID NO: 152431 - protein, 391 aa, unidentified
MVCVGIDVAKDKHDCCILDSDGTIRADCITIPNNMDGFKQLLQTIRDCTKKSDKIKVGLEATGHYSYNILGFLLDNDLAVYVMNPLHTNLYRKSLSLRKTKTDRVDARTIATMLLSDVDLKSYTDTAYHNEELKSLTRYRFDKVRERAKLKQSVSRLVTILFPELEKLVPSLHIASVYALLSEYPGAKQISEIHLTKLTNLLTTASKGRYGKDKAIQIRDAAKTSIGSVMPAKSLELKHTIKLIRELTSEIDEIEVSIQKIMDELNPPILSIPGVGIQSAAMILAEIGDFSNFESPDKILAYAGCSPSTYQSGKLTNCYAHMEKRGSRYLRCALYNATKYVCHWNPVFAEYLAKKRAEGKHYNVALSHAMKKLVRLIYALQKSGKAYLTAA

SEQ ID NO: 152432 - protein, 339 aa, unidentified
MKKKYFIGIDVSKHTLDVAFIVNELSSLSQPVWKQFNNTLQGLQQMKCWLAEMQVSLCDETIVVIENTGIYHRLLWQFFSHLQINLCIENAAQVKWSLGIARGKNDKVDSRRLALYAVRNADRLKPTPALHYVVMPLKDLLTVRNKLIVQTRSIETALKELKHVSTSSAETAALNKLLQPALKGLQQSLKQTEQKIKDVLKQNNTVYKTYKLLNTIPGIGHITAVYLICCSNMFTMCTSGKQLACYCGVVPFDYQSGISIKGKHHVHKMANKELKRLLHMCALTSIKNHKEFKDYYERKKQEGKHAMSILNAIKNKLVLRAFAVVKNERAYVDNYTKAA

SEQ ID NO: 152433 - protein, 416 aa, unidentified
MNAAGIDVSSRKSTVAVLRPLGEVVRLPFDVAHNTEGLASLAEQLKALDGETRVVLEHTGRYYEPVAKALHEAGLYVSAVNPLLIKEYGANSLRRVKTDKADALKIARYALDNWTDLRDYTPIDTIRYDLKTLNRQFQLASKQRTACSNNLIALLEQSFPGIRRCFDSPVRSDGTQKWVDFAHTFWHVDCVRKQSYNAFSERYRKWCKRHGYFFKQNNAEEVYALAKNAVVLVPKSKVTKVLVQEAANQLTSTSRSVETYRTEMERLASMLPEYPVVMKMYGVGKSFGPQLMAEIGDVRRFERKQALVAFAGIDPMPNQSGDKNVRSNRSSKRGSPYLRKTLFNVMGIYLKCAPLDEPVFQFLDRKRSEGKPFYVYMTAASNKFLRRYYAQVRDYLAALDDLPPVDMDSTGLKTSD

SEQ ID NO: 152434 - protein, 359 aa, unidentified
MGEYISFDSHKHYTLAEREDAESGRTRQCRIAHTRGAIREYLSRCEARAAVAVEATANWYWIVEEIEQAGCRPLLTHPRKAKLMMGLINKTDKLDVHGMNTLQRNKTLPTVWIPPGPLRDLRELTRVRMVLARHRTRMKNRIQATLAKYGLVVEGFSDPHGKKARAEMNRQIALLPPQARYVTELLCAQLDFTERQIQEQEKRLRTLVPITPEIQLLMSLPGIGVILGAVCALEIGDVGRFPSAERLAAYAGTTPRVHSSGDKTRYGRLRPDVNRYLRWALIEAGHSIVLNCEKKPERHVSQLYRRLHARRGHYKAVGAVARHLAEAAYYLLSKKQPYRDPALRPRGGPAGAQGRTREA

SEQ ID NO: 152435 - protein, 412 aa, unidentified
MTAKDQFAAHVGLDWADKKHDVCVQFKNGDRIFHVIEHTPEALDSWLNELHQRAKGRIAIAVELKKGPVVYALQKYPFVTVFPVHALSLARYRQAFWPSGAKDDPQDAELALDLMLRYPHKIKAIEVDNPDIRLLQQLVEQRRLLVEDKRRFVNRLINTLKQYYPQPLEWFSHRDSSLFCELIIRWPSLQQLKRARSDTVRHFMNAKGGPAVAYTEQRVASIASAIPLTTDKTVIEANALMATALASQIKLTGDLIRTYDERIESLFDTLPDAELFKSLPGMGPCMGPRMLAALGDNRDSFNNAEEIQNYAGIAPVTERSGQKSWVHWRWQCAKFVRQTFVEWTAKTVNSSYWARLYYQSQREKGKSHQSAIRALAFKWIRIIYRCWKTRTRYDEAKYLLALEARKSPLLKP

SEQ ID NO: 152436 - protein, 440 aa, unidentified
MEQVIIGVDPHKLSATIEVVDQREELLGSGRFTTDRSGYAAMRAYVKSWPDRVWAVEGANGVGRPLAQRLLEAGEKVVDVPAKLAARVRLFDTGHNRKTDALDAHSIAIVAVRTKTLRVLQVDGELEALRILADRREALTRRRVQTVDRLQALLAQLLPGQAKKDITALQAKAMLAGVRPRDVAGKTRRRVAAEELAELTAVDAKIKKATTELKAMVLARRSRLMDIHGVGPVVAARILADVGDVGRFVDRNRFASWTGTAPLDASSGEQNRHRLSRAGNRRMNHMVHIAAVTQLRLDTEGRAYYRRKRADDKKPMEAMRCLKRRISDVVYRQLVADAQRAAPAASTGTVSAGPGGHCGASQESSAVDLPPLIDTSDQPLPGPAGPTLPGTTPDAKPRAASAPRSTRRRAGAVKVERPTGRTTLTATSAGAHSTAPKPRT

SEQ ID NO: 152437 - protein, 343 aa, unidentified
MQETIYVGLDLGSSVCQQTVMSGDGVRRFSRVVATSEKSLRTAFDQLEGDVHVHMEAGELASWVQSILKPLVAEVVVSHPRSLAWIGKDAVKDDKIDAGKLAELLRLGRVHEVYCEEDAKRRIFKHLVTHHEQMSREQARQKSKIKARLRTLGVIRKDARLFSASGQAALLESIAEPEIKQMIAQSFAVLNRMLESEREARAAMIEYSRKFAEVRLLQTAPGVGAITACRFVGYLQTPRRFSNKRKLWRYCRLGITRRESNGKRLSHPRLDNAGVGSLKDISRKVFEAARRCKGDNSFKRCYEQSLENTKNQVHARLATQRKILGCLRAMWIANQPYRDFGGG

SEQ ID NO: 152438 - protein, 391 aa, unidentified
MPMYFVGIDISKYKHDCCIISAADQQIISKFTITNDKDGFEQLLTALNSLSNPEDIKIGFESTAHYALNLELFLENAHHSFMEVNPVLIKEYKKSTTLRRTKTDSVDCESIARWLITVEYKPHSKGFYHAYSLKSLTRLRDRLIRQRSFYLVKITNVLDHTFPEFKPFFNERLSKTALYLLENYGSAEKMARMNSASYDKLRCISRGKFSIQQFLRLKELAANTVGVNNSIFDLELNTLLTLYKSLSDEINTLETEIIKLIEEVHPHYMSIPGIGPISAAVIYAEYGDISNFSNPGQMLAFAGIEPGINDSGTESHGGRMVKHGSSQLRYVLLNACLPLIRFDLTFATYYEKKRAEGKKHRVAITHVAKKLIRVIYALERQDVDFNAQKLR

SEQ ID NO: 152439 - protein, 349 aa, unidentified
MTVYVAVDFHAREQTISYCDLADGEIHRRQLRHQHDDVRGFYEQFSGEVIVAFEASGYSAWFEQMLAEVGHTVWLGNPAEIRRKAPRRQKNDRRDADLMLDLLLKGDFPRVHGFSEESRTVLRQLRYRHKLVKVRTIAKNSLHAIGINAGLPLKRRLLTEQGIAQLQALSLSPVLTQQRDEWLELIGSMNERIATVEAQLQQRAKDDAAIALLQTHPGIGLLTSLALRYTLLPISRFSTTRQVTAYVGLDCMEDQSAERRRMGSISKAGSKLLRFLLNEAGHTAARHDPELKKFYRRLLHRRDKPKAKVAVARKLLVRSFIMLRDQIDYAEFVRRGVAARVARETHSLP

SEQ ID NO: 152440 - protein, 314 aa, unidentified
MAKVESFIGIDVSKETLDVAVIPDSKDLSFTNDPEGIRALCKKLKKMRPTLIVLEATGGLQIPAVAALGVAKLPVSVINPRQGRDFAKATGRLAKTDRIDARILAEFGKAIRPEIRPLKDEQALELSALITRRRQLVEMLTMEKNHLVIAPASIRPGIEESVTWLEQQLDELNTRLGLVIRSSPLWREKDELLQSVPGVGPVLSATLLAEMPELGALNRKTVAMLAGVAPINSDSGKHRGKRRIWGGRSRVRSVLYMACMTAVRFNPVLRTFYRRLVESGKAHKMAMTACMRKMLVILNAIVKSGRPWGAVAEV

SEQ ID NO: 152441 - protein, 369 aa, unidentified
MDHHSVAYVGFDTSKTKHAVAVAAGGREGEVRYLGEIEAAPAAVERLLRKLERQYKTLHVCYEAGPTGYGLYRPIRALGHACDVIAPSRVPKRPGDHVKTNRRDAVTLARLLRAGELTAIWVPDEVHEAVRDLVRAREAAAQDLRHKRQQVLSFLLRHGRIFTGHRHWSRAHLRWLAGQAFNHPAQQIVFQDQVDAVADAQARLEWLDRQLAELVPTWSMAPVVAAYQAMRGVSFLVAVTFVAEIGDVRRFESPRQLMAFLGRVPCERSTGDTVRRGGLTLAGNRRVRRALVEGAWSYRHPARITETIRVRLENLPKAVREIAWKAQVRLSARYRRLIAAGKRAPVAVAAIAREMAAFLWAIGRVVEPA

SEQ ID NO: 152442 - protein, 341 aa, unidentified
MKYVGVDLHKKTISLCVMMKADDQRQVVCRKRFACTQPEAIRKFFAELGRFQVVVEATSSYEWFLLLVEELADRCVLAHPKKLRVIAESKNKSDKVDAQVLAEFLLLDMLPEAWRPTPRVREHRVLVRHRRWLDGRITGVKCKLRHKLAHYNADIAGLFTERGAEYLAGIAMSAADRFEVQQLQAELDLFLTQLQQTDKQLREFAKRAPLVEREARAVLDTIPQVGPVTIDAVLSELGDWRRFRSAKRVVKYAGLNPGRRESDRKVKQLPISKEGSRILRWALIQAAWRLANTSPRWQRIFETLRRNTGSKKKAIVGVARRLLCVMFALLRDGKRYDFAAA

SEQ ID NO: 152443 - protein, 405 aa, unidentified
MTKKLMCGIDLHSNNLVCGVVDPNGKRVFEKKLLCDLPGVLKALKPLKSQMHTIAVESTFNWYWLVDGLQDNGYQVVLANPNRINQYNGLKRTDDQSDAFFLAELLRLNILPTGHICQRSLRPVRDMLRRRMGLVHKRTSLMLSLKSLHARTTGQALKQSEVKALTPDGAVKLFSDSSDQLVAELQTRLMNQVAQSISQIERAVLEKAGDLPSYRMLQTLPGVGTILGLTIALETVDCKRFAGPGQYASYCRCVDSRRISNGKKKGENNAKCGNRYLSWAYVEAAHFAVRYDDRCRRFFDRKAAQVNKLVAIKALACKMAKAAWHMMDQQVPYDARRMFPPALSPLAAAGPKDSKHSTVAGAPIGVGGVSPLRGGDRRRRELGSRSTSPPLTRPRQSNGAMRLGN

SEQ ID NO: 152444 - protein, 344 aa, unidentified
MYHYAGIDVSLECSSVCLVDGTGKILREAKVASEPEALITWFRSLGLVLERIGLEAGPLSQWLYAAMRDAGLAVELLETRHVRDAFKAMPVKSDRNDARGIAQLMRLGWFRPVHCKSIEAQETRAVLTARKLLQSKLRDIENSLRGVLRGFGLKVGPTTERTFAERIRELVAGHPGLEVVAQALLEAHAVLRREFNGLDKHTQRLARSHPQAKLLMTTPSVGPIVALTYASAIDDPKRFRSSKATGAHFGLTPKKYQSGETDYTGRISKIGDASVREALYQAAHVMLTKPVRNCSALKGWAMRIARRAGMRKAKVALARKLAVILHRMLADAKPFNPMAKASAT

SEQ ID NO: 152445 - protein, 351 aa, unidentified
MYISHYIGLDVHKKSISYCVKTADGQILEEGKLRATHQVLREWAQKRSEPWHGAMEATLFSGWIYDALKPFAAELEMGNPSMMKAIGAAKKKSDQLDARKIADLVRCNLLPVCYVASAEMRDLRRMLRYRNLVVGQAVQMKNRMSGMLMEVGAEYRKQRLHGKQYFSELLDQLEEVPASVKDLLRLSRGALEMFETTQRQLLDRLQKEPLLVKRVKLLRSIPGVGEVTALTWALETCDPRRFPSIGDAVSYCGLVSALVSSADKAKRGPISKQRNAHLQTVLIEAAKLAPRWNQPLAELHERELKRGDRNQATLAVARKLVAYLLAVDKSGKRFEVRKPPVREMEEVGQVA

SEQ ID NO: 152446 - protein, 319 aa, unidentified
MNPIPVGVDIGKNVFQIHYIAPNGGEIVNKSLKRANFLEYFANLEPCMIGMEACGGSQRWARSLSKLGHQVRLMAPRFAKAFNIGNKNDAADARAIWLAVQQPGNEVAVKSEAQQAVLALHRLRQQLVKFRTSQINCIRGLLGEYGEVMPASRRAFDANIAAVLDRVGDHVAAPLIDTLQEQCTALTHLDEQIMRIEQRLKQWMSTDLSAQAIGAIPGVGLLTATAAVATIGDAKAFKSGREFAASIGLVLRQVGSGGRTTLLGISKRGDAYLRTLLVHCARVISVQLRSKHPWVEELLKRRPYNVAVVALANKLARVI

SEQ ID NO: 152447 - protein, 342 aa, unidentified
MKFYCGIDLSARDCHVCVIDQQLKVVVQQKLRNELPKIIQLLEPYKANLKIVVESTFNWYWLIDGLQAEGFEVVLAHTLGLYLITGAKVKTDRRDAYALAKLLLVGAVPAAYIYPVETRPVRDLLRRRLLLVQVRAGEYGSLRRLLLRQGVLSSKQQEIKTATEAELEQWFTHPLVRLHASQELQRIELYSEQIAELEKTILELAKTERSYELLLKLPGVGQTIALTILYEVGELTRFANVKDFSSYCRVVPGIAQSGNVTRRGRGSKQGNHYLKAAFSQAAVHAVRCYPKVRRCYERQLKRHQGRGRQMICYNIIAHKLAQAAFHVLREQIEYREELLFGR

SEQ ID NO: 152448 - protein, 416 aa, unidentified
MNAVGIDVSSRKSTVAVLRPLGEVVCLPFDVTHDIAGLASLAEKLKALDGETRVVMEHTGRYYEAVEKALHEAGLFVCAVNPLLIKEYGANSLRRVKTDKADAVKIARYALDNWADLRDFTPMDAIRYDLKTLNRQFQLASKQRTASANNLIALLEQSFPGIRKCFDSPVRSDGTQKWVDFAHSFWHVDCVRKQPFPAFCERYRKWCKRHAYLFKQSNAEEVYALAKRAVVLTPKAKVVKVLVQEAANQLSSISRSVEVYRAEMDRLAAMLPEYPVVMAMYGVGKSYGPQLMAEIGDVRRFERKQALVAFAGIDPMPNQSGDKNVRSNKSSKRGSPYLRKTLFNVIRTYLQCAPQDEPVFQFLNRKRAEGKPFYVYMLAAANKFLRRYYAKLRDYFASLDTLQPVAPIPTILKATL

SEQ ID NO: 152449 - protein, 459 aa, unidentified
MLWRNRKERKEWGRRLQSEDPGLEVVHPHAAGIDVGNSAHYVAVRPDRDPKPVRRFECFTADLHRLADWLQSCGVKTVAMQSTGVYWIPLYEILEERGLEVYLVNARHTKNLPGRKSDVQESQWLLKLHTYGLLNNSFQPVSEIRVLRTYWRQRAEHVREAATCIQRMQKALTQMNVQLANVISDISGLTGQAIVRAIVAGQHDPRELAALSDPRVHASQEEIAKSLEGNWRPELLFVLQQEVDMYDTYHKRITECDQRLQKHLGSFKNARSLQTPKEKSKTKKPAAKNAPCFDLSSELQRVTGVDLTRIDGIDVMVAQTLLSEVGLDMSRWKTESHFASWLGLCPDNRITGDKVRSRGTRRVVNRAATALRQAANTLMRSRSYLGAQYRRLRTKLGAPKAITAMAHRLARLVYRMLKYGQAYVDKGTEYYEERFRQQQIQLLRKRAAKLGFQIAAIHA

SEQ ID NO: 152450 - protein, 404 aa, unidentified
MFVALGGSSLVMLGRGLDRLAVQSLKHGGRALVEHTTTYVAFDNSKDRLAVAIAEGGLRGEVRFWGTLPNQPEAVRKLVAKLAAKHPVLSFCYEAGPCGYGLYRQILGLGHSCLVVAPSLIPTKPGGHIKTDRRDATMLASLFRAGELQGVWVPDAEHEAMRELMRGRQTAMQEVRRSRQLVLSFLLRHDRAVPTRQHWTRAHRAWLARQSFSHPAEQFVFEELIHRMEAACARQTRHEEAIRRLLPAWSLAGVVTAIQSMRGVALMSAVTLVAEIGDFGRFTSPRQLMAWLGLVPKEHSSGRKVARGNITKAGNTRARRVLVEGAWTYRLPARMGEDIARRNEGLPETIRAAAWKAQVRLCTRYRRLQKTGKPQNVIVVAVAREMAAFVWAIARMAQPVIAPA

SEQ ID NO: 152451 - protein, 442 aa, unidentified
MGHDVEEIDAEWDEQVLERAGAIDVAKASGKVCVRIPGARRRITRAWDVAATTNAIMALADELAELRIERIVLEATSDYWRPFFYLLEARGLCVWLVNARDVKNVPGRPKTDKLDAVWLAKLNERGMLRPSFVPPVEIRQLRDYTRLRAELVEERSRHKQRLEKLLEDALIKLSTVATDIFGKSGRAMLEALIAGERDPEALADLALGKMRKKTAALKEALTGRFDAHHAELARMLLDEIDALGDKVDRLTVRVEELVAAIPGAGTPVDPSTGEIGPAGSLPVLDRLDEVPGIGLRAAQVIVAEVGLDMAQFPTADHLASWAKVAPRTIQSGPRSRSGKVGKGNPYLKRVLGEVATAAAKTDTFLGERYRRLARRQGKQKALVAIERSILVVVWHLLADPNARFVDLGADFDERRVNKERRARDLVRQLMALGHQVTLSPAA

SEQ ID NO: 152452 - protein, 361 aa, unidentified
MKIMTGIDLHSNNALCGLMDESGQRLVHKQLPCELSAILQLLDPYKDRIDTVAIESTYNWYWLADGLQDHGYHVVLANPARMKPYDGLKHTDDVSDAFFLTELLRLKILPTGHLYDRKTRPVRDLLRRRLMLVHQRTTLILSFKSLNERTLGRRIALSRVKTMPVAEARALFADPADQLLSGTEIELVGRFTQAIEQLEAHVLGVAGKWDPYQRLQTLPGIGKILGLTIALETGDPKRFATAGNFASYCRCVKSRRESNGKKKGENNRKCGNTYLAWAFVEAAHFARRYNAACRRFYDRKKQPTHPVIATKALACKLAKAAWHVMAEDAPYDAERVFGPGQKTDFGETGREPAKGSGHPSQ

SEQ ID NO: 152453 - protein, 339 aa, unidentified
MELHCGMDLHGDNVYCAVMDREYRTVFERRLANDREVILEALEPYRERLAGIAVESTYNWYWLVDTLQAHGYRTRLANPARMQENLGLKSATDKTDARFLAKQMVMGVLPEGYIYPKAERSMRDLLRRRMRLVHMRTAEWLSLEGLVARHSGKDLGVQALNGLEAGELSALVDHDPLVLQAAQIGYRHIEFLGREIRQIEQAVEGRVQLREGYERLLGVPGIGRILAMTIMLETGPITRFAGPGNYASYCRAVKTEHTSNDRKKGEGNGKSGNRYLAWAYIEAANFAVRYSPELRAWYQRKAARSKRVVALKALANKLTKACFFILRDGVEFEVKKLVG

SEQ ID NO: 152454 - protein, 339 aa, unidentified
MKNTKYYIGLDVHKERTTYVVRDRLGNILAEGETATLYQELSPRLKPYLNTAIIGLEASTSYYALYQTFLNHGYTVKVANTIQLRQLVTKNVKLDAQRLSEMLRLGTFPSSYIPDERIQRIRSLIQIRHSLMEEKVRCNNRIQAFLDRNGVIMPSYKAFSKKWRYALMHHMGSSIVSIELRHEYDHYVFLEKKLEQVEQEIQGFARKHWTTEYDLLQSITGIGPVISCYVIAHILPIERFSSCKKLRRYAGVVPTCKESGNTRSSGHIPKTSSRRQLRWALIQAANTIGKTNTNLGRYYRKKKRQKKNAGIAKVAVASSLIDIIYKVLTTKQPYTPKTC

SEQ ID NO: 152455 - protein, 456 aa, unidentified
MGHARARKIPARLVEDEEYQLRYERVAGIDIAKAKADVCTRLPPQREGGRRASRLEEVPASAKAILALAARLAADGVELVMMESTSDYWRIWYYLLEAAGLNVQLVNPAHARQLAGRPKTDQLDAQWIARLAEMGLLRPSFVPPPEIRALRDLTRTRLQLVRDRTREWQRLEKLLEGALIKLSSVVHSLAGTKTARDILEAIAGGQRDPRALAALAAAHVKGGRAAVEEALDGMMPGDHHLVLIRIHLDHATFLDRSIAAVEDEISAALDAIEGAWGISADGVPSPDPGPDPAALTAAGRLAEIPGVSPKLAMSIIAETGLDMTRFPTAGHLASWAGLAPVARQSGPRSRKPGKGQGDAYLKGYCTQAANGAARTDTFLGERLRRLSRRLGGNRAKCAVARSILVIIWHLLADPAARFTDLGPDWHEHKTDRDRKIRAHLRQLQALGLDITINPAA

SEQ ID NO: 152456 - protein, 482 aa, unidentified
MASKGMVEGSKGQRLTRRQRKELGRRIWSDHPGLEVVHRDAAGIDIGSREHYVAVGPDRDAEPVRTFGCFTADLNRMAEWLKQCGIQTVAMQSTGVYWIPVYDVLERHGFEVWLVHARDTRNLPGRKSDVHESQWVLKLHTYGLLRKSFRPTAEFRALRTCWRERGEYVEQAGACIQRMQKALTEMNVQLATVLSDLSGVTGMSILRAIVAGERDGLRLAEFRDPHVKASKETIALSLEGTWLPEQLAVLKRQLEDWDHIQRQMTACDQDLEAMMQKLPQANDEPAPPAQPAAGTLTGRKRNKSSKSSKNEPDFDLAAALRRVTGVDLTRIDGGKVNTVQTVITEAGLDLTQWRTEDHFVSWIGLCPRNDLSGGKVLNRKTRKVVSRLATALRMAASTLRESDSYLGAQFRRLRTRLGAPKALTAMAAKLARLIYRMLRYGQEYVDKGTAQYEQKYRQQQIKLLAKKAAQHGFALVPATNRA

SEQ ID NO: 152457 - protein, 487 aa, unidentified
MISMVLGHVGDIGEPVTAGIPFERVSTTTNPYRRGIPTNMMEDAVARRKREFELAYPNAAGIDIGSASHYVAVPPDRTDDCVREFKSFTENLEALADWLTACEVDTVAMESTGVYWIPLYELLESRGFVVYLVNARHVKNVSGRKSDVLDCQWLQQLMSYGLLSGAFRPRDEICVLRSLTRQRDMLIKYQSQHIHHMQKALTQMNVQLANVISDVTGLTGQKIIRAIVAGERDPVKLAKLRNERIRASEADIAKSLKGNWREEHLFALKQAITLYDAYGAAVVDCDSQIQGQLERLYRHEAPPQPERKRGPRRDTTKFDLRTALLRTCGVDLTRINGVETATALKVIAEVGPDLSRFKSAKHFASWLGLCPGTKISGGKVLSGATKRTANRLAQALRMAAFALSRSQSALGAYYRRLAGRLDKAKAITATAHKLARLIYTMITKGTEYVDRGQDYYEERYRQRVLHHLNRRASVMGFELTPIKTAAA

SEQ ID NO: 152458 - protein, 417 aa, unidentified
MKLLFIGDDWAEGHHDVAAQDDAGKTLARRRLPEGADGIARFHEMVGSCPGEDAEPDPARVIVVIETDRGPWVKALAAAGYRVYPANPGQAARHKETVANPGKKDDFFDAGCLADMGRTRRHQMRELAAGSDVAEAVKIAARAHQKLVRERTRHLLRMRPALREYFPAALEAYADLTLAGKDALELLAKAPNPESAARLTVTQVTAALKRAGRRGDLAQRARDIQAALRAPHLAQPDVIAEAHAASVQAAAAVITALNEQVKIMEAKVSGLFRRHPDAGLCLSQPGIGDITGARIPGEFGDAPGRYATAKARKNYAGTSPLTIQSGKKKTVHARYIRNRHLIDALPAQALTALSVSPGARGSYDDLRARETGHDDAMRRVASRLAGILHGCLKTGREYDEATAWSHRAGNPEATKAA

SEQ ID NO: 152459 - protein, 322 aa, unidentified
MSLMVLGIDIAKQKFDVALLADGKIKNKTCKNSVEGFETLSLWLEKQGVQKVHACMEATGNYGEDLAIYLHEAGHTVSMVNPARIKGFAQSELIRTKTDKLDAGLIARFCLAMKPETWIPPAPEIRSLRALVRRVDSLIDMRSQEKNRMGTAHESVIILIKEHIAYLDQEIEKIRKQIDDLIKRNPQLKQRKDLLDSIPGLGKATIPHLLAELNNLDKFTHVREMVAFIGLAPKETISGSSIKGKPRLCKIGHARLRKALYMPALVSIQCNPVMIAFYNRLKERGKNGKVIVCAIMRKLVHVIFGVLKSGKKYDPNFKPVLA

SEQ ID NO: 152460 - protein, 364 aa, unidentified
MDVHLRSTTVCALDAETGEAVTRRFRGNPWGEVAEWMSGFPGPSLAAYESGYLGFAPQRELSGLGVDCVVAAVSKVPRSAADLSSKNDRNDAARMAKAILSHDVTPVWVPSPEIEGLRDLAAAHDAATARLAAAKQRLLAFLARRGYVYGGTTPAGNPRKYWTYGFLRWLDGIHPADDGGIRALAALRNEVEAADETREALLAEYRAAVAAGPLSAEVEALQSIKGCGFALAAAFASEVGDFSRFRSGRQVTAYFGLAPKQRSSADSVRLGGISGAGNALVRKLAVEGSWCYAAARHQPKLMPRDTGVPLEIRMHGRKGSERLLRRREEMIARGMPQAKANAATAAELVRWLWALGTMCREGAE

SEQ ID NO: 152461 - protein, 366 aa, unidentified
MKKTSTVRVNKNMIFKGHKLTIGVDLGDRWSCYCVLDEAGEIILEQKVAMTPEAMKQTFAKIPQSLIALETGTHSPWVSRLLTELGYKVIVAHAQKVQLISKSNRKDDRHDARTLARLARIDPELLGPVRHRSAQAQIHLTVIRARAELVRARTALVNAARGLVKSYGQRLPKCGTQQVSRELGAGLHAELREVLEPLLKEVESLNERIQEYEVRMEKIAKESYPHVELLKQVKGVGTQIALTYVLTLDDPHRFPKSREVGCFLGLCPGRRDSGESQPQMNISKEGDRYLRTMLVQGAHYILGPFGEDSDLRRWGLKLAARGGKNGKKRAVVAVARKLAVLLHRLWVSGEVYEPLRNSQKAMRAAA

SEQ ID NO: 152462 - protein, 324 aa, unidentified
MFYLGIDVSKAKIDCCLILENSANKKKTKTFSNTPKGFEQLQIWLNQHAATSTQTIILMEATSIYHELLAKYLFDEGYQVSVTNPARARYFAQSMSKLNKTDKVDSEVLARFAMTANLHFWQPLPKHIQLLNALLDRRAVLCEDLQREKNRLEKAESTFTMEPVLESLHKSIEQLNQHIQGIDQQIDDHIDQNPDLKNDKELLSSIPAIADRTSLLMLSFLRSHTFERASQAAAFVGLVPTQKQSGSSIHGRSHLSKAGSSKIRAGLYMAAIVATRHNPHIKGMNERLLANGKTKMMAIGAAMRKLVHLCYGVLKHQQPYQADY

SEQ ID NO: 152463 - protein, 347 aa, unidentified
MTLYIGVDFHPHQQTVSYCNNEEGEVHQTSLIHNVEQVRRFYRQLPKAIVGVEASCTAAWFEQMLFDLGHELKVGNPTAIRARARSRHKSDKRDADLILDLLVKDEFPELWRRPLPSQAVLEQLRFRHHLVKQRTQICNRLQALAHGAGLPKKGIQTNRARVALMEARLSETQSFQRDQLFELLEDLTGRIKEVEKWLESKAEGDAKVQLLLTHKGIGLLSALAVAHTLGDVSRFPSSKEAVAYTGLDPLEHSSAGKVRYGSISKAGSSVLRHLLGQAMHVASRYDGELRSFYKRLASRRTKSIAKVATTRKLLIRLFIMLRDGIDYNEFKRRGSTVGMPVLSHGLK

SEQ ID NO: 152464 - protein, 341 aa, unidentified
MQYGAIDLHRRSSVICLAGAADGSYELEQTVGTSRAALTAFFAGRPPCRILIESSTESEWVARLLESLGHEVVVGAPSYAAMYATRNRRIKTDRRDGRALCDACRAGRYRAAHRTAEPWRSVRKQLSVRDALVRSRTRMINVARALCRQEGCVIASGGNADTFAARAQQAALPPELAQVIRPLVRSIGLLSRRIDRCDRTLAALAGGHARVRRLMTLPCVGEVTALAFAAVVEPAARFGSPGQVACYLGLVPSEDTSSDRRHLGRITKGGDRRVRWLLVEAAHRLMRSTDPKAADLRRWSGRVLKRRGRGPAAVGLARKLAGRMWLIDKQERDYETRACRD

SEQ ID NO: 152465 - protein, 383 aa, unidentified
MFGNDHSGLTKLVSWMKELQRQYAKTDIILGIEPTGHYWFPLAEFLHRENIKVVIVNPHHVNKSKELEDNSPTKNDYKDARLIADLVRNGKYSEPKLPTSVYADLRILMNLREKVMVNFGQVQRRIQNWLDRFFPEYSLVFKDWEGKASLITLREFPTPQEIVSLGASTIVNRWKEDVKRAVGSKRAAQLLQAATNSIGLTEGLTAAKIELKALLEQYELFSRQLEEIMAQVEALLAQIPGTNEMLTVPGIGVVTLAGFLAEVGDLSGYDHGQQIIRLAGFNLKENSSGKKKGKSTITKRGRSRLRALLFRAMMPMVAKNAEFKALHHYFTKRSHNPLKKKQSIVALCGKLIRVLYTLGTKCIPYNASDVLGPVRQSQIQMEA

SEQ ID NO: 152466 - protein, 415 aa, unidentified
MALKIVYKICCGIDVHKTFVVACIASTNDKGITSYESHRFSTYTSGLKTLLQWLLDRNCKDVCMESTGKYWIPVYNILESDCSIVLAHPKYVKAIRGKKTDKKDAKWIADLFKHDLVAGSFMPPADIRQLRDLMRYRFKLTCFKSSEKNRLQNCLTVSNIQLGNVVSDTFGKSAQAILDKLLENPADTSFDLEPLVYKSLKKKLPELRDAIDGYITPEQAGKLKVIKAHYENLESRKAELEELILALAAPYQQELAILQTAPGISSPFTAIGIISEIGTNMEAFPSAKHLCSWAGLTPTNNESAGKKKSVRVSKAGCYIKPLLVQCANSVVKSEKHPEIRNRYLRLRKRRGHKKAIIAIARMLLTALYNMLKNKEPYNAELYRKSDVLPVNREITIEQAILMAQFQGYKIKSAAE

SEQ ID NO: 152467 - protein, 350 aa, unidentified
MLHAGLDLSRNRIDVCLLADGGELVGEFAVPSDSDGVAGLARRVLELGEPVQGVVESMNGARFVHDMLERFGWDVLIADAQKVKGLAPLACKTDKIDARVLAVLSERDLVPQIWLPDPGVRSLREQARFRMHLVNHKSTLKNRIHSTLITFGHPCPVTDLFGVAGRQLLDRLALPQPWRGTVDASIELIDYLERQVATINQQLRTDGADHPYVPLLLTVPGIGWVLAFTIAAEIGDISRFASAKKLCGYTGLCPRVIQSGERDRRGPLTKQGPKYLRWAMLEAKMHALRHPIYRERYQRTKQRLGRQRGAKVAQIDIARKLTEAIWHMLTTNQPFAPTTAAGGAAFRLAA

SEQ ID NO: 152468 - protein, 349 aa, unidentified
MIVIGIDSHKRTHTAVAADGNGRKLGEVTLGTTSAGHLELVRWAARFPGHRFALEDTRHLSRRLSGDLLRAGETVAWVPTRLMAGARRHGREQGKSDPIDALAVARAALADPGLPTATLEGEERELRLLVDHREDLVAERTRAQNRLRWHLHELDPGNEPGARSLDRAVVLAALDERLAPVGGTVARIARELVARIRDLTRTIDALEREIRRLVREVAPTLLALPGCGPLSAAKLVGQVAKAGRFRSTAAFARHNGSAPLPVWSGNDERHRLSRKGDRQVNVALHRIAITQMRVDERGRAYYEHRRAAGDTKTEAIRALKRRISDEVFRRMRHDERLRATPRADLAAAA

SEQ ID NO: 152469 - protein, 350 aa, unidentified
MIIVGCDYHPGFQQIVLVDTETGELKEQRLEPCEPAERFYRELARRGEKVRLGMEASGHSRWFERLLGELHIELWIGDATVIRAQRGRKPKTDRQDAQHILKLMRKDDFPRIWVPSWENRDLRQRLWHRHRMVPARTRLMNQLQAVALNEGLRCKKKLWREQGRKQLEAIRLAPWASRRREDLLQLLDGLNPTIAELTQAIDQEVEKSAEARRLMTHPGVGPLTARAFVLIIGRAERFQCGQQIAAYLGLVPLEDSSGERRRLGHITKQGSSMLRFLLVEAAQVAARVIPPWRNQYFHLAMRRGRKIAKVAMARKLAIRLFWMMRQGWEYEQVKQFGSHAGQLGNRDGVR

SEQ ID NO: 152470 - protein, 355 aa, unidentified
MKKSTPTVTVGLDVGEQFIHLCEMDATSGVIETAKFRNGRHHVRKRFEGVERCRIVLEAGSHSRWLAEDLTEMGHEVLVVNPRKLKLVSDSLYKDDTLDAERLADLGQSVPHLLGVVRVRSEQHHRALVLVRARAKAVKCRTLTINAIRGLLKPFGIRIRKDGRASTFITYCRNELPADLAPLIEPLLATLEALNQAIKDYERQVEPMLEKLAPEAVHLTAIHGVGALTALYFVALVGDPHRFSKTRSIGSFLGLVRGRKDSGKKKSEQHITKAGDPYMRALLGNAASHIVGPFGADNDLRRWALARPDQTAGHRRITKTALARKLAVLMLTLWKTGDAYAPLHNAARQPVEVAA

SEQ ID NO: 152471 - protein, 356 aa, unidentified
MNIHRVQNFVVKGKEVFVGLEDSKKTWKVAVRCEGMLIHQAAMDARYPVLIGYLNNNFPDCTVHLIYEAGFRGFGLHDRLTEDGITCIVIPPHQVTQPKVNKVKTDRRDARRLALVLENHDFKDGCHVPDRERREDRQVSRTLLAIQKDIIRTRNRIRRFLEFHGIEINRSGSWGRTEYRSLKELALNPVVRATLDIYLSILEQLWAHQKTLRTHLRVLCHKARYYKAFTIARSVPGIGWLTAIRLVLELGENPARFSNARKIAAFTGLTPREYSTGETEWKGRITGMGPGFIRATLIESSWVGIRKDQALLSKFTRVWRGTGSKKKAIVAVARVLIVRLRACLVSGTPYMMGITR

SEQ ID NO: 152472 - protein, 335 aa, unidentified
MSYFVGLDVSMEETAYCARNTEGRILGQGKTVTDPDAIAAALARFGRPTRVVLETGRMANWLHRQLIARDLPAVCVDARQAHAVLSQMPNKTDANDAAMLAELARTGFYRAVRVKSEAAQGMRALLKARELVLRQRMDLDNTIRGLLTSMGVRLPKGPRRWADRVELALEANEALALALRPLLRLRGDLARSLAELTRRLLTEARGSDLCRRLMGVPGVGAITAYAFLATIDDPTRFAHSRSVGAYVGLTSKRYQSGEVDYTGRITRRGDGMLRTLLFEAASSLITRAGGGGALREWGLRLRAKVGHKKASVALARKLGVILHRMWVDGTEFRAA

SEQ ID NO: 152473 - protein, 354 aa, unidentified
MSEKLNSEIAVIGIDIGKNSFHLVGQDRRGSIVLRQKWSRGQVEARLANLQPCLIGMEACVGAHHLSRKLQALGHDARLMPAKYVRPYSKGEKNDYRDAEAIAEAVQRPTMKFVATKTADQLDLQALHRVRQRLVSQRTGIINQIRAFLLERGIAVRQGLHFLRAELPGILAKRTDVLSPRMLRIIEDLAGDWRRLDERIESLSAEITRVVEQDPACQRLMTVPGIGPIISSAMVAAIGTGDVFAKGRDFGAWLGLVPKQMSTGDRTILGSISRRGNRYLRKLFVQAAWVVLVKVGPEQWERYGLKSWIEAAKKRLHHNVLAIALANKLARIAWAVLHKGRAFECVKTNAPRPA

SEQ ID NO: 152474 - protein, 318 aa, unidentified
MEKAFFCGVDVSKDKIDVCFLTSITSEKAKFETLPNNYDLIKVYFNSFKNDEILVVFEATSNYHLALQRALSDLNIRYNVTNPYKASLFLKHLSTIKTDVNDSYGLAVYARTFKSEILPDRYNAEYLQIKSYNSTLNLLQKLNTQLKNFKQSQKLVKNSVVDEVIENLIKEIAKLQSMLQKLAFDLVKKTIPETEEIIKSNKGFGIDLALNLFPQLHFNRDKSEKQFVSFLGLSPRIFQSGSSVYKSQKINKMGSSNFRRILFMSALCAIRFNEKFKARYDRLIANGKKKMVAIVAVMCAIVRYLKSLFPFNAEIKAI

SEQ ID NO: 152475 - protein, 370 aa, unidentified
MVSRTASYSWRQTADKPAFDRRRLKAASSHNTKNKHTDITFMILTESVRTCLGLDIAKAKFDACLLLGPRAHHAQVDNSTPGIASLRAWCKRHGAPAPLTVLEATGRYGELAAAQLHAAGHRVHVANPRRIKDHARSLGHRNKTDRIDAALIAGFGITRALPEWQPASAAQQLLRALMRRSADLAAMLQAERNRTESAADPLVSKSLARVMRALEKETASLQAQITAHIQATPELREDIAHLCQIQGVGARTACWLAAEVPRHLPHGRAAAAWLAVTPRVRQSGTCLRATAPVGTEGNRHLRRVLFMAALTARRRNPRLKVFADRLAAAGKSKMSVLLAVVHKLIKISFLLLKNHSAYDPNHHPIPTTKN

SEQ ID NO: 152476 - protein, 423 aa, unidentified
MNVSTLCIGADVHLDEIVLRAVDQASGHEVLERFRVTNNRPGAQAAVANIVQAATHGGYSRIEIGWEATGLFWVPFHRFLSTSPLLQPFQVELVCFNPKLVANFKDGLVLRRPKDDERDAYDVAARLRFGEWPVSYVPADYWQGLRRLTRYRFQLSRELTREEQRFQAYAFLKASDWKRVKPFAQVLGATSAALLTEFTVAELEALSHDELVDLITHRGRGRFEDPHATARAVRAALASSYPIDPRMDEMVTRTLATGWEHIRFIQRLMRRLDHHIAHYIEPFPNPLITVRGLGPVITAGILAEIVDISRFPEHKHVAQYIGLTWQKRATGPWVSQNTRLTKVGNVYLRYYIILGADKLRQFNLEYKAYYSRKFHEVSKYQHKRALVLTARKLVRLVHALLTKNVPYVRPQMLFETEEEPLLQ

SEQ ID NO: 152477 - protein, 342 aa, unidentified
MEQYVALDVSLKEISVCIIDSKGEVVFEGKTGAEPAMLVELIRSKAPQVKRVGLETGATSPWLFHTLASAGLPVVCMDARHAHAALSTRPTKSDRSDARGLADMLRMGWYREVHAKSVTSHERRTVLGARHQLVTMRSELDAQIRGILKTFGLILGTGNKDTLIQRAEKLVAGHPALSGLVAKLADVRRHVTSQIAAIDRDIRHLVHTEPTLKRLISVPGVGPITALAFLSAVDDPSRFKHARDVGPYLGLTPTRYQSGETDRQGRISKCGDTFTRTCLYEAAHVLLTRVHRFSPLKAWGMRLAKRIGGRKARIAVARKIAVILHCIWTDGTEFWWTREKSA

SEQ ID NO: 152478 - protein, 346 aa, unidentified
MMIIGCDFHPSWQQVSWLDSETGETGEQKLVHASGDAERFYRQVAAPALIGMEATGNCHWLVDLLADLRHELWVGDAAQIRASYVRQQKTDKRDAAHILKLLVEGRFPRIWMPSSEVRDLRQLLLHRYKLVTIRARVKNELQHLCLNQGVQRKHKLWSKAGQRILGELPLKPWAGRRRDDLLRLMAMLDQQIEPLDQAVKSEAQRDKMALLLQTQPGVGPITALAYVLTMGDVSRFPRGKQVASYLGLIPREHSSGGRQKLGAISKQGNRMLRMLLVEAAQTTVRLDPEFRKEYLHRCHQKPKAVAKVAAARKLAVRLYWMLRTQTPYPEIVRIESSPRVALVGAS

SEQ ID NO: 152479 - protein, 330 aa, unidentified
MVVSVGIDVSKDKHDCFIVSSEGEVLADAFIIPNTMDGFHYLLQRIRHCTAPQDKIKVGLEATGHYSYNLLGFLLDNGLTTYVLNPLRTNLYRKSLSLRKTKTDRVDARTIATMLLSDAGLKPYTDTAYHNEELKSLTRYRFDKVKERAKLKSSIARLVCILFPELEKLVPSLHIASVYALLEEFPGAKQVANTHLTRLKALLETASNGHYKRDMALEIRNAAKNSIGSQMPAKSLELQHTIRLIRELDREIDEIEEQIQAIMDELHSPITTIPGLGFRMAAMILAEVGDFTRFDSPDKLLAYAGMSPSTYQSGQLKNSYPHFKNGALHF

SEQ ID NO: 152480 - protein, 410 aa, unidentified
MEVVHAHCAGLDVHKDTVVACVRHMTDGKVTTTIKTFNTATQELLALSDWLSAENATHIAMEATGVYWKPVWNILSDGEFELVLGNAAHIKNVPGRKTDVKDAAWLADLMAHGLVSGSFVPDQTTQEMRDLLRTRKQLVRERTSHTQRIQKTLECANIKLDSVVSNVVGVSGRRMLEALIAGQTDPKELAAMAHGRLQATPAELEAALRGRVTAHHRFMLRLHLDQIDSFDEAIARIDKEVNDNDQNFRAAVELLKSVPGVGSLAAEVIVSEIGIEMNRFATAGNLVSWAGLCPKNDERAGKRRSNRLRAGAPWLKTTLVQCAWGAARSKGTYLHAQYVRIRARRGNQKAICAVAASILTIVYHMLKDGTFYEDPGPDYFDKRNKNQQANKLVNRLHNLGFNVTIQPAAA

SEQ ID NO: 152481 - protein, 336 aa, unidentified
MKYIGLDVHKKNTCACIMNASGKEIHSMEVSSKPSGLEKIAEYMGDEEYAVLMESSTYSIRVHRYFADRGVPAHTAHAKYLSMITKSDRKTDKIDASHLARYLRLHLNNELPLSMSYIPDRKADALRALCRLREDLTHEIGDSIRKIKSHMSSVGIDIPYPVSSAKTKKFASYLRTWHRDDLTLMNRLDMLETLMKKAVEIEKEMAIAGKNDRNVQLLMTIPGVGMQSAVQMMSMIIDVNRFTDSEKLCSYFGLAPRVRDSGGKELHGRMTKNGDPMMRAVLDRVTYVHICNCDSSITEFYNRKSNENKKKALTSASRKMLCMIYAILSRGTGFAA

SEQ ID NO: 152482 - protein, 332 aa, unidentified
MRYSYVCGIDISKHHLDLSLIKGAGPQLFSGRCENTPNDLEALLNELPVDDLSSVLFCAENTGMYGYILQQIASNQSLALWIEHPGQIKACNGLQRGKTDPADAERIARYGWRYQDQVRLWQQADSELDQLRYLQSEAVLLVADRAKYKGQLSDQADYMPTAVYQSKQARLAAIIAVFDEQIAQIECQIKTIIAGSQKLNRQNRLLQSIPGVGPRVALAAIILTKGFTCFDNARAFCCYCGLAPFVWHSGTDTNTKARVSHRADKRMKSLLHMGAMAAVKRPGELKIYYERKCKEGKPKMSVINAVRSKLVHRMFAVVKQNRMYQPAIPTIA

SEQ ID NO: 152483 - protein, 334 aa, unidentified
MSYTIGIDVSKDRLDCAGRCNMDQVKTTRRHSTNTPKGFSSLLIWAKKISGLCAKDLSFIIEPTSIYHDKLVAFMHACGATVYLVNPARVRKFAEGIGILSKNDVIDADLLSHYGLAAKKLIAFKPLSQDICALTSFMNRIRTLDKDLRREQNRQEKSGRASVFDKLEEKSIQRLVKQRKNEIKRFEEAIRKLVKQSDLLRKDYELLLSIPGVGEKTAWIMLVVLKSQVFASAKEAASFIGLNPIEKRSGKKAYRRPRLSKAGNGFFRQALFFPAIVATTKNPDIQAQYERLLENNKTKMCAIGAAMRKLVHICYGVLKSQRPYESQRQVVKRS

SEQ ID NO: 152484 - protein, 429 aa, unidentified
MNQVPVAGIDVGKRFSEMAILSPSNDVYARIRINHDSYSSFERALELLKKAEKEFAAKPVVVMEATGHYHKILFQSLIDVGYQVCVVNPIQTDSIKNIGVRKVKSDKADARKIALLYRFKQLNYSCIPNEDIDCLRSLCRHYYKLSDQFTAYKNRLLGIVDQLFLSFTDVFSDVTSVTALVILEKYPTAEDILKADKETLIALMKQTSRKNLKWASDKYEQLYLKARDFKSLSINSIANITMLKANIAMLKTLKQSMDDALKAIYELLEQDSKRDMPLLFLSIELLCSIPGIGLLTAATIISEIGDFSAFSKPGKLAAYFGIDPSVKQSGQFKGTQNKMSKRGSNLLRRVIFTSALANIRKKCNGENINPVLYEYYHEKCKNKPKKVALGAVMHKLVNIIFAVLRDKKPFELRNPEEHAKLLIAKKLAV

SEQ ID NO: 152485 - protein, 357 aa, unidentified
MSSKHNGAIASVIGIDIGKNSFHIIGQDQHGAIVLRQKWSRGQLEARLANVPPCLIGMEACVGAHHLSRKLQALGHDARLMPAKYVRPYSKGQKNDFRDAEAIAEAVQRPTMKFVATKTADQLDLQALHRVRERLVSQRTGITNQIRAFLLERGIAVRQGLRFLRAELPRILATRADVLSPRMLRLVEDLAGDWHRLDERIEGLSAEIEALARQDKGCERLMTVPGIGPIISSAMVAAIGTGDAFSKGRDFGAWLGLVPKQISTGDRTILGSISKRGNRYLRALFVQAAWVVLVKLRPDQWQSYGLKSWIEAAKKRLHHNVLAIALANKLARIAWAVLNKGRAFECVKTDETASQPA

SEQ ID NO: 152486 - protein, 313 aa, unidentified
MKSSRYVGIDIAKDHLDVAVRPEGKVWTIPNKETSIEDLAEQLKDLEPELIVMEATGGFEQKVASVLATNGLPVAVVNPRQVRDFAKSTGKLAKTDTLDAKVLAHFAEAIHPEPHYLSDEQSRKLKSLVSRRRQIIEMQVSEKNRARLCDKNVREMIVEHVDWLEKSLAEVDIQIAQAIQESPIWHEKERLLESVPGIGKVTSSVLLASLPELGSLDRKSIAALVGVAPFNRDSGNMRGRRAIWGGRAPVRCALYMATLSSVRFNPLLKDFYHRLILAGKPPKVAITACMRKLLVILNAMTHANQLWHAPMAV

SEQ ID NO: 152487 - protein, 341 aa, unidentified
MKNLFIGVDFSKEKVDVAIIFADGLTETAARVFNEFKTTVSGYKQLVKWVEQNSYGIDSSLWLFCGENTGDYSKGLCNFLYGKGYDMWLENAKSIKDASGLRRLKSDRADASMIAEYAMRNYDKAVMYEPLSESLAQLRELFLYRQMVVRHRCSFQVRRGEKRLTMEKSPIKTMISQSGRHIVSELNKEVEKIDKRIAELIKSDEELTEVFTIVTSVPGIGTQNAVCLMVYTDNFRRFNYDSRKIACYYGIAPFGKDSGTSVHSDPRVHYMANRQIKAMLTQAALAAVNFNPIMARYYMRLVERGKKKQVALNNVKNKLVHLITAMVRNRQLFTTEYKITA

SEQ ID NO: 152488 - protein, 426 aa, unidentified
MKNREVLSTLFIGIDVSSKMNDICVIDFDETRYLEASITNNQPGAVSLAEKLASIMTTHPEFTRMVIALESTASYSTHIATFLSSTEILMPFKPFVYCLNPKTVANYKKSYVSVGKSDPIDSFMLADFARVGRIKSEPWRGSQFLALQRLTRHRLHLVEAITREKSYMLSNIFLKFSELAVLPKDESPFCNNYGATSAAVLTEFLSPEEIVSIPSAELVEFICKKSKNSFADPQLVAKLLKQAAVNSYKLDKCLYEPLTISIASSFNCISAFESEVKKLNKAIERAIKGFNTNEYQSLLSIPGMGPVLSSGILAEIGSVKAFPSHESIAKYAGIVWNPNQSGNFSAEESKMSKAGNRYLRYYLIEAANSVKNHAPIYTDFYHKKFNEVTKHQHKRALALTSRKLIRLIFGLLDNNQLYSNTVEQKN

SEQ ID NO: 152489 - protein, 360 aa, unidentified
MQTKVNEKLFDGQSIYVGIDCHKKNWTVTILGEQYEHKTMSQNPDPDILASYLKRNFPGAAYNAVYEAGFNGFYSCRRLRQLGINCDVIHAADVPTSNKEKIQKLDPVDSRKLARSLRSKEFEPIHVPDPNLEADRALVRQRFRVMKDVSRTKSRVRSLLFQFNISVPDRFTLCQARSWSKIYINWLKELQLEHESLKQTLDNYIRIGEIQRKELLSVNRQVRSLSQTDAYRSNYKLLISIPGIGFLTAMTFLVQIGNIRRFERLDDLCDYIGLVPMMHGSGDKMSTGKLINRGRKELKIMIIEAAWEAVRIDPALMVRFNELARRMNKNKAIIRITRKLVSRMRSVLMTQKPFKLGITE

SEQ ID NO: 152490 - protein, 427 aa, unidentified
MSYRIAGIDVHKRMIVVVVADVDVAGDYEFERRQYGSSPAQLRLLAAWLVEQGVEEVVMESTAQYWKPVWASLERYWKPICEKREGAGPMSGSLHLAQAQSNRGARGRKNDFADAERLVRRLVAEELTLSFVPDAEQRLWRTVMRTRYQLKCNQVQLQNRLEALLEEAHLKLSSLVSDLLGLSGRRMLQAVAEGETDPAVVAARADCRLRATQEQLCDALGAYQELHPVYRRLLKTALEEWERIEAQIAQLGQEMASLIGPQQEQVQRLAEVPGLGVDSGQQILAEVGASAATFPSGRALASWVGACPGEEETAGVNRNRRSPKGNRHLRRILNQAAHAAVKLKGSIFALLYRRYVVRFGHNQTIAVIAHRLCRLIWKILHEGVRYEERGPAVSQRAKQRRTARMIRQLRSLGYSVELLHAAAGVPA

SEQ ID NO: 152491 - protein, 418 aa, unidentified
MTDDIHWFVGFDWATEEHHVCLFDAEGNRVAERKVKHGGAGLQELCSWLIERTGARAQEIAVAIETPRGPVVEVLLERGFQVFALNPKQLDRFRDRFSMSGAKDDSRDAQVLGDSLRTDRRAFRRLTIDDPLVIELREWSHIYEELKQEQSRLSNRVRDQLWRYYPQAGELGDPAANWFLDLWDQVPTPAKAARVAEKTIARILKNHRIRRFDAAEVLRILRQQPLTVASGTIAAATAHIGTLAARLRLVNQQIKQAEQRLDELCAAIEAAAETTPGQICEQRDMAILRSVPGLGRITIAALLAEACAPLRRRDYHALRVLSGQAPVSRRSGKSRIVLRRYACNPRLQSALHHWARIAVQHDPISKQRYAELRRRGCGHARALRTVGDRLLGVLCTLLERQTLFDADYKNSQIAAAAA

SEQ ID NO: 152492 - protein, 369 aa, unidentified
MSDVITYVGIDAHKKDLFIAMLVGQQAKPVAWTVANEPNAVRRLAKKLEREAPGPVHAFYEAGPCGYALQRQLTTPRVQCDVVAPGLIPQKPGERVKTNRRDARKLVELGRAGLLTTVRPPTPEEEAVRDLCRARDDAREDLQRCRHRLGKLLLRRGLQYRVGRQWTKAHRRWIDSLTWPHDAERVVVEDYLLAIDQHETRLKELDQQLAAVAETEPYREPVAWLRCFRGIDTLSAMLILAELHDVRRFPSPRALMAYVGLVPGENSSGEKHCRGRITRAGNALVRRLLVEAAWHYQHRPGVGVALARRRKGQPGRIVAIAEKAQQRLCRRFQYLAVLNKPRPTIAVAIARELVGFLWAALQPALVVAN

SEQ ID NO: 152493 - protein, 452 aa, unidentified
MAKRKEKKIKSKVNPLHVMELNAAGIDVGATEIYVAVPDDRSEKPVRRFDTFTCDLHKAAKWLKECAIESIAMESTGVYWIPIFQILDSYGFKVVLVNARHVKNVPGRKTDVQDCQWLQFLHSVGLLRGSFRPAQDICAVRSLLRHRNNLVKAASTHVQHMQKSLTQMNLQIHNVISDIAGHTGLAIIDAILSGQHDPNKLAELRDPRIKADKKTIVKSLIGDYRREHLFTLKQALQSYRNYRQLIMDCDLEIEIYLKEFDSRIEIDESQLPPPKKTKKKPRGNTPDFDLKTHMHRLLGTDLSHIDGINDLTAHVFFTEVGPDLSSFKNASHFCSWLGLCPNNKISGGKILSSHTRPGSNRMAQALRMAANSLWNSKSYLGEYFRRMRARHGAPKAITATAHKLARIIFHLIKHQKSFDETIFAEQEKIHQQRLKKRVIKQANSLGLKIVPA

SEQ ID NO: 152494 - protein, 361 aa, unidentified
MLHIGIDVHQKSSVFNVFDPHEGREGGTHRSQKVETTADGFRKVLEPLAGRCEVVFEVGPMAQWVAALVRPYAAKLTVANPSQIPWLFRAGRKNDRIDAKKLSILSYLGQVPKVHLPPPEVSEWRGLINERRQLVTKRTRAKIQIRALLRTQALRCPQKSVWTRCGMIWLKALKLKQILKGRITRLIDEMDFLIGQITALEKQLNELAEKQPAVALLRTIPGIGPRSAEALVAYTDDVKRFSNRKQFGSYFGLTPTEDSSGERVRRGRISKRGPSVVRWVLVEAARCAIRCCPAFRAFAERVARGRKDRRKKAVVATARKLTAIAFGMLRTGEVFDIARLAPPQTTPQKKAEASLEPKPAA

SEQ ID NO: 152495 - protein, 388 aa, unidentified
MIHVDDLSRSLIAFEQISTLVIVVELSQSSWLAAGVVPGIERRPLKKLDPDPTALLHLVEGWRDRATKAGRAITRTVLAFESGRDGFWLARWLRVRGVETFVMHSTSVAVSREPRRAKTDRLDTEMLIRVFLGWLRGEPRHCKMVAITTLEEEDARRPSRERENLLDERTRIINRMKAALVRLGIRGFKPGLLTAPQKLDALRTPEETPIPPNMLDEMRRDMARLAWVREQINAIEQARLERLERAPATGRHAMVRMLARVIGVGVETADMLVQEVLSRNLRDRRAVARYAGLTGSPDESGSKRREQGLSKAGNARVRRGLIQLAWRFLRFQKDSALAQWYRGRTEDTAGKRKRTMIVALARKLLIALWRLVTIGEIPVGVALRPAVA

SEQ ID NO: 152496 - protein, 356 aa, unidentified
MSRDIKYIGMDVHKEATVIAVQNGSGKLVMESIVETEASSILQFIHGLRGELQVTWEEGTWAAWRYDLLQPQVERVLVCDPRRHALLKEGNKSDKIDARKLADLLRTGMLRPVYHGEHGLRTLRELGRSYRTISQDLNRVMNRIKALYRGWSIPCAGTQVYALRYREEWLHKIEPAGVRRRAELLYQQLDGLQALRRTLRPELLAESRKHKASKLLRQIPCIGPIRAARLLALMQTPHRFRSKRQLWTYSGLGIETRDSAQYRFVRGQLQHAKKPQQIRGLNQNHNHEMKEIFKGAATRASCGVGPLRDFYVALLAKGMKPEMARLTLARKIAAIALTLWKKEERFDAEQLKPQAA

SEQ ID NO: 152497 - protein, 347 aa, unidentified
MMIIGCDFHTRTEQIAMLDTETGEVVERKLDHESGEAKRFYAGLKEPALVGIESTGYTIWFAEMLGELGHELVVGEAGKIRAKETRRQKHDRRDAEHILNLLVRGDFPQIWLPSGSERDVRVLLEHRHQLVQLRTRAKNGVQAMALSYGLRRRGRLWSQAGRAELQRLPLREGMARRRADLLNLLAQLSVWIKELDQRIAEEVARREDAQRLMTHPGVGPLTALGTVLVLGPVERFPDAKHLTSYLGLIPQEVSSGGRQRFGHLTKQGNRLLRFLLVEAAQIASRYDPGLGRVYRRLAFRKGLPSAKVAVARKLAIRLYIMLRDRIDYTEFCRRGSHAGMLGDVALV

SEQ ID NO: 152498 - protein, 361 aa, unidentified
MAFPGGYVVENMAIPLGKEPFNGELCRSRSTQTSNAVGCFERRAAAVQFRFSNDPKTVDGVLKKLPRGTKIAVEATGSWWWFVEKARELGHEVSLSHPKQTKAIAHARLKTDKVDAVMLARLLKADFLPTVWIPGEKERYVRELLAHRVRLVRTRTAVINELHAVYAKRNVEVPGMIWHRIRPVPWRAEELSGYAPRIVSENAELLKLINQQIQNLDKELVKAGQEDPQAKRLMTIPGVGVATAVAVSCWIGDIRRFPSAKKLVSYFGMAPKVRQSANRETHGHISKEGSGMVRWLILQAALVGIRMSKGPARGHYIGVSRRRGKKIARIAVARKLLGTIFHMMKEEIDYEEFLKRGSNAQ

SEQ ID NO: 152499 - protein, 369 aa, unidentified
MKRVIYVGLDVHADTIAVATAMEGRNGEVRFYGVIENTADSVLRLTKRLSAAGPQPVFCYEAGPCGYGLHRLLTKHGFDCAVVAPAMIPRRAGDRVKTDRRDAEMLARLWRAGELTPIWTPDEEQEAMRDLIRTRKQALEALKVAKQQLLSFLLRHGLRYERPTYWTKMHWRWINELRKFRYQHQQVAFEEMKRAIRQIEERIRTLDQAIEDAVKFWRFGPLVDALRALRGVNTTIAATLAAEIGDIGRFTNPRQLMAWLGLVPSEHSSGSTTRRGRITKTGNALARTMMVEASWSYRHPPREQHPFLRRSAHLPQEVRDISWKAQTRLCKRYRDLSRTGKPQPRVLTAVARELAGFIWDIARKVPLPV

SEQ ID NO: 152500 - protein, 390 aa, unidentified
MYYCGIDVAKRKHAIALLDEHGQPVQRPFTIDNTRAGFDQLLQALAQRSGPVLIGLEATGHYWWALYEDLTQHNHPVVVLNALQVHAFRKSGVRKVKSDRTDATWIAEFLRFSQPAPAQPTTPVLLQLKEVSRFRYHLTEQIGDCKRKLLSILDRVFPEYETLFSNVFLTSSRQLLAQAASAQELATFDLAELTDLLKTASRSRFGRTKAVAVQAAAQQSVGVRFLADAAQLEVRCLLAQIDLLEEQRDQVDAALAQLMAQVPQHLTSVPGVGPTTGAALLAEIGDIQRFDAPEKLVAYAGIDATVYQTGQFEARQMHMSKRGSPYLRHALWQAASMAIVHDSELRTYYDRKRQEGKSHGTALGAICRKLITRIYIVLKENRPYEVRTQH

SEQ ID NO: 152501 - protein, 364 aa, unidentified
MKKLTTAATNWIGKQQRLTIGLDLGDRSSHYCVLDESGRIVTESKTATSPKAMEAVFGGMTRSRIALETGMHSPWVSRLLSQHGHEVIVAHARNVRLIGESRKKDDRLDAQTLARLARIDPELLCPVKHRSAKAQADLSLIRARAGLVRARTALVNTARGLAKSYGQWLRGCNVRNMNPEKAEALSPELQVALQPLLAGIEAVSEQIGEYNERIEKLAQESYPEVKLLKQVKGVGTLIALTFLLTLEDQHRFSKSRDVGCYLGLQPGRRNSGQSEPQMHISKEGDPYLRTLLVQGAQHILGPFGADCDLRRWGLKLAERGGRNGKKRAIIATARKLAVLLHHLWVSGEVYEPLHNNRTAIAVAA

SEQ ID NO: 152502 - protein, 351 aa, unidentified
MNKFCKSKADGNVFNTMFVGMDVHKNYLQVAVLDEKGKVLSNSRVDNNLIKVNKFFDSLHSGSNTKVVMESSGMWFNIYESLTKRQLDVRLSNPVKTRAIASAKIKTDKLDAIKLADLLRGGYIAECYVPDRRIMDLRELVRHRAALVRMRTKLKNKIHSIMVMNGTSISYDGTHSFTKGYIEKLKELEDYRINGYLRIIESLNDEINAVSKKILLLAQEDEMAKLLMTVPGIGYYSALLIVSEVGDINRFPDSYHLCSYAGLIPSTHSSGGITYHGSITKTGSKYLRWIMLECLHAHIRNDKNSNVTQFYQRISKKKGNSKAAVAAASKLLKIVYWVMKQKRKYNKSGST

SEQ ID NO: 152503 - protein, 403 aa, unidentified
MNAAGIDVSKGKSMVSVMRPLGEVVAKPFTVCHTGSELKELADYLKSLDGETRVIMEHTGRYYEPVAQFLHDAGLYVSAVNPKLIKDYGNNSLRKVKTDKADSKKIAKYGLDNWGELRQYASMDTIRYQLKTLNRQHTLYTKMKTAMKNNLIALLDQTYPGVNALFGSPAREDGTQKWVDFATSFWHVDCVRGMSQTAFTERYRKWCKRNRYNFSSDKAAEIYTGAKDQIAMIPKDDLTKRLIQQTIDSLNTVSKTVEQLKAEMLKLASQLPEFPVVMKMHGVGDSLGPQLMAEIGDVTRFVHRGSITAFAGVDPGANQSSEREAKSVRTSKSGPPELRRTLFLVMDGLLKSMPQDDPVYQFMDKKRAEGKPYLVYMTAGANKFLRIYYGRVKEYLASLETAD

SEQ ID NO: 152504 - protein, 480 aa, unidentified
MAKTQKSTSQKSRSQKSRSQKSTSRSRSKQKNRAKLKSQDWTLGLQVVHPKAAGIDVGNAEHWVAVPPHMDPEPVRQFGCYTVDLVALADWLQGLGIQTVAMQSTGVYHIPLADILAERGIRVFVVNPWETKNLPGRKSDIQECQWLLKLHVYGLLRNSFRPEEEILRMRTYWRQRQQHIGDAACHIQHMQKALTQMNVQLANAISDISGWTGQAIIEAILEGERDPQKLAELRDPGVKASAEEVAQSLVGNWREELLFVLRQEYESYQALQGKIGACDEQLKKHYQTMEEKADPKTLPPCRREKRPHGNVPKCFDLRSELYRATGVDLTAIDGINVLTAQTVVSEMGYKMDRFETEAQFVSFMNLSPNNKISGGKIIGRDKRKVRNRAGQALRFAAMSLLRSETYLGAQYRRLRTKLGTPKAQKAMANKLARIVYRMLKYKEAYVDKGRDFYAQKYRQQQVRMLQRKAAELGLQLVEAA

SEQ ID NO: 152505 - protein, 343 aa, unidentified
MGEVSTIGLDIAKSVFQIHGVDVDGAVVMRKRISRAKLLEFFATLPACLVGVEACPTAHYWSRRLGALGHTVRLMPPSYVKAYLKRSKNDANDAAAICEAVTRPSMRFVATKSEQQQSGLMLHRSRQLLVCQRTMLSNATRGHMAELGIISAKGRNGTAELLEIIADEHDDRIPSAARFSLDVLARQYAVVRAQIVAIEKRIHAWHRSSEESRRLEEIPGVGPIVATALVAEVGDWKEFTSGRSLAAWIGLVPRQHSTGGKERLGRISKQGNRHLRWLLVAGAMAVIRYARQHGTKRPWLARLMDRRPLKVAAVALANKIARMAWAMMVRGERFKEPKLLPAA

SEQ ID NO: 152506 - protein, 340 aa, unidentified
MGDITTIGLDLAKSVFQVHAVDEAGTVMMRKRLRRSQVLAFFAGIPPCLVGLEACATAHQWARELISLGHEARLMPPNYVKAYVKRNKHDVADAEAICEAVRRPSMRFVPVKTAEQQSALMMHRARDLLIRQRTMLVNALRGHLAEFGLIEAQGLHKVARLIAIVMDETDGRVPDIARQVLKMIVNQIEDTQTRIVGLETQVLAWHKSNPVSQRLATIPGIGPIIATAIAATVADPNIFRSGREFAAWLGLVPRQNSTGGKARLGGISKRGDSYLRRLLVNSAHTVLLCSKQAKTDLWLTSLLSRKPRLVVAVALANKTARVAWAVMSKQDIYRHAAVAA

SEQ ID NO: 152507 - protein, 328 aa, unidentified
MTDLTLGIDVSKDTLDVCLLSPDCRLTRRYSNDHKGHRALHGWIKKRCGSLRPHACLEATGQYGESIADFLFQRHYSVSVVNPLKIKRYAQSLFIRNKTDRADAQIIASFCQQRTPALWMPPAPHYRSLKAMARRLDDLKNALIQEKNRLHATGGEGWVAANITCHIEYLDEAIATLKKQIQDHISQHPDLRRKRELLCTIPGIAQLTAARILSEIPDLGQFESARQLAAYSGLTPRNHVSGTSVHPRARLSKQGNVHLRCMLYMPAVVAKRYNPIVVRFYQRLVDRGLAKLAAIAACMRKLLHIVYGVLKHEAPFDPNYLANQPSAA

SEQ ID NO: 152508 - protein, 373 aa, unidentified
MHKDTIVVSLAKAGLRGTLQEVREYGRVLNTPAALKAMATKLAAGGNELRFCYEAGPCGYGVQRQLSGMGHQCAVVAPSLVPRKPGERIKTDRRDANNLARLHRAGELTPVWVPDQAHEAIRDLVRARVAAVRSLRQARQQLFGFLLRNGHHYHRTPWTAPYRRWLASLKFEQAVHYTVLEDYIAAVEAARERRDRLEAQIIVLPEWSLAPVVEALQALRGIALIAAATLVAELGDMTRFDNPRQLMAYIGLVPSEHSSGRSRRQGEITKAGNATARRMLIEAAWSYRFPARISQQQLLQQAHLAKPIRDIAWKAQERLCRRRRKLIRAGKPKNVVAAAIARELAGFVWAIATETNSVGGRKGSGSPAGVFAS

SEQ ID NO: 152509 - protein, 332 aa, unidentified
MSSHEIVGIDVAARKLVAIGERVALAEYENTAAGRSKLAKALSQSPRPVRVVLEATGIYFLDLACELAAAGIAVMVVNPKATHHFAEAILQRRKNDPVDAAMLREFGRRMDFVPWQPPRHELFAFRALTREAQALSKAVAAAKNRLHAITATQLAPDTLIRALERQLAQNQALVDELVAAALAETKTNRELARLVARTDSAPGFAAKPAPGSEQGAAVLVVGELAVLPPMTARQWVAQAGLDVREECSGTSLARRPRLSKRGNKRLREALFYPALTAARCCPLAGAFVERLVAAGKTRLQAIVALMRKLLHGLHAMWRNDEDFDAEKLFAPA

SEQ ID NO: 152510 - protein, 341 aa, unidentified
MGQLNTIGVDLAKNVIQVSVVSPSNKELLNRALTRTKFKEFLAKQQPALVAFEACASSHYWARTAQRHGHDVRILPALSVAPFRQGHKTDQNDALAVAEAAVRPNLKVAPIKSLDQQGLQSIQRSRELLVQERTALSNHIRGLLFEFGIVMPKGFATLHARIPEILEDGENEVPHIFRSTLQLMYRRLLALKEDLDVLTRQIEQLVQANDACKRLLDIEGVGPISAVLLYATLGSGEAFHSGKEFSAYLGLTPKQYSSGGKTKLVGLSRHVANKRLRAVLIQGARSYIHRVKEPKTTKDQWLLAMVDRSGYGKASVALANKNVRTAWAMLTKGTEYKRVAA

SEQ ID NO: 152511 - protein, 350 aa, unidentified
MDKFIGIDVHSSSCTVAVIGPSGKRLQTQVLETNAKVLIDFIRAIPRTRHLCLEEGTHSSWLYEVLSPHVEEIVVAGVRQERGPKSDKIDAFGLAEKLRIGAVERRIYKEQGTFGALRELCRAYNVLVADSIRVQNRIKSLFRSRGIPCSTRQVYSTGRREKWIEKLSAKSQPLAETLYLEYDALEQLRERAEKAMLDEARKHAMYRILKTVPGIGDIRAAQVLPIVVTPYRFSSKRSFWSYCGLAIVMRSSSDWVRTQDGSWARAMTQQTRGLNRNYNRVLKYIFKGAATTVIGRSKDGPLYQHYQMLLDGGTKPSLARLTIARQIASIALSIWKSEEVYDPKKLSHTT

SEQ ID NO: 152512 - protein, 373 aa, unidentified
MTTNGARRSAEATRTEVVLGVDTHLDFHVAMVLDHLGRRLGESKVPTTTGGYRSLLSWAEGFGSVRCAGVEGTGSYGAGLTRYLKSMGITVMEVERPKRRHLKRNGKSDPKDAEAAARAVLAGEAAGEPKSADGQVEMIRVLRAARCSAVKARSQAANQLQALRVTAPEKLQRHLCGLSTSELVATAARFRPGNGPDDVETATRFALRSMARRHEALSEEIAELDEQLDRLVAEVAPGLICLPAIGTHHAATLLVVAGDNPERLGSEASFASLCGVSPVDASSGKVVRHRLNRGGNRDANRALHMICVVRMGSDRRTRSYVARRTAEGKSKREIMRCLKRYIAREVYRVLLSSTTVEPSPIRSERGFVGAYVA

SEQ ID NO: 152513 - protein, 314 aa, unidentified
MKAHVFVGIDVSKRSLDVALPEGVERVSNEPASITDLAERLSQTAPALVVLEATGGYETGLVLALQRRNVPVAVVNPRQARDFARAQGRLAKTDAIDARVLARFGEAMRPAPLPPIDASRAALAGLVARRRHLVEALIAERNHLEHATAAVTAWIDQHIAMLRDQLAQVDAAIAATVEADRALAHRQAIVTSIDGVGPATAAVLLAELPELGRIEHKQLSALIGVAPINHDSGQFRGQRHIAGGRASVRCALYMATLSAVRHNHTLRLFYQRLRDNGKPAKVALVAAMRKLATILNALVRDNRPWQPALQQDGC

SEQ ID NO: 152514 - protein, 352 aa, unidentified
MSKQVTKDSPKLFIGLDIHKKSWRFHFTTDLFSGSGHTFPPGSELIKNYVRKNYPNYEVSVAYEVGCFGYNPARDFESFGWDTFVVNPADIPRPSKSKFMKTDKIDAKNIAQQLKSGNLKKITIPEPVRESLRALTRQRTALVRDYRRIKSRIKSLLLYYHIAIPEGMDSPKWPKRFLEWLAVLDLEHTNTERTFRSMLNQYHFIDKEIKELSNDIRRYCKKHHKEDYMLLRSVPGIAGLTAAYILSELGDLRRFTSFKKLASYVGFIPSMQQSGEGLYTGGSTPRANRHVRNMIVEASWQAVRKDPVMQNYYRSHAGKNSKAVIFKVGRKLLSKIHAVIKTETPYSVGVIS

SEQ ID NO: 152515 - protein, 343 aa, unidentified
MQSISTIGLDIAKSVFQVHGVDAAGQVVDRRQLKRRHVLPFFAKLPPCLIGIEACASSHYWARELQAVGHTVRLIPPAYVKPYVKRQKNDAADAEAICEAVTRPNMRFVPIKTVEQQGCLVLHRTRHLLVRQQTATINSIRAHLVEFGIVAPVGRRGVEHLLEVIADADDPRVPEVARACVATLGILLRQLKSQVLELDRRILAWHRSSEASRRLNHIPGVGPLLATALVASIADPKALRSGRDFSAWIGLVPKQNSSGGKDKLGNISKRGDRYLRSLFTAGALAVIRYAKIHGTKHRPWLVALLARRPTKVAAIALANKLARIAWALMTKGSHYRQPAALRV

SEQ ID NO: 152516 - protein, 459 aa, unidentified
MKIVNTHCAGIDVGSRSHYVAIGQSDSDVREFGVYAEDLKELSNWLLDNGINSVAMESTGNYWQNLYVELINSGIQVVLTSGRFTKNMNRKKTDVRDCQWIQKLHSLGLLPSSFLPDSSTEKLRTLCRHRANMIDLKADASNKMQKFLKLLNFRLDVVVRDVTGLTGLKIIEDICKGILNPEELAKNRHYNCRKSQNEIAKALVSNERDDYIFGLNQEFERHKFYLQQIDKCDQKITGFLNQLLKCSSPKKPEEKSYKRNNKNSINGMDLNKVSFQYFQGVDLYQIPGVSHSTILSIMSEIGPGGFEKFPSAKHFASWLRLAPNNKISGGKTLSNRIPKGSSRLKIALRNAANAVGNLKESDLGRFFTKIAFKKGRQAAITATARKIAVILWNMVTKKEQYLTKTTYIFLDEKRKQIALIRKKIAKFGLDPNELGIFTQERYREKWNSKQTNIQTVSLR

SEQ ID NO: 152517 - protein, 348 aa, unidentified
MKPEFDIDKSFRQCVGIDISKDKFSACLYMQNAEGSNCRSPFVEFANTKTGFNQLMKWTRKECIKEHAIGFLMEATGIYYEPLAFHLQKLKQTVYVVLPNKARKFAEYKGILTKTDAMDSYVLGWLGCEDRKLKPWTPPKKIYRQLRQMTRFDSAMKGQRTALLNQVEALKHSEMPDSFVIKATLSVINEINRQLEANEKQIKKLIKTDEELEKRIRHLSTIPGVSLITIASIVAETRGFDLITSRKQLASYAGLDIPAHQSGKEDRPRHISKKGNAHIRAALYMPALVATRFNDPLKEDYNRIVLKHATKRKVAIVAIMRKLLLLMYTVWKKEEDFDNDIDKKGAGN

SEQ ID NO: 152518 - protein, 306 aa, unidentified
MIVQGTSVGLDVHALSVVAHAIDEETGKIARARLCPDHREVLGWLHQLRGPVRVTYEAGPTGFGLARAINNSAGMECLVAAPSKLQRPAGDRIKTDAKDAAHLARLLRLGEITAVTVPAPEIEAVRDLVRARDDARADLMRVRHRLSKLLLRQGIVYSGGTPWTCVHEAWLRKQRFADHHLKAAFDHSFDAVLAATAARNRLDEQILDVAASARFADPVNRLGCLRGISALTGLALTVEIGDWSRFTGSSIGAYVGLVPSEFSSGTSRVQGSITKAGADHGIENRLVICGLICEPTPSRNRPPEYS

SEQ ID NO: 152519 - protein, 410 aa, unidentified
MLFVGDDWAEAHHDIEIEDDQGRVLVRRRLPEGVAGLAALHALVGDHLPEGADPEQVLVGIETDRGPWVQALIAAGYTVYPINPLQAARYRERHGVSGAKSDPGDAHVLAEIVRLDRDHHRPAAGDSVLAEQVRLAARAHQSMIWMRQRAANTLRSLLRECYPAALEAFGDDLTGRDALAVLSAAPDPATGRRLTPYRVAVLLRKAGRQRNLDKQAEQIVAALRSEQLPVRVELASVHAASVSALVAVLATMVAQTGVLEEQVRLGFGQHPDATIYLSQPGLGTILGARVLAEMGDDPTRYADARARKNYAGMAPITRASGTKRVVLARYTRNRRLADALYQQAFSALNASPGARACYDRHRAVGATHHQALRTLANRLVGILHGCLRNHTLYDEHLAWHKEPDKLSPAA

SEQ ID NO: 152520 - protein, 411 aa, unidentified
MVKENFIYVGIDLHKETHTAVMIDCYNQKLGEITFPNRPAAFPKLVTKVKKCNTDGKEVVYGLENAYGYGRALAVWLIDKGYLVKDVNTAISHRQAKHRGAMYRKSDSDDAEAIALATLNMLDKLPDACPNDAYWSLGQLVHRRDNIMKQRTRLVNQLHEQLCIAYPSYKQFFNDISRPTALYFWEHYPSRKYLKGKSVEDLRAELVPVSHNKCSTKTCEKILDAVASDKVKNNAYQDARDMVTLSIVSDLQHYDSQLTEVDKMLEQMYKMLGCTLTTIPGVNVITAVKILAEIGDIKRFSNANKLAQFAGIAPLHLSSSGKGKDVATKQGNRRLQVTIYFLAIQMVQLSSKGTPRNPVVRAYYEKRKAEGKTSQQALICISRRLISIIYGMLKNGTEYRMPVVENAGEKL

SEQ ID NO: 152521 - protein, 466 aa, unidentified
MEVLYARCAGVEVHKKTVVVCRIIPGPDGQPLQEIRTFTTMTRDLLALSDWLTEGGVTHVAMESTGVYWKPVYNLLEGTFTLLLVNAAHIKQVPGRKSDVKDSAWIADLLRHGLLKGSFVPDRGLRELRELTRYRTALVRERAAEQNRVHKTLEGANIKLAAVATDLMGVSARQMLSALCSGRSDTEAIAQLAKGRLREKIPLLEQALEGDFQPHQRFLVAQQLAHIDYLEALIDQVSDEVAQRLEPVPPLPSEPLPSAGGEDAAEAAQLAAAELEARREALHLRLATEDLQEREAVEGPLSFAAAVALLVTVTGISQRTAEVIVSEIGTDMSRFPSAGHLCSWAGLVPGLNVSAGKRHGNKTRRGSPWLRSALVESAHGASRSKGTYLSAQYHRLAARRGKKKAIVAVAHTILATAYYLLKNRTTYEELGDAYYDERDKEAIQRRLVRRLEEIGYTVTVELAQAA

SEQ ID NO: 152522 - protein, 427 aa, unidentified
MSYRIAAVDVHKKMLAVVVADIAGEGEFQFERRKFGATPGELHVLAQWLDQQGVEEVVMESTAQYWKPVWGMLERFWKPARQQRESAPKMAGTLHLCQAKSNHGPRGRKNDFLDSERMVKRLVAQELVLSFVPDAEQRLWRTVTRRKHQLTRAKVVYKNQLESLLEQAHLKLSSFVSDLLGVSARRMLKALAEGETDPVALAALADCRLQATPEQLRDALGACTELNRTFRRLLQMALDELQLIETHIEKLEREAMGLMKEHQDVVQRVAEVPGFGPDSALQMIAEVGPKAATFRTAKKLSSWVGVCPGNEESAGESHSTRSPKGNRHMRRLLNQAAQSAVKVKGSIFELTFSRLLPRLGYQQAIWAIAHRLCRVLWVILHEGVRYEERGPAVSAKSKRTRAARMVRELKKLGYRIEGGPLPAVTRA

SEQ ID NO: 152523 - protein, 453 aa, unidentified
MCLEDRPLLEPNAAGIDVGAREMFVAVPPGRDENPVRVFATFTEDLERLTDWLEQCGVTTVALESTGVYWIPLFEILEQRGIRPCLVNARHMKNVPGRRTDWHECQWLQFLHSVGLLRAAFRPGQDVCAVRTILRHRNELVAAASQHVQHMHKALTQMNLQIHHVINDITGVTGLAIVDAILAGERDGAELAKLRDPHIKADIETIRKSLEGNWRPEHLFTLGQSRDLYRIYQQQIVNCDLEIEKMLQAFEPRTNPVERPLPPDRKRNRAGSKRRKKNGHPHPEFDLRTETYKLFGVDVTQIPGLDENALPLFSEVGRDMSRWPDAAHFVSWLALCPDNDISGGKMLWRGARKVKNRAGHIFRLAAFSLHHSLTPLGNYLRRMKTKLGPEAATMATAHKIAVIFYTMVKNQVEYDETIWDARDAQREKRLEAKLKRQAKQLGYELVPIEPKAA

SEQ ID NO: 152524 - protein, 355 aa, unidentified
MTLTHINPRDYDVFVALDVDRKSYAISFKRSGMQDPKSIKMPADPHRLHNYFTRRFPNDKVVYAYETGPTGYKLHDHLKQLGSSCIMAHPGNIRKAPKDRVKTNRLDSIKLLKDLSSGDLPGIRVPDEAYRQLRHITSTRQHYANDLRRAKQRIESFLLFESIILPELIATRWSNKHIGLLKNLKLDQVRQFKMASFLSDLEYSRQRLLAVHKELQMFLKQNKTLESHIQLLKTLPGFGVVVSAYFLARIGNPENLRNVREIGSFIGLVPTEHSTGDTTNRGHITHMGDPVLRGLLVEAGWVAIRRDKELKQFYERIRSKNPGFRGPKVAIVAVARKLTHRAHRVLKDQRPYEFR

SEQ ID NO: 152525 - protein, 457 aa, unidentified
MGNARKRKIPARLIEDEEYQLRHERVAGIDIAKAKGDVCTRLPAAREGGRRRSRVEENVPARSRDILELGARLLADGVELVVMESTSDYWRIWYYLLESLGLAVALVNSSHARQLAGRPKTDRLDAQWLARLAEIGLLRPSFVPPPEIRALRDLCRARVHMVRDRTRAWQRLEKLLEGALIKLSSQLSSLARVKTGRLILDALAAGERDPKALAGLALGPARARMGELEASLDGMMIGAQHALLIRVHLDRIDGLDRAVAALEDEIAATLEEIPAAAGVDAAGTRAAAPGPGAAVLPAEARLAEIPGVSLDLARAIIAETGLDMAVFPTPGHLASWAGLAPVARQSGPRRGKPGKGQGNGYLKGYCTQAASGAAHTETFLGERLRRLARRLGGNRARCAVARSILTIVWHLLKDPEARYADLGAGWHARRTDHGKKIRGHIRQLEALGLIVTVTEAA

SEQ ID NO: 152526 - protein, 307 aa, unidentified
MFVGIDVAKDRLDVHLKPSGEAFDVARDGEGIDELVKRLAAVSPTLVVLEATGGFEAIVAAGLAAAGLAVAVVNPRQIRDFARATARLAKTDTLDAAVIAHFAEAVKPPPRPLADPQARLLGELMARRRQLIEMIVAEGNRRRLLTARRALRSVDRVLATLKAQLALIDDDIDTAVRGTPAWREAEDLLLSVPGIGPRIARTLIAEMPELGRLDRREIASLTGVAPFNRDSGTMRGRRTIAGGRPVVRSALYMSILVSIRRKLPLAETYHRLRAAGKPAKVAIVACMRKLITILNAILRDKKPWAPA

SEQ ID NO: 152527 - protein, 295 aa, unidentified
MEQITRGEIVRVGVDLAKHVIQVHGVDAVGRVVVARAIKRDRFEARCSQLPAGCVVAMESRSGAHHWARRLSLLGLQPRVIAAHLVSPYRMEGRRAKNDANDAAAVCEATARPTMRFVPVKSAQQQAVLTVHRLREGYKEERTACINRIRGLLAEFGVIVAQTPEVLRRQLPEVLEDASNELPSLARTALQQAQLQWVELECHMAWCDERIEAHAKSDEMARTATQLCGVGPITASALVASVADFGQFKSAAQFGAWLGLVPSQNSSGGKASLGRITKRGDDYLRTLLIQAASLR

SEQ ID NO: 152528 - protein, 345 aa, unidentified
MKKSTTIAIDLAKHSFQVCKLQGSSDEFNKAFTREKLKAWLIQQPPTTVVMEACSTAHYWGRFCCNHGHSVRLIAPKYVTAYRTGQKTDKNDATAIAVASQQANARFVALKSIDEQALQSIDRIRQHLTDSMTATSNMVRSLLSEFGFNIPKGHSAFKRHIIEILEDGQNSLPDILREHVANAFHLHETLAKKRADLETSLTQHLKHHDACRKLEALEGVGPVNALGLYLSLGANGGNFKNGREASACIGLTPKQHSTGGRVTLLGISKKVGQKKLRSSLIQGALAVAKVVDKREPRNVKETWLKSLIQRAGLMKAAVALANKTTRTAWALLHYGSEYQVPLTYE

SEQ ID NO: 152529 - protein, 366 aa, unidentified
MKKVSTVRVNGNMIFKGHKLTIGVDLGDRWSCYCVLDEAGEILLEQKVATTPEAMKQIFEKIPRSLIAMETGTHSPWVSRLLTELGHKVIVAHAQKVQLITKSSRKDDRHDARTLARLARIDPELLGPVRHRSAKAQIHLTVIRARAELVSARTALVNAARGMVKSYGQRLPKCGTQQVSRELTAGLKAELREVLEPLLQEIESLNERIQEYDVRMEKIAKESYPQVELLKQVKGVGTQIALTYILTLEDPHRFPKSREVGCFLGLRPGRRDSGESQPEMHISKEGDPYLRTMLVQGAHYILGPFGADSDLRRWGLKLAARGGKSAKKRAVVAVARKLAILLHRLWVSGEVYEPLRNSDKALRAVA

SEQ ID NO: 152530 - protein, 363 aa, unidentified
MSNYIFVGCDSHDKTLVNKIAVNREDAEKKNFAANRSGRRKLIEYLRKRSESAGGAKVVVVYEASGNGFVLCDEVKEAGFECHVLAPTKIERSSQQKKNKNDDRDAYRLLDIVRGHYLAGTKMPSVWVPDLRTRDDREPVRGRQDLSHKQTVVKTQVQMLLKRHGLEKPEGIGNSWSKALRAWLQALTADARQGCGLRTALASLIRQLEFLEEEIQKVDQAMKQLADTPRWKPIVQAMMKEKGVGLMTALKYSTDIADFSRFRRGRQVGAFYGLVPSSDESGENNDRKGHITRQGSPSGRQVLCQSAWSRVRHDEHEREVYRRLVLKNPKKKKIALVACMRRLAVRLWHVGLQAQLQMKTNEV

SEQ ID NO: 152531 - protein, 407 aa, unidentified
MYCLSFDIAKGKSVVGLFNGQLEPLITPYEIHHVKEAFVALASRLDINQTEIILESTSMYHYPVVSFFENLGFVVIILNPIISKEHKRNLRKTKTDLIDCVNLASIYFEKKFNLQKKHLPIYHQLQSISRHIFTLNESMVRYKNRYHQLLELIFPLYEYTLKNDIKFKSDHMALLKTFPHPELLVNTRVDRLATVLASTHKRMDKRFLKTAQMIKNLAKMTLSSVSKDDVVVDEFIELSNLILDLDDKIMHHKNQLIDLAQTRPDFHKIVSIFGISPYMAALLVAELKDLSSYRTIKQLTAACGLDPTIIQSGKSVDYHGHISKRGNKHARKALFNTVSTIIRISSRINPQNPILVYYRKKRSENKHHYASVIACTTKLLRIIFTLCKNDLTYLSQHNQNHLITPIV

SEQ ID NO: 152532 - protein, 424 aa, unidentified
MPFAALDLHKKVVEAVLLDDDGRILMRDRFPATREALSRFAQHLPNNTRLAVEATTNTWAVTALLQPFVAEVVVSNPLRTRAIAEAKIKTDKVDALVLAQLLRCDFLPRVWIPDEATRQQRHQCTERANLVADRTRIKNRIHAVLHQRLIEAPYHDLFTPAALSWLEQLQLDAPGRSALNRHLRQLAAIENELVQLTDELASEAHASPSAKLLMTLPGIDFPVALTLLAVLGDVTRFPSADKAAAYLGLAPSTHQSGHHCYHGRITKQGSGHGRWMMVQAAQSLAVHPGPLGVFFRKLARKKNRNVAVVATARKLVTIAWHMLRNNEPYRYAQPTTLAAKFSRLRIRVTGQRKRGGTAKGAPRPAAYGSGQGSRAVPSLDQVYKDAELPPLTELQPGENKMIGAAGVVPFTRDIRQPKRVPRRS

SEQ ID NO: 152533 - protein, 371 aa, unidentified
MKIYNLKATPVASVKELKDEQRPKAKQIVLGTDAHLRGYQVGRKIDHGVVGAVESFRSEEALLFFAQKQLERAERVVLVYEAGPLGYSLYRKLKALGVECYVCAADSSEQQRKRRKNNRIDARNLTSKLFNYLNGDQNALQMVRVPSEAQEQLRLTSRQHDQLVEERKRLAAQGNAMLLSQGFGSWSNWWRPKTWARLSSLVPGWLLERLQVWVDVLKMLDEKICQAKVGLARGCSGPRPKGVGALSQMQLRSEVLDWHFYSNRRKIACLAGMVPSEWSTGDSERRGSITKVGVPAIRRIIVEMVWRMILFQPQYKPVQKWQEVLRGSNPALKKKAVVAIGRQLIVDLWRLETGRVTAQELNLVMIEAEGV

SEQ ID NO: 152534 - protein, 361 aa, unidentified
MKTYYIGADVHSNSTELAIEHNGKIVSRHGVPTAIPAIKEILASLGGGKIHLTFEEGPMAGWLYRNLKDTVAEIIVCDPRRNKLICSDGDADDKIDAAKLASLLRGGYLRAVYHSDDEQRAELKQWVSLYHDRVRHAVGMINKIRARCRMHGITIPRNVIRDRLQRPQWLADIHNQILAKQLELLWIGYDATAIQVRRARRQLAVLAKAHSIIKIWSELPGIGLIRAITAFAFLDTPWRFAHKNRLWKYCGVGLQRTASGTDKKGKPKPARLQLAWAVNRLLKNVVLGAVHTAINQNENIFRRDYERMIHESIIPSNARHAVARKMLTVMWGMWKTNSRFNEKLVYAAAVTAGSSFSVSGK

SEQ ID NO: 152535 - protein, 387 aa, unidentified
MHTVTSTTVVATAARANDNTLFASLELSKSKWVVTINSPGSEKFSKHVIEGGDGAGLLELLARLRAKAEQRCGAGVKVVVIQEAGLDGFWIHRLLLAAGIESHVVDAASIALPRRHRRAKTDTIDGETLLRTVMAWARGERRVCSMVCAPSPEEEDRRRLTRERDTLLKERIRHTNRVKGLLSSQGVRDYHPLRRDRFERLETLRTGDGRELPPLLKVEIRRELERIGLVTTQLAAVERARDALIRADAEGPNTPAALLLKLKGIGPEFASLLWLEALFRSFVNRRQVAAYGGLAPSPWQSGAIERDQGISKSGNRRLRKTMIELAWLWLRHQPDSALSRWFRARVGPAKGRVRRIAIVALARKLLVALWRYVTQGVVPEGAVLKAA

SEQ ID NO: 152536 - protein, 394 aa, unidentified
MRASSRQVDGLLEWASGWPRRRWAIEGARGLGQLLSQQLIATGERVLDVPPKLAARVRLLDSGQINKNDPNDARSVAVAALRAHDLPQLSGEDQTMVMRVWSRRYRDLGTLRTQAVCRLHTVLCELVAGGVRKQLRTSQAIELLTRIVVDTPIAQAKLELARDLVADLQRIDTQRREARRRTAQAVAASGTSITDIYGVGPIVAGTVLGYVRDIGRFPNRDRFASYNGTAPIEVSSGDRTIYRLSRRGNRQLNYVVHMAAVSQIRHRGSEGRAYYDKKIADGMTGKCALRALKRKISDALYERMIDDARRRDAGKDPGGQSGNDAVSSVAGSHPGRPALWTSHSRAETNSRTTTGQRSLASRPAPDRRRSSRSAGGVQVEPRPGPRRGRGQERP

SEQ ID NO: 152537 - protein, 468 aa, unidentified
MLDMGSEGCWIFETLISLPKLAIIISRMHECVFERVWEIVPFEDDNICPYQERNKMEKQKNIVCGADIHKKFIMATILSRDGNKIRGRFGMTLDEILRFKEWVISNNCEAVAIESTGVYWIPIYTVLEGSVEVILANAYKVKHTPGRKTDKRDSGWLAELCLNGMIEPSRIFPKDDRDIRALTRAREKLVNNSTQMKNRIHKELESACIKISSVLSDIFGVSGMKIINGLLEGKNIDEILKMITSKRILKKEQELRQAVTNSLDPARILMIRTYLELIEKIESEIEILNKEIMNRMQKLREDLEIAMSMTGMGFTSASTILAEIGNYKDFETAEQLASWSGLTPKVSQSADKLVTGSITKQGSKHMRRMLVQVAHAISKSKNSKLKKFFLHILAKKGKKKAIVALARKVLCILHHLLVNREKYQDSEMSKTKKVKLNWASSPVQMTEQDMINVLVGAGYTVQKMKECV

SEQ ID NO: 152538 - protein, 312 aa, unidentified
MIKTTIGVDISKDVFDAHRLPDGAQRQFANDKTGWRAFIKWLDGSSVERIVFEATGAYHRAFEQAIDKAGLPLCKVNPRLARRFGEALGKLAKTDRMDAAMLARFGTALQPPVRPAPTRLQCDLKELLVARMALVKDRTAAKNRQKNLSCALLKRHAEQRLKQIERQIDEVETAIRDLIEANPDLARRFRILTSIPGIAERAAFALIIDMPELGSLDARAAAGLSGTAPMTRKSGKKTGKAFVQGGRPNVRAALYMPALVAARFNPDLKAKYNQLLAAGKPAKVALTAVMRKLVILANALIRDDRSWSPGNP

SEQ ID NO: 152539 - protein, 346 aa, unidentified
MKQIIRIGMDTSKHIFQLHGVDAAEQPVLRKKLSRKQMLQFFAELPPTVIGIEACGAAHYWARELRKLGHEVRLMAPQLVKPYVARNKNDGRDAEALCEAMSRPRMRFVPVKTAEQQAALMLTGIRDGLIARRTQLSNAIRGYAAEFGRIAAKGLDKLEALLAQIAQDETLPALAREQLAVLGREYGRLQVDLKEIDAKLMAWHRADAVGRRLAQIPSVGPIIATMLVMKAPDPHAFRSGRHFAAWLGLTPKDHSTAGKTRLGKITRAGDEDLRRLLVVGATAVIQQARRGRGHHSAWLLALLKRKSAKLAAVALANKVARIAWKLMVTGQSYDAARMKAEPALAA

SEQ ID NO: 152540 - protein, 343 aa, unidentified
MKLSRVGVDLAKNVYQLHGVDRYGKTVWKRRLRRGQWLQVLTDTVEPGCEIGMEACTGAHHWARELQDRGYTVRLIAPQFVKPFVKSNKNDANDAEAICEAMSRPHMRFVSVKSIEQQDIQATHRVREELKAHRNAKANQIRGLVAEYGLVAPKTLLALRRAIPEWLEDAENGLTDNFRSLLHGLWNDLLTLEDRLKGLDKEIEKLARRNEVTRRLQQLRGVGPLVATALVATVGDGRQYAKGRQMASALGLTPRQNSSGDKYRLFGISKRGDVYLRTQMIHGARAVVSQAKHRDDPLSRWVTDIAKRRHPNVAAVALANKTARMAWAMLKNDTDYDPGLATS

SEQ ID NO: 152541 - protein, 317 aa, unidentified
MSYTSRFVGIDISKSSFDICILPDNRSASFPNTAAGVAKFISVVASLDRLERCLLEPTGGYEHRVLEALLSAGIPVARVNARQVRQFAGACGQLSKTDRIDAYILADYGRRMETKLVSPASAAQAVLVELVARYRQLSHMIVQEKNRREKLGNKAAGRTQEWIEESLTFLESQRQVVVVEMARCLEEDATLSQKAAVVMQIKRIGLRTACFLLAGLPELGSMDKGQIAKLVGVAPLNRDSGQMRGKRMISGGRKPVRDALYIAALPAIRFEPDIKTFYAKLRANGKPGKVALVAVMRKMIIILNARMRSHAATVLDP

SEQ ID NO: 152542 - protein, 427 aa, unidentified
MKKADLLSTLFVGIDISSRENVVAVMDFESTKPISSFAVPNNEPGAEEMAKKISTFITPESGLKKLVIGLESTSFYGVHIANYLSTCRELMPFHTEVYCLNPKSIANYKKSYIGLSKNDYIDAFIIADFARVGRITTKPWRGCQYLALQRLTRHRLHLVKALTREKTYMLSNIFLKFSEFTMLDTEEQPFSNEFGATASAVLTEFLSTEEIVDMSMEKLVEFICEKGRNRFPDPHKTAKLLQVAARNSYRLDKCLYEPLTVAIASSFTMISTYNAEIKKVNQAIEKTIKGLNTNAFLSLQSIPGIGPIMAAGIMAEIGDITVFKSQESLAKYAGLVWRENQSGQFKADDTSMSKAGNSYLRYYFLEATSHIKLHCPEYREYYSKKYAEVKTHQHKRALALTARKAIKLIFGLLAKNQLYSRNRVGQA

SEQ ID NO: 152543 - protein, 372 aa, unidentified
MSQPEVLERGLALLEAAVRKKWLWAGVDLGVETASVCIIDDSGEVLHEGVCPSAADSVRRELTCFRRTRFASVALEAGTGTHVARGLRSLGYPIELYEARQLSKFLRVRRNKTDAGDAQGIAEAGRIGASIVSKVYLKSIDSQALQSRLAIRRHLIRQRVAAINMLGRQIEVFGGRLRCNPLRKGLRSAVEAEIRSLFRSGSSPLVAQLRYLADHCERLIEYQRAMDLELKHAAYENDVCRRLMEIPGVGPLCALTFYAAVDDPHRFSRSSDIGSYFGLAPRVHQSGLTSRKARISKMGNKSVRSLLVHAAALYIHHGNPQSALRDWALRIEERRGRAPSRVALARKLAVVMLAIWKSGGHFEPADRLSVVD

SEQ ID NO: 152544 - protein, 392 aa, unidentified
MELAGCSTWCYTQPVNKQQKQNPSKTHKVDLIKLSADVHKRDFKISRQVGDQNIQPAQTFTPAAAFEWAVKQLASAERVVFCYEAGFSGFSLARRLTDRGVEPVVMCPQRLDERCKRVNTDKRDSRAIASRLDRFLAGNTEALVPVRIPSELEEEERAVSRQRDQLMKTRKRLEAQGRSLLTFKGLNCPAHWWRGTEAGWRATVQQQNWPASVVELLAVYRRLALATETEIAALTRKLEQAAGEHLPPSMPVLPQGFGELSLETLRREVCDWSRFHNRGHVGSFFGMCCAESSSGEQQNQGSITKTGNPRGRHALIELAWRALHFQPEYWVVKKFKPRMDQAKPRSVARKKMIVAMARLIAVDLWRLYTGQTTLAKLGLKAKTGKEYGLKNV

SEQ ID NO: 152545 - protein, 536 aa, unidentified
MPAHKYDFGSCERSIDGVSALRKVRLDLVGEYVSLGMPSRAWVQLNGQEQYVMAKRTRSTFERINLERMNRRQRRELGQRLEKSDPGLEIVHPDAAGIDVGNQSHFVAVPGDRDAQPVREFGCWTSDLVKMAEWLKACGIRTVLVQATGVYWIALKDTVEQQGIEVVVANAQHTKNLPGRKSDVQECQWLMKLHTYGLVRGSFQLAEGMQGVRAVWRLRDRHVEEASRAVQHMQKALSQMNVQLANVLSDISGKSGQAIIAAILEGERDPVKLAALCDWRVKASAEEVAESLQGNWRDEMLFELDQARESYRFALQQIHSCDQKLESYLKVLPTRQVEITLPSPRPSPATVVRAVKDTRQRGYSPNIPGLRDELIRICGVDLTTIDGISVITAQTILAEIGTDMSRFPNEQAFVSWLGLTPSRDISGGKVLRAVRRKVPSRSGQALRMAATALRCSNSYLGARYRHLQKQLPSKASAVKAMARYLGVLVYRLMTKGQAWVDQGAARFEQKRKALNLASLQSRALANGYRLVPVTAE

SEQ ID NO: 152546 - protein, 376 aa, unidentified
MITCFIGIDAHTTNYTLSTAIDAEDKPFNTCKYAPKLTYILKYANALCKKYNLKKEDILLGYEAGCLGFKLQRDLNENGFNCVVMAPSTIPGTAINRRKKTKNDIRDAEAISKALRNDDYSSVATPDEEDEAIREFIRAREDVRMELKRCKQHIMAFCNRHGQHYEETGWTQKHMKWLNNLAFSQPVLKETLNSLLLEYEYLTEKLEEKDRRIEEFAQMDKYRESVHKLTCFKGIKTLTALAVIVEIGDFARFMKAKNFVAYLGLSVGEQSSGNDHNQTGITKQGNRFIRKLLTEAAQCFSRATSKKSKELKKRQEGNVEEVIAYADKANERLRKRYHHLVIHNMKSPNKAKCAITRELACFIWGMMTDNIHTVLV

SEQ ID NO: 152547 - protein, 361 aa, unidentified
MKKTTHHLIAEVRRSASKVGMTIGIDLGDVWSHYCTLNEDGEVVGRGRFRTSPSGVEKWFTDLPPVRIAMEAGTHSIWISEQLQELGHEVIVANVRELRAISHSDRKSDQVDAEKLARYARLDPKILRPIAHRTVAQQEALTLIRARNLVVRLRTASVNAVRGLAKPCGYRLPASSTLCFAKRSLAVLPRGLVQALGPVLEQIAEMTVKIKQYDSVIKGLTETEYPETQALIQVYGVGQLTALTYVLTLGSKERFQRSRDVGCYLGLRPKRSQSGDRDPQLGITKAGNIYLRTLLVECANHVLGPHGRDSTLRQWGLHLASRGGKQSRNRAIVAVARKLAVLLHRIWITQEPYIPFYGVAA

SEQ ID NO: 152548 - protein, 375 aa, unidentified
MIATTRPEMSVSEPTLYVAFELGKKEWKLAMTSGFGIAPWLRSVASGDWRGVERALAQGRARLGLPAAAPVVSCYEAGRDGFWIHRALQQRGIRNRVVDSASIEVNRRARRAKTDRLDALKLVMMLVRVCWGERRVWSEVRVPSVAAEAARQVSRERTALTQEQARLTNQLKGWLATWGATLPRRRPSGWWTTVRDWAGAPLPVEVQARLARAEARRAVLTGQIAELAGQQQAAVSAAAPASALRQLVQLKGVATTGASVLLDEGLVWRAFRNRREIGGFLGFVPTPYDSGESAREQGISRAGNNRLQSISIQLAWNWVRWQPVSALTLWYQKQFGTGKRARRIGIVAVARKLVIALWRYVTTGVVPAGAILKVA

SEQ ID NO: 152549 - protein, 350 aa, unidentified
MEYISVDAHKRYSFVSIENQTGKLCCEARVEHHRGAIRDFLSLRAPGSPVAVETVGNWYWIVGEIEEAGMVPRLVHAYRAKMMLASTNKTDRLDARGMNRLQRSGTLPTVWIPPKQLRDQRDLFRTRMIFAGQRTRLKNRIHATLSKYGLQVEGSSDAFNKKGRKELEKLVESLPEHTRYSAERVLEQLDCAERQIALLEKRMKEVFLPNEEIQLLKTLPGIGLILAVVILNEIGVIGRFGSAGQLASYSGVVPRVRASGGKVRLGQLRSDVNRYLKWAFIEAGNSVAIHRKGHPQWYVNQVYERVRARRGHQAAIGAVGRHLAEASYWVLKRHEDYCPPKTGSISSRKG

SEQ ID NO: 152550 - protein, 341 aa, unidentified
MNYCGIDVAMVSSYIYVTDSRGRKLTAGQIATEESALQRRLKPLLPGGLSVAIEAGNQTAWIHDVLVQIGAKVMVVNPAKVKLIAESRRKTDKIDAKILCELLRLDALPHPVHMPGRQTRSLRGLLVARRQLISARTKLCNVVRGMLRQEGIRLPARALSSPVGWRRLLAGAYTHAHLPLVVAAYADSFRALTRSIQQIDRELADYERAARLQSMPKVGRIASLTFLAAVDDVDRFGSSRKLVSYSGLAPTLRSSGERTEYGCISREGRRELRAVWVQIVHLVAHDRRRATRPLRSWFNKVARRRGKKTATVALARRLLVIAYHVVRDGTEYDAARLKRAA

SEQ ID NO: 152551 - protein, 360 aa, unidentified
MSNLTTTTSPIVVGGVDTHKELHVVAVVDAHDRVIGTESFSTTRAGYRALVRWMRTYGDIARVGVECTGSYGAGLMRHLDTAGIDVLEVTAGDKVDRRKRGKDDTIDAEQAAHAAYARVRTVTPRAHDGMVESLRALKIARSSAISARRVALQLIHATIISAPEELRDQLRNMTRMQLIRTLASWRLDLSGYRDPVTATKISLRSLARRYLELHDEIADLQVPMHALVDELAPDLLARVGIGYESAAQLLITAGDNPERLASEASFAMLCGAAPLPASSGMTTRHRLNRGGDRAANSALHMIAISRWRIDPTTQAYVARKKTEQHSNPEILRCLKRYIAREVYYLLRNQQRAIHQIAPAA

SEQ ID NO: 152552 - protein, 438 aa, unidentified
MRSTYAGVDWASEKHDVVIADETGEQILAATFAHDEAGVRGLCRALVRHEVTLVAIERPDGLLVERLLDAGLRILPLHPNQVAATRDRFRASGGKSDGFDAFVLCELARTDHHRFRVLEPDSDQTKALRALTRAREDLVGSRTALTNQLRAELARFWPGPLGLFTSLHSRISLAFLERYPSPADARGLGEARLRGFLVRQHYTGRQKPAQLLAKLRRAPEARVGELELGARRALVLSLVATIKTLNEQIKQLERKIATAIREHPDGAIFRSLFKQPKSVICAAELLAEIGDCRARYATRDTLAADAGQAAVALESGKRKAASFRWACNKRLRQAFVTLADTSRHHNPWAHDLYAAAHARGHDHPRAIRTLGRAWCRIVWRCWQDRVPYDPARHRALQRHLTVTIPTSSGPRPDTAATQRMAGAAVTPRGGPQGRARSA

SEQ ID NO: 152553 - protein, 407 aa, unidentified
MFVGDDWAEAHHDVHVMNEAGDKLASARLAHGMSGMSRFHELVASHAKEPGDVIIGIEVDRGLWVEALIAAGYQVFGINPKAASRYRDRHSVSGAKSDAGDAKMLADLVRTDCHNHRQVAGDSDTVAGVQVLARAHQNLIWERTRNTNRLRNALREYFPAAAEAFSGELAGMDAVAILAKAPTPALAARLSQAQIRSALKAGGRQRNIDTKAEQIQVLLQTEHLSAAPAVEAAYGATTRSQVAVIVELNKQIAALEEELAQVFSSHPDTDIYRSLPGFGPVISARVLGEFGDDPERYADAKSRRNYAGTSPLTRASGRSHIVTARWIRNRRLYDALDQAAFCALTASPGCRTFYDQRRAKGDLHHQALRALANRLVGYLHGCLKTRTPYNEHTAWAHRQPTDLTIAA

SEQ ID NO: 152554 - protein, 349 aa, unidentified
MHTVTQPQAACRLQAVLSLIEHRQKWALPAELRIVVSYEAGQDAFWIYRALQARGIECYVVDPASIPVERQKRRAKTDRLDAIRLVINLRAWLHGERDRMRAIRVPSLQDEASRHLMRDRGQLQKEVLQHRDRMRKLLVTLGCWGEVDSRKFAAHLARGDVRCHDGTPLPLELQQRLLRECERLALVEQQLAALEKARLASLPESARVRIDRLTRLSGIGAVGGSRLVLELFWRQFSNRRQVGACVGLAPQPYDSGESQVDQGISKQGNRRVRALLIEMAWSWIRYQPESVLTHWFSQHTAGTGPNRRARRIAIVAVARRLAIALWRHLKDGVIPEGAWLKHAQCTAAQ

SEQ ID NO: 152555 - protein, 341 aa, unidentified
MYYTGCDAHKKNCTLQHIDEDGALGLMMTITNTPQGFNAFLDKLDAPTVITFEASRSYWWLYQYLSKHPKVSDVVVVDPYRSRKIAEELAVLKGYGRAKNDRIDSEMLAEQTRTGLAVGIQVPTPEQFERRTACRHRFELKQNRTASANLIHSTLAMHGHSIALGELTGNEASRKHLFEQLPGYVQIIISDLIAQIELFEKQTAGIQQLLDKLLPESDPQMQLLMTAPGFGPICSRIVLTEILDIAYFKAPKSLVNYSGLAPIEQDSAGKKGIIKLNRHCNYYLKYAFMTAAHAARTHSRYRRKYEQDLKKHGKTQAKINLARRLAKAIYWMLNRQQPFKF

SEQ ID NO: 152556 - protein, 364 aa, unidentified
MKIIGCDFHPSFQQIAMVDNETGEMSERRLVHAEGEAQRFYESLTGEVVVGVESSGNMLWFERLLEKLGHQLLIGDATAIRAAAPRNQRCDPRDAKNILQLLLEKRFPAIWVPSMAERDLRQLLKHRHTLVQMRTRAKNQLQHIAMNQGMQKKSKLWTKAGMEQLKSLELEPWTKRRRDDLLKILEQMDSHIAELSREVETEAKRCTKAVLLMSHPGVGPIVSLATVLTLGDVSRFARGKHVASYLGLIPREDSSGEHRRLGSITKQGNSFMRSLLVQAGMSAARGDAELGRVYKRLAQRKHHGVAKVAVARKLVLRLYWMLRTNMRYPEVVRMQGSSSHSVAEVTAGLLSERPASRGSSDPAQ

SEQ ID NO: 152557 - protein, 414 aa, unidentified
MTSMTSTTSSTVRVAIDVAKFTHQVLLELPTGQRRALRVANTKAEIDQFVAMLRSLEHPCDIAFEPTGDYHRPLAYVLGQAGFHLSLVSSLAVARTRDAMYNSWDKNDPKDAQVILQLMRSGTTQRYVDPLVTGHLDLQELANTYQQVSLRKVRLQHSIVTHHLPLYFPEAERYLHSSRAEWFTELLLFTPCPAAVRRYSKTDFVAAASKTVAGRKVDKARWLAGFYDTATSSLGLPVAEDSEAIRMFRVVLEEYRALCRLRKRLETDAVSRLTEQPDFARLQTLPGIGPILAMTILAEARDLRRFGCARQFLKYCGFDLCTEQSGQFRGTTHLSKRGNARLRYAFWMAGTVAIRMQQNSFRRKFETTSVLIRRTRTGDGKRTRRLRPKWPASPTRSSPPASTIVASRKRRDQA

SEQ ID NO: 152558 - protein, 340 aa, unidentified
MEKKWFIGIDVSKDTLDVAMHGTTQREKFIEKKFDNDLRGYGFLLSWINKKNISVQDCLFCLEHTGVYSITLVAFLNEQDLFVCVEPALQIKRSIGMTRGKTDKIDARRIAIYAMDNQHKLNNYKVPGKSILKIKQLLTYRDQLVKTITSFKISLKSHERFQLTTEPDFVTLDIQHQVEDLNARIERINKQIEDIIEQDGSLKNNYDLVRSVKGIGLVIGAFMIVTTFNFERFENGRKYACYAGVAPFEHSSGTSIRGKTSVSHLANKRIKTLLYNAANSAAQWDPELKNYYQRKRNEGKDHQLVMNAICCKLVNRMFAVVKRQSPFISTYKEKVIKCIV

SEQ ID NO: 152559 - protein, 431 aa, unidentified
MARKEDSKVLQVLHPVCCGLDVHKEKITCCLITGTGTGDRVEHREFGAFTHELRALKEWLLDNECPIVAMESTGVYWHPVHNVLEGAVQVILVNARHTKHVPGRKTDISDSKWLAGLLRHGLVKGSFIPSKEVRQWRDWCRQRKVLVDSVGDFKRRVHRMLQMANIKIDSVLSNLFGATGRNLLKLLLREEPIAFNDVQRCLRGALAGKKQQKQKTCELYDAIDGYFGPHEREVLKPFLRVIDHHEKEIALIEERLSTILAPYNDLLERLDAVPGIDVVAAAAIIAEVGTDLKTFPTVQAFTSWCGVCPGNHESAGKRMSGRSPVYKKMFKTLLIEVAWAAIKKKDSYYRDKYFRLKARLGQKKAIVAIAHRIAKALFHIIKHGATYKELGRDYLSLLHAEKRYLYLNREAKLIGYELVPIGPVTPLFSEP

SEQ ID NO: 152560 - protein, 402 aa, unidentified
MNAVGIDVSKGKSMVAIMRPFGEIVSTPFEIKHTTSDINSLVELINSVEGESRIVMEHTGRYYEVLAHQLSEANLFVSAINPKLIKDFDNDSLRKVKSDKADAVKIARYALDKWQNLKQYSVMDELRNQLKTMNRQFGFYMKHKTAMKNNLIGILDQTYPGVNTYFDSPARSDGSQKWVDFASTYWHVDCVRKMSLNAFIDHYQNWCKRKKYNFSKSKAEEIYGKAKELVPVLPKDEITKLIIKQAADQLNSTSTTVESLRTLMNETASKLPEYPIVMAMKGVGLSLGPQLMAEIGDVSRFTHKGAITAFAGVDPGVNESGTYEQKSVPTSKRGSSDLRKTLFQVMDALIKTKPQDDPVYQFLDKKRAQGKPYYVYMTAGANKFLRIYYGRVKEYLSSLPEF

SEQ ID NO: 152561 - protein, 347 aa, unidentified
MRTYVGCDAHKRYSIFVTMTGRGRAGAPVRVEHAPEMYRAFLRGLPAGSPIAVETVGNWYWMIEEMEKAGHEPKLAHAGKAKVMMGQINKTDKLDAKGLATLLLNGTLPSVWIPPGELRDQRELSRMRMSLVRVRTMFKNRIHATLAKYGIVIDEVSDIFGATGRQIVTSRLKELPPYTRESVLTQLAVLDDVEGRIGPCEKEIEAVVRETREMQLLKTLPGVGPILATAIALEIGDVDRFPGPDRLASYAGTVPRVKSSGGKTYLGKVRQDVNRYLKWALVEAANVIHRNPGRYAGRHVVRLYLRVRERRGHPKAIVAVARHLAEAAYWVLKKNEPYREPISSNQG

SEQ ID NO: 152562 - protein, 292 aa, unidentified
MSAEVTTDAAGLSELHARMNGSKYVVMMESSTYSYVVYRFFSKLGMETHVVHARSLKMITETDKKTDLLDAERIARVLRLWKLGEIELSMSYFPTEKEAELKDLCRFKEELSNKLGDEVRQIRSHMSRNCLELPSEFQNLSTKRSRDFIVRMYASDYTLMRRVEVYSALLDESELVAREIERRGNDDRNVTLLESIPGIGRQTAVQLMSMIVDIARFDDPERLCAYFGMVPRVRDSGGREHHDRMTIEGNMMRFIMERVTLSHIRFCDSTITAYFRRKSKEMGVKKALMSSR

SEQ ID NO: 152563 - protein, 408 aa, unidentified
MNPLFVGIDVSSKNNVAYLMKPDGSKHSSFSVQNNLGGAKLLSERIVSALGSMQLERVVIGLEATSIYGDSLVYALREDGRLGRFQRKIHVLNPKQVRKFKEAYSDLPKNDWVDAFVIADHLRFGRINREVYMDDYRYKALQTLTRARFDVIQNLTREKQRFANYLFLKCSGMAQDKDIQNTSATTIALMEHFETVDDLANADLEELTAFITETGRGKFADPDATAKAVRAAAKGSYRLPKTVNDTVNQAMAVSIASMRALKGQVKVLDKAIEQQFEIIPNTLTSIPGIGKVYSAGIIAEIGDIHRFDSQASVAKYAGLVWNRSQSGDFEAEHSRMIKSGNRYLRYYLLEAANSVRRCDSEFRRYYDLKLKEVNKYQHKRALALTARKLVRLVFRLLKDNRLYIPPEG

SEQ ID NO: 152564 - protein, 422 aa, unidentified
MLAKTQDNEEIIERVAALDIGKAELMCCVRVPDEDHAGRRLQEVETYSTMTRPLLGMADRLACLGVTRVVMEATSDYWKPVFYLLEAAGFETWLVNAKDVKHLPGRPKTDKLDCIWLCKVAERQMIRPSFVPPPPIRKLRDLTRYRADLVAARTAEKNRVEKLLEDAQIKLSVVVSDIFGVSGRDMLAALVAGERNPRVLAQLARRTMRKKIAVLEEAFTGYFTDHHAFLLRRMLARVDAITGDIAALDTRIGEQIAPFAAAARKLDEVPVINLAAAHAILAETGLDMTRFPTAGHLVSWAKYAPGVKESAGKKKGKNSTGHGNSYLARILGNAAAAAARTDTFLGERYRRIARRRGATKANVAIGRSILVIIWHLLADPDARFYDLGPDFYANRIDPDRRRRNHVRQLETLGYTVILERTA

SEQ ID NO: 152565 - protein, 467 aa, unidentified
MAHVGGQLQAQFMARIRGRDPERCLVVPVDVGKAVAMALVADHYGEMVVEPFEFPLTETGFGLLATAITRASAARCAEIVRVGVESAGHYHRTLVARLRAEGLEVVELNPAAVKEARAQQLLRRLKSDARDLGAMAELMVRGAGRRPAIRTDALATQAAWVAHRRRKVFARVALANQVIGELDLVFPGLDGCFSDLLRSKAGRVLVSDICNPDRVRRQGIEGLRRFVARRGVALSGPKSAQVVEAARGALRLPTAERAALGRVLAADLALLTSLENEILAAEAALAEVLGATPAVVLTSLPGVAVVRASNYGAGIGDPARFPNAAAAYRSAGLVPASYESAGRSRPRQHISREGSVELRQAIIELGRGLAQHERDFVAYRRRLLDANKPASVAAVAVGHRAHRLAFAMLRDQKPYDPAKWSQSVAAGMTAMAKTQKAHQNDVTCPPPGTSVAEGGDRHNTNHRRAQG

SEQ ID NO: 152566 - protein, 320 aa, unidentified
MMSEVVLGIDVSKKTLDAALIFDNRTFSKQFQNSAEGFKLLAVWLASLQIKQVHACLEATGVYGEAVALFLHECGHQVSVVNPLRIKGYAQSNMRRNKTDRLDARLIADFCLTQKPDAWQPPSVAVKHLQSLVRRVEVLEEMRQAEDNRLANASAEIKPSVERMITLIKEEINQLERQIKQHIDCHPDLKEQSELLQTIPGIGAKTAHLLLSEIEFERYNSGRAIAAQAGVVPRQKQSGTSLKQTGLSKLGNARLRKALYFPAIVARQHNEIVKEFAKRLKKNGKTPMQIVCAAMRKLLHIAFGVLKHKRAFDASLAFSA

SEQ ID NO: 152567 - protein, 323 aa, unidentified
MSQIPFQVTIGVDIAKKKFDVASLINGKYKHKIFSNDESGYIAFVAWFLPLCGEVKPLICMEATGAYSLPLADFLVNQGYAVSMVNPAKIHALAKSELNRAKTDKADAKLIARYALMMQPSLWIPPPANIRALQALVRRVEHLLEMIQMETNRQETANASIINSIDTVVATLEAELKATRKAISDLIDSDPDLKNRSDLLNSIPGIGAATTAYLLVALSPHHDFSNAKQVVAFAGLAPALRESGQWRGNTHIAKNGDSALRKALYMPAMVAWKHNPLIHVFCERLKVNGKNGKAIVCAAMRKLIHLAFGVLKSGKPFDLKYAG

SEQ ID NO: 152568 - protein, 344 aa, unidentified
MQITTIGLDLAKSVFQVHGIDAAGQVVVRKSLRRAQMLAFFSKLPPCLVGIEACGTSHHWGRELIKLGHEVRLMPPAYVKPYVKRGKTDAADAEAVCEAVTRPTMRFVPVKSPEQQAALSMHRTRDLLVKQRTQLINMLRGLLAEFGFDIPKGLERALLIARQVIDGKAPEVPIEAARIATTLSQQALDVHVRLREIDRDLVIWLRGNDVARRLMTIPGIGPVGATALAASVTDPHQFRSGRQFAAWLGLTPLQKSSGGKERLGRISKMGDKYLRKLLIVGMTSLVRRARYAPGNIDPRLGDLLARKPTRVATVAMANKTARVIWAIMARGGTYRAGHQPALEA

SEQ ID NO: 152569 - protein, 360 aa, unidentified
MEVEQGATGRFVVGGVDTHKDLHVAAVVDEHDRVLECQCFATTRHGYKLMLAWMRAFGPLRRVGVEATGTYGAGLLRYLQKAGVEVLEVTTPDRQDRRKRGKNDDLDAQNAAHAAFAGKRTVTPKSRDGMIEALRVLKACRKTAVAARRVALQMIHNTVVSAPDELRDTARELTRMELIRTLAAWRPDMTDYRNVTSAYRITLRSLARRYLELHDEIADLDDMIRAIVDELAPDLVERNAIGHESAAQLLLTAGDNVERLHSEAAFAALCGVSPVPASSGKTTRHRLNRGGDRAANSALHIIAIGRLRTDPKTKAYIAKRVAEGHSKLEAIRCLKRYIAREVFSLIRKRSREINQRQIAA

SEQ ID NO: 152570 - protein, 345 aa, unidentified
MTTSYIGADVHCKFTEVAVERHGEIVMRDRVRTDISSLRDFLQIVPKPRVVVIEEGTMSGWLSRNLRADVEEFVVCDPWRNKMIWSDGDKTDPLDAAGLAALQRGGYTRAVYHTDDEERLALKEIVALYHDRMHEAVRQINKLRAQGRAYGVRIPARVLKHRSARATWMATVEPAALMQRLSILWRGWDTVQSQVKLAKAQMVRQAGDYPVIAAWQDLPGVGVVRAATLFAYLDTPWRFGSVKKLWKYCGLGLKHRASGTDKNGRPRKGRLSLYRRANSRLKDALLGAAVTAIYRGRGNPFSEYYARCVKKGMTESNARHAVARKLLTVMWGMWKTNSRYDARQV

SEQ ID NO: 152571 - protein, 290 aa, unidentified
MISWVGIDISKSNLVVWIQPQKVGFEITNTLEGFVELTSRLSHYTVGRVLLEATGGYERKVVAALQEAGFNVLRINPRRARAFAVAMGKNAKTDPIDAAVLADFAEALHASREKPISPGREALRELIQLREHFVQQRDDNKRRLQQAQLPAVIEAIKDHIRYLQLQIKQFGKAINQSMRELDAEKADRLTSVKGIGTVATASLLVYLPELGELDRREIAALAGIAPYNDDSGNHSGKRQIYGGRSRVRRALYMSCWVVIRYHADFKARYEALRERGKSAKVALLPACGYY

SEQ ID NO: 152572 - protein, 340 aa, unidentified
MKTWHVTTLTESGYKYSFAQHADTKELFDRLNKKFPGAHFKSAYEAGFCGFSAHYALTELGFENIVVHAADIPTTGKEKAMKTDAVDSEKIARSLKRDELTSIYIKDKDYMDDTNLMRLRQRFIKDLSRQKNRTKHLLYTQGVTYPERFSKSGTHWSRNFMKWLREEVVLLSEEKRTLMLLCDQVEHIRKDILAVTREIRRLSTADKYRENFSMLSSVPGFGLITSMSVLTEFDNNPMRFPNERKFVTMLGLIPTCHASGEKKVSGEKINRGNKQLGPLIVEASWVAIHRDYDILEAKLRQGVVGRDPAKARLIGRLEVCPGEFLVQSVKELLCISMLCE

SEQ ID NO: 152573 - protein, 377 aa, unidentified
MAKLRFVGLDVHAEMIAVAVAEEAGEVRSLGVIPNRLESIRKLMGKLAPAGSLKCCYEAGPTGYVLYWQLTQMGVACEVIAPSLIPTKAGDRVKTDRRDAEKLARCFRAGELTAVWVPDAAHEALRDLVRAREAAKKDQLRHRHRLGKFLLRHGKRPTNAGKAWTKKYVNWIRIHVRFEQSALNATVAHYLEEVDHIAERIQKLEKAIDEAIAQAAPEIRAVIEALQALRGVAQTTAATVVCELGRLSRFSNPRQVMGYSGLVPREYSTGNRVQRGAITKTGNAHLRRVLVEAAWTYQHRPNVQGRVLRRQKSLSLSEEATRIAWKAQQRLHKRFTALSARSKNNNVIVTALARELLGFMWAIAVHVEAQSQPTKAA

SEQ ID NO: 152574 - protein, 375 aa, unidentified
MEHHSEAFVALDTAKLRNAVAIADAGRNGEIRYLGEFDNTEVGTRKLVAQLASKHARLTFCYEAGPTGYGLHRLIKSLGHDCIVVAPSLIPSKPGDRVKTNRRDAVNLAKLLRAGELTAVWVPDERHEAMRDLVRARDAAAKDYRIKRQNVSSLLLRVGRHYPGKKTWGRAHTNWLTSLKLEHREQRIAFEEMLLAVRQVRERIERLEQAMREAVADWSLAPVVEAVQALRGIDMVGAVAFLAELGDLSRFENPRQLMAYLGLTPSERSTGESVKRGGITKAGNTRARRLLIEAAWSYRFPPRVSKDMQTRIGAAPRTAREIAWKAQMRLCGRFRILTRKGKRPTIVVTAIARELSAFIWAIGREVVGSHATANQ

SEQ ID NO: 152575 - protein, 414 aa, unidentified
MMDVVVSRCAGIDIGKAEVVVCLRVPGPGRKRVSEVRTFRAFTGEIERLASWLAEHRVTHVVMEATGQYWKPVWDVLDEHGFELMLVNARHVKIVPGRKTDVADAVWLAELLEHGLLRGSFVPPRVIRELRDLTRYRKRLVQAHTSEGQRIAKILEDAGIKLDSVVSHLMGVSGRAMLRALIAGQRDPDQLAEMARGRLRPKIPMLVEALNGRFGEHHALMIGLALDHFEYLERMTVHLDERIDTLMSEHTAARDRLDTIPGVGKRAAEVIIAEIGADMNVFPTAKHLASWARMCPGNNITGGKRRSGTTGGGNRWLRETLVECAWAASRQRDSYLAAQFWRLARRIGKKKAALAVGHSILAIAWHLLHDNTSYTDLGGDWFVRRIDNNSRRRDRLIGELQGMGYLVSLEQAAS

SEQ ID NO: 152576 - protein, 350 aa, unidentified
MEFIAFDAHKHYTLASVATPDGQLVREGRIEHERGALREFLGRCEQGSPVAVETIGNWYWIVDEIEAAGCMPRLVHARKAKLMMGEINKTDKLDARGLNRLQRSGTLPTVWIPPGELRDQRDLPRTRMVLVRQRTQLKNRIHATLAKYALHDLEGSDVFGVRGRALLRERFERLPSHTGYASRQLLAQIEELGRQVRALETRIRVTFKLTPAIQRLLTLPGVGLTLAVVIALEVGDVARFASAEKLAAYAGTTPRVHASGGKTRFGPPRPDVNRYLKWAFVEAANVICLRRGRAPHCHVSHLYDRIARRKGHAKAIGAVARHLAEATYWMLSRQEPYREPKGSGRFVHGG

SEQ ID NO: 152577 - protein, 402 aa, unidentified
MECTAGAPAFAGVDTHKETNMLALKDGLGRTVGIWEFPANPAGYDALADAIGDTSVPVGVEGARSYGAGLAQRLAELGYEVREVVRPRREQRRRGKTDEIDALAACDNLAAGRSMPAKEMEGGAAALRWLMVAREQEVAHMTRLACCMDSMLVTAPYGVRERWRGLEGAALMRAVAAGRPKDAAGRTMREVAKSWLGAEARAGRLEAEILELMARSYPALIGAPCVGAISGARIVLAAGSNPSRLGGEAAFSMLCGTSPVPASSGNTVRHRLNRGGNRQANRAVHEIARARMSHDPRTKAYIARKMSEGKTKREAVRCLCRYIAREIYRLLTGPQEPPCDQSALAERRKACGLTQRQAAEGAGITRAKVGGLERLAEFDTESLLRYDAFLREVEAEKGLDSI

SEQ ID NO: 152578 - protein, 309 aa, unidentified
MKEELVYLGVDIAKSHLDAAIGNEKRRFANESVGHRELIRWIKAMKTSVQVICEPSGGYERALVRALVSAQLAISLVPANRVRQFARAAGILAKTDRIDAKLLCVFAEAMQPTPISASQLEQEHLRELESQRRHLTHLLVMEQNRGARLSELAVRRLNRTLINQIKKQIEQLDLLIKEHIEQSGELSRKAAKLTAISGVGARTAALLLAQMPELGQLNRREVAALVGVAPFNRDSGRMRGKRTIYGGRRPVRHGLYMAALVAARHNPTLRSFYLRLRAAGKPAKLALTATMRKLLIVLNTSLKPDLSYA

SEQ ID NO: 152579 - protein, 371 aa, unidentified
MFEDIRYYVGLDVHKESIAIAVAESHSREEPRFIGTTGYSVHQIHKALSSLKCTPKQLSIAYEAGPCGYGLQRELTSKGYECIVVAPSRVPRRAADRIKTDRRDALLLARMHRSAELVKVCVPDPADEAIRDLIRAREDALRAQKAARQQLQALLLRLGNPYRGGKAWTLKHLKFLADIKFEIPAHRIAFTEYRLAVQAAGDRLERLNTAIRQESESWRWLPVVKPLMSLRGVDFLTAMTIVAEIGDLKRFDHPRKLMSFLGLVPCEFSSGTSKQRGSITRTGNSRVRKLLIESAWNYRHPAKISREIEQRLDGLPQAVTEIAWKAQVRLCHRYRKLRYRGLHQNKTCTAIARELAGFVWSIGQITQPQHA

SEQ ID NO: 152580 - protein, 431 aa, unidentified
MRSMPNVMRKCQPVPDLERGVVVGIDVSKGKMSFGGFRPGECTGVSLADQNAVGFMSLERFVERLIAQGHQPWIAYEPTGPYSTCLREWLVATGRRVVQVNPYHVKRTKEIRDNSPEKDDWKDPSVIADLVWQGCYQEAMSLDGAYADLRAASAEWASLNKKRNAIRNEFQALLQVWFPEICDIFKDAVCKSVRGIVRRYASSKALANSRRSSLDCTLRKASLGRTLDRVGAILLSAKSSVAPASGQQARRSAMVNLLDMLELIEYRRERLKEEMENLLFAMPEAQSLLSLPLVGTITVAGILGECGNIGSYSCYAQLEKFVGLNLYEVSSGKRKGRRRISKRGRSLARYLICSIALCQTRSGGLFERYAKELKARGKKTGEIRVAVARKLLRLLYAVARDQKAFDPRQFFTGARAEDGLVIQQGTQAQAA

SEQ ID NO: 152581 - protein, 401 aa, unidentified
MWYVGLDWADTHHDVDVLDEAGKRVGARRFAHSHQGLNELKQFLLGIATQPEHLACIVETNHGLLITFLLEAGIPVYPVNPTSANQLRKSAGAKTDQIDAHLLAKIGRLDLAELRRLEPDSPIVAELKTLTRDQDALIQTQTRLVNQLTACLKEYYPAALPLFAKLHQHSTLVFLQTYPTLQAAQSASVEEITTTLRLAKHTNPTRAACKIVEELHRPQLVASAVIIRAKSRLMLSLVNQLLVVIKDIASYDEEISTLFLTHDDQPIWSSLPRAGKRLAPRLLAEWGDDRTRYADANSVQTLAGTAPVPFQSGNFAKAHKRFACLKPLRNALHQFAWQSTLQEVWARNYYRRKRAEGKTHSMAIRALANVWVRIIYRMWLSKTCYQTTVFEQAQQHARRAA

SEQ ID NO: 152582 - protein, 408 aa, unidentified
MRLFIGDDWAEDHHDVEVMDEAGKVLARRRLPEGMAGMAQLHALAGGLLGEAAEAEDSEVLVGIETDHGPWVSALAAAGYRVFPVNPLQAARFRQRHQVSGAKSDAGDAHVLADMVRTDSHQLREAAGDSPEAAGIKVLARTHKTMIWERTRETQRLRHQLREYFPAALEAFTDLDAPETLELLGKAPDPGRARKLTRAQVSAALKRAGRRNIPERATAVLTALRGEQLAQPPVLAMAYAAAVRSLIAVITALNEQVKLLQGQVEEHFGRHPDAEIILSQPGLGMILGARVLAEFGDDPSRYRDGKARRNYAATSPITRASGKRKVVAARFVHNSRLVDALNAQAFAALTASPGARAFYDEFRARGAGHNDALRRLANRLVGILHGCLKTRTLYDEDTAWGHRNRQAA

SEQ ID NO: 152583 - protein, 575 aa, unidentified
MSTATPLDRIGVGIDTARYGHRVTFLKPDRLPAAKPLTVLENRASYRALQQRLQRLHEQHPQAHFHIRIDAAGQYAANLERFLRQLSLPMTVSIGEPKRNKDYRKAHFPKRTTDDTESQAMARFAVVEQPAATAGSAPAMVLLREVAGRLQAKVKQSTQAINRLHNILARVFPELATLTNNLAVAWVLNLLDKYPTVERITQARSSSLEKIRYLSEDLATQVRRAAQQSVASLHGDVAAALVRDLVAQVRHTQQAEEGMRQLLKQAFADLPPSGHLQIETIPGIGPTTAAVLMAKIVDIDHFATPDKLVGYFGVFPELNTSGVDKQGQPLSAGTLHMSHKGNDLVRAYLWNAVRSAILHNPAVRALYHRLRAKGKRGDVAMGHCMRKLLHLVFAVWKTNRPFDPEHVPWEQHTDMVVSPKTTANTDDTNNEAVGHKRVKPAQEVVTTADVTVVPATPSVKPPLRTAKPFKLDFAFLRQQVTMEQVLERLGILSNLRACGQQRRGPCPIHSQPTDRQRTFSAHLGKNLFQCFHADCAAQGNVLDLWAALHHLSLYEAALDLADTFHLRRNREEEPV

SEQ ID NO: 152584 - protein, 483 aa, unidentified
MKPKPEEKNKRATNHPTQHHWHEMNRKQRREMMRKIQTEDLSLEVIHPDAGGIDIGNESHYASVPPSRDSQPVREFGCTTAELKAMADWLKQCRIRTVAMQSTGVYWVAVYDILEQAGLEVYLVNARDTKNLPGRKSDVQESQWLMKLHTYGLLRNSFRPSQEIRVMRTYWRQRNDLVHSAGRHILRMQKALTQMNLQLANVLSDISGATGQAIIKAILAGERDSHKLAEFRDFRVKASEEQIAQSLEGNWQPDLLFVLKQEHEGYEFCQQQMAQCDRQLAQYLQQREDRSHGAPLPEEKRKGRLKKKKGNAPQFDLREGLFRMTGTDLTRIDGIDVMTATTVISEAGYDMSKWKTENHFVSWLRLCPDNRISGNKVIGKGRLPTNNPISIALRMAASTLRESKTYLGAQFRRLRTRLGAPIAIKAMAAKLARLVYRMLRYGMKYVDQGAAFYELRHRELQIKRLKAKAEKLGYRVTPIPAAA

SEQ ID NO: 152585 - protein, 393 aa, unidentified
MVCVGIDVAKDKHDCFIISSEGEILADVFTIPNNAEGFDTLLQAIRRSTRPEDKIKVGLEATGHYSYNILGFLLDKGLPSYVINPLHTNLYRKSLSLRKTKTDRVDARTIAAMLMSDVDLKSYTDTVYHNEELKSLTRYRFDKVRERAKLKQSVSRLVTILFPELEKLVSSLHSASVYALLSEFPGAKQISSTHMTHLKAVLKNASQGRYGQEMAETIRNAARSSVGSVMPAKSLELQHTIRLIRELDAEIEDIETAIQAIVDEMQSPITTIPGMGVRMGAVILAEIGDFSRFDSPDKILAYAGMSPSTYQSGQLSLSGAYSHMEKRGSRYLRYALYNATKHVCHWDPTFAAYLAKKRAEGKHYNVALSHAAKKLVRLIFAMEKSQRPYCAAA

SEQ ID NO: 152586 - protein, 286 aa, unidentified
MGGVNAAIDVGKRQLAVGLGSAGEQFTEPNEPRAIKRLIKRLAEAGCERVLVEGGSYQNLLVAALRTAELPVVIINPRRVREFAKSIGRLAKTDQLDARVLALYGERLQPPLRELPDEQSQALRALWLRREQLIEMLVMEQNRLEHAGKALQRSLRAHIDDLRKEIKHSEDELDHTVRNSPLWDRYEVLSSVPGVGPILSVALLADLPELGRLNRGEIAALAGVAPFNQDSGSSQGVRAIEGGRGRLRRVLYMATVAIWPRLPQCAVIQCSGLFIRVCAPAVTCPR

SEQ ID NO: 152587 - protein, 411 aa, unidentified
MRLFVGDDWAEDHHDIEVMDEAGKVLAKRRLPEGAAGMTQLHELIGRFLPEDADDAEVVTGIETDRGPWVAALIAAGYTVFPVNPLQASRYRERHGVSGAKSDGGDAHMLADMVRTDSRQLRPAAGDTPEAGAVKVVARAHKTLIWDRTRAVQRLRHQLREYFPAALEAFEDLDATDTLELLGKAPDPARAAKLTRAQVAAALKRARRRDIAGKTDAILAALRGEHLGQPAALTAAYAATARSLIAVITTLNTQVKILEEQVRDHFGRHPDAEIYQSQPGLAAILGGRVLGEFGDDPRRYVTAKARKNYGGTSPITRASGKKKVVAARFIHNDRLVDALMSWAFSSLKTSPGARAFYDQQRAKGLEHSDALRRLANRLVGILHGCLKTRTLYDEATAWGHRENLPQSSVAA

SEQ ID NO: 152588 - protein, 308 aa, unidentified
MPLWIGIDVAKDTLAVHVLPQDQLLSFPNTAHGHQRLCDHLAGQCVGNALLEATGGYERAVMTALATAGIAVTRINPRRARAFATALGTIAKTDRLDAALLARMAQLVQAPAPVPDPLREQLRMLVQRREQLVQQRDDERRRLHQATLAVVRACLIEQIGDLRRRIQRMNQAIKQVRCQLDDALAHALSTVPGIGVVTTASLMAYLPELGTLDRRQIAALVGLAPYNVDSGQHRGKRRIRGGRASIRRVLYMACWSVVRTQASFKERYQQLRARGKPAKVAITACMRVLLIRLNAMARDRTPWREAIG

SEQ ID NO: 152589 - protein, 333 aa, unidentified
MHYIGLDVHKQSIVFCIKTGDGEVVDQGTLEATRSALEEWAATLPQPWQGAMEATQFSGWIHDTLSPYADDLAVAHPADLEAITKAKKKSDTIDADKVSDLLRIDMLPRVWMPPRQWRELRRLLRYRNRLIEQAVWHKNRIATALMELGEPYVKSKLHTKSYFYPFLDKLETGEEDAFLLCASRDRLEESERLARTIEKKLLRHPLLERRVALLQTIPGVGVMTALTWAIEIGDLNRFHTLDQMVSYCGLCARLDESAGKAKRGPLSKRRNRHLQRVLIEAAKLAPRFNEELAALHAKECERGHRNRATVQVARALVARLRAVDARGTPYEKR

SEQ ID NO: 152590 - protein, 378 aa, unidentified
MKSISTSTPADDARSTLFVALELSRSTWLVALHSPVADKVSQHRLEGGDSRGLLALIARKRADAERQLGRPVRTACCFEAGYDGFWLHRWLCEHGIENRVLDAASLLVDRRARRAKTDRLDAAGLLRTLMALERGEAQVCRVVHVPSREQEDIRRRSRERARLVVERGQHSSRIKGLLMTQGIRDFEPTRRDWQTRLEAVRTPDGRPLAPCLRAELMRECRRLRQVMEMIAEVEAEQKQVVAAEDGNAARLSRLRGIGLTFATVLDNEVFFRNFRNRREVGGYLGLVSSPWRSGRVARDQGIAKSGNPRARRAAIELAWLWLRHQPGSVLTRWFHERVGTAKGRMRRIMLVAMSRKLMVALWRYITDGIVPGGVVLKA

SEQ ID NO: 152591 - protein, 355 aa, unidentified
MTVTIVEEARPVTCRTAITGGVDTHADTHVAAALDPVGGLLGVGEFPATAAGYARLLGWLGGFGTVCLAGIEGTGSYGAGLARHITAAGIRVVEVDRSDRQDRRRQGKSDPLDAVSAARAAQSGRARGAPKGRDGAVEAIRTLMVARRSAAGERTRTINQARALVLTGPDDLRARFARHKPAALITGLAALRPRPGDVAGHATRIALRELGRRAQFLDGQLVRLDELIIPLVTARAPGLLAIYGAGPRTAALLLIAAGDHPERLRSEAAWAHLCGAAPIPASSGKVTRHRLNPGGDRQANHALWRIVFTRLGSDPATRAYAERRTAEGKSKAEIIRCLKRYVAREVYRQLRLAAG

SEQ ID NO: 152592 - protein, 312 aa, unidentified
MQKIFIGIDIAKDTIDISVLPSGDNWSVGTTPAELSETVDRLVALKPTNIVMEATGGYETRLAALLITTGLPVAVVNPRQVRDFGRALGILAKTDAIDAHLIALFAEKVQPECRPIPTDDERALKELLIRRRQLVDMRTAELNRQKQTNSQQVYNSITQLIDFINHDLDTIEHEIDKRIKASPVWRAKEKLLQSVPGIGKVTASMLIVTLPELGQLNRRQIASLVGLAPMNRDSGTFRGRRMITGGRASIRSGLYMPILSAVRYNPKIKQFYDRLIDAGKLEKVALTASMRKLLTMLNAIIRENQPWRSIPA

SEQ ID NO: 152593 - protein, 384 aa, unidentified
MEAKRKEADPLEPERHRCARVEMSSNHSRDRGSAMNVTTYGLDVAKRVFQVHWVEPQTGEVKRKRLARTEVSAFFARRESGVVAMEACGSAHHWGRLLTGLGHEVKLIAAQFVRPFVKTNKTDAADAEAIWEACQRPRMRFVAVKSEEQQAVLSLHRIRQQFVKVRTMQALQVRGLLYEFGVVIPQGWRALLAQGGPMLADETRCPVPELVRRELLRQLDGLRTSTTRIAELERQIGGWQRRESECQRLAAIPGVGRLTASAVVATVADARTFRSGREFAAFLGLVPRQAGTGGRVRLLGISKRGDPYLRTLLIHGARAVLRQQSRADRTLDPWLKELLARRHKNVVLVALANKMARTIWALLAHGRAFDKSWSRAAMPIPALH

SEQ ID NO: 152594 - protein, 321 aa, unidentified
MATCVKALQIGVDVSKAELVISVDGQAPFALENSTKAIKGWLKQLPSQCQIAMEATNDFHMSLATLAHAQGHRVYLLNGYRLNRYREGVGGRAKTDCADALLIVRYLQREQEDLREWEPAVKGYRELQVLLHRRATVIRAKTQIQQSLEGISVLDGVLKSLLKQIERVDQLIRKHILKIVAQAQWQGHLQRCQQIEGIGPITAAGLTMAYNRGHFKDSDAFIAFLGMDVRVRDSGAKQGKRKLTKQGDPELRRLLHLAAMQAKRQPAWEQLYQRYIDRGLAPIQVLNILARKLARVAFALMRNQTDYEPRRLPDTQAMMNC

SEQ ID NO: 152595 - protein, 377 aa, unidentified
MKTILYVGLDVHAETIAVAVAEGGRNGEVRSLGTIPNRPEAIRKMVRKLREHGEPRFCYEAGPTGYCLYWQLSEMGMDCEVIAPSLIPTKASDRIKTDRRDAEKLARCYRAGELTAVAVPSPEQEALRDLVRAREAAKKDQLKARHRLGKFLLRHGRKPEGMKPWTKQFLEWIKTNVHFEHKAHEVTLLNYLHEVEHVALRILHLESAIDEAVREAPADMRAVIEALQALRGVAQTTAATIVSELGSLTRFANPRQLMGYSGLVASEHSSGNKVHRGPITKTGNAHLRRVLVESAWSYHHRPNVTGFLLRRQKSLAISDEVKAIAWKAQHRLNKRYKALAAKGKNKNQIVTAIARELLGFIWAIAKHTEQKQTANAS

SEQ ID NO: 152596 - protein, 339 aa, unidentified
MDDIKTSDSIPSAPRVSVGIDTSKDILDCHFMPEPDRSATGQFPNNQKGHVKLLKWAKRLAGNSTIHFCMEATGSYGDAIALYLAEAGHLVSVINPYRIHHWAISRGLGNKTDKVDARAIARYCLNEKPDVWRMAAPEVRELTAFVRHLDNLKQQATQQNNRLSEPGLPPLVIKSLKKLLHQIEEQIASLEQGIEEHINNHPGLKQDRDLLVTIPGIAQTTAAKILAELPDVHQFNSAQSAAKYAGLSPSQYMSGSSIHKRTKLFKGGKRRLKATLYMPAMTAIRYNEPVKQIYQRLVAKGHKGASALAAAMRKLLMIAVGVLRSQTPFQADFAKIAKA

SEQ ID NO: 152597 - protein, 316 aa, unidentified
MKTQAFVGLDVSKQKLDVAVRPQNRHFVTPNDDRGIRQLVKRLAALKPQLIVLEASGGYEFLVTAALAEAQLPVALVNPQAVRQFAGAAGKLAKTDKIDAQVLAHFAEAIKPEPRPLPDQEHQVLKAALQRRLQVVKMIGQEENRLEKTYIPVVRRDIQGHLTWLRRRLDELNRDLDGQIQRSPLWQARDRLLQSCIGIGPIVSLAIIAQMPEMGSLRGKQASALAGVAPYNRDSGRLRGKRMIRGGRSYLRRMLYMAAVVASRFNPVIRAFYQRLLAAGKPKKLALTACMRKLVLILNAMLKNNQPWNQFITQAP

SEQ ID NO: 152598 - protein, 430 aa, unidentified
MTKLHSTPPDAVLVAIDMSKHRQEVLLERPEGGRRRRMTVMATKVDYDRLADDLTATGRPVVVGFEATGNYHRTLAHRLLSAGFELRLISSVALARTREALHNGWDKNDSKDAQVILHMLKIGATQRYVDPLAAGINDLQEMSKTHEAISKAKTQTWHRILTHYLPLYFPEIERFAGNSRSDWFLALIERFPTPGSITSIGREAFTEQAWPLIGRKVSKARVVNDIYETACASIALPIDEDSTAVAMFRMVIAQARTLIQQRNEIERIAHDALATNSDYQLLRMIPGIGPINALTILAEAGDLRRFSHHRQFLKFCGLDLATYQSGIFRGRTKLSKYGNARLRRTFWMARQVAIRQPNNSFRDKLSRYVDGHAGDPDRRRKAMTALTAKMARVVHAVIKTGTEYRPFVERADTRWKDPSLLCREGATATL

SEQ ID NO: 152599 - protein, 337 aa, unidentified
MKRYLGVDLHRTQFVVCTRWENGEQEIRQWRIGELPKFVEQLCSEDQIAVEAMGTTARFYDAVVGRVARVVVVNPHQFKVISESVKKTDRKDAQALALYLEKDLLPEVRMKPKQNRELMHLAETRDLLVKQRSALKGKINNLLAMQGIELKREALSSKIALARVLALPVSGMVQLELRVLVEQVRALSESIAELDERLEEEGQQLPGYENLTSIKGIGSLSATVLLTVIGKISDFGDENKLASYLGLVPQIANSNESERSGRITKQGNKLARTALVQCGLVAKRYSPYLNRFYDRIKQRRGGGKAKIALARKLVKIVYDTLKNQWVFEDFPSFTLAA

SEQ ID NO: 152600 - protein, 402 aa, unidentified
MNSVGIDISKGRSTIAVMRPFGEIVISPFEVRHTDSELSELAKLLKSLDGETRVVMEATGNYHAPVAKLLHDAGLYVSVVNAKLVHGYGNNDLRRVKTDRKDAVKLANYGLDRWLTLPRYVPEENTRLLLKNCYRQYRQYSKVQTVLKNNLISLLDMTFPNANRLFVSPARADGSEKWVDFVAEFWHCECVSERSLKSFVNKYWRWCRKHGYNFSEEKAHAIYDEASGHIGVMPKSETTKLLVEQAVSQLSATSAALAALKQEMQSLSSQLPEYPVVMGMFGVGPILGPQLIAEIGDVRRFYSKKALVAYAGIDAPPNDSGDVIGRHKSMSKVGASSLRRTLFLIMSAYLQNSPPNEPVYQFMDRKRSEGKPYRVYMMASANKFLRIYYATVKAYLETLEQF

SEQ ID NO: 152601 - protein, 312 aa, unidentified
MDATVIGIDVGKDRLDVCVRPSGESFVVARNSAGIEDLVKRLIELAPRVAGIEATGGFEAVVAAGLAAAGVPLVIVNPAQVRAFAQALGKRAKTDPIDAAVIAHFVEATQAQPRPLPDETTRLLADLVTRRRQIVDMIIAEGQRDRRSANKRLKNSIARLRRALEKELAEIDSEIDDHVRGSPAWAAKEDLLASVPGVGSVTARTLIAELPELGSLDRRKIAALVGLAPWTRQSGQWRGRSFIGGGRKTVRTALFMAATVAARHNPVLKTFRDKLVAAGKPKLLALIAVARKLLIILNAIVRDNRPWQPKTA

SEQ ID NO: 152602 - protein, 458 aa, unidentified
MEKPMRWKKANTKADIDSAFPLLRPNAAGLDVGSREHYVAVPAGRDTRPVRSFGCTTSELKQMAEWLKACGVDTVAIEATGVYWVPIYEVLEDAGIEAFLFDGRQTRHVSGRKTDVLDCQWSQKLHSHGLLTRAFRPDKEIATLRAYWRQRGGIVECCARQIHLMHKALEEMNIQLHKAVTDITGVTGMRILRAIVAGERDVHALAALRRGRIKATTEEIARALEGTYRQEHMFALAQALEAYDFFQRQLADCSQALERHLAQMRSGSDTPPQTPPPKQRKNQPNFDLRNELARIAGVDVCLIEGIDAMTAQTLISECGTDMTAFPTEKKFASWLGICPNNRKTGGRIRSRRSRRVKNRAATALRMAAQTLHKSDSALGSYFRRMKARLGAGKATTATAHKLARLYYRLIKHGEAYLTRSQAEYEALQRQRTLTSLQRRARHLGLQLLDASTGELLGA

SEQ ID NO: 152603 - protein, 534 aa, unidentified
MVKLLRYGPYVTETTLAYSSSEQRSLFPEEQLHNKRSFTVGNRTIYQSQSQDLCNLFEEAGHPSKVMCVALDYAKASHAALLCSGTGEYLRKPFTVHNSQKGIDFLVERIRSACKRHRIQSKHVFFGGEDVPSYAVNFIHALRSRGWLVAAVNAFDAKKQRENMQASSDILDLLGIAKMLLSRRGNTKPAQTGIYRNLRNLVRHRRQLIQMRTETSNRMHTLVDQLFPGFLDEKKSGIVAFSAGSLWLMEDRFSARQIRRRRTDGLIRGLQRCGTPRADKAIAKLKGLADQVLGPASEYIDTLQVSLGQQVALYRCLSQNAEQSEHEMAVLLAQTPAALLTSVRSIATVLAAGVVGELGDPRTQCPVNNLCSYAGIVPRTKQTGGPEKGVKTGRVSKRANRVLKDYVVQSGTLIGRQGPPELMADHHRRQSAGQHADFGLARRYLRLGMCLMRTGQIYLPPELRTEDATPEQRAAYYLQLWPKLTAKWRRIKADHIAFDPKNPLGQWRNMVEELYGIKLPLKRPLIDGGGKRNR

SEQ ID NO: 152604 - protein, 343 aa, unidentified
MQDPVVVGVDTHRDSHVACVLSESGARLGARRFAANEAGYGELIGWAGSFGEIAMVGVEGTGSWGAGLTRTLVTRGVTVVEINQGDRAVRRLRGKDDAIDAESAARTVLAGTHAGAPKRRDGAVEAIRALRVARGGAVKARTASVNQLRSLVSTAPEPVRARLRGLKTAQMIAACSRFRANASRASDADEGTRMALRSVARRYTELDGEAVALEKQISQLVREAAPRLVELLGVGPDHAGQFLVTAGDNPDRLRCEASFAALCGVAPVPASSGVTNRHRLSRGGDRQANRALHMIAVCRLRYCERTIAYAQRRTAEGLSKKDILRCLKRYIAREVYAALPRTA

SEQ ID NO: 152605 - protein, 364 aa, unidentified
MNKCHLNTELSSHEGTRCQFNGGTGAIKLGIDVHQDFYVVVMQEGGSNPKPPQRFRKEAFLHWATKLKSRATEVHAVYEACGFGFSLQRQLNALSIHCYVVCPQKLDEHNKRVKTDGLDAKALVLKLDRFVQGNRAALAMVRVPSKEEEQKRAIHRQREQLVKTRMQLEAQGRTLMVNHGIEPVKNWWKGRTFAALQLPAWMKELLGNSQPILLALQEKISALTLQLQVAAASKQARGLGAMTSVIIDREIGDWNRFSNRRQIASYTGLCPGEYSSGNSRLQSCVTKHGNPRLRAAMVELAWRLVRFQPSYKPILKWRRLLAKGALATGAARKKAVVAVARQLAVDLWRVRTGRCKPEALGLVI

SEQ ID NO: 152606 - protein, 341 aa, unidentified
MDKELYFGVDVSKKTLDLAYYDGETIDWKNAHIKVSNDDAGFKKIGSWVAKVGKDFDTFLFCMEYTGLYNQNFRLWLESKEYIYGMVEPRKMHHFEPDLDDDQRSLDRIKTDELDAFRIAIYCEQNHKKILRNPSKLPSPVYFKLKRLLAERKQNTKQSTLYKQQLHDICAYDTDLSVERKKLLLKNMMENQKAIDKEIDSYMNEDASISKNYDLLTSIPGIGRIIALETIVLTENFTAISNPRKYACYIGIAPFKKESGTSVRKRTSVSKKGFSEAKADLSIAVLSAIKNNPSIRDYWIRKRKEKCGGIVLNAVKFKLVLRMFAVIKRGTPYVETDAYKN

SEQ ID NO: 152607 - protein, 364 aa, unidentified
MEHGGIDVHKNESQISLLTVEGEILEQRILTRWDRFAAVLGNRPRARILIEASTESEWVARCLEELGHEVIVADPNYAPMYATRSRRVKTDRRDAQALMDACRLGAYRPAHRLSDTQRQVRALLVVRDNLVRTRVRQIQVIRALTRREGLRVRSGEAASFGERLSEVELPEWLRSILAPVSAAMDEVNRQLAAVDQAILQVVGRDPVVQRLDTAPGVGAVTAVAFVATLDPVERFEGAHQVECYLGLVPGEQSSGERQHRGPVTKAGNPPDALAAGRGCVVHPALARPEHRAPAAVGGADRDAPGPEDRHGGIGAAAGGHPVRDVARRDRVRSPSLRARPERTSTRECSGVNLWAMRWRCGPRS

SEQ ID NO: 152608 - protein, 365 aa, unidentified
MNNAYYTIIGMDVGDRKTQVCVMAGGGAAPKVVMETAIPTTREGLAKFLATQDRASAVAFEAGTHCRWMDEVARGMGFKVYVANPCRLRMITESKTKNDKNDARTLARIALADPGLLHPVKLRGPEHQRMLNLHEMRNLLVKQRTGIVVQLRAVAKSMGFRIAKCQAAGFHRLDRSAWPREFRDIAWPMLKNLEQLAVTIRTYEKQIRELAETPTFKAQVERLMEIRYVGLYVATGFVAVTGGDVDRFGKPRDIGPWLGVTPKQDQSGDVDRQCHITKAGSGLMRRLLVESAQMILRDCSADTDLKAKGLRICARGAKIARRKAVTAVARSLAVLMVAMLKKPDAPYVPLSERCEKELLAMRATA

SEQ ID NO: 152609 - protein, 349 aa, unidentified
MKIIGCDFHPGYQQIAVLDLATGETEEKALSHERKEEVRAFYGGLGGSVRVGIEASGQSQWFERMLAELGHQVWIGDAAKIRASCERKQKTDRRDAELLLRLLAEDRFPRIWVPTAAERDERQLLLHRHKLVRMRTQVKNQLQALALNQGVQRKRKLWSETGRRQLESLPLLPWASRRRAELLQLLDQLGASITELDRAVVEQANARPAAQRLMTHPGVGPVTALAFTLTMGPAERFSRGKQVASYLGLIPIEHSSGGRQQRLGHISKQGNPFLRGLLVEAAQSAVRLEPEMRRTYQRLAQRKCRALAKVAMARKLAVRLYWMLRLQVNYAQLIQGSHAGQPGTFCGRG

SEQ ID NO: 152610 - protein, 349 aa, unidentified
MAMTIVEAVPGITGGVDTHLDKHVAAALDPLGRLVGTESFPADAGGYRALLGWLEGFGQVTKVGVEGTGSYGVGLSRFLRSKGVEVVEVNRPNRQSRRNQGKSDPLDAVEAARAAISGRASGTGKTKDGPVEAIRVLVVAKRSARQARVKAIVQMRHLGITAPDQLHSKLKGLTVTALVTEAAKLRSTRSPDPVTAATKASLSSLAHRIQGLDQEIAELNEKIESLLLATAPDLLGLFGVGPDTAASLLVAAGDNPQRLHSEAAWAHLCGVSPVPADSGRNTGHLRRHNGGDRQANSALWRIAMVRIAHDPETTHYFDRRVKEGRTKRDVIRILQRYIAREVYRYLPRG

SEQ ID NO: 152611 - protein, 338 aa, unidentified
MYYTGIDLHKFTSYLTTVDSSGVILKQENLKNVAHNFVQYFNSIPGEHQATVESTMTWYWLNDLLTSINIPLVLAHAKYVKAIAYAKVKTDKVDSHTLAQLLRMNFIPVAHKISNDNRTLRDALRARLKIVQRHTSVTNSMQLLLAKYNFDSPTQLSGIPEFQYEQLTKVEELLNEQMLELEKQLYPSLIPNDDIQRLLWIPGIGKMNAFTILLEVDDINRFPDVKNFFSYSRLTPSARNSGGKSKQRSSKDGNKYLKSVFTDAAIHAVQYYPVIKKFHNSLLHKKNKFVARTIIAKEIARVVFYTLKYKTDFNNKFKGKELEHTKSLQWPRVVSPSA

SEQ ID NO: 152612 - protein, 334 aa, unidentified
MYEVGTIRYASRGGLSCVAFLGVDISKADFHCCLLDGEVSSAAKFDNKSPGYRGVLKWLKKERAKDIHVCMEATGPYWRGLANTLYAAGLRVSVVNPSRTAYYARVKLQRTKTDAVDAKMLADFCKSQKPDLWKPPAPEILELRAFLTYRTQLIKQRTAQNLLVAQVEGNSALGRIHTAQLSAIGKAIGAVEREIRSHLKRHPELQERVARVQSIPGLGTLSSATIVAHLPVERLRDKKAVGAYAGLSPRDRQSGTSVHGKPRICKMGNADLRRAMFMPAMVAIKCNPAMKVFAERLKARGKPAKVIIVAVMRKMLVLAYTLLLAKTNFDPSRA

SEQ ID NO: 152613 - protein, 340 aa, unidentified
MDVEYAGKRYVGIDLHRRRSVIVAMSPQGEVLDTTRIDNDPFTLAELVASWGESPEVVLEATYGWYWAADVLAQAGATVHLAHPLGVKGFAYRRVTNDERDAADLADLLRMGRLPQAWIAPPDVRGLREAVRHRCKLVALRSGLKAQVHSVLAKQGVHVAMSDLFGAGGQRLLDELALDAPFNARVVSLRRLIDAFTFEIDILAKRTAADLAADRGYRAVQTIPGVGPVLAAVFVAEIGDVSRFHRPEQLCSWAGMTPRHRESDTKVHRGRITKQGSHLVRWAAVEAVQRLHGGPIGATRARLTERRGANIAKVAAARKLLTLVYWGLRDGHIRCLASAA

SEQ ID NO: 152614 - protein, 382 aa, unidentified
MNRIIKIGMDVHSTNYTLCAMEPVLDGEDRIFTNIQVTPDYENVIQFIDNLKERLGSSDSYSIECGYEAGCLGYSLYHQLTKAGVKCTILAPTTMLTQQGKRVKTDKRDAVMIAQCLSYGGYHAVHVPTDQDASVKEYLRMRDDHKLALKKIKQQINAFCLRHGYIYDGHKWSIRHLDWLKKLDLSELYRETLNEYMTSYEEQTAKIERFDKRIEELAADSDYHENVRKLSCLLGIQTHTALSLIVETGDFKRFRKGNTYAAFLGLAPGESSSGEKISRTGITKAGNNHLRTLLIEAATGICKGQVGHKSKALCARQAGNPEEVIAYADRGNIRMRSKYKRMIRREKKRNVAVAAIARELACYVWGIMTNHIEPREEGKKAA

SEQ ID NO: 152615 - protein, 345 aa, unidentified
MKITTIGIDLAKNVFQVHGVDEHGKAVFNKGLKREQVAAFFVNLPTCLIGMEACGSAHHWARKLQGMGHTVRLMAPQFVKPYVKTNKNDAADAAAICEAVTRPSMRFVPIKNVEQQGVLALHRVRQGFVKARTAQANQIRGLLAEFGLIIPQGIGHIAERVPELIEDAANELPGVFRLLIQRLLEHLKELDRQVQELEAQIVAWHRQSDLSRKLEQIPGIGPITACALVASLGDAKSFKDGRQVAAWLGLVPRQHSSGGKQNLLGISKRGDTYLRTLLIHGARSVIYHAQNKAQDSAQCGWVNGVLQRRNKNVAAVALANKNARIVWALLAHDRSYEPGYVRELG

SEQ ID NO: 152616 - protein, 345 aa, unidentified
MKKGITIGMDLGDKKHQVCILDKAGKIIAAEGIDNNRTTVTKFFKRYRGAVVAMETGTHSRWVSQVAEAEGLEVLVGNARKLRMIWESRQKSDPRDAVMLARIARFDRELLCPIRHRGEQVQMDLEIIRARDLLVRERTRMVNHVRGVVKSMGERLAASSTASFGHKVKIPEALNEGMQPMLEMIRELTKKIRAYDLMIKEAAANKYPETERLRQVGGVGPLTALAYVLTLEEPERFAKSRMAGAYLGLVPRLDQSGQIDKQLRITKHGDGYLRRLLIGSAHYILGPFGPDCDLRTFGQKLMQRGGKNAKKRAVVAVARKLAVLLHALWRSGQQYEPQRRQQAVA

SEQ ID NO: 152617 - protein, 357 aa, unidentified
MKKLFIGIDFSKEKLDATIILACGMNEIGSREYGCFPNNTTGYRKLCNWVKTNAWNTIAEEWLFCGEDTGSCSIGLSKWLYGKGYDIWIENAYAIKHSSGIQRVKNDKADSAIIAEYAWRQQDKVVPFEPLNESLAQLREIFLYRHKLVGQRVAMELRKEDKSQSNKSKAISFINRKSKHLIAEINKTIAECDKAIDSIIEANEELKENYAIITSIKGVARQNATCMLVYTNNFKKFGYDPRKIACYYGVAPFGKQSGTSVNTPAHTSHFANKLIKSLLGQAAHIAKIYNPEIRDYYQRLISKGKKPQVALNNVKNKLIRIIVALVRKRVPYDQNTYKYYEEREVIERKKNEKLIYC

SEQ ID NO: 152618 - protein, 497 aa, unidentified
MPTKANIYSDCNPQVLKLFEQAGHPARVLCVALDYAKAQHMALVCNGLGDLLKGAFAVDNTPAGATQLLQQVRQCAKQRRIPTQQVFFGGEDYPTFAENFLRHLRKEKFLVVRVNAWEAKQQRSNFQASSDELDLLGIARCCLNRRGQPVQDLPVAYANLRIATRDRNELVRLATATSNRIHTYVDRLFPGFLSADKSGLAPFCQASLDLMAERFSPAEVRRRPRGALGQWLARRAVEEPHAVAAQLKELARGALGPAPEQTALLQRTLAQLVGLYRGLEGSISGLDRELAYWLARTPGALLTSISGIGITLAGGWMAELGPPQQWRAVRRICSYAGVVTKTKQTGGPEKEPMPSYVQQRCNKRLKNVVLQAVEKVRQYGPEDLRRSAEELEANGSHTEFGMAKRLVRLAKYLVVTGTIYRPKTLLDPDTPKEKLVLYYQTAWDKLLLKWKGKSDLKEVFAPAHPLGQWRQMVKELYALELRLPQQRAAPPPGASAP

SEQ ID NO: 152619 - protein, 339 aa, unidentified
MTTIKPASAITNSPVPDSTPDTQEPFTQFIGVDIAKDHLDVFLAASNQLHRIENCPAAIDKFLRRFKQPERTQILVVMEATGGYEYVLTQRLHAAGIAWAAVNALRIRHFALGCGLIEKTDAIDAKIIAKFGQMSPPRPTPMPDEATELIRALSFRRGQILRQFQQEKNRLQQCHCSAAKKFIADACKFYSKQLKAIDAKIAEAVKNDADSAQKAATLTSVPGVGTVTATVMISQMPELGKLNRGQIDKLAGVAPIANDSGRKTGYRKTMAGRSSVRRTLYMATLVATKHNPLIKGFYQSLLKKGKPKKLALVACMRKLLTILNCMIRNNQPWKDTLTA

SEQ ID NO: 152620 - protein, 316 aa, unidentified
MPQQVQPVSVGADVDSRFIEIAVHGAEATERIENTPEAIRAWLARQSPATELALEVTGRYHCELLERAYAAGVRVYLINPQWLHHYRKGVGHRNKSDRADARLLARYAAHERDELRAWTPPPAGQRRLCSLLKRRAKLVQVQTTLEQSFAEEKAVAEAFQRTRAELQRLARAIERRIKALLREHGWWAHYQRCCAIFGVGETTAAALVAAFQRGAFKSADAFVAYLGLDVRRRQSGRYEGQAKLTKQGESEYRRLLHNAARAAARRDLKAYYERLRERGLQPTQAHVAVARKLARIAFSLMKNQTTYDPSKIAAAA

SEQ ID NO: 152621 - protein, 402 aa, unidentified
MKPTCLFVGIDVSKSKHDVAVIDQNKQLVAKPFVIADNRQGYQTLINKLNALRQNNGQCPVKIGLEATSDYWKNLYYFLCAQSDEFQLTVINPVQTHHWAKTQLRRAKTDPLDAKEIALFMAEKNPSPTVRRTPIFDIIKDIDQRLSVIRKQLTATLNRLRLELTKVAPELEKAIKKLDSKRILAVLIQLPTAEAMAQAPVETWRQIRYGKNNVRLPQTLIEKLKQCTTHSVAYKTGPGAGIAVQSLVREILFYQQEQQLLRQHMAKLYQQISDQESLLCSIPGIRRETAIALEAYIGDVHRFPNAKKIVAYFGLNPTIQQSGKSKRKARLQKKGNPIVRHKLFMAVISIIRQKKGPIYRYYQRLVDSGKPKLTAIGAAMRKLLVTIYSMLKNKQPFDENKM

SEQ ID NO: 152622 - protein, 355 aa, unidentified
MTSNIKYIGMDVHKESISVAVMNATGKFVMECVIETKASTILQCIDGLRGDLHVTFEEGTSAAWLYDLLKPHVTELIVCDPRKNASMREDNQNDKIDARRLAELLRIDHLSPVYHGEHGLRTLKELVRSYLTVTKDLVRVKTRVKAIYRSWAIPCNGKEVYAARHRAEWLEKIKELGVRRRAEFYYQQLDALRVLRLGVRRELLAESKKQKAWKQLCQIPAIGPIRAAVLLGILQTPHRFRTKRPLWKYSGLAIETCSSADHRSINGQLQRSKKNSVRGLNQNCNHDLKNLFKGAAVIASSKPGPFQEFYTALLAKGMRPEMARLTLARKIATIVLIVWKKGVSFDAQHLKPQTA

SEQ ID NO: 152623 - protein, 360 aa, unidentified
MERHRTSVGLDVHARSVVGCALDAETGELIERRFVPDYGEITAWLKSLPAPISTVYEAGPTGYGLARTLMAADIDCVVAAPSKLIRAPGDRIKTDSRDARHLARLLHLGEIVAVAIPTVDQEAARDLVRAREDCRGDLMSVRHRVSKLLLRQGIVYYGGEAWTGKHEQWLRKQRFAAPALQMAFDAAFDAMLATVDRRDRLDHAIADLAADSEFTPVLTRLQCIRGISTLTAFGLAVEIGDWDRFSGRTIGAYLGLVPAEYSSGSSRVQGTLTKTGNGHVRRLLIEAAWHHRKRYRPGLRLRQRWNAATPAARARGHAANRRLHNRWIRFDQRHKRPAVANAAVARELAGWCWSLAVLDD

SEQ ID NO: 152624 - protein, 365 aa, unidentified
MSFARDDGESPTETEVRALMKVLIGVDPHKASLAVAAVDEATGELLERASFPQDRAGLRSLERWAKRFSECRWAVENAGGLGRYLAGRLAGSGESVVDVPPKLSARVRVLSTGNARKNDGLDALATALAASRNGRLAAVDPEAASEVLSLLSERREDLVAERTRALNRLHALLRDLLPGGVTGTLSADRAARLLRGIRPRSSSSRIRRRLASEVLRDIRTLDRKIADLNGRIEAEVEASGTTLPEIFGVGPILAAKIIGTVGSVERFPTKAHFASYAGTAPVEASSGEVVRHRLSLAGNRHLNYALHMVAVCQARSDARGGTYYRKKIAEGKSRKEALRCLKRRISDAVFASLVADSQVLSRSAA

SEQ ID NO: 152625 - protein, 338 aa, unidentified
MQNASFPLHGAVDVFIGVDVGKGHHPAVALDRTGRRLYNKALPNDEAQLRALINELKTHGRLLFVVDQPAPLGALPLAVARDAGALVADLPSLAMRRIADLQAGEAQTDARDAAVIAEAARAMPHTLRSLRLADEPLAERTMPCGFDDDLAEQVNHTGDRIRGLLTQFHPAPEHVLGPRLGHPAVLDLIERSPSLAALARAGRKTLANRLIKLAPRSGKNLAAAISQALTEQTVVVPGTPAATLVKPRPAQQLAALRKQRDEIAAEVERLVQSHPLWPVLSSMPGVGLRSAARLLTEVAHKAFVSAAHLAAYAGLAPVTRRSGSSIRGEPPLGGVTEC

SEQ ID NO: 152626 - protein, 352 aa, unidentified
MKELSKEGVIKFVGIDLAKRSFHLYAVDAEGRAVLSRKVTRARLSAVVAQLPACTIAMEACGSAHHWARLFRTFGHEVRLIAPQFVKPYVKSNKNDAADAEAICEAAQRPGMRFVAVKTVEQQDIQAIHRMRSLAVQQRTAQINQIRGLLLEYGLEVAQGRAAIQRRLPEILEDADNGLSERFRAEVHELAEELRHLNERVAHYDEQIEQIAQDDAQARALMTIPGLGAKGATALLAAVGEDPQLLKNGRGLAASLGLVPRQHSTGGRERLLGISKRGDVYLRNLLIHGARAVLRCIERKEDPTSRWATALKARRHTNVAVVAMANKIARIAYAVIVTGKPYDPAKAALANG

SEQ ID NO: 152627 - protein, 412 aa, unidentified
MSKQSHRYVAFDVHKSYVMVAAVNTTQEVVLPPRRVPFSRFEAWITKHLKSTDQVVLEATTNAWFVHDLLEPLVARVVVAHPYHVKLIAAAAVKTDKRDTLALAKLLAANLIPAVWVPPIEVRELRALIAHRRRLVSHQTAAKNRLNSVLHRHNIVPPQGKRFNQDNHPWWLALDLPPSERLRVRQDLATLLHLKPQLEELETELARLSVTDPWASPMTYLVQLPGIGMLTAMTVLAAIGDISRFPSAKKLVGYAGLGARVHVSGQTHKGGGITKQGRRDLRSVLVEAAWTAVRVDPHWQAQFERLARRIGKHKAVVAIARKLLVVIWHVLTAADTDRRADADRVAAKLMLWAWQVGHQHRPDHLSTGQFIRFHLLKLGLGDDLDFIVRGGVKRLIPSLQQLKTDRPDLFGD

SEQ ID NO: 152628 - protein, 324 aa, unidentified
MSEAIVGIDVSKETLDANCARGQRKQSRTFTNNPEGWKLVLSWLKAMSSKQAHVCMEATGRHSLGVALALHDAGHVVSVVNPAQIRDFARTKLGRNKTDKVDAALIREYAELFRPQPWAPPSPAMRRLCELQTVRAGIVSNRAEWKNRIGSGLGDSTATSLAAATIAHFTSQLEAIDRAIAETIDQDAELRGRRDLLLSVIGVGETLAASLLAEMPEPGVLRRSGEMVAYAGLNPSHHRSGSSIDRPTRISKVGNATLRSSLYMPALSAMRFNPAVAALVARLKSAGRLKPKQIVVAAMRKLLVLCFGVLKTGKRFDPAIAMPA

SEQ ID NO: 152629 - protein, 421 aa, unidentified
MRAVALDVHRDFCEVAIVADGRLRSAGRIETRPETLELFARSLDSRDRVALEVTGNAWEIARILEPHVARVIVVSPSDTGIRQARAKTDRLDARALARLLWAGQLEGVWTPDERIRGMRRRLARRSQLVRSRTRAKNEIHAVLMRCLKDRPPASDLFGVKGRRWLAEQQLPVTERETVDSAARQVDFLDAEIAEVERLIAAEALSWGQVKRLMTVPGVNVIVAATFMAAVGDIGRFPDRRKLTAYLGLDPRVRQSGAAPAAHGHISKQGSSSARHVLVEACWSTVRQPGPIAGFYQRVKARRGHSIAIVASARKLACLFWCLLTRSEDYAFAQPSLTKKKMRRLELQAGARRWQGGRGIWTTNEMMRQAERELALQAQRAYERTVKDWQQNKGASATPGRASHGSSKEHVARQTPRPKSAL

SEQ ID NO: 152630 - protein, 389 aa, unidentified
MYYCGIDIAKRKHDVVIINAMGDVQGKPLTIPNTQAGYDELQKALSGLEEPVLIGLESTGHYWLTLFDALSQWGYQLILINPIQVAAYRKSGVRKVKNDRKDAWWIADYIRIANLPPTDQQVPILLKLRELTRFRNSLIQQISNLKRKVISILDRVFPEYETLFSDIFINSSRALLQEAASAEEIAAFDLSELTEILNKSSRGRFGTEKAHQIQTAAQDSVGVGFLVDATRVQMLCLLQQLDLLLDQVKLLEQSISDLMDQIPQFITSIPGIGPVTGAVILSEIGDINRFEGSEQLVAYAGIDPSVYETGQFKADHAHMSKRGSPHLRQAIWQAATVAARHDPDLKAYYQKKRDQGKTYGVAIGAVCRKLLARIFIVLKEQRPYVIRDY

SEQ ID NO: 152631 - protein, 410 aa, unidentified
MQVLYPHCAGLDVHKESVTACVRSTVGNTVKREVRTFDTTTKGLLVLADWLTSEQCTHVAMEATGVYWKPVWHILGDGDFELVLANARHVKNVPGRKTDVNDATWLADLLAHGLIRGSFVPDAETQVLRSLLRTRKQLVREKSSHVQRLQKTLEDANIKLDSEISDIIGPTGRRMIEALIAGETDPAKLAALAHPRIKAPPEQLREALHGRVMTHHRFLLRLHLQQIDALDVVVSDIDREVNARMEPFRTATELLTTIPGISELSAQMIAAEIGTDMGRFPTAAHLISWAGLCPKNDESAGKRRSTRMRKGAPWLKTTLVQCGWAAVRKKGGYLQAQFHRIRSRRGPKKAICAIAASILTAIYHMLKDGTCYHDLGHDHFNQRAKAAQTKRLLARLHNLGYAVQITPLPA

SEQ ID NO: 152632 - protein, 470 aa, unidentified
MSTRRNAQELTNGAVVITSFHKDFRSGSSGAIEPNQTSSAKNMEPSISTSPSAALSAYIGIDWADQKHAIALRSAAEPSKVQHQVVEQKPEALMQWIGQLEQRFGAQGKILICLEQSRGALIYHLMGYEFLELYPVNPLQLARYRETFSPGGAKDDRPDSELLCELLYCHRDRLRAWKADSTLTRKLAFFNEGRREAVDQRTALSNAIKSQLKVYFPLALELLNEESSTALAADLLLRWPSLEVLQKQSANTLRKFFYGHNCRGETKMLQRLELIQQAQPLTQDSAVIEPATFRVQLLARQLKSLLVDIARYDQKIAQLFEAHPDRFLFENLPGAGTALAPRLVTAFGSDPTRWDSAQEVATLLGIAPLRRASGKNTGKKASVHFRLACPKFLRQSLHEFAGCSIRSCSWARACYEAQRARGKAHHASVRAVAFKWIRILFACWKQRTPYDPQRYQSALQHRGSPFASAC

SEQ ID NO: 152633 - protein, 334 aa, unidentified
MLYAAIDIHKRAFQAAVLDPESGEVVEERFAADRESLARWAEQWRGRVEAVAIEATTGWRWVWRELVERGFEVRLAEPVQTRALLGRRRSAKTDRLDARWLARLLAKEMLPQSWIPPEQIQQLRDRTRLRKALAEDRRRWGQRLHAYLLHEGWPCSRSNLLRPPGLRWAAALQLCEHARLQVDSLLAVMAALQEQLDTVDGELRRFARGDERCQALQSIYGVGPILACHLLAEIGEASRFQRAEQITRLAGLDPVVDESGESRRRGHLAKAGSPHLRWALVEAAVHAHRPTAPDLALYRATRQRRDTTVARLTVARKIGKRAFHALRELELAAA

SEQ ID NO: 152634 - protein, 412 aa, unidentified
METIVERPAALDVHKASVMACVRVPAAGGGRDEHVEQFATTVRGLLTLADWLEAHGVTQVAMEATGVYWKPVWAVLEDRFACMLVNARHVKQVPGRKTDVLDAQWLCRLLEAGLLKASLVPPKPIRTLRNLTRYRKSNIRDRQREANRLHKMLEDTGIKLDCVATDLLGKSGRAMLDALVSGTTDPQLLADLARGQLRRKLPALREALEGRFDSEHALVVGQILAHIDFLDESIDRLSAAIEEQIAPFAAAVELLCTIPGVQRRAAEVIIAETGGDMTAFTTAGHLASWAGVCPGNDESAGKRRSGRTRKGSKWLRGTLIEAARAAARTRDTCLNAQYQRVRARRGANKASLAVAHSLLVAVWHMLQTGETYLDPGGDYYNRRDPARTTRRLVTQLERLGYSVTLQEQQVST

SEQ ID NO: 152635 - protein, 438 aa, unidentified
MLRPDAAGIDVGAEELWVAVPEDRDERPVRCFATFTNSVKVMIVWLQQCGIQTVAMESTGVLWIPVYQMLEAAGIEVCLVNARHYQNVAGKRTDVQDCQWLQFLHSVGLLRASFRPEQAVCAVRVLVRQREQLVQMRSQHVQHMHKSLDQMNLKLHYVISDVVGASGQRIVRSILAGERNPEVLAKLRERTIQATEEEIRESLVGDYREELLFALGQSFAMWEEYNRRVNDVEVEIEKYTAKLETKVELTVVAKLGKKRGKGRRCKPQTRHLANMRDLCHQKFGVDVCQITGMKRGGIAEVLIAELGPDLSAFRSASAFAAWLGLCPNHEISGGKILSRKTKKIKQPVAVAFRLAGQSLERGNHYLNRWYRSMKGRMGAPKAITAAAHRLARIFYYMVTRQVEFDEGVFAKNEKRMEERMRRNLEKRAAQLGFKLVAA

SEQ ID NO: 152636 - protein, 370 aa, unidentified
MNKSNQTISSSGGNRASVRQHGNRVLKLGLDMHYRQVTVAMQEEGGRIKGAGKMSHQAFGNWVNKKLAEGWQIESCYEAGASGYWLDRQLVALGVKNLVVAPKAMGQGGKQQKTDRRDSAELVDSLDRYLRGQDKALSVVAVPSVEQEEKRALIRYHRQIMADRGRYEARGKGLLCAQGLEVGGRWWQGKGWRELNSDPRLKEWIKEQLEAWRQKVLGAEAEQKGLRRRIEALAPAILPKGVGAYSAAVLEYEMKGWGRFNNRRQVASYTGLCPGIHQSDGRGKEGSINRCGNRIVRWSLVEMVWRLMVWQPHYGPVRQLAAGLVRSKRAKRRLVVKAARRLAIDLWRLSSGQTTAEKLGLVLQSNGQSK

SEQ ID NO: 152637 - protein, 362 aa, unidentified
MRIIGCDLHARQQAVAMLDTETGEVVSMILKHEGNNVREFYSSLPRPVRVGIEATGSMQWFVNLMEELGIECLVGHPAEIRAAEPRKQKHDRRDADLILKVLVENRFPAIWLPSKELQDLRSLLRHRHQWVRMRTRIQNALQSIALANGLRRGTSLWSHDGQNTIASLPLAPHTAYRRSELQALYQKFEAEIEKLNQRVEEQACGRAGARLLMTHPGVGPVTALATEVFLGDPARFADSKALASYVGIIPREYSSGGRQRLGGLTKQGNPLLRFLWGEAGAHAVRRDPELQRFYRRKLIQKGFGKASVAVARKLGIRLWIMLRDQIEYNEFCRRGQKQQKSSEACAGMPETRNGAKSHRPVD

SEQ ID NO: 152638 - protein, 322 aa, unidentified
MSTSSGRTTYVGIDASKATLHVPILPTAEHLIVSNDEAGIDELLGKLAEASDALVLLEASGGFQRPVAAALAASGIALFVLNSRQARDFAKATAPLAKTDRLVAFVLAHFAQAIRLAPRAIPEAEAREFHEILARRRQIIRMMTAEKNRLGATRSKADRGRVEAHIRWLEKELSRTDRDLEETIENSPTFKENEALLRSVPGVGPVLCRTLLVELAEWGTLSPRELWALLVGVAPLNRDSGTLRSRRRTVWGGRARVREVLYVGALIASHFNPAINEFYERLVETGKPKKVALVACMRKLLVILNALMRERTPWRCPHALNP

SEQ ID NO: 152639 - protein, 337 aa, unidentified
MTAISMLAVDLSKGSFQVCAVGPDGTVLYNRALSRSRFAALLADQPACVVAMEACATSHHWGRVAQKSGHEVRLVPAVYVKPFVKRQKNDRADAEAIAEAAARPRMRFVAVKSAETQGRAVAFRTHQCLVRQRTQLINALRGHLAEFGVVAPKGPANLKVLEEALADAVADLPVAVRAMGTIYLDQIAGLTQVIERLADELETASRTDTDLRRLCTIPGIGPVTAGAVAAFAPDLDTFASGRNFAAWLGLVPRQRSTGGKAKLGSVSKMGQTDIRRLLIVGAMSVIRWVVRKGGSANRWLATLVTRKPKMVAAVALANKMARMIWAVTTKQEDYRMA

SEQ ID NO: 152640 - protein, 311 aa, unidentified
MTEHTIGIDISKTHLDAFRLEDQAVRQFENSTRGFRALIKWLGQTRVARIVFEPTGPYHRAFETALSGRFPLVKVNPLQARRFAEACGTRAKTDAVDARILARMGAALALEADAPVSENLLVLRELQVARTALVKERTRLRNRSHVQINPVLKRQIKARLTLVERQLAELDAEIASHVAKDDGLARKGEILRSIPGLGPIAVALFLTFLPEVGTLDRKQAGSLAGLVPHSRESGQWKGKSFISGGRKPLRDALYMPALVAMRFNPDLKEKYHALREAGKPAKLAIVVLMRKLLEMANALVKADRVWVERHT

SEQ ID NO: 152641 - protein, 389 aa, unidentified
MYYVGIDISKYKHDCFILDSSGNVVVRDFIFSNDLDGFNSFLSILESFGSPENIKIGFEATGHYTSNLKRFLENTHYSFMESNPALISKFIHSQTLRKTKNDAIDSQSIARWLMTVDYKPYPSGFYHIYSLKSLTRLRDSFVRQRSLYMVKLTNVLDHTFPEFKPFFGNRFSKTALFILDKYPAPSNIMEIPDSDYDELRCISRGKFSFAKLIMLRDLAKNTVGESNDIFELEITSIINLYNICNSEISKMDEEITSLIYELHPHVLSVPGIGPITAAVITSEYRDVKRFSSPDKMLSFAGLEPGYYQSGTMEFQGKMVKRGSSQLRCTLMNCTLPLIRFSPVFATYYHKKRQEGKTHRVALSHVAKKLLRVIYKLEINDVDFDESKLR

SEQ ID NO: 152642 - protein, 309 aa, unidentified
MKQSVVYIGIDVAKAHLDVAWAGTFRRLPNERSGHAVLVRWIKQSATPVQLICEASGGYEQGLLESLEKSEVKVTLVQAVRVRQYARAAGILAKTDQMDAKVLAAFGSAMQPPPTPPLCAEQKRLRQYEAQRRHLSKVLVAEQNRLAQLSCAELRTLSRGLISKIKKQIETIDTRIGDLIAQDQTLREKAQKLTAIRGVGVRTAALLLAQMPELGQLNRRQAAALAGLAPFNHDSGSIRGKRAIFGGRRALRSGLYMAALSAARFNPILSRFYRRLRAKGKPHKLALTAVMRKLLLALNQTLKPIPSLA

SEQ ID NO: 152643 - protein, 415 aa, unidentified
MALKIVYKICCGIDVHKNFVVACIASTDGKGVTTYESHRFSTYTRGLKNLLQWLLKHNCKDVCMESTGKYWIPVYNVLENDCTIVLAHPKYVKAIRGKKTDKKDAKWIADLFKHDLVTGSFMPPADIRQLRDLMRYRFKLTCFKSSEKNRLQNCLTVSNIQLGNVVSDTFGKSAQAILDKLLENPADTSFDLEPLVYKSLKKKLPELRDAIDGYITPEQAGKLKVIKAHYENLESRKAELEELILALAAPYQQELAILQTAPGIRSDFTAIGIISEIGTNMEAFPSAKHLCSWAGLAPTNNESAGKKKSVRVSKAGCYIKPLLVQCANAVIKSNKHPEFRNRYLRIKKRRGHKKAIIAVARMLLTALYHMLKNGENYNSELYRKSEVSPVDREITVEQAIIIARNQGYKIKSATA

SEQ ID NO: 152644 - protein, 391 aa, unidentified
MIYVGIDVAKDKHDCFITNSDGEALFKSFTIPNNRKGFETLFQKVQSVSDDLTKVKVGLEATGHYSYNLLGFLLDKGLPTYVINPLHTNLYRKSLSLRKTKTDKVDAHTIASMIMSDVDLKSYSDTSYHNEELKSLTRYRFDKVQERAKLKTSVSRLICILFPELEKLVPTIHMASVYALLSEFPSAHAVASAHLTRLTNLLSESSHGRYGKDTAVMFREAARNSIGSNMPAKSLELKHTIKLIQELTSEIDEIETEIKSIMDEVNSPILSIPGINYRMGAMIIAEIGDFSRFDSPDKILAYAGMSPSTYQSGQLDNCYSHMEKRGSRYLRYALYNATKYVCHWDESFGTYLAKKRAEGKHYNVALSNATKKLVRTIYAMEKTGQSYSSAS

SEQ ID NO: 152645 - protein, 369 aa, unidentified
MTFFIGVDLHKTQFTVHVRTEEESESLDQIKQYPTSPDGYAEFLARISRYKATGADVKVGVESTGNTRYFKNQVEKAGAEVTVINTLKFKVINESTKKTDKHDASTISEFLSKDMLPESYLCGKETENIRRLLKSRERLVRSTVGQKNEIHALLVSLGLSDELRSLQSKKGRQRILDTLESNNDYVLEAQSVKLMFEIIERIEESVKIIEKQLVELTKDDEMVNRLLTIRGCGKITAWTIRAYTEDISRFATAKKYAAFCGLVPWVQDSNETIHHGKITKRGPQELRTCFVQLVLGIRRCKDTSNWRMMQRYEYMKTNKGSGKSIVAAARKMAEIVWAMLSDKKDFDAQKMIGKYKPMSLAEEALTAMN

SEQ ID NO: 152646 - protein, 347 aa, unidentified
MRKIAYLSMDVHARTIVMGDMDANGKYSGKRPFTPGENNIISALKAVKAKLKYLIIEAGPLANWVAQTANPYVTDVFICDPRQNALIHKASTKHDKLDAPKLCRLLRLGEFKEVYRPENDERAIFKAAVQHYLDLRDQLKAVKNKIKAKYRQWGVIDCFTDSVYSVSGRKKFLKQVNEHPIYLQLKRLYELMDHIEAIKEAAQKAMISLGRNYPEIKEFKKMPGVGPIGDHTFDAYIQTPHRFAKKSRLWRYCRLGVTDHSSDGKPLGYKRLDKSGVSELKASSYRAFLSAMKSDNEVRRFYYQSLQRTLSRKHARLNTQRKIVAVMYSIWKKKDAYRPELFLDPST

SEQ ID NO: 152647 - protein, 384 aa, unidentified
MNKNSASSRKSEPEKFVGLDVHKETIAIAVADHGASAPRSLGIIRNDLDELRKALRRIGAPSRLRVCYEAGACGYVVYRFLERLKIDCLIVAPSLIPRKPGDRIKTDRRDALALARLLRTGDLTATWVPDREHEALRDLVRAREDAVEDRLRARHRLSKFLLRLGITAPAGIRSWSTRYRQWLDGLRFEDAAQRLVFIEYRHSLEELDRCITRFERELEPLAQRSPHAPTIAGLQAMRGIKLITAATIVSEIGDVARFQTARQLMAYAGLIPSEHSSGGRVRRGSITKCGNGHLRRVLVEAAWHTRHLPALSAELRRRQRETHPQIRTIAWSAQQRLHRRYRHLCARGKRPQQVVVAVARELLGFVWAVGQVIRATCDPLKAAA

SEQ ID NO: 152648 - protein, 449 aa, unidentified
MHGAHIGGQRAAAFFKLVADLDPRRVLLVGIDVAKATWFVVVSDLTGAVVADGVRLVADRAGLAELERVIAELRWQLAAELVVVGIEAAGHQHQSLTAHLADRDGLHVRLLNPGAVAAIRKQQGNRRRKTDWLDAAAVCELLARGEGTLVHLDASMAASLRPLWSGRKDLVDTRSRLRQQAGALVDCLWPGFSAADKQAGVSPVLCDLFKTKAGRVIAGLLGEGWTPARFTAAPTTQLQAIFAARGCRLTRPLASRLRARAADALPAHPAATAGKAAALAGMLGVLDGIDAEVERLEAQMAPLLAATEGAKLTQIRGVGVVTASGFVAFVGRTDRWAEWSKVWRAAGLDPARSQSGAKDARLGISREGSAWGRRALLDLAAAVCRQPGRWGDGFRARTTQGRKPAKVALAATGNSIGRTCFALMRSGADYDPAWETKRTRSSKVGDQAA

SEQ ID NO: 152649 - protein, 447 aa, unidentified
MEKKNVKMEVINPNAAGIDIGSRSHFVSVGQGTDDVREFGVYNEDLKAIADWLKANEIETVAMESTGTYWQSLFAVLQAEGFQVILCNGKFTKNIKGKKSDVQDCQWIQKLHTMGLLSGSFLPDEATEQLRTYCRHRSNLLEQAADTTRKMQKYLRLLNLRLDVVVNDICGLTGMKIIDAICKGEINPEKLASFRNGNCKKSEEEIAKALQTNGRNDYLFALKHEYQMYLNLQSKITECDAEIEKMLNQQINNDDNKKQHHIDKKAHKRINKNTPKNIDINLLSYQYFEGVDLLAIEGVSYSTVLTLMSEVGHGIHKFETAKQFASWLRLSPNNKISGGKVLSNKIPKGSNRLKIALRNAANAIGNLKDTALSNFFARISHRKGRVSAISATARKLAVIIWNMVVKGTAYVPLTEYQFVDQKRKKIAAMKRLITKFEITTDDLNLQM

SEQ ID NO: 152650 - protein, 458 aa, unidentified
MPRGRRRRVTRPVTMPILHPHAAGIDIGAIEIYVCVPLDRDPEPIRRFGTFTEDLHAIADWLAHCGVTSVAMESTSVYWIPLYQVLESRGFAVCLVNARHVKNVPGRKTDVQDCQWLQYLHSVGLLRGSFRPPETVCAVRTLLRHREALIQQTTAHTQHMQKALNQMNLQLHHVLSDVTGVTGLAILDAILAGERNPVVLASHRDYRVKASRETIMKALVGEYRPEHLFTLRQALASYRHVQALIEECDGEIYRLIGAFPATADLTERPLPAVPTRRMPHVKTPRFDLRSEFYRVLGTDLTAVPGIQITTVSTLFAELGPNLSAFPGGAHFASWLGLCPDNRISGGKVLSVHTRAVKHRVARALRLAAQSLGRSQSVLGAYFRRMRAKLGAPEAITATAHKLARIVYHLLVTHEPYDETRIARAEQQYQRRTEARLRSQARALGFQLMPIGPVVSTVS

SEQ ID NO: 152651 - protein, 358 aa, unidentified
MKHNNTNTQKSSSTKTAAKAKIIKLGIDVHADSFSVVRQIDNDTPPPAQKFTPEGFVKWVAKQLPAAEKVHRCYEAGPFGYSLHRQLLRMGVQNVVVRPQNWDELGRKVKTDRIDALALVQRLDRYVQGNRHALAVIAVPTPEQEQARGLGRHRQQLVQERQTHEAQGRSFLLYHGRRVQGQWWQPFAWEVLQQELEPWQCRILENFRAQILLADQQLAQVEKQVVAEAVSPAKGFGALTCQLLGREVLDWKRFANRRQVASLTGMCPSVHASGGHSRQGSITKHGNPRIRRLLVELAWRVVRFQPNYPPVRKWRPQLDSKRARGGRKKAAVAIGRHLAIDLWRTETGRSTAAQLHLT

SEQ ID NO: 152652 - protein, 326 aa, unidentified
MTAPILGVDIAKDKFDCVLLFGEKQHHHTFPNTTPGWKKLDQWLEKNGATTIHACMEATGRLWHGLAQHLCGASHRVSVVNPVRIKRYAQSRLSRNKNDAVDSALIALFCREQNPPLWNPPSPEQSQLQELTRLVSARKDQVQEEKNRLKSGTRNTFILAEIRRTIKNLEQSIQRLEKEIQAVLAANADLAEQAELLCTIPGISDRTAAVILAELPNPRHFTSASQVAAYAGLTPAQKESGSSVRRKTRLCKTGNSRLRKALYLPAVVASRSNPLLKARAQRLLAAGKTKMCVIGAIMHHLLRMAYGILKHQKPFDVNFAAQPKDA

SEQ ID NO: 152653 - protein, 337 aa, unidentified
MLFVGIDLHKKTIMLCVVNQAREIKERKQFHCCHPEQIRSFFAALGPFQAVVEATASYEWLWEMLEPLAERLVLAHPKKLRVIAESTRKSDKLDAKVLAEFLALDMIPEAYRPTPRQRQHRRLVRHRYYISRGLRGVKNKMRRLVSDYNADRPDLFTEAGQEYLDQVAVSPADRFVLQQLQQRFQYYRVQMRDVDKALAEFARKAPLAEAEARAALESIPQVGPATVDVVISELGDIRRFSSAKQVVAYAGLAPGQRESAGKSKDLGISKEGSRLLRWIMVEAAWRLVYHSRRWGLAFEKLRTRRGKKKAVVAIARRLLGVMVALMRSGQRYRLAQA

SEQ ID NO: 152654 - protein, 349 aa, unidentified
MTTMTSTASAVIGGVDTHADVHVAAACDQLGTVLGTESFPTTAAGYRRLLAWLRSFGVVSVVGIEGTGSYGVGLTRFLLEAGVELREVSRPNRQTRRRHGKSDVIDAIAAARAVITGDASARPKSHDGAVEALRTLKIVHRSANKARTQALNQIRDIITTAPEELRSELRGLRRRELLAVCAAFRPADRDDLVAITKLSLRTLARRVAELDDELAMLDARRRRITTTVAPALVAAHGIGPDTATGLLLAAGDNPDRLGSERTWAALLAASPLPASSGKTIRHRLNPGGDRHGNSALWRIIIVRMGNDPRTKAYVERRTKEGLSKPEIIRCLKRYVARETYSLLPRELLV

SEQ ID NO: 152655 - protein, 339 aa, unidentified
MHVTTIGLDLAKNVFQVHGIDDHGEIAFNRALRRAQVLAFFERLEPCLVGIEACGTSHHWARELIKLGHNVKLIPPAYVKPYVKRGKSDAVDAAAICEAVTRPTMRFVEVKTPEQQAILAVHRTRDLTVRQRTQTINMLRAQLAEFGLVLPQGVYHPLQFAKDCVDGEQPDLPKNAQEVVFDLCDELLFLHAKILRHSRHMTRIAKSEKRVALLRTIPGVGPITASAIVATVGSGKQFNNGREFAAWLGLTPLNRSSGGKERLGHISKMGDQYIRRLLVLGMTSRIRSIRMEPEKFDPWFADILSRKPSRVAAVAMANKTARMIWAVLTRNEPYKVRTV

SEQ ID NO: 152656 - protein, 435 aa, unidentified
MLYAGLDLSRQRLDVHVLDEEGRTIEVTAATPEVFGLREFVARISRHGDEVSAVIESMNGARFVHDQLELYGWDVEIADAVKVKGLAPLAAKTDKIDAWVLAELGRRDLVPAIWLPDPTVRAERERARFRLHLVRHRTALKNRIHATLIAFGHPVPVSDLFGTKGRELLARLAIPEPWSTTLATSLRMVDELDAEIAACERELRTEGADHPYVPLLMSVPGIAWVLGYTIAAELGDVARFSSPKKLAGYTGLCPLVRQSGRRDDRGPLAKNGPKYLTKKRLGRTAAARDGGVRRLNACSRCRRDRRLGRSHLRRRSLPRGKSQGRQGPLDVALDLGRDPSTGGAQDLRGGLRLALLPDAQDDPDRERGQHPVGQPRLHAVDRPFAERCDLVTPEDPAIGRRPLRLFQKTGELHRTLPVNRRARRASSMPQGPVAA

SEQ ID NO: 152657 - protein, 351 aa, unidentified
MKILAMDLGKSNTVICFYDSESGRHRFGKVKTTPQLIHDLLAEQMPDRVVFEISSSAGWVYDICSVLKLDTQVANPNTAAWRWKNVKNKNDKKDALKLAQLSAMNQLPVVHIPKPQVRQKRALIQYRQTLVARVIQIKNSIRSILDKQGYTMAMGKSGWTKKSLEHLNRLSLPFDKCDSYNLWRGQLHIELQMFHSTQKLLSDVTVTLDKLAESDRQIQLLQTAGGVGPRLSEAIVAFIDEPQRFTGGKQVGSYAGLTPRQYQSGSMNRQGKISGQGNKLLRSLLVEVSWLGLRYNKWMQQTYQRILRGSASRKKIAITAVARKLLVRCWAMLRDGTAWHDEPLDVGKMAV

SEQ ID NO: 152658 - protein, 426 aa, unidentified
MKLEEKELEKPIRAWIGIDWADEKHDVSLYDVATGKQEALTIRQSPEALQEWLGQLRSRYEGGYVAMVLEQGRGGLLNALMGCEFLVLYIINPKSLSSFREAFYGSGATSDPVDAELMRDMVRQNASRFRAWRPDDVMTRSLRLLTEGRRNLVNQSTALTNQLTALLKGYYPQALAWIGTLDTAWACDFLEQWPTLQSLQASSRRQILRFYEKHPRVSLDLNEQLKQIQDARALTQDEAVLESSALMVQALVAQLRPLLASIAEFDRKIAMIFRKHPDRPIFESFPGAGAALAPRLTAAFGTDRDRFQAAIEMQELAGIAPVTEKSGKKSFVHWRYACPKFMRQTFQEFADHSRRWCKWAKAHYELLRRRGKSHNAAVRALAYKWIRILFRCWKDRQPYQDEVYTKALLKHGSPLSSLLAESVENP

SEQ ID NO: 152659 - protein, 385 aa, unidentified
MYYVGIDIAKDKHDCAIIDSEGNVLDSFTFGNNKIGFNAFSNSISKFLPLEITIGLESTGHYGFNLIDFIDSLQLPLIVLNPLSVNLYRKSLTLRKTKTDKIDCMVIAQMIRTGEFKPYTPVSYHLSELKALTRHRYRLIKEQSRLKISITRLIQILFPELPHHVWSIHQKSSYVLLSKYPSAFLIADVHLTTLTTILSNASRGKYSKDKALEIRDAARNSIGSTRVSFQFELVQNIELIRKFKSEINILDNEIKKLMLEIDSVILTIPGISYTLGSIIIAEIGDISRFNNSAQLLAFAGLEPGIHQSGGYTSDRQKMVKRGSRYLRYALLESARLIAMRDPVFKEYMKKKLSEGKHYNISKSHVAKKLVRVIFKLLSTETKFNR

SEQ ID NO: 152660 - protein, 423 aa, unidentified
MIQQPTSQEFVALIGIDWADEKHDISIQVPGEKKITRQQIKQSPEALNQWIGYLRNRFRNGPIAVCLEQSKGALINFLICHDLFVLYPINPKTLAKFREAFRPSGAKDDPDDATKLLEIVANHRNQLTPWKPAEEIVRIIDILARNRRDAVDRRKQVINQLRSVLKAYFPQAIDLVSEDICSPLTWDFLMKWPTLQKLQKVKDATLRKFYHDHHCYKKKVVETRLQLIRQTQPLTSDEAILKTSPIEVKLLCQLLKQYTQSIAEYEQQLKELYPQHPDAEIFRSFPGAGTVHSARLASAFGADRERYKSPESLQKYSAVAPITISSGKSKVALARYKCPKHLRQSFIECAGQSLQYSLWTAAYYRMQIEKGKTHNVILRALAFKWIRIMFRCWQDKIPYNELNYLQSLTRKGSKILNYMKAAT

SEQ ID NO: 152661 - protein, 380 aa, unidentified
MQKDIRHLGLDVDSERIAVAVAEGRAEVRSLGMIPNREDSVRRLVKKLGPANRLRVCYEAGPHGYSLYWQLSKLGVHCDVVAPTLIPVKSGDRVKTNRRDAERLARCYRSGDLTPVWVPDASHEALRDLVRAREAAKKDELRARHRLGKFLLRRGLRAAAGVKSWTAKHLLWVKTLRFEQPAQEATFLDYLHEVEHSAARVTRLELAIDQAVASAPAEMRALIAGLQALRGIKTVSAATIAAEVGPLTRFARPKQLMGYSGMVSSENSTGNSVRRGAITKTGNAHLRRVGGEAAWAYRHRPAMSPALKKRQEGLSEEVKEIAWKAQHRLSSRYRRLLAKGKSPQKVATAIGRELLGFVWAIGMQVAKEQPGRTQGHHRVA

SEQ ID NO: 152662 - protein, 457 aa, unidentified
MPARGKQPRSGAGSPAHTIDPNAAGVDIGATEIYIAVPTDRDPHPVRKFSTFTEDLLAAADWLKQCGIKTVAMESTGVYWIPLFQILEAGGMKVCLVNARHVKNVPGRKSDVCDCQWLQHLHSAGLLRASFRPEQQICAVRSLVRYRDSLVQLSAMHLQHMQKALDQMNLQLHHVISDLGGKTGMAIVEAIVAGERDPHQLATLRDPRTRASKETIAKSLVGDYRREHLFTLRQSLTGFRQNGQLIADCDVEIESLLKEFSSGDGPGAEAVPEPQAELKRKPRRNEMNFDLRTQRHRIFAVDLTEIPGIDTLTAHTLFTEVGRDLSKFANVAAFTSWMGLCPDNRVSGGKILHAQTRRVNNRVAKALRMAAQALSRSHGWMGQYYRRMRAKLGGPKAITATAHKLARIIYHLLTTGQAYDESLFAQQEAQNNQRNECRLRHQARKLGFELTLIPTEL

SEQ ID NO: 152663 - protein, 410 aa, unidentified
MSEKSVTHAVYAGIDTHKDFHVVAVVDHLGRLLDTFTAATTRAGYHALLQWITSFHDIARIGVEGTGSYGVAITRLLRDRGFEVVEVNRPNRQMRRLRGKTDAIDAEAAARAALAGTAAAVPKSHDGTIESIRLLRVTLTGLRKCSTALTNSLRNIIVSAPPDLRDRLEPMTTGALLHHCSSFRIPAGAPADARLALRSTLRSLSRQILSQQRELDRLRSELTDLVRRVNPSLLAAPGVGVDSASTLLVTAGDNPERLYSEASFAALCGVSPIEASSGKHIRHRLNRGGDRQANNALWRIAMIRSTNDERTRAYVARRTIEGKSPREVRRCLKRHIAREIYSLLTDPKPVQGTDDLRPLRHRAGLSMQSCADHFAVSLTTISRTERAIKPNHDFAARYRDWLTGQLAETA

SEQ ID NO: 152664 - protein, 346 aa, unidentified
MKHNNVKRAVAVMGIDLAKQSFQLHGVDANGIVVLKKKLTRKKLREFIAKIPPCIIGIEACGGSHYWRRVFETHGHIVRMVAPQFVKPFVKSNKNDEVDAEAICEAIQRPSMRFVPAKSVAQQDIQSLHRIRSQAVARRTAQANQIRGLLLEYGITIPKGISCVRKQIPGILEDATNELTPIFRELLNEPYREMVHLDERVQQLEEKLAMICKSNEDCQRLLTIPGVGLLSATAMVAAIGDIRVFKNGRELAAWLGLVPRQHSTGGKPTLLGISKRGDTYLRTLLIHGGRTVVRVAAKYQDKRNQWINQLEQRRGKNISAVAVANKNARIAWALLTNKTTFQSQTV

SEQ ID NO: 152665 - protein, 343 aa, unidentified
MTQYVGLDVSLKETKLHVLDEAGSRVWRGRCATEPAAIAAAVRRYAPAAVRIGLETGPLTTWLWTALTAEGLPMVCLDARHAKKALDMKVNKTDANDAEGLAHLVRAGWYREVRVKGRSAMLAKALLGARGQLLNMSLSLENQIRGILKTFGRIVPKGAGGLFEKNVRAVIADDAEIAAVIMPLLQARGMARSKCAALDRRIIRSVQGDASCRMLMTMPGIGPITAVSYVAALERPDTFKRSRAVGAWLGLTPRRFQSGEVDYDGHISRRGDRQLRALLYEAAAVLLTRVRKESALRRWGLMLWKRLGFKRAATALARKMAVVLHSMWKSGTAFNPTLSAVTP

SEQ ID NO: 152666 - protein, 343 aa, unidentified
MDYFAGLDVSVKETSVCIVDDAGKIVREARVASEPEALLQVLTIAIYRFKRVGLEAGPLSQWLYSVLAEAGLPVICVETRHMRAMLKAQINKTDRNDARGIAQMMRVGLYRPVHVKTLRSQKLRVLLTHRKLLHSKAIAIENDLRATLRNFGLKVGMVGTVKFEARIRELVENLPDVAVLVEPLLVVRRVLREQVGILHRRLLAIVRDDDVCRRLMTIPGVGPVVALTYRVTVDVPARFRNSKAVGAVFGLTPSKYQSGENDRTGAISRCGDEMMRMMLYEAAQSMLVRSAKWSWLKAWAMKIARHRGMKKAIVALARRLAVIMHRIWVDGTEFRWTREVAVA

SEQ ID NO: 152667 - protein, 376 aa, unidentified
MGGANIRKEPAVPSLTHPDAVYLGMDVHKDSISIGILNPGHERPDVEKIFPDEESVRRLIGRFPDRSLVWSCYEAGPTGYDLARLLKSLGVHCEVIAPSMIPKASGDKVKTDSRDCRRLARLHRAGELVAIRIPTPLEEAVRDLCRARGDMVEDLTRARNRLIKFLLRHSRVWRDGTNWTVKHEAWLTAQRFDERALQTTFDHYRAVVLNRESALAAVEADLRTWFDKEPFADPVRRLAAYRGVTTMGALSLQAEVCDWRRFARAASFMGFVGLVPSEYSSGGSTHRGGITRAGNVHLRSHLVESAWSYQHRPYVGAEIAKRHEGLPPEVVGRAWGAQLRLCGRFRHLAARKNTKSVVAAAIARELAGFLWAEMAA

SEQ ID NO: 152668 - protein, 330 aa, unidentified
MRIVCGLDVHKDSVFVCILNEKGEKFEAKYGVLTPELEQLHQLLLNHEVKEVTMESTSIYWHPIWRVLSNIPCLKLVNPYFIKQLPGRKSDVRDAAWIAECTMKDLIRGSFVPDAIVQQMRQYNRRIFDLNKEKIYKLTKLDALLQHCNIRISNYVSSIDSKSYKEVVRLLSEGTVDPEELSKVIHGRTKKRAGEDVIISALTGIVTDVDIDIIRQYREEILMDDKHLKECQEKLTKMCEKEFPKEFENLQTIPGVKERSATSILSELGADMKMFLTASALVSWCGLKPRNEESAGKIKSRKITHGNKYLRKTMIECAWGASRSQNCYFF

SEQ ID NO: 152669 - protein, 319 aa, unidentified
METVQFEQLISVGCGIDVHKDVIVATIRKSNKDYQTKSYSAFTSSLIDLRAWCKSEGVTHIAMESTGIYWKPLFNILEEDFEIILVNARHIKNVPGHKTDKKDSIWISKLLLSGLLKGSFIPPQEIRELRDLIRYKKKKTQFIASEKNRMIKFLEDCNIKLSSVVSDTQGVSATKIVNDIIDGNDDVNHLLTHIHGKVKADRNDIAKALTGKITEHHRFMLKMIRKTIDENEKLIEEIDKQIDLCVEKYQVELQLLQTIDGVGRDTAITLISEIGIDMNKFENEHHLASWAGLSPGTNESAGKKKAHESSTETNSFNQH

SEQ ID NO: 152670 - protein, 421 aa, unidentified
MAKRRYKSEKFKQVDWDAVRERIAGRRIALAVDVAKEDFVASLMDVGQAALLTFSWRHPMETGEVLERIRRLERICQLEVVLEPSGTYGDVLVWQLQQAGIALYRVSPKRVHDAAEVFDGVPSLHDAKAAHLIGRLHLQGASQPWQAPSEARRAMKALESRLNLCKRHEQASCNRLEALLSRHWPELLCVLPLGSMTLAALIGRYGTPAAVACDPGGAAELMRRVGGVGLSEEKIQAVLDSAGTSLGVPAVAAERAHLQWLADEALAAHRAVRQIEREIERHVVQDRVLTSLAMIVGKVSAAVLMAALGSPLDYPEAGSYLKAYGLNLKERSSGKHQGQLKITKRGSPVGRFYLYFAALRLIARDPVVKQWYALKRRRPGAVKTKCVIALMRKLAKALWHAARGAPFDTGKLFNLKAVAAA

SEQ ID NO: 152671 - protein, 337 aa, unidentified
MNPRKSNHKFCLGIDISKADYHVALLHRESGESIARSKFANNPQGHAKLLEWLAKHTGADLPVHACMEATGSYGESLADHLDGKVAILSVVNPRAIKAHGDSDLRRCKSDPADARLIAGYCRSKEPRAWQAPSPAQRKNKAISRCLANLKKDRTRESNRLDLCSDKTVVKALKAHIKWIEKQIAKLEEELLTAVKEDAASARALELIVSIKGIGEKSAAYLIAELPDLTLLKNARQLAAYAGVTPRIFQSGTSGKTRTPTSKAGNRHIRKALFFPAMSAMRFNPICKAFAERLKEKGKPSIVIIGAVMTKLLHLIYGVLKSEKPFNPDILKKAPITP

SEQ ID NO: 152672 - protein, 380 aa, unidentified
MSSSAAASSPTTIWLGLDVHKESVTIAVLRGDAQAPDRVDRLPNDLPKLKRYLERLAGQGPLRAVYEASGAGYVLHRACTAWGVPCDVIAPSLIPTKPGVQRKHDTYDAIQLARLHRAGELTVIRIPTEAEERVRDLVRCRETFQREILKSRHYLLKFLARRGCVYLQKAWAPAHYAWLRQLTGAASPLVDEDRVVFGEYLALLEYKLGRREDLDQRIAQLALTPALAPAVARLQCFRGIDVHSAMVLATELVDWRRFTSPRQLMSYFGLVPREDSSGERQRRGPITKAGNSHVRHVLVQAAWSYRHVPKVGVGLKARQQGQAPRVLAHTWKAQHRLYKLYHRLHAKRPPQIAAVAVARELVGFLWSVMQDLEGPVPQTM

SEQ ID NO: 152673 - protein, 421 aa, unidentified
MLILYQRCAAIDIGKDVIAVAVRLPGDGAEHRQTIKQTFKTFYGVLKHAARWLTEQQVTHVAMEATGIYSMPVYHALIEHGQFEKVLVCNAGHVRNVPGRKTDLSDAEWLVHLLECGLLRGSFIPPAQIKAARDVIRYRTKLTESRTSELQRLGNVLQDAGIKVDSVASTITTQSVRAMVEALIDGERRPLLLAELAKGKMRAKIPDLQRALEGRFDDHHALMCRLHLDHLDHLDEMIARLDTQIEDMMQPFRSQRELLTSIPGIGPFAAAAVISEAGADIAETFPSAGQFASWIGVCPGNHESAGKRHSGKPRKGNQHLQHVLVECAWAASRTPGYLQSLYRWHVRKFGGSRNPTAKNKAIVAVAHKLAIIIWHVLATGKPYTDLGADYLDRRVDPAKETRRLIARLQALGHTVTIEPAA

SEQ ID NO: 152674 - protein, 422 aa, unidentified
MKRRGSAGLQVIFHRVCGLDVHKKVVVACLRILDPSGQVRTEIRRFGTMTRELRELLAWLKREHVTHVAMESTGVFWKPVYNILDGNGMEVWVINAQHLKKVPGRKTDVTDAEWIAQLLQCGLLRPSFVPDRTQRDLRDLTRQRTRLVQQRVTVTNRIHKVLEDANIKLAAVASDALGTSGRAMIAAIIGGQEDPDVLAELARRRLRGKIPELRLALEGKVTDHHRFLLGELLDQLDYVERKIATLTARIEQIAPPRFKQCTQLLDTIPGIAEPAAQAILAETGTDMGQFPSHKHFCSWGAQSPGNRESAGKRRSGKPAAGNKWLGAVLTEVAHAASHTKNTYLNAQYHRLTPRRGEKRAIGALKHSILTAIYFMVRDQVAYHDLGADHFTRINPDQQTRYYVRKLERLGHKVQLTPSNEAA

SEQ ID NO: 152675 - protein, 359 aa, unidentified
MGVEDGTGRHVVGGVDTHKDLHVAAVVDEQDRVLGTRCFATTRQGYRQMLVWMRSFGEVQLIGIESTGSYGAGLLRFVQQAGIEVLEVTAPDQHDRRRRGKNDDLDAQNAAHAAFAGRRTVTPRSRDGMVESLRVLKACRKTAVAARRIALQMIQNTIICAPDGLRDLLRTMTRMQLVRTLAAWRPDLSGYRDVESAYRISLKSLARRYLELHDEIADLDTMIGAIVDELAPDLVARPSIGHTSAAQLLLTAGDNLERLRSEASFAALCGVSPVPASSGKTIRHRLNRGGDRAANSALHIIAIVRLRTDPKTKAYVAKRIAEGHSKLDAIRALKRYIAREVFTLIMRRQKEINQTRITA

SEQ ID NO: 152676 - protein, 387 aa, unidentified
MEVRVVSTPSAGADNEPVHCYVAIELSKSSWIVGFQTPLTNKTSQYQVKACDANALLELIERIRTRVARELRRPIEVMSCYEAGYDGFWLHRVLKAHGIHNHVLDPASLQVNRRARRAKTDRIDADRMVRALIRYLRGEPEACSVVRVPSVEQEDAKRLHRERRRLIAERVQHVNRIKGLCATQGIYHYAPLRKDRLARLDDLRTGDGRALPTRLKAEIARELKRLEVLLEMIATVETERDVILTSAASTHLNAGKIKMLAKLKAIGPEFATTLVGEVFYREFANRRKLGSYVGLGSSPFCSGSLDRDQGISKAGNPTARSMMIELAWTWLRYQPGSALSIWFRERVGNLKGRPRRIAIVAMARKLLVALWRYLQTGLVPTGALLKA

SEQ ID NO: 152677 - protein, 367 aa, unidentified
MKKVSTRAAGQSRNISQQQLTIGLDLGDRNSWYCVLDEAGRIQLEQRVRTTAKALQEVFGAMPRSRIALEIGTHSPWISRLLSDLGHEVIVANARKVRLIGESRKKDDRLDAQTLARLARIDPELLYPVKHRSAQAQADLMTIRARASLVRARTGLVNAARGLAKSYGERLRGCNVRNMDPEKAAGLSPELQRALEPLLATIEELSERIVEYNDRIEALAQTSYPQVELLKQIKGVGTLIALTFLLTLEDPHRFRKSRDVGGYLGLQPGRRKSGESEPQLRISKEGDPYLRTLLVQGAQHILGPFGIDCDLRRWGLKLAERGGRNGKKRAIVATARKLAVLLHHLWVSGEVYEPLHNSRRPMVAAAA

SEQ ID NO: 152678 - protein, 392 aa, unidentified
MFYIGIDVSKDKHDCFCCNDDLQPVFQFQFSNDSIGFNLLFEAIKSLDSSFDNIKIALEATGHYSYNITSFILDNDLPLAIINPLHSNLFRKSISLRKTKTDKVDANVLARMLVAYPDLKFSTSLDDNDIILSELKSLTRFRLSLVKDLSKLKTSVSRIINIIFPEIEKVFSSTNSLYELLYNFPSAQEIANAHLTKLTNVLIKASRGHFSKEKAIQIKELAKNTVGNSSCASTFELKHTINLINEYNYSIDKIDKEINTIMDKIASPITSIPGIGITLASIIIAEIGNFDNFDSPDKILAFAGMSPTIYQSGKYVASSAKMEKRGSKALRYALYNAARLTSIYCPVFREHLARKRSQGKHFSVAISHVVKKLVRVIYHLQTKNELFKNTIN

SEQ ID NO: 152679 - protein, 475 aa, unidentified
MNIKGTKKKNQVVTANIFEQQELLKKAEVIKENLTASTWRELETNGKFDKNKKLSFISDDMLILGCDVGSETHYVRAIDTRGRELSKSAYSFDNDYEGFQSAKEWAVKIAAEHDKSQIVLGLEPTGHYWFCLATWMIANGISVVQVNPYAVKQTKEVEDNSQLKDDRKDPKLIANLVKDGNFGMPYLPEKIYAELRRLSMFRDQLNEDRIRTINRMHREMKIYFPEYKEALGKVDGAFSLELLKEAPFPDELTALGEEGIRQIWHAAKLRGRGYSRAREILQYAKASVGIKDGSIASKTAVKWFVQKIMELDVELAVIENQINQKCQEIPHTGNVLEISGIGENTLSGILAEMGDISRFDDVKEIQKLSGLGLVACSSGKHKGETKISHRGRKRLRYWLFQAAKSAVAHAEEFKELHMYYTTRADNPLKKMQSLIVIACKLLRIIYTILNTGTKYAPKKMLMDIRRPEKKEAIVA

SEQ ID NO: 152680 - protein, 362 aa, unidentified
MKEYIGVDLGKRKAVVVKKDRQGKITSKVTVPVTQAALESYFSKQDHRSQVVVEATGNWMYLYETIERYTPQVVLAHPLKTRAIAEARIKTDTIDATTLAELLRLDGIPKAYIPPREVRDIRELLRYRASLVSIRVGVKNKIHAVLTKNGMDCTFSDVLGKSSQVWLKSLTLRPCYRQEIDGYLRIADALKDSIDEITTSIKAEVAENAQAQLLMGIPGISYYSALLILSEIGEIERFADAKRLCSYAGLVPSIYSSGSKSYNGRITKQGSRWLRWILVEISTHAANGDANFQKVYRRVSRRRGRSTARVAVARKLLTIIYAMLKRNEPFRRHKPRQKLMAVPGRKKVTDVSGHPRGVMVPA

SEQ ID NO: 152681 - protein, 423 aa, unidentified
MTSMTLDPPLTNLLPPDAELVAGVDTHKNTHHVAILDLVGRPVADREFRADGRGYAQIVTFLHAHGDVVRVGVEGTGSYGAGLARALTAAGLTVVEVARQDRQARRRRGKSDPLDAHQAAVAVLAGTDTAIPKSGDGAVESMRILLAERRSAAKARAQVTNQIHALLITAPELVRQAFRALSGQRLVNTLAKTRPGTIMSPDPEVVARQTLRRFAVRHLTMQAEIDLIEQQLEVLVRQVNPTLLSLSGVGPVTAATLLVAAGDNPERLGTRASFAALAGVAPIPASSGQRTRHRLSRGGNRHANAALHRIVLLRMRHREPRTMAYFERRRSEQLTDRDIMRCLKRHVANEIYAALLNPATDNPIGRELRARRQAVGIPISVLAATLDVPYQRLRRLEIGTRADPELEARATAVLEQISPPLAA

SEQ ID NO: 152682 - protein, 422 aa, unidentified
MSPLPEQPFTAWVGIDWADTKHDICVQAAGESRRESGCIAHQVAAIDEWANALHRRFGGPLAVALELAKGPIVAALQKYDFLVLFPINPATLAKYREAFQPSGAKDDPADAELALDLLVRHPERFSPLRPQSAAMRSLVSLVERRRQLVGDQTRLTNRLCDTLKQYYPQALEWFDDRGTVLFCDFLERWPTLRSVRQARTAVLETFFHAHHCRSASRISARIESIRSAAALTDDPAIIGPCRLHVLALVAQLRAVLAAIVQFDLEIAAVVHTLPDYALFEDLPGAGACLAPRLLAAFGEQRERFRSADELQKYAGIAPVTERSGKKSWVHWRLQCPKFLRQTFVEWAAQTITRSFWAGAYYRQQRAKGSSHHIAVRTLVRISHQAGQGFRGKLDRLFTRSWTRISRQAGQRFRAKLDSKFVK

SEQ ID NO: 152683 - protein, 417 aa, unidentified
MKKRSWKHGLTENTLLVTVDIGKFKNTGYYRCPDGTDIPTFEFGNSGEGFKTFWSRITQGMHKFNLTEVVVGLESTGSYAEPLLHFLRKRGVQLVQVTPAHTKKAKELFDNSPNKTDDKDPKVIADVIELGRALTVVIPEGVAADLRRLTHARERSQERRTRVYNQLHDLEFLIFPEFESVMSDFSTKSARYLIENYGTPTRLLTLTPEELTQTLRRVSKGRLGSERAQALYELAQTSVGISDGQLSLVAEIQHALHLIADCDRFIAALEEQMLAFLLKVPYSRFLLSIPSIGKVTVASLIGEVSDFGQFKTIGELLKYAGLNLFELSSGEHKGQRRISKRGRPLMRKLLYFAAMRMISKHGIFHEQYQKYLRHGMLKNKALVAVCRKLLGMMLALVRDQREYLAHDATCSEYQNAA

SEQ ID NO: 152684 - protein, 415 aa, unidentified
MSLKIVYKICCGIDVHKTFVVACIASTNDKGVTSYESHRFSTYTSGLKTLLQWLLERNCKDVCMESTGKYWIPVYNILENDCSIVLAHPKYVKAIRGKKTDKKDAKWIADLFKHDLVAGSFMPPADIRQLRDLMRYRFKLTCFQSSEKNRLQNCLTVSNIQLGNVVSDTFGKSAQAILDKLLENPADTSFDLEPLVYKSLKKKLPELRDAIDGYITPEQAGKLKVIKAHYESLESRKAELEELILALAAPYQQELAILQTAPGIRSDFTAIGIISEIGTNMEAFPSAKHLCSWAGLTPTNNESAGKKKSVRVSKAGCYIKPLLVQCANAVVTSKKHPEIRNRYLRLKKRRGHKKAIIAIARMLLTALYHMLKNGENYNAELYRKSDLPPANREITVEQAIIIARNQGYKIKSATA

SEQ ID NO: 152685 - protein, 347 aa, unidentified
MRPKLLMENDYILRQCVGIDVSKETLVVTMCMFSFAEEAHYSDVKTFKNNKTGFNQLVKWSRKEAYTDKPLRYVMEATGVYHEELANHLVKIGCTVIIMMPNKAREFAIWEGMISKNDTIDSRVLALVGCVKRSMRPWQPSKEIYHELRAMTRFAQDTKKLRLALKNHLEALEHSHQAEKSIVKHYEAMVSYLDKRLKMNLKNMKEKVASDEALNKKVENIITAPSLGFTSVITVIAETNGFALIQNRKQLTSYAGFDVKDNQSGNVEGTSRISKKGNSRIRAILYMPAVQAQLRSRHLKEAYDRIVQKHPDKKMIAVTAMERRLLLLIYALWKSDKTYDEDHDKKK

SEQ ID NO: 152686 - protein, 443 aa, unidentified
MSIGPPMRRRQRELVRVMFVESSDDEQIIERVAALDIGKAEVVCCVRLPGPGGGKGRVQEISTHSTMVPSLCELANRLVGLGVTRVVMEATSDYWRAPFYLFEAQGLQPWLVNARDVKHLPGRPKTDKLDAMWLCKVAERQMLRPSFVPPADIRRLRDLTRYRADLVGVRTAEKNRVEKLLEGACIKLSVVATDVFGVSGRLMLNALVSGQRDPKILAAMARSRLRVKIPRLEEAFAGLPLGTFNEHHRFLLGKMLARIDAVNADIAALDTEIEAQLAPFADAVARLDQIPGIGPTAAAIIIAEIGLDMTRFPTSSHLTGWAKFAPGINSSAGKTKGSGSTGHGDHYLARVLGEAAVMCGRTDTFLGARYRRIARRRGKKKAIVAVGRSILVIIWHLLSDPDVEFNELGSDHYDRHVNTTAKRRSHIRQLEALGYKVTLEPAA

SEQ ID NO: 152687 - protein, 313 aa, unidentified
MANQVAKITLGIDVAKDQHLVYNWQTQQTTRLPNQRSDIKVWLKTLHGPVRLAIEPTSHYHLAMVDEALELGYEIYLVNPRQLVHYREAVNERNKTDPLDAWLLARYLEHEADQLRPFQPRDPRAQRVWRLILHRATVVKSQQQLQQSFADVQISIRGVLSQFKGLLARIDRQILTLIRELGWWPDYQHCLSIPGIGPANASVLVAAYHRGSFASSDAFVSYLGLDVRIRESGYFNGRRKLSKRGEPEVRRLLYCASHPARHYQRFADYYQRQLDKGLCKIAARIILGRKLARIAFTLMRNGEAFVRAEKLIA

SEQ ID NO: 152688 - protein, 331 aa, unidentified
MRYIGIDLHRRFMVVAVVDERGRSRKPRRFECHDEAAVLEFFERHRPFVAVIEASSSYRWLYDLLSPLGQVKLAHPARLRAIVAGRAKTDKLDAVLLGQLLRAGLVPEAYVPPKPYLELRSLTRARARLVRRRVQARNEIHALLRQRNVHPPFANLICRKGRSWLQGLPLELLGGLLRDELLRRVGHFDEEIHLLDRELARLGEAFPEKEVLLAVPGIGLFSALLIIGEIGEPERFRDGRKVGAYAGLTARVSQSGDHCYHGHITRQGSPWLRWILVEAAMRAARKDEKLRNFYTRIRKRASAKIARVAVARKLAGICWIRLRGWHRDRAA

SEQ ID NO: 152689 - protein, 354 aa, unidentified
MKRTTKYVALDVHQATTVASVREDSGRVIARSVLPTDGGAIMEFVRGMRGAVHVTFEEGTQAQWLHDLLAPVVDRVVVCDRRGAPRYGNKGDHVDADQLAELLRCGGLRAVYHGSAHRAGLKELTRTYQNLVEDSTRVMLRLKALFRARGIPTAGTAVYHRHQRARWLARLPDGGARFRAEALYAELDVLRQLRPKAKAAMVTEARQDPAWPVLRTIPFLGPVRVALLLATMQTPWRFRTKRNLWAYAGLAVVTRSSADYALVAGQPVRRRRAPMTRGLNRNHNRVLKDVFKGAATAATARPGPLQDVYHNVIARGTREELARLTLTRKLAALTLRLWKKGERYDPTKLTTPAR

SEQ ID NO: 152690 - protein, 429 aa, unidentified
MNSNTQNAKIKSITEKTLIVGIDIGSETHYARAFDWRNYEYSKKPFAFNNDEEGFKAFSSWMNEIAEKHDKDTVIPGMEPTGHYWLNLGAYLQEQGMKPVHVNPHHVKKSKELDDNNPNKNDRKDPKTIAALVNEGRFSYPYIPTGIYAEIRSLSNLRIQTQEEISRIKNRIARWFSIYFPEMKDVYKKPDAKSGMMVIKKAPLPADIKELGVDGVNQIWRDAKLKGAGLKRAKTLVEVAERSIGNTEAPGSARIEIRMLLSDYEVYSKRMDDLMTEIEKKLSEIPYIDKLLEINGVGIKTVSCFVAEVGDISRFDNPKQLQKLAGYAIVSNDSGKHNGESRISHRGRKRLRYALYEAAISVIGKNPEFKSIHEYYLTRTKNPLKKMQSVIAIACKLIRVFYMILTKGVDYDGQKMLNDIVRPEIAAAE

SEQ ID NO: 152691 - protein, 387 aa, unidentified
MAKQNDLSRCLVTLEQDATVIAVIEMGQSSWLVAGIVPGLERNPLKKLSPDPDALLQLLYRWQKEAVQAGRAIKRIVVAYEAGRDGFWLARWLRAREIEAYVIHPSSVPVSREHRRAKTDRLDTELLKRAFLGWLRGEPKHCSMAAIPTVADEDTKRPGRERQSLVGERTRIINRVKANLARLGIRGFRANLAQASSRLEALRTPEGIAVPANTRAELQRDMDRLRFVKQQIKEIETTRAKRLAGAPNEQRHATVRLLAQVVGVGIETADMLVQEVFSRNIRDRRALARYAGLTGAPDESGKKRRERGLAKAGNARVRRGMIELAWGHLLHQKASALTEWYRKRTSDTRGGTRKTMIVALARKLLIALWRLVTTGETPAGLLLRPAV

SEQ ID NO: 152692 - protein, 409 aa, unidentified
MDQLIGRCGGLDVHRDTVAACVRVPGLNGKRQQEVRTFGATAAELLALRDWLEAHGVTHVAMESTGVYWKPVFYVLEEAFTCLLVNATHIKQVPGRKTDVKDCVWIAQCLECGLLRGSFVPPAPIRELRDLTRHRRVLIQERTRAANRLHKLLQDAGIKLASVATNILGVSGRAMLEALVQGTTDATVLADLARGRLRKKLPALRQALAGRFRPHHAFLASQLLAHIDYLEEAISTVSEEVEARLAPFAQHLTRLDTIPGIDKRTAEVLIAELGVDMSYFPSDRHLASWAALCPGNNESAGKHRSGKTRKGNRWLRTALVEAAWAAIRVEGSALGARYRRVMRHRGHKKAVVAVAHAMLRAVYHLLAEGTTYREPGADYYDRRHAERVRRRAIQLLERQGYRVTLEPAA

SEQ ID NO: 152693 - protein, 415 aa, unidentified
MTDQITIPQKRFIGLDVHKHYLIALGVDAELNVVLPAQRVELFRLEAWMKKTLTKQDAVALEMTTNTWEIYDELSPCAHSVTVVHPPHVALITRSQVMNDKMAASILARLLAKGLLVSIWVPPVEVRELRALVAQRSKMTRLATQAKNRLHAILQRHHIVPPEGNLFHADQTEWWCALPVGKLEKINLQSDLDTLRFAETQLTRLASTMNQLAVKDERVTRLIHLPGFGAVVALTVLAAIGEIARFEDAKHLVGYAGLGARIHDSGLTTRTGRITKAGRRDLRAALVEAAQVAANSHPHWKAELARLEPRLGRNKAIIAIARKLLVAVWFVLSKQTTDRFAQPEMVARKLMQFAYKVGKHNRPANQSAAQFIRQQMDALQIGADLSAIPWGTKNRSIPLPPSALLENKMSDVPNT

SEQ ID NO: 152694 - protein, 331 aa, unidentified
MNFKSIIGIDISKSTLDAYLKINHSHATFSNNEKGYLELVEWVMENSGLVLAKELLFGFESTGIYSSQIASFLERYGLPFYIMSGLELKRSLGIRRGKSDKADSKDIAEYLYEKQEKITPTVLPSQTILSLKKLLSYRERLVKERAAFKTRLKEYDSVIPENGMKVYQSSHETVIACLNEQIKTIENEMEQLLKKDSFLTEQYNLINSIKGVGPQTALTLIILTEGFSRFSTWRKFASYAGTAPFPNQSGTFKGKTKTSQLANKRIKSLLTMCASTSIQYNTEMKKYYERRVNEGKNKMSTLNIIRNKIIARAFAVINRNSSYVDTFKYAA

SEQ ID NO: 152695 - protein, 404 aa, unidentified
MIIVGIDWSRYKHDFVLMNLQGDILERGTIAHNMNKLEELASRIEQHVDSANQVRVGLELNDGALLAWLATKGYTIFGIQPKSAQRAREIYRPSGSKDDKIDAFVLAEFVRINTDRLRPWSPLSEITLKLRELLRWREELVHQRTAAYQRLRALLAEWSPQLSELCNNLECIWQLDLLSQFPTEPRLCQAHGNRIRSFLRNHRMRSKKQQQIEDIRQSVPMPVPAGRVHIVEKQTAFLVEQIRMLTAEIKQIEDDLQQFTAQHPDFNVFKSLPVKGTATIAGLLAIFGDDHKRTTSPDELAALCGVAPVTIASGKARKVRQRRACDHTFHQTLVHFAFNTAFCQGCWAGPFYQRKRSEGATHYAALRCLAKRWLKILHRMWKDHVTYDEQLHQANQKRNQNHAA

SEQ ID NO: 152696 - protein, 344 aa, unidentified
MDHFAGLDVSVKETSVCIVDETGKIVREVKVASEPEALLAVLKNPAYHFKRIGLEAGPLSQWLYGALAEAELPVVCVETRHMQAVLKAQINKTDRNDARGIAQMMRVGLYRPVHVKTLRSQKLRMLLTHRKLLQSKAIAIENDLRGTLRNFGLKVGMVGTVKFEARIKELVENQPDLAGLVEPLLVVRRVLREQFVILHRRLLAIVRDDEVCRRLITTPGVGPVVALTYRATVDVPARFRKSKAVGAVFGLTCSKYQSGEIDRNGRISRCGDEMMRVMLYEAAQSMMWSKKWSWLKAWAMQIARRRGIKKAIVALARRLAVIMHRIWVDGTEFRWTREQATVAA

SEQ ID NO: 152697 - protein, 427 aa, unidentified
MKKIKIDYLSTLFVGIDIGSRTNVISALNFDQDFLIRMVPVANAQGGAEQMEEMVAQVLSQHHEFRAVIIGLESTGFYGVHIANYLSTSEKLAPFSTKVYCLNPNEVKQYKKSFNSLDKNDGIDSFVIADFARVGRIHTEPWRGAQYLALQRLTRHRLHITECIAREKTYMLNNIFLKFSEFAMLKKDEHPFSDKYGATAEAVLTDYLSTEDIVDASVDELVAFISSKSRGRIADPEQATYLLQKAAQDSYRLDQCLYEPLTVSIGCSFNCISAFEKELKAINAAIQRAVKGLNPTEYQILTSVPGIGPVYASGILAELGTIKCFKSNDALAKYCGIVWRENQSGEFEAEDTPMNKAGNRYLRYYMIEAAGSVMQHCPEYKAFYDKKFAEVRTHQHKRALALTSRKLIRMLFGLLANGRLYSVEKSR

SEQ ID NO: 152698 - protein, 388 aa, unidentified
MRRSNQDRIVGLDVHPDSFAGAILQGTDPWKARVVSTSTRVALPLLEKWALRHTREEDILVMEASGNAFCVAERLRALKCKVVILDSHRAGKVGKTYCATDRVDAIKIARIYLSALSPVVWQPDAKTRERREVFSAYQAVVKEGMRLKQQLKSMLNEHCVRLEKGFRLSHPSAIGRLLQRRKWSEAQKMLLSQLHAGLVGARVRRQRLRHYMAQEILAEKELLRLTRLCGINLITLYGLIAAIGEIKRFATARKLSAYFGLNPTVEQSGNYEGSGALKRHGRGAIRALLVQSAKKLLQVDNPLQNWGLALAARRGRNKAAVAIARKLCVAVWHVMQGHVIGAIERMDTLHTKLHKLATKLGVPTIKQLGYETKEAFVQKKLYLLRSYA

SEQ ID NO: 152699 - protein, 407 aa, unidentified
MDSLKTVFGIDVSSRKSNVCIMVNGQKVNDYAISNDMVGFNQLLDDLKQVTNPQIIFEATGVYSRRLQAFLDMHELRYVMMNPLEAKRKTKDDLHQNKTDKLDAMYLAKMQSEHPQRLAYVQSEEYQELMANNRIYEQASHDLITNKNRLHKAIQLTFPEIEHLMANPRGKNYWSIVLKFPHPNIVLETKEADIIDFLKSLSGIGEKRANDLAQRLIRLAKLACPAVKKSSAHIRGLEMAINNILSAEETCQTALKEMAKLAPKRDLEILKSIPGIAENTALRIISELGDIRRFNNPNQLNAFVGVDPQVYESGNLTAHLSISKRGTAIGRKVLYLAINQIQSAKKVGNPCHIADYYEKRKRSSETASHKKAAIASIHKLLRTIFALIKNDQLYSYDVAKHNQRLLS

SEQ ID NO: 152700 - protein, 324 aa, unidentified
MAKRITICAGIDTGKRKLDVAIDGSSLQLQVENTAEGHKVLLEWLRRHKVKRIGIEASGGYELPVVTELRRKRFVVVVFQPAQVRAYAKFHLQLAKNDKIDAALIAACTAAVKKIHAAPDPRLQPFAEHLTLIDQIGEDIQLHKNRLETCRDPRIQKLWEEEISRLAKRQRVELKALAAAIRQHPDLAQRLNLIYSVSGAGMSTAVAILVRMPEIGTLNREQVAALAGLAPYDDDSGERSGARHIDGGRKRLRRALYTAALPASFFWNPHLIALYKRLKAAGKGHKSALIACARKLLIFVNTVVARGTPWQEQQPARATNPAAA

SEQ ID NO: 152701 - protein, 408 aa, unidentified
MKRYYIGVDWGDRLHQVYVGDDEGKKVREIKVPETVEGLAEIGRWLDEKRAEGFELWAAIEKPAGRIVDFLLDHGVEVYPVNPKAVDRVRDRYRMSGSKSDAFDAYVLAEFLRTDHAHLRALRPSSEKAQELKLLSRDQRRVGRHKTRLLNQLTTTLKEYYVRPLEAFENLETEVALDFLKQYPTPAHLSALKRKQFNRFATQQHHLSKQRCEELWEKLQKPQLGVPEHVVRAKAQLVEVLIEQLRASIKAVKIYHHKVESFFASSPAAEFAKTLPGAKSGTLVAAIWAELGDAQGRWESSRHLQAEAGAVPVTKASGKSRVVHFRFACNKHLRYAMYWFSFVSLNHSEWAKLYYRGQRDKGHSHPQALRALGAKWLKIIFVMWRDHKPYDEKLHLANIALQKMRQAA

SEQ ID NO: 152702 - protein, 388 aa, unidentified
MLLDHPSDGLTAIRTHIGAIFVSLELSRSNWLVTSLSPGKGEKMSKRGIAAGNVAELLTLFAELKRKTEARTGQSYPIVTIQEAGLDGFWLHRVLQQEGIESHVVDPASIAAPRRRRRAKTDRLDGEALLRTLLAYKRGEPRVCAMVVAPSPEEEDRRRLCRERRTLIAERIRNVNRIKGLLFAQGISDYAPMRRDRRQRLEALRTGDGRELPSHLKAQIGRELDRIELLLEQIKAVEAAQDALLAARKPASEEAAPDPVTMLLALKGMGANFAAILWSEAFYRPFANRRQVAAYAGLAATPWQSGGIRHEQGVSKAGNPRLRTTMIQIAWLWIRHQPQSALTRWFKARSQQGRKRAIVALARKLLVALWKYVTQGVVIEGAVTKPAA

SEQ ID NO: 152703 - protein, 340 aa, unidentified
MGDKVHSICILDASGTVRECAEVSNTRAGIYKFFAKMEPSLIALETGTHSSWVSRILEELGHEVLVGHARKLRMIWNNPQKNDMRDAEMLARIARFDRKLLHPIQPRSMKAQCDLAAIKARDQLVKVRSSLIAHVRGLVKSVGARLPTCSPECFAKRAAEAVPEELALALEPVIVSIAELTVRIRHCDQLVQKLADEEYPATKRLQEIPGVGPITSLAFVLTLEDPKRFARSRDVGPFLGMTPRRNQSGQVDQQLPITKAGNAYMRRLLVQCAQYILGHYGPDCDLRRFGLKLAERGGKNAKRRATVAVARKLAVLLHSLWKTGEEYEPNRCRRQNRKTA

SEQ ID NO: 152704 - protein, 399 aa, unidentified
MFVGIDWAAESHDICVVDSAGKIRGRATVAHSRDGFEELVKHMVRWAKQGEILVGIERPEGRLVDRILEAGYPIVVIPTFAMKDLRRRYAVGGAKSDPGDAYVIADVVRTDGHRLRRLEPLSEETRALRSVVRGRDDLVDQRVALGNQLRSCLEAYWPGAAVIFADVASEICLAFVERYPTPESAARLGELRLGSFLKKAGYSGRRSAAELLERLRSAPTGVAGVEAEARADAVRSMVRVMRALNRSIKDLERAVVAHLGEHPDAEVFTSLPRSGRINAAQMLAEWGDCREAYPEPDAVSMLGGLCPVTHASGKHRDVSFRWACNKRLREAITTFADNSRHASPWAAETYRRAIARGCDHPHAVRILGRAWVRVIWRCWQDHRPYDPALHGAAVLLEAA

SEQ ID NO: 152705 - protein, 312 aa, unidentified
MAKIICGVDVSSKTLDARIGQDGPSQSFDRTPEGIRALAAFCKSHDVEFVAMEATGGYEKLPFSLLWLAGVPCALLNPRSVRRFAEAMGTFEKTDDIDTGVIAHFAEVKRIVPQTPASATQQELEALVTRLRQVPDLRTSQTNQRRLVTDAGVLEGIDELVALLNRQIRALEAKIAQSIDADPLWKALDAAFRSIKGVADRTVARLMADLPEIGTISGKKAAKLVGLAPLANDSGKVKGKRSIFGGRANVRSILFVVAELVRRHEPDFSKFHQTLTAAGKPKKAIRVALARKLLVRLNAKARDARKELGLAV

SEQ ID NO: 152706 - protein, 342 aa, unidentified
MDYYAGIDVSLEYSSICVVDANGKIVREGKVASEPAALIGWLRSPGYELSRIGLEAGPLSQWLFAAMREVGLAVELLETRHVRKAFEAMPVKSDRNDARGIAQLMRLGWFRPVHCKSTSAQEVRAVLTARKLVQTKLLDVENSLRGILRGFGLKVGKTTARSFAGRIQELVKGHPHLEAIGEALLSVRTVLLREFNAFEKRVRAMARSDARTRLLMSTPAVGPIVALTYAAAIDDPARFKSSKQTGPHFGLTPKKYQSGETDYSGRISKIGDASVREALYQAAHVMLTKPVKGCSQLKSWAMRIAGRAGRRKAKVALARKLAVILHRMLANGTPFNAAAAAA

SEQ ID NO: 152707 - protein, 422 aa, unidentified
MSYCPVAGIDVSKRFSDMCILSPDNKIFAQEKIYHDETSINRANALLQKAERLFFSKPVIVMESTSHYHLILFQFFSEHGYDVIVVNPLQSNSMKDFSIRKRKTDRVDAFKLAMMYRTKTLRPSQIPQTATRALRQLCRHRAELLNDVSSYKNRLTALLDQTFPGYDKVFSDVGGVTSCAVLARFPTPTILLVEEESELVEVIAAASKSGYSFAKKKAGLLISAAQKAQTLGIHSCADETLIVCTIQMLRTLSESVLQIETAIDNLLAQIKEMRNNVSLLQSIPGIGSHSAALLLGEIGDISLFKKPKQLAAYFGLDPTERQSGSFRGTKNKLSKRGSPYARAALHMGVVNSICKRGKDSAANPVLLSYYEKKCKNKPAKVAQAASMHKLVFIIFAVLRDQKPFELKTPEQHAVEQGFVKAA

SEQ ID NO: 152708 - protein, 346 aa, unidentified
MKDVQIIGVDLGKNSCSLVGLEHAGQVVLRRRVRRDGLTALLAKLPSAVVAMEACCGAHHLGRLLVAQGHEVRLMSPEYVRPYVKAQKNDDRDAEAIAEAATRPTMRFVALKSEAQLDVQVLHRVRDRLVGQRTSLMNQTRSILLERGLVVAQGRRALLDALQAVEEQGEASKLSGRVRLLLADLLDQWHALDSRIAALDEEFTEMARNDPAARRLATIPGVGVMNATALVAAVGDGRTFSRGRDLAAWLGLVPRQATTGGKPKLLGITKRGSKYLRKLIIQGARAALPSLARSPTPLGAWLRGLLARAHGNKVVVALAAKLIRVAWALLRHGTSWSWAPSQLATA

SEQ ID NO: 152709 - protein, 370 aa, unidentified
MGKYSEVFVGIDTAKKKHAVAIADAGRDGELRYLGEIDSAPATVERVIKKLASKYEKVRICYEAGPTGYGLYRQIITLGHECTVVAPSLIPKKAGDRIKTNRRDAVTLARLFRAGELTSVWVPDAVHEAVRDLVRARDTAAADVRKKRQQLLSFLLRHGRIYSGSKHWTRAHSRWLATQAFEHPAQQIVFQDAVDAIEDCVSRLHRLEEQLYAIVPNWSMAPVVDAYQAMRGVSFIVAVTFVAEIGDVRRFENPSQLMAFLGLVPSERSTGDNVRRAGLTLAGNRRARRALVEGAWTYRYQARVSAKLQKRLEDIPKPVRDIAWKAQVRLCGRFRRLAAIGKKRPVIVAAIAREMAAFLWAIGRHVAPAS

SEQ ID NO: 152710 - protein, 268 aa, unidentified
MEIAVLGIDLGKNSCSLVGLDEAGAVVKRRRMRPENIPAFTKTMPTCVVAMEACCGAHHLGRLLAAQGHTVRLMSPEYVRRYVKAQKNDDRDAEAIAEAATRPTMRFVELKSEEQLDMQTLHRARDRLVGERTALINQMRAILLERGIRVARGRRKLEQHVVAMLDGDSDASVSPRMRQLIDDMRAEWIKLDQRIASLDNEFATRARNDANARRLATIPGIGVLNATALVAAVGNAQTFARGRDLAAWLGLVPRQITTGGKPRLVGIS

SEQ ID NO: 152711 - protein, 349 aa, unidentified
MKILAIDLGKFKSVACLFDTQTHQSQYETIPTLVFAIEQLLQTMQPDKVVIETCTISGWVYDLCKGHGFEVIVANPSSEAWQWRNVKRKTDKDDALKLAKLEALGQIVPVYMPAQEMRQYRRLVKYRKVLVGRINQVKNSIRSLLDAQGKQMGSRAKAWTIEGMQVLEEWRKPVGECELEELWRGELDVELILLDKLWEQQERVEKQLEAIAKQEQRVQRLMTIPGIGRCTAEVIVTIIDDPHRFENGRQVSAYAGLIPEQRQSGQTNRLGAITKRGSRLLRGALVEIAWMLLRFNPWALEVYNRIYAGQKTRKKTAIVAVARKLLVCCWAMLKHNQPWNPPQPQSVAA

SEQ ID NO: 152712 - protein, 366 aa, unidentified
MKIIHWIGIDDHADKWTIAQFKSDEEKPAKEFELVPDDAGYRKLIKFLKELDGEVRIVYEAGPCGYELYRRLKKAKLQCEVAAPSLTPRKPGDRVKTNRRDASKLARYLRSGMLTLIAVPDERRESLRDLVRARHAVQKDVVSIRNQIVKFLLRYGHRYREGKTGWTERFWAWVGKIKLEGEYGQFVLDEMIHTHKQRLERRARYDDAIEVAAKKAEYATYVAALSVLRGIDRLSAMTLLSELGDLRRFPTAPQLMGAIGLVPSESSTGDTTSRFSITKTGNAHVRHIAVEAAWQYQRRITTGATIKRRRKDQPKALVDIAEKCDLRLNRKFHRMTSRGKRSTVAAVAVARELMGFIWAIGQIVHP

SEQ ID NO: 152713 - protein, 364 aa, unidentified
MNEIIKQCVGIDISKDTFTVCVCRRDLTGKEYLSETVDFKNLKTGFNQLVKWSRKITDPSIETLFVMEATGIYYENLAHHLHRLNLPVSVLLPNKVKHFAKSLNVKTKTDQVDARIIARLGAERKLLLWKPPPEIFKLLKDLTREYAELIRERTAFKNRLHAMSSGYKPHPAIIRSNKAIIKKLTENAEKIKEEIEKLIYSEEWLGSKVNKVLTAKGVGLMTVATILAEMQGFEFVSNIRQLCSYAGYDVVQRESGTSVMGKTRISKKGNGRIRAALHFPALQSARHSPRMKSIYDKINQNKPSKMVGATAIQRKMLVLIYTLWKKDEEYVEDYENKAGRGLSNLPAQDELPTSSQKLSFVCEI

SEQ ID NO: 152714 - protein, 433 aa, unidentified
MKKTYKSDAFAALHKSASDLHGIGLMSDGDRQYFDETCLETIPDYTPERVKFLRKREDLMVWTALPLAASMCQIEDRLKTSIKQGEPSMEHHSIVGLDIAKSVFQVHRTDLSGEVLERRTLRRGALLKYFTSLPPALIGIEACAGAHHWARSFQALGHDVRLIAPIYVKPYVPRQKNDAADAAGICEAVSRPHMRFVPVKSVAQQSALMLHRVREIFIKQRTMQINALRGHLAELGLVSAKGRDGAAALMRMVEEGESGNQLDRLTCSALAPLVRQLRGLQDDITGLDKKILNWHRQSETSKLLETIPGIGVLNATALAASLGDGSAFQSGRQLSAWLGLVPRQNSTGGKTRLGKITKQGDSYLRRLLVMGATSALKSAKRGLPGPYPWAAELLTRKSYRLASVALANKLARIVWAVLTSGQPYRRPNHQTTV

SEQ ID NO: 152715 - protein, 343 aa, unidentified
MYYIGLDVHKKTISFCVKDAAGRVWEEGKVGSTRRELDGWIETLPQPRMIAMEATIFTGWIYDHLLPHAEQVKVAHPLMLRAIAAAKGKNDRIDAGKIADCLRCDFLPECHMASTEIRNRRRILRYRNLVLRQTVQMKNRVSGLLMETGVSYNKLRLHRLGYFAELMSTNEEVSESIRPLLRLCRDQIDRSIKLDTTLLRSLERDPLLTDRLRRLRTIPGVGPITALTWALEVGDTSRFRSIKQAISYCGLCSAEKSSADKAMRTPISKQRNKHIQQVLVEAARLAPRYSDELAVLYEKERQRGNGNRATLAVARKMVAWMLAVERRNMDFVPSGEFRRTRAA

SEQ ID NO: 152716 - protein, 342 aa, unidentified
MERELYIGVDVSKNWLDLAYYDGVVVDWKQGHIRVDNKESGYIQIDRWLKKLGVNREYVLFCMEYTGLYCQDFRLWLERKGYVYGMVQPRKMHRFEPDLGENERALDRIKTDEMDSFRIAIYCENHCRKIKASPSRLPGEAYFRLKRLMAERKQYTRQSVLYKQHLHDISVYDTEGSRERKKAGLGLLTEQIRQTDAEIRRIIESDPALKRNYELLCSIKGVGIVVAVETIVLTENFTSITNPRKYACYIGIAPAKKESGVSVRGGEHVSRKGFTQAKADLSLICLVAIRHDPGIRAYWQRKKAEGKHSGIVLNAVKFKIVLRMFAVIKRQKPYVEIDAYKR

SEQ ID NO: 152717 - protein, 419 aa, unidentified
MSFKILKFNCCGLDVHKTWIYACIGITDSNNRTEYKQARFSSFTKGLNELCDWLAKYNCKDVCMESTGKYWIPVFNILEQHNLWVTLSHPKYTKPMKGNKTDRKDAKWICDLYMCGMVKPSFIPPADIRELRDLVRYRFKLTCMITGEKNRAQNCLTVSNLKLDDVFSDVFGKSSRSITEQILKHPGETFDVTPFVDGRCKTPIEEIQAAVDGAISKEQAVKLRQCLYHIDELNKHISEVEQEILRLSDKYEIALNLIRTVPGFNKNPLTAIQVLSEIGGDMSVFPTAKHLVSWAGCCPRNDQSNQKIKSTRISRAGSYFKPVLVQVANALIKSKKHSEFTNRYKRIKARRGHKKAIIAICRMILTAIWHILSDLKPYTPEGFLESRPVKEEKVLSISQALNLLKQRGYIIKDEPLSVS

SEQ ID NO: 152718 - protein, 387 aa, unidentified
MTVRTVNNLPAATHGETVRCLFAIELSKQSWVIGFNTPLSEKISRRTLSGCDWKGLLELIEDVRARVSREMGRAVAVMSCYEAGYDGFWLHRQLEAHGVRNYVIDPASLQVDRRARRVKTDRIDAERLLRSLMSYLRGEPKVWSVVRVPSVAEEDARRLHRERDRLVLERVQHVNRIKGLCALHGIYDYHPLRPQATARLEQLRTAQGGELPPRLKSEIKRELHRLELVVEMIATLEAERDAIVEDEASTHLNAEKIQNLHKLKAIGPEFAAVLVGEIFHRSFDNRRQLASYVGVTPSPFQSGSMAHEGGISKAGNRKGRTTGIELAWLWLRYQPDSDLSIWFRARVGIMKGRIRRIAIVALARKLLVALWRYLETGLVPRGAVLNG

SEQ ID NO: 152719 - protein, 352 aa, unidentified
MSKITITGIDLAKNIFHLHAVDSTGRQVKAIKLSRLRLSEYLHRSEPVTVAMEACASAHHWGRLCQLLGHEVRLISPQFVKPFVKSNKNDRNDARAICEAAQRPDMHFVPVKTVEQQAVLSLHRVREMLIGQRTATINQLRGLLTEFGLTAPAGRRALHNTIPAMLEDLMNISPTFLVSCIRQQWEHIGELDQRIDNVTSQIEMHARQSDVTRRLQTIPGIGPITASALEAYVGNATQFRAGRQLAAWLGLVPRQHSTGGKPVLLGTSKRGDGYLRRLLVHGARAVVATVRSSPNVQKQDKTIMGWVARKHMNVAVVAMANRNARIAWAVITQKRNFDRNFRDQLANQLAAT

SEQ ID NO: 152720 - protein, 337 aa, unidentified
MEQYVGLDVSQETTSIAVRQDGRRVWRGKCPTDPKALSEVIRKHAPHAVRVVFETGALATWLYHVLQAENLPVVCIDARHAKAALDMAPNKTDANDADGLAQIAEIGFYREVRVKGYGPMLTRTLVGARSQLLRISVQLSNQIRGIMKTFGLIVPKGAGRIFERNARALLETNEAVARVVLPLLETWQVVRARAAEFDRQLIAAARTGPSYRLLMTIPGVGAITAVSFVAAIGVPENFKRSRAVGAWLGLTTRRYQSGETDYDGHISRRGDRYLRALVYEAAVAVLTRARTDCALRSWGLKLKAKVGFKRAAIAVARKLSVIMHTMLKTGAAFAAAA

SEQ ID NO: 152721 - protein, 324 aa, unidentified
MNKNKQFFGIDISKDVFDVVDHADNHYQFKNDLSGFRKFGKILTEHSHCVMEVTGSYYQKLATWLFSKSISVSVVNPLSVKRFIQMRLKTSKTDKSDARMIRIYGEYENPELWQPPSQYIIEASELHKLIELLLRQRTALKNKLHGLKSKGISTSAVVTSVRRQIRNLDKEVSSLEVKLENLIKECHADLLTRLCSIPGIGKRTAIFLIVLTRGFERFENSRQLISYFGLNPTIHQSGSSIRGSSRISKTGNKHIRNLLFMCSFTACEHNKSCREIYQRIIAKGKSKKLALIAVANKLLKQSLAIAKSGLLYDENFKSVYVNIG

SEQ ID NO: 152722 - protein, 398 aa, unidentified
MLEFDKNKGNRDYRIQKEITHMKRILKIGMDVHTTNYTLCAMEPIIGEDDRVFATIKVTPDYKNILMFIENLKLKLGLNDEYDIQCGYEAGCLGYSLYNQLTAAGVKCVILAPTMLTPQGVRIKTDMRDAYMIAQCLSYGGYHAVYIPTEDDDSVKEYLRMRNDHKLALKKIKQQINAFCIRYGFCYDGTKWTQAHLKWLKKLEITNGLYRETLNEYMASYEEQEAKIERYDKRIEEIAEQTKYHDKVKKLECFLGIKTHTALSLIVETGDFERFAKGNQYAAYLGLAPGENSSSDSIRRLGITKAGNSHLRQLLIEASGGICKGAVGHKSKELRARQNGNTADVIAYADKANTRLRSRYYKFIRHGKKRNVAVAAIARELACFVWGMMTDNIEMKVA

SEQ ID NO: 152723 - protein, 355 aa, unidentified
MDSAKYIGMDVHKESISMAVRNAAGKVVMECVIETKANMILEFVDGLRGDVHVTFEEGTWAAWLYDLLKPRVTKVVVCDPRRNALLQEGNQNDRVDARKLAELLHHNQLRSVYHGDHGLRTLKELVRSYLTITKDLSRVMTRVKALYRSWAIPCTGKQVYASRHRAEWLGKIGEPGVHRRAEFYYQQLDALRSLRQAVRRDLLAESKKHPAWKRLCQIPSIGPIRAAVLLGILQTPHRFRTKRQLWTYSRLGIEVHSSADHQVVKGQLERKKKHIEIRGLNENGNHDLKNLFKGAAVVASTKPGPFEEFYTALLAKGMRPEMARLTLARKIATIVLIVWKRGVCFDAQHLKPQTA

SEQ ID NO: 152724 - protein, 305 aa, unidentified
MSNSSVVHIGVDISKAYLDCDLQGRALRLPNSMQGFKKLLPLLPPNAHLCIEATGGYERPLVETLHRSQIRYSVLNPRQVRDFARAKGILAKTDTIDARVLSDYGSAMDPKPSTLPEPAQRQLAELNTLRDQFVAIQTQLINAGEHLTDPVAKRIFKSQLLHLQKQIKKVEKACCDTLKAHPPLAARNATLQAIQGVSAVTSITLIALLPELGTASRGQIAALAGLAPLNDDSGPRKGHRHIRGGRSRVRRALYMATLSAIRSKGSLRSFYQRLRAAGKPPKVALIASARKLLLFINYQLKSSSI

SEQ ID NO: 152725 - protein, 448 aa, unidentified
MAQRPRRRRPNPFPTIHPHAAGLDIGATHHVVAVATDRDPEPVRTFCTFSGDLHLLAQWLQAVGITTVAMESTGVYWIPVFEILEAHGFEVVLVNARDVKQVPGRKTDVNDAQWLQQLHQYGLLRGSFRPREAVVQLRAYLRLRERLVEYAAAHIQHMQKALMQMNVQLHHAVTDITGVTGMRIIRAIVAGERSPDVLATHRDVRCAASEATLRSALTGHYRPEHVFALRQALELFDFHQVRIADCDVQIETTLEALAAARPEPNTALPARRHARGRNEPDFDVRATLHRLLGADLSQIHGLGPYSVLRLVAECGDDMTRWPTAKHFTSWLCLAPANKISGGRMLSSATRRSSNRAAALLRIAAVNVGRTQTALGAFYRRLASRIGKAQAVTATARKLAILFYKAQRFGMAYADPGVSAYEAKYRHRLVLHLQRRAKTLGFTLVEQTA

SEQ ID NO: 152726 - protein, 486 aa, unidentified
MGEHSMAYVAFDTSKLHNAVALAEAGRAGEVRYLGEFENTPAATANLVRKLTAKHGALTFCYEAGPTGYGLYRQIRQLGQDCIVVAPSLIPRKPGKRVKTNRLDALSLVKQLRAGELTAVWVPDERHEAVRELTRARGAAALDLRAKCQQVSSMLLRLGRHYPSKTTWGKAHMAWLAGQKLEHLEQRIALEERLVAVRQAKERIERLERAIGEAVPGWSLAPLVAALMALRGIDFIAATALLAEFGDLSRFRSPRELMAWIGLVPSEFSTGETTKRGPITKAGNRRARQLLIECSWSYRHPPRLGADKLVRVAAAPPAVRDIAWKAQVRLTGRYRALCRAGKPDVVAVTAVARELVGFIWAIARAVAANAAAAAADAKATDADNGSGGTRSVSNRSAISSRDGIQGKPTHGTQATGRTRTERRRTPGALPHTAKPVGAGDTVGATPPAHTATQRQPGAALARGGRRDRRLAGGICRMAASPAGGNP

SEQ ID NO: 152727 - protein, 347 aa, unidentified
MRGTVHMQITTIGLDIAKNVFQVHGIDVSERVVVRKQLRRGQLMKFFEGLPPCLVGMEACATAHYWARELTRLGHQVRLMPAKDVKAYVKRNKNDAADAEAICEAVRRPTMRFVEVKSAEQQGRLMQHRTRDLLLRQRTQVINALRAHLAELGIAAAQGREGLKELLEIIADKGDARLPIDALASLIVLAAQLQALQTMIGTIERRIMAQHRANEASKRVASIPGIGFLGASAITATVTDASAFRSGRDFAAWIGLVPRQASTGGKEKLGPISKQGDRYLRRILVVGAHSVLRRAKQSPEKYPWLTQLLARRPFKVVAIALANKMARVAWALLARGGTYRAPQLAAA

SEQ ID NO: 152728 - protein, 343 aa, unidentified
MSVVIGVDPHKASHTAVAISAGEVELAQKKVRSGAAQVRQLLSWAEPFGSRCWAIESANGLGYLLAQQLVNAGETVVDVPATLASRARLLARGRSNKNDGNDALSVAVAALRAQGLRRVEPAGHVEVLRLLAKRNTDIGNQRTRVVCRLHALVAELAGGGIAKEINASDVDRFLETTTPVTPVEQVRYDLVAELLDDVRRLDTQLKLSHERIRTAVRASQTSLTELFGVGPIIAGMLIGDSGDITRFASRDHYASYNGTAPVEFSSAGRVVHRLSQRGNRQLNHAMHMAAISQLRQPHSDGHAYVQRKLAEGRTKKEAIRSLKRHISNAVYRQLRMDAERCTQ

SEQ ID NO: 152729 - protein, 338 aa, unidentified
MIVIGVDVHKHSLTAVAVDEAGRMLDETTVVATDDGLLTWAGQLAGERLWALEDCRQLTRWLERELLAAGEELVRVPPKLMAPERRAGRARGKSDPIDALAVARAALREPRLSRPRPDEQPFRDLKLLVDHREDLVDERRRAQQRLRWHLHQLDPSFVVPARRLDRSMHLERVARWLARREQEVQVRVARELVARCRSLTRTIVELDAELERRTAETAPALLELPGCGALTAAKLLAEVGPIDRFQTDAQLARHSGVAPLEASSGRVQRHRLDRGGNRQLNAAFYRIAITQARYHPAARAYLERKQAEGKSRREAIRCLKRQLARVVFNTLKTSPALT

SEQ ID NO: 152730 - protein, 318 aa, unidentified
MESAPVFVGIDVSKDRLDVALRPSGEIFQVENSEAAIAGLVERLQACSPTLVVMEATGGLQAPLLASLAVVMPVAVVNPRQVRDFARALGKLAKTDRIDAAVLAHFAQVIRPATTPVPSEASETLSATLARRRQLIEMLTAEQNRLGRMRVASVRKDLEVHVAWLKARIKDIDKDMERTLRNSPVWREKEDLLRSVPGVGRVVATTMLVELPELGTLDRKKIAALVGVAPMNRDSGTMRGKRSIQGGRPTVRGALYMAALVASRRNAVLKAFYEHLVGAGKPKKVALTACMRKLLTAMNSMLRSGTRWNPAQLASAAA

SEQ ID NO: 152731 - protein, 358 aa, unidentified
MRQQSNEISFKGQNIYIGLDVHLKSWSVTILSETSVLKRMSQGADPDALHRFLTSHYPEAEYYSVYEAGFCGFWIHDRLTELGIHNIVVNPADVPTMSSEKLRKTDAVDSRKLAVSLRAKQLKGTYTPDREALEIRSLIRLKNSITKDMTRQKNRIKSQLRYLGITIPDEFIETHANWSRRFLEWLRNVETTTPFARQTIDVQVRQLQSLRDIKADITKRLITLAHSERFATTLGLLMTVPGIGQASGLALLAEIIDISRFKSSEQLAAYVGMIPMCHSSGEHDGVGDITLRKQPILRNIIIESAWVAIRQDEALQLCYLNNRNRMAPGKAIVKVARKLINRVYFVLKRQQPYVKAVA

SEQ ID NO: 152732 - protein, 373 aa, unidentified
MPEPTASFQSFVGVDLHKTTVSLAAVDPAGQPIARLTCHTKCVERIERWLAELPPPVHLAVEAVTFAEWFIDRFGPVVARIDIAHATALANLRGKRRKTDRNDAMDVAVRLSRGDCPLGWIADEDVMQLRKLGRHWRSLSRTLSRTKHGVRSMLDAANLKGPTLNGAAMHKWLLAHGHLLKDAQRLAFEDLLDVILLLERKRERLKLAITAANRAPRFDALTTRLRTVPGIDQVAACVIAAEVGDFDRFPNADALEFWAGLTPDNLESAGRVTSGHITKAGSATLRWTLGQAAMCLCRSDAKLEARRQRLIRTRGRPRANVAMARHLRRILFAMTRDGTAYERGDSGGEATNHTANANRARMSKRSQRSKQAA

SEQ ID NO: 152733 - protein, 350 aa, unidentified
MKTTHPVIIGIDTHKASHVAVAIDTQGTRLATLSIPTNPKGYLELERWSQSLGKVQAFGIEGTGSYGAGLSRSLLAHGHNVIEVTRPNRQLRYTQGKTDSLDAEGAARSVLSGQATARPKTQTGSSEMIRHLKIARDTAVKSRSQAMVTLKTLIINAPADLRDALNHIRGKIALIRHIAAFRPGDIDNPLASAKAAMRALARRWLWLHEEIIAHDKELERLVTERAPELMASHGIATLTVAQMLILVGDDPTRIRSEAAFAKLCGVCPIPASSGKTHRFRLNRGGNRQANAALYRVAIVRMRSHEPTLAYVKKRTKDGKSKSEIIRCLKRYIVREIYSQLCVAKSSQIKA

SEQ ID NO: 152734 - protein, 371 aa, unidentified
MMIKFIGLDVHKDSIAVAVADEGHKGEVRFYGTIPNTPEAIRRLVSRLSGPGVRLSFCYEAGACGYGVHRQLTKLGAECLVIAPSMMPRRPGERIKTDRRDALTLARLLRAGELTAVWVPDEGHEAVRDLVRARRQAKDDLTAAKLTLLSFLLRQDRRFPGRSTWSQAHWRWLGQQAFASPHHQLVFGEGIRRIEEAQARCDRLDLALAEAVAGWSLAPLVQALRGVGLVVAATLVAEIGDLSRFETPKQLMSWLGLVPSERSSSTRRRRGGITKSGNGHARSMLIEAGWSYRLPAREAVRYRARVEGLPAEIRAVAWRAQVRLCQRFRRLMAAGKPLPKVTTAIARELAGFVWDIARRVPLAPVTRTQGA

SEQ ID NO: 152735 - protein, 339 aa, unidentified
MAILFVGVDLAKNVFAIHGVDEHGKAVLVRPSVPRARLHQLVAALPPCTIGIEACSGAHHWARLFAQHGHTVRLMAPKFVAPYRMSGKRGKTDAADAQAICEAVQRPNMRFVPVKSQDEQARLCIHRVRQGFVEQRTATINRIRGLLSEFGIVLAQKAATVRREAAAHLEDLPGWANTAVGDSLSELHRLDERITEYDRHVVHMAREDERSRALMQLSGIGSTTASALVSTIGNARDFKNGRQLAAWLGLVPGQYSSGGKTRLGGITKAGDGYLRTLLVLGAKAVLAAARNKHDRLSRWAMALEVRRGYWKAVIAIAAKNARMAWAVLAKGDEFKPLVA

SEQ ID NO: 152736 - protein, 353 aa, unidentified
MQEATTNFASTTIGLDLGDRLTHGCVLDAAAQVVERLRVPTTRDGLEQAFAGRGPCRVVIEVGTHSPWVSRTLEPMGHEVIVANPREVVSIARSSRKTDRGDAEQLARLGRADPQLLRPIRHRAEPVQRDRAWLAVRRKLVDTRASLVAQARGLAKARGERLPPGKPEAFVKTLRQRPDLRRFPGLEALREVVQALDGQIQALDQQLDRLCQERYPETRLLTQVPGVGPVTALTYVLTLEDPAHFATSRRVGSYLGLRPKQRESGTRRPELSISKQGDRELRRLLVQCAQWILARGPDSDLQRAGRRRIQRGGAAAHKKAVVAVARKLAVVLHHLWSTGSVYQPLYRGTRHAA

SEQ ID NO: 152737 - protein, 350 aa, unidentified
MVIIVVDYHPSDQYIAFANTETGEHGERRLNHSDGEAEKFYRELAARGFSVRVGMEATGYSRWFERLLAELGIEVWMGNAAEIKTKRVRKQKTDRNDAQLLLKLLLENNFPTIWMPSPENRDLRQLLWHRHRMVQMRTRIMNQLQALAMNEGQRRKKKLWSDRGRVELEKLPLAPWASRRRRDLLELLDRMNPTIEELSKIVEQEAKKRPEVLRLMSHPGVGPLTALAFVLIIGTPKRFKCGKQIGSYVGMIPSEDSSAGHQRLGRITKQGSSLLRFLLVEAAQAGARYDADLRRRYIHLAMRRQRNIANVAMARRLAVRLYWMWRNGWEYSQWAKFGSNAGQLATGHSV

SEQ ID NO: 152738 - protein, 412 aa, unidentified
MDVIVERQSALDVHKAQVTACVRVPGLGRERVQHVEQFKTTVRGLLVLRDWLQAHGVTHVVMEATGDYWKPIWHVLEDDFELMLVNARHVKQVPGRKTDVSDAAWLCQLAEAGLLRASFVPPKPIRDLRQLTRYRRAQIAERKREAQRLHKALEETGIKLDCVATDILGKSGRAMLDALVAGTTDPELLAELARGKLRKKIPALREALEGRVEPLHALLLGAILAHLDFLDEQIDLLSSAVEEQIRPFWPAVRLLCTIPGVQQRTAELIIAEIGTDMSVFPTAGHLASWAGQCPGNDQSAGKRRSGRTRKGSKHLNAALKDAAMAALRTNDSYLQALYRRKKPQLGHGRALGAVKHSMICACWHMLTTGELYADLGGDYYTRRNPERQTKRLVAQLERLGHKVTLDTVAEAA

SEQ ID NO: 152739 - protein, 410 aa, unidentified
MAERFVGIDVALREHRIAVLDRDGEAVGPSFTIAASPDGVTTLLRTLAARGATTAQTLIGLEASGHLWENLEAALGGAGYRVLVLNPLQTRRYRDVVRRKAKTDDIDAHVIAGLLRSGAAQASYVPDEQIQSLRELARLRARLLADRQDYQRQLIAQLDVVLPEHRVVLGDLLTARARGILAQFPTAQHLAHASPRAIRRAAEDAGARGFSLDDATSVRDHARRSLYSGKAAAARAHVVRTLVSQLERLTSAMDEVDHAATTLLPPSEPGTSPSDAELLQTIPGIGPQTAATLLGEFGALTRFTDARALVAYVGFYPVISESGDRAAPPRLSRVGPRIARHSLYLAAVNAVRHSREWRTIYLRKKAQGKTAKQALVVVAVKLLHAVYAMLKHREPYNPSRLLVAPATIGT

SEQ ID NO: 152740 - protein, 413 aa, unidentified
MLRVIHERGAGLDIHKKTVVACVLVTKQDGQVQQEVRTFGTTTGEILALAEWLKSHGVESVAMESTGVYWIPVYNLLEGDFQLVVVNAHHMKAVPGRKTDVSDAEWIAQLHRHGLLKGSFVPPKPQRQLRELVRHRTNVVERRSQSVNELQKVLETGNIKLASVVSEITGVSAMEMVHGLIAGQQEPQLLAELARGRLRDKKPQLAAALNGRLEKHHRFILSQLLADISFCEEQILELDLEIMIQMKDYQEVIQRLDQIPGVNRRIAEVIIAEMGTDTSRFGDAAHVVSWAGMCPGNNQSGSKRRTARVRQGNKSLKRVLVEAAHAAGRKKDSYFSAQYHRLAARRGKKRAKVAVGRSILETAFHMIQRQSTYNDLGSDYFDRRNPEKLAKRLAERITKLGFKVSYTPLVQAA

SEQ ID NO: 152741 - protein, 376 aa, unidentified
MENDSTLFVGLDVHKDSITVAYALGSGEVEVLGKIGSSQSDIDRLCKRLKSKAPHVRVVYEAGPCGYGLQRHLRAKGFGCMVCAPSLMPRKPGDRVKTDRRDAIKLTRLLRAGDLSAVHVPSVEDEAFRDLARAWSRCRSDLKRARQQLKAFLLSHGVRYTGTANWGPAHRRWLSALSLHNKWQDLAFNELRRTIEDRLAQCQRLEDALREAVQRWHFYPAVLAVQAMRGIAFTAAIGLVSELGDLTRFGHPRQLMAWLGVTPSEYSSGSKRRQGSITKTGNSYARKLLVESAWQYRHAAKVSRDIQRRQEGLPKAIIDRAWDAQLRLCRRFRKLLARGKERNVAAIAVARELAGFIWDIGRLGMAQASPAPESTA

SEQ ID NO: 152742 - protein, 356 aa, unidentified
MAMLADTVELVIGVDTHKHTHTAAVVAAATGAVLEQVTVSATPAGYQQLLKLAGRHQGQRMWAIEGTGGYGAGLTRFLAAHAEQVVELDRPKRAARRHGAKSDPLDATRAAREALGRDQLAQPRAAGQRAALQVRLTARRSAVQATTDAQRQLHALVVAAPDVLRGRLRGLTTPRLVSACGRLRLRADLDSETAATAASLRALARRIQLLDAEIADHTRAITILVRAWRPELLARCGVGPIVAAIVLCAWSHPGRCPSDAAFAMLGGAAPIPASSGQTVRVRLNRSGDRQLNQALHLVVLTRLRYDPATRAYAQRRRAEGKTNRGIRRCLKRAVARQLFKLLERYGHMAVEVLTPV

SEQ ID NO: 152743 - protein, 350 aa, unidentified
MVVVGADVHKRTHTFVAVDEVGRKIAEKSVKATTVGHAEAVMWVRERFGVEVVWAIEDCRHLSARLERDLLGFGQDVVRVPPKLMAMVRKSARTRGKSDPIDALAVARAYLREPDLPVASHDEASRELKLLVDRREVLVAQRTATINRLLWRVHELAPERAPQPRSLDTVKHRRILGDWLATVDGLVAELARDELADITRLTEAINALAKRIGIRIRDIAPALLAMPGCAELTAAKLVGETAGVTRFKSEPAFARHAGVAPIPVWSGNTAGRMRMTRSGNRQLNTALHRIAVTQIRLSGLGRTYYQKRIDIGDSKTEALRCLKRRLSRVAFNHLHTDHNNRTKPCQPAAA

SEQ ID NO: 152744 - protein, 331 aa, unidentified
MPVRYQAAAAFAGGEPRCIGVDVSSDQLATAPADANTLDTPMTVVANTDRAILRWLKTLPPGCRIGMEATGKYHQRLAELAWRAGHVVFVFNPAKIANYLRALRSRCKNDLADARGIARYVLNETAGCHAYVPPQPFYARMALLVQRRHQIGKQRDSLRMSLSDFPHCEGAVRALHEAFKQLLAAIDKQIEAEYRAEPELQARRKQLCSILGFGRLVSAAVAARLGRTPYANSDAVVAAFGLDLRVRDSGKFRGQRKLSKQGNAEERRLIYMAAVSACNNRVFRAMRDRLLALGRTPIQAHCCIARKLLRVAFAVWRSNQPFNPALVGGAC

SEQ ID NO: 152745 - protein, 337 aa, unidentified
MKRHHPPQALSWAGIDLAKATFEAALWGHEDFRAMRVRSFPRCVDGARALLAWLRGNAGPDDPIGIVMEATATFAEELATWLLDLDPGLHVAIVNPLQTSAFLRSLGLRNKTDDLDAKALAQYGTERQPVPWEKPLAEMAILKDLVRVRMDLVHARTAMALRLKDHARVSKSAAKAMAKVIRALDAQIKALEVEIRKHLRAHEALAEQADRMDSVVGVGLLTAVTVMAELGDLRRFARSRQLTAFAGMSPRRKESGTSVRGKPRLCKQGSTRVRAALYLAASAAVRFNPDMKAFYDRLLAQGKVRRVALAAVMRKLLVLMRAVVKAGHDWVPEAKAV

SEQ ID NO: 152746 - protein, 395 aa, unidentified
MVATRSTDCSTMSACLYLAFELGEKEWKLAFSVGLGRKPRERQIDARDFNAVAEEIRRAKQRFGLAEDAAVVSCCEAGRDGFWLHCYLRSIEVKNVVVDSASIQVDRRKRRAKTDRLDASQLLKMLIRWNLGEDDVWSVARVPSVEEEDARQLHRELETLRQEQTAHINRIKGLLSLHGLTMPAISRRFPRQLAAFRQWDGSPVPPELYKRLLREFERMQHVNRQIRHLEKERAQTICHADEDRQVAQVRRLLRLKGIGPESSWLYVKEVFGWRQIRNRRELASLVGLTPTPYNSGTQQREQGISKAGNRRMRTMAIEIAWGWLRYQPWSELSRWYFKKFAKGGKRRRKIGIVALARKLLVALWKYLETGVPPAGAELGDWRKKIRYTPDLTSQP

SEQ ID NO: 152747 - protein, 433 aa, unidentified
MGSRPSEDRYKGNLPFSSGLLIGRRGDVMRYYIGVDWADTAHAIWVEDEQGERVLTRAVPHTAEGFAEWGRWLDEQRASGIALWAAIERPDGRVVDFLLDHGVVVFPVNPKALDRARDRFRMSQSKSDPFDARVLAVFLRTDHAHLQALQPSSEAAQELKLLARDYARLVREQTRLLNQLTVTLKEYYPRALELCPDLTTQRAWALLRAYPTPMALAAVTAEQWQEFVRPHRWTADQATALWDLCRQPQLPVPAHVVRAKSRLVGALVTQLEAAVTAVDAYREAVTDFFAQLPAAEWATTLPAGHGILVPTIWAELGDVGGRWASWQHLQGHSGVVPVTVRSGKAQCVQFRFACNRRLRTTLHLFALCSLTRSEWARAYYDRQRGRGHRHHEALRALAAKWLKIIFVLWQRQTPYREEYHLATMARQHLRQVA

SEQ ID NO: 152748 - protein, 319 aa, unidentified
MAQNDLVVAGIDVAKDKVDVCMRSLSLRRTFASTAEGRRELTLWLRRRKVAKAVMEASGGYERDWAKALRNAKIEVRIVDPKRVRSFAQSAGRLAKNDTIDAEMIAWFAETFDEARGQAYDATREQLHQMVNARQAMKDMQTKLESQGEHALPATVQRMHARIMKTIAVELVKIEAAISAMVQATPHFTELAEIIESVPGIGRTTSAALIAAMPELGQANNKIVAALLGVAPYDDDSGRRRGERHIKGGRRRTRNVFYMACLGAATQHNPVLKAFYDRLVAKGKQKKVALVACMRKLISILNIMIERRQKWDASRYAVS

SEQ ID NO: 152749 - protein, 433 aa, unidentified
MRVMHERVAGIDVHKDMIKVAIRSPGEKRWTRTTEIFEFRTFYGVLQAMARDLRARGVTHVVMEASGVYTEPVYHALAEQDFEQVMVVNPAHVKALRGHKTDAADCRRLAELFECGLLHGSYIPPAQLKEVRDLTRYRMKTVQARTSEIQRLGKALESAGIKLGSVASEITGASATAMIDALIDGERRGAVLADLARGRMRTAGKIADLSMALAGRFTDHHALLCRLHRDRITLFDDAVAGLDGQIAQKAGRWQQELDLLKTIPGFGDVIAQAWLGEIGPAPHRHFAGHDKLASWVTLRPGNNISARKRKHGRTGDAGAYIKPMLIQAAWNAIRTKGRLQARYSRLVRRFGGEKNPAAKKKAITAIAHTLLKIAYQVLKSGQPYQDLGADFYTRRESPAQQHAYLERRLQKLYPGQTIIITISPPPGGPAEAA

SEQ ID NO: 152750 - protein, 347 aa, unidentified
MQILRYGIGLDVSMEKFDACISVIDVDQKVVVKATRSFNNNAKGCQQLYKWVTSQGCRTAPVIFLMEATGIYHEALAHYLHSHDCAICVVLPNKAKKYKQALGLRSKTDGMDAKSLSRMICEQALPIWSPMSKTIYLLRGITRRIESITKDITRTKCQLHAQEFAMYENKDVINCMKQQLRLLQKQKDQLKKHVLHIIESDAALTEKFEKICRIKGLGKLSLAVIIAETNGFSLFEKVGQVVSYSGYDVIENQSGKHVGKTRISKQGNGRIRRILHMPAFNVVRLKQKPFYDLYRRIYDRNKIKMKAYTAVQKKLLVLIYFLWKKDVPYDPCYQQTSREKELVLSFV

SEQ ID NO: 152751 - protein, 344 aa, unidentified
MTHYAALDVSLRSVAICIIDNGGHIRLETSVASEVEDITAVLDGFHGNIVSVGLEAGVLTQHLTYGLQSTGYEVICMEARQVKAALSAMRNKTDKNDARGIAQILRSGWYSRVHVKSMRSHEIRALLSSRKAVLAKCVDLEQEVRGLFKVFGIKLPPRLGHGAFDETVRPMIEADPALTHALLPLLEARLVLYRSFRELDNRVRHMAQADPICCRLMSAPGVGFVTSLTFKAAVDDPTRFKRSRTVAAHFGLTPRRFQSGDMDIPGHISRAGDPDVRATLYTAAHALMTRSAKYSSLKVWGMQLAKKRGHRRAVVAVARKLAVILHRMWIDDTSFHWSSEGSTV

SEQ ID NO: 152752 - protein, 330 aa, unidentified
MGAEVWVGIDVSKARLDVALGAAGELLWVANDARGIASLVARMVELGPELVVLEASGGLQTALVAELGAAGLPVVVVNPRQVRDFARATGQLAKTDALDARMLALFAERIRPKVRPLPSAQELELKALVARRRELVEMITAERNRLGSAPQLLRKEISAHIRWLESRLKERDRDLGRMLRSLPLWREREDLLRAVPGVGPVLCATLLADLPELGALSRHQIAKLVGVAPLNCDSGTMRGRRTVWGGRAQVRAALYMATLAAVRCNPALKTFYLRLRSAGKPAKLALTAAMRKLLTILNANAQTSHPVESSMPSCRLTSNTVALPSDKERG

SEQ ID NO: 152753 - protein, 347 aa, unidentified
MSICMIGLDTAKTVFQIHGVDEAGKAEIRRKLRRNDLIAFFEKQAACTVVMEACGAAHHWTRMLTGLGHSVKLIAPEAVKPFVKKGKKNDAVDAAAICEAASRPDVKFVPAKSVEQQGILALHAARSLLVKQQTMLANAMRGLATEFGLTVPKGIHKLDELMAVVDADEIIPKRAKQAIAGLHDYCNNLSDGVETFETEIVAHARRDETARRLATIPGIGPITASLIAATVGDISLFKTARQFAAWLGLVPRQSSTGGKTRLGRITKTGNREIRKLLVLGATSMVYRANGWNSAVGAWLRSVLERRPVRLVTVALANKMARIAWAVMTRKEVYRPKGGVAAVAQAAA

SEQ ID NO: 152754 - protein, 311 aa, unidentified
MTRNHIGVDLSKDVLDIHDPRRGTARLANRPGAIAAWMLRLGVDDIIVYEATSACDRPLRLALRQAGQPGVRLNPLHAWHFARSLNRAKTDRIDAALLARLGSERQLAPDAEADPTREALRALVHRRDQLKRMQTQEKNRLSASAPGLVASDIRAELANLARRIARIEAAIGAHLARHPALAAAERLLRSLPGVGAVTAMTLLAHLPELGQVDRRAIASLGALAPRAHESGRYRGRRFLGDGRRHVRRALYMAALSAMRHAGFLAGFVARQKAAGKPAKVILMAVARRLLVVANAILRTGVPFRPPQPGPA

SEQ ID NO: 152755 - protein, 426 aa, unidentified
MGVLKPIDLKIQLGRGDILNQLFVGIDVGSRDNAVYIMLPDSSKHSSFSVGNNLGGAMMLSKRVVSALLEKELSSVVLGLEATSVYGDNLVCFLREDGALGQFERKIHVLNPKQVKKFKDSYSDLPKNDATDAFVIADNLRFGRITSAVHMDDYRYQALQTLTRARFSAVQDLTREKQRFMNYLFMKCSGLAQEKVFSNNYGATALSLFEAFDSPDDLENMDIQELIDFIVEKGRNRFPDPEAVAKAVQSAARGSYRLPKTVNDSVNQVLSISISSMRAMQAQIKALDKEIERQFENIPNTLTSVPGIGPVMSAGIIAEIGDINRFDGQAAVAKYAGLAWSQHQSGSFESQNTHLIKSGNRFLKYYLGEAAFALVRCDTEYRRYYDLKFKEVNKFQHKRALALTARKLVRLVFRLLKDNRLYMPVD

SEQ ID NO: 152756 - protein, 339 aa, unidentified
MKYTPVGVDIAKHLIQVHFIDEHTGEVIDKRLRRQDFLMFFCNREPCLIGMEACGGSQHWARELTKQGHKVRLLQARFVKAFVMGNKNDVMDARAIWMAVQQPGKEIAVKTEEQQSVLVLHRSRRQLVKFRTMQINSLHGTLLEFGETIHKGRAAMEREFPEALERMKERLPPYLITVLENQYNRLNELDSLIEDIEKQLTSVAKQNETCKRLLDIPGVGPLIATAAVATMGEASAFKSGREFAAYVGLVPKQTGSGGKIRLLGISKRGDTYLRALFIHGARAAALLTKEPGPWITELKKRRPASVAIVAMANKLARTVWAIAAHGSKYDKNHVSTRPY

SEQ ID NO: 152757 - protein, 348 aa, unidentified
MKYYVGLDVSQEETHICVIDEDDRKIWQGKCLSTPEAIGKLIQEHAPDAAKIGLETGNLSTYLWHGLNDMSLPVICIDAYHAHGVLKLRMNKTDKNDAHGLAQIMRSGWFKAVKVKSFASHEVRALYRARSSLVSMRSDVVNQIRGCLRVFGILIKGIAGVAFEKRVQEIIDEGGTLAAPLQAQLTVLQTIKKEIEELDELVLDHSWACPSCRALMTIPGVGPMTAAHFVLAVDDVERFNKSKSVAAYFGLTPKRFQSGDMDFNGRISKRGNRIVRHHLYEAANILMTRVKKPSALQEWGLRIAKRSGMKKARVAVARKLSVIMHQMLLTGECFNPYPAHNYGGSVHG

SEQ ID NO: 152758 - protein, 341 aa, unidentified
MYYVGLDVHKKTISYCVKDVSGHIEQRGTIAATRSELDNWMKTLPQPWTVAMEASIFTGWVYDHLLPNASAVKVAHPLMLRAIALAKKKNDRIDASKIADCLRCDFLPECHMASTAIRDRRRTLRYRRLLVRQMVQMKNRVSGLLLETGVEHNKERLHQVKYFSELLRGKEISESLRPLLQLSHETITRLHKTEVALIRSLERDPVLMERILNLKTIPGIGVITALTWALEMDDVSRFGSVKQAISYCGLCGDERSSADKVRRTPISKQRNKHIQSVLIEAAKFAPQQSQELALLYEKEKQKGNRNRATLAVARKLVAYLLAVDREGRPFKPAEEFSKAAA

SEQ ID NO: 152759 - protein, 338 aa, unidentified
MPLYGGIDLHANNSVVVLLNEQDQVIYQRRLANHLPTILEPLALYQADITGVVVESTYNWYWLVDGLMDAGYRVHLANPAAMQQYSGLKYTDDYSDARWLAHVLRLGVLPEGYIYPKAERAVRDVLRKRSHLVRQQTANVLSLQNIIVRNTGVRLSAKRMHELTLEECERLLPEPDQVLAVTSSLAVLHCLGQQIKALEKLVHKRLQHTPAYEQLQTVEGIGTILAQTIVLETGDIRRFPTVGNYASYCRCVQSTKISNGKRKGQGNVKNGNPYLEWAYMEAAQFAVRFSPTVQRFYQRKQAKSHLMVARKAVAHKLSRACYYLMRDLVPFHVHKAFG

SEQ ID NO: 152760 - protein, 338 aa, unidentified
MIAVGVDTHKQQHHAVALDGLGQILGEIVIATTFAGYSQFVCWLRELGESVLVGIEGAGSWGAGLCEFLQAEEVEVFEVERPQRRERRGGKSDRVDALLAAKKVLTREGLSTPRGSGKRLALQMLLAGYRSIVSERSRLYNQLQALQVSAPYALRERIGQARNGATLANRLTGMRTRPTASQQENLTLQVLRDIANRARALDAEAENYTHQIEEMVNSLAPALLEEPGVGPICAGRLLAFNPSRFTSEAAFARANGTAPQPASSGKTVRHRLSRGGDRQINAAIYTIALSRSVHHPQSRAYIQRKITEGKTKREAMRSLKRHLSRHLYNQLAKTPLTT

SEQ ID NO: 152761 - protein, 340 aa, unidentified
MKITTIGLDLAKNVFQVHGVNEHGKAVLRKQLRRDQVAAFFANLPACLVGIEACASAHHWARKLQSMGHTVKLMAPQFVKPYVKSNKNDAADAEAICEAVSRPSMRFVPIKNIEQQAVLALHRARQGFVKARTAQANQIRGLLGEYGLIVPQGIHYIADRVPALIEDAAVELPGAFRLLISRLLDHLKVLHQQVDEIEAQIKAWHRANDASRRLEKVPGIGPLTASALVATVGDAKNFDNGRQFAAWLGLVPRQHSSGGKANLLGMSKRGDAYLRTMLIHGARSVIFRSTQRADTESWLFKLTTRRNKNIAAVALANKTARTIWALLVHDREFRPGYAAA

SEQ ID NO: 152762 - protein, 340 aa, unidentified
MNATMIGLDIAKTVFQVYGEDAHGQPVLSKRLGRGAVEPFFAKLPPATIGIEACGSSHHWARRLQALGHAVRLIPAAYVRPFVKRNKTDARDAVAICEAMQRPDMRFVPIKSIEQQAARGIETARELLVRQRTQLMNAMRGLSAEFGIVVAQGSTGFAALCARIAAGDPAIPAALLPSLRLMRQQWQALNDAVDAQQAQLVARAKADPVMRLLMGVPGIGPLTAHAIVAAIGDGRQFGSARDFAAWAGLTPREQQSANKRRLGHISRQGDPGVRRLLTLGASAVLRQVRAEPRRGTAWLRGILTRRPVKVAVVAQAAKTARIAWAMLRSGEAYRVAAPAI

SEQ ID NO: 152763 - protein, 400 aa, unidentified
MLSIGIDVSKGKSTVCGMKPGGEIVYAPFEVQHTREGMSELVSLLHNSGEEVRVVLESTGSYHCPVVAALLENGIFVSVVNSLRMKRFCSQSIRKVKTDRIDAMQIALYGLAYWQELQPTKLPEDTYRELQLLARQYYQMTSMLIKAKVDFNAICDQVLPGMQELMNDHAGRHKLSDFVLRYRHTTHILEMGETRFRKDYCKWAEKKGYRNCERMAALIFATAQNGIPVLPNAPSTQIVITEAIRVLHTVEASRDAILTQMQALAKTLPEYSLVREMPCIGDTLAPRLIAEIGDVRRFHSKRALIAYAGIDAPPYQSGKFCANNRHISKRGNRYLRKTGYEVMQSYVMHKPANDPIFTFIEKKRGEGKSGKLAMVAGLNKFLRVYYGKVTELYRSLPAIE

SEQ ID NO: 152764 - protein, 341 aa, unidentified
MQKNSYFIGLDIACDDFVASIYESPGKPIVTKESIENNPDGFSMLVSWLKEQGINSSNSVICMEATGVYSEACAHYLFANGFKVSVEPPLKVKRAFDPVGHKTDAVDSRQIAEYAYRYSDELRFWQPKQEIVEKIKQLLTAREQFTKQSTAIQNSIKAYERHIIKVPLIINAHQETLKELKKHIKAIDKELDRLIRQNPTISQISNQLKSIPGVGLLLASDLIAITGAFNDISSHKTLVAFLGICPYQHQSGKSIYRQPHMRNFGPNYARKLLMLAARSCATHNIEFRKYYMRKLAEGKVKQLVLNNISNKIIKIACALIKNNTQYTESYRSVNPICFNLA

SEQ ID NO: 152765 - protein, 400 aa, unidentified
MMTPDDIDVWVGLDVGKSAHHAHALDHDGNTLYDKPLKQDEKAIRTMLGKLSKHGRVLLVVDQPNTIGSLPLTVARNMGIAVAYLPGTAMRRTAQLLPGDAKTDRRDAHVIAWAALKLPETLRDAGPDDETLAALKLLAGHDEDLAHESTRHVNRLRSLLLQTHPAFERALKGERITRDATLALLERYGGPMGVKRAGIEDVKDWAKSNGLRAGRIIDDMFKAIGEQTVTVPGTLMAETIIPSIAHDIKTIRDRRREVGRQVEKLLEDHPLLTVLTSMPGIGVRTASNILLGIGGDIANLKSSAHLAAYAGISPVTGQSGTSIKGERPSRRGNKRLKNALWQTAFVASTKHPPSVAYYKRKREQGKHHNAAIICLARRRCDVIYSMLKNGTLYQEPALVA

SEQ ID NO: 152766 - protein, 376 aa, unidentified
MNSIGCRDTVGIDLGDTFSYVCILDPQGRVTRRFRHPTTPKAFRAHHERRASSLVVIETGTHSPWISRLLKECGHEVIVANARRVALISRSKKKTDREDCELLARMGRADPALLAPIEHRGEESQLDLTTLRARSAAIRARTLLINAVRGLVKSCGERLPKCGSATFHKVAGKHMPQQLKESLEPLVGLIEANTTLIKAYDKQVKALCTKHQPTGHLQAVTGVGPIASLTFVLTIEDPRRFRRSRQVGAYVGLTPRLSESGDSKPQLRITKAGDVDLRRLLVTSAQYILGPWGPDSDLRRWGLALAERGASKGKKRAVVAVARRLAILLHHLWKTGEVYDPLFLARKRGEADDPTKMRPPRARGGSKKQELLASSS

SEQ ID NO: 152767 - protein, 419 aa, unidentified
MSFKILKFNCCGLDVHKTWIYACIGITDSNNRTEYKQARFSSFTKGLNELCDWLAKYNCTDVCMESTGKYWIPVFNILEQHNLWVTLSHPKYTKPMKGNKTDRKDAKWICDLYMCGMVKPSFIPPADIRELRDLVRYRYKLTCMITGEKNRAQNCLTVSNLKLDDVFSDVFGKSSRSITEQILQHPGEKFDVAPFVHGLCKTPIEEIQAAVDGAISKEQAVKLRQCLDHIDELNKHISEVEQEILCLSDKYEAALNLIRTVPGFNKNPMTAIQVLSEIGCDMSVFPTDKHLVSWAGCCPRNDKSDRKIKSTRISRAGSYFKPVLVQVANALIKSKKHPEFITRYKRIKVRRGHKKAIIAICRMILTAIWHILSDLKPYTPEGFLESRPVKKEKILTTSQALNLLKQRGYFIKDDPLSVS

SEQ ID NO: 152768 - protein, 444 aa, unidentified
MARSVGLDVHKHFIEVCALDSRGKVVYRGRTGCLRPELQAFARAHLKRTDRVALEATTNTWAVVDVLRPFVAQIVVGNPLKTRAIAEARIKTDKVDAQVLAQLLRCDYLPTVWQPDEETQRLRGLLTHRAALMGQRSRAKNHIQCLLARLLLQPPCKVLWSKGGMSWLVALELPDHARLLRDSELRQLAMLDAELAAIDRRLAEAARSESRVQLLMTIPGVNYVVALGLLAALGDISRFRDGDHAASYLGLVPSTRQSGRKCYHGPITKAGSPQARWLLTQAAQHASRHPGPIGAFFRRLAKRKSRQVAITAVARKLVTIAYLMLKNNEPYRYAKPELMRKKLGKLHSGGSADGPRPMRSGKNTRPALDDVYRRANLPAVTAPADLPAGERRMLADQDLEGFVRALYSPGSPGNETSEPCASGQTSAPTARRPCAARRPDGRQT

SEQ ID NO: 152769 - protein, 385 aa, unidentified
MRDKTFVPREYDVFAGLDVDKKSIAATFSSHQGFIRSLSMPYKVEDLLNHVRNHFADQKVAFAYEAGPTGYGLYDGLAAQGYRCLIAAPSMIPRAPGQRVKTNRLDSKALSESLRGGQLKSIHVPSPLYRQLRHLTQLRDTMMSEAVGMKQRIKSLLLFEGITFPPAPAGSQWSFIVKAKLRKLPCSHTVRFKLDQLLDSLEFAEKQVFKSTKEIRRFCQTDPELSQCIKYMMTVSGIGWIVASQLLARIGDWRELENIRQLGGFLGLVPMEHSTGDKTDRGPITHTGDGRLRSKLIQAAWSAIRKDGELREFFRSVCQRHPRKVASRVAIVAVARKLSVRISVVLMQQRPYEVREKVHSAPLTQEETSPQGTTRRQAEPGVETP

SEQ ID NO: 152770 - protein, 521 aa, unidentified
MASDSHGRSLLVLFTRLRVWFWGFIGDMIGEALYEVMAAIPFRRFFKYPAPGQSRLNSDIEQEVIKLEGQIKGVKRECSGPGVLQRIHLNAAGIDIGSREHYVAVPEDRDSQHVRVFGCMTPDLHEMARWLKGCGIETVAMESTGVYWVPVAQILESYGFEVVLVDTRHVRHVPGRKTDVADCQWLQELHTFGLLSGAFIPEERVRVLRSYWRQRGSLVESCSRQIQLMQKALEQMNVQLHKVLSDISGVSGQRIIRAILSGERDPFVLARMRDRKVKASEDTVAKALTGDYRQEHLFALRQAVELYDFYQQKIAECDQEIERHLAVFESKADPADLRDKPVKKNKRGRRKNESWIDLRAHLYRITGVDLTRIDGFDSLTVQTIVSECGIDLSKFPTEKRFVSWLGLCPNNRITGGRVHDSRTRKVHSRAAKVLRLAAQSLHGSKSALGAFYRRLHARLGPSKAITATARKLAILYYRMLKFGMEYVDRGQQAYEEHYRDKVLKNLKTQALTAGYKLVPIQ

SEQ ID NO: 152771 - protein, 409 aa, unidentified
MKRAGIDVHKKVLMVVVMNTSTPQEKAVRRRFITLPNELHRLLTWLREQGVEEGVMESTAQSWRSVWRELEPHMGLHLAQAFSNRAPRGRKHDFKDAERLVRRWIADELILSIVPSGEPRIWRSLTGMKLQLTRDRVRLQNQIECLLEEMRIKLSIVVSHLLGASGLRILHALANGETDSRKLAQLGGERWQCSEEQWVDALTGTVQPVHGERLALQLERLQWMDEPMERLHHRIAAAMKAHQDAVIRLAEVPGVGVDSAQQIIAEVGVQASRFASAAELTSRVGTCPGQDESAEQNHSRRSAKGNQYLRRVLNQAAHAAVCKKGSYFQALFRRLLPRLGYKSAIWAVAHRLCRLVWKILHEGVRFIEQGAEVAPREKKKRAQVLARALRKLGYEVTITPINQLAPKLV

SEQ ID NO: 152772 - protein, 370 aa, unidentified
MAKRSMFVGMDVHKESIDISLAEEGRDGEVRRYGVIPGDLEAVAKVVRALRAPNRRLRFVYEAGPCGFGIHRYLTAQGEECVVVNPSSMPKRSGDRIKTDRRDGDALARLHRAGELTAIYIPTPEDEALRDLVRAREDAVGLSTQAKHRLKAFLLRQGRRYPGRAGWTRPYRRWLADLSFPLAPQHIALQEYRDTIEETERRVERLTDQLRQQTPAWRWAPVVDALQALRGVSFVTAVGLVVEVGDIRRFDHPRQLMAFLGLVPSEYSSGPSVRRGGITKAGNPHARRLLAEAAWAYQGVPRIGRQMLYRQETLPQPICDIAWKAQLRLTSRFRKLMARGKTKPKVATAIARELTGFIWAIAREVPPPRA

SEQ ID NO: 152773 - protein, 345 aa, unidentified
MQTMYYIGLDVHKKTISYCVKDGSGQIHAEGTIPATHCDLDRWMKTLPQPWTAAMEATVFTGWIYDHLQPHAAALKVAHPLMLRAIAAAKKKNDRVDASKICDCLRCDFLPECYMASTAIRERRRTLRYRNLLVRQMVQMKNKISMLLMEAGVSYNKQRLHKAGYFRELLATNPNINEGLRSLLRLCRETVVRLQKTESALVRSLEHDSLLMDRVERLMSIPAVGPITALTWALEVGDVQRFSSIKKAISYCGLCGAEKSSGNTVQRTPLSKQRNKHLQTILIEAAKMAPRYSPDLAMHYDKERQKGNANRATLAVARKLVAYLVAVDRRQKEFLVVEKENCVAA

SEQ ID NO: 152774 - protein, 349 aa, unidentified
MKKIVKQVAGIDVAQKELVVCLGRMYDDWSPELYAHKTFANTVKGFVALLLWLKKMTDETIPVRFVMEATGVYHESLAYFLDEKGYELSIILPNKISNYFRTLDVKTITDKTACEAIALFGLERKLDRWQKPKAIFKKLRQLTRERGQIVEERTAAKNQLHAEQTEAEPNKKSIERIKERIKMLNRQEKEIKAEVAALVKQDEQLTTHINVICSLVGVRLLTAAIVLGETNGFELIRNKRQLASYAGFDIKEKQSGTSVKGKPRISKQGNKHLRKAMHMPALCAIRYDERFKAIFARLVSRHGIKMKAVVAIQRKLLEMIYTLYKTGNKYDKNYLKKNNGMIEQHENAA

SEQ ID NO: 152775 - protein, 456 aa, unidentified
MITQMARRRLRPGTPVSERARGRSQAAETLYKLFHKWQRGRKAGPCILPVTAQTARVAVGRKRGLWREAVQVPRRNRSLIEERPPSFLSHAVENPRPLEPAFTRLAREVAQDREPEPTVEQGADMDKRQAVGVCAGIDVSARELVVAIQGKAEVHTFANTQGGHQQLIDWLRRHPAPVRVCLEASGNYSLDVALALAAQRQIELEVANPRRARRFAESLGKRSKTDPVDAHVLAEFAARMPFVPWQAPSRTALQLRSLVRTIAALTHIATQQKNREHAAEVSAVLAPVVARELARHTRYLEQRMAKLRQQAQRMVQRDPELQRRWQHLLSVPGIGEVSALQILGELVVLPPTLDARQWVAQCGLDPKRYESGSSVQAKPRISKAGNHYLRAALYMPALVAVRCDAPAGDFYRRLQKRGKAKLPSLVAVMRKLLHGIYGMFRHGQDYDGLKLFPAFI

SEQ ID NO: 152776 - protein, 364 aa, unidentified
MGWTPPDGIYVPVCGLLESHTKEASVEEVSIIGLDLAKRIFQAHGGDKSGKCLFSRKLSRAQLLGFLKSQKPCIVAMEACSSAHYWGREIAALGHEVRLIPPHYVKPYVKRGKNDAADAEAICEAASRPTMRFVEIRSAEQHSQAMVFRSRDLLVRQRTQAINAVRGHCAEFGLSAPTGHKGYEALKGLIGEARDLPGVAREVLELLMASIDQLEGQIGALEKKMTQLAKRDPVNKALMSIPGIGPITALAVKALGPDAGGFASGRDYAAWMGLVPSQHSSGGKERLGKITKKGNRTLRRLFVICAGTVITSIARSRTVPDPWLAKLLARRPRMVAVTALANKIARIVWALQVKGGVYQSPMTT

SEQ ID NO: 152777 - protein, 397 aa, unidentified
MDSLESIRLEQFRQFQKEIRGSERYLIVGLDIAKDSHHAFFGTATGRTLWKRWLFDNSKEGFQELLLQTEALQVRHGLPQVVFGLEPTANYHKPLGEHLIRHGHQLVLVSGVAVKRNRELLDGRWDKHDTKDAANVADLISQGKCLYYEHPDPRIRDLRLLLSLKKRLKRQEQGIRVRIRNGLLAQYFPELDRTFPRLIASKKERDLLSAMQQPSSIGCAAHPEVAFAAKVMVQELQQARESLKAVQERIQKLCFQFPEYAYLLSIPGFGPEVSSQVLAAIGDPFRFGKGSQVLKMAGLDLSADRSGKASERARPVISKKGKADLRYALYQAAFIASIRNAAFTAYYTLRLKARSQEPGIQAKRRVKLAAKLLLIAWTLMKRKEVFDPERLVPSALL

SEQ ID NO: 152778 - protein, 466 aa, unidentified
MKPFYLGIDVSKGYADFMIINSKKQSVVQGFQLDDTFDGHRSLYNILGRFLAEHSDSTLFVGMESTGGYENNWYNSLIEFQGSLKIQTARLNPFGVSHNSKADLKKNTTDKISAQNIAESLVAHPEKVVYQNQDRLAGLRKQWGFIRMLTKQCTQFLNQLNGLIYSANPELLSYCQNGMPGWVLKLLIKYPSAANLKNAHAETVAKIPYVSRQKAQQLIANAKRSVASTKDITTEQLIVATAQQILHIKKIIADQTNRMLRECSIPEIELLKTFTGISDLSAVGLIIEIQTIKRLTGLKKLASFFGVHPVYKISGDGVGGIKMSKQGRKAPRQILYMIALSAIQHNPLIREIYEKHRKQGKHNMAAIGICMHKILRILYGMLKNNKPFNPTIDIANRLQSVRLKNDTPAGNKNRRFQEYDQKAPVSRRQRKKRLDREMSQSVCDTHSGITAPVPLANIIANMLPQL

SEQ ID NO: 152779 - protein, 375 aa, unidentified
MKEKVRFLGLDVHAETIAIAVAEPDGEVRSLGTIPNRAGSIRKLIKKLGPAEKLRACYEAGPTGYVVYWQLAELGVRCEVVAPTLVPVKAGDRVKTDRRDAEKLARCYRSGDLTAVWVPDEGSEALRDLVRAREAAKQDQMRARHRLSKFLLRSGQRPPIGVRPWTRPYLIWVAQLRFTQIAQEATQQDYLHEVEHMRERVARLEQAITEAVKLASPALQQVINDLQALRGIADISAVTIAAELGQVSRFGSARQLMGYCGAVPSEDSSGKRTRRGGITKTGNAHLRRIVVEAAWSYRRPPCIWYGLRKRQESISEEAKEIAWKAQHRLHKRYMRLGAAGKDQRKIVTAVARELLGFIWAIGTRAETISKQQVAA

SEQ ID NO: 152780 - protein, 345 aa, unidentified
MKKVMAGIDLHSNNLVIGIMDLDGKRVASQKLSCKLKEVVEFLSPFKQRLEQVAVESTYNWYWLVDGLQALRYPVVLANPAGMEHYSGIKHADDTNDAFFLAELLRLKILPTGHIYEAQLRPVRDLLRRRLTLVHHRTALMLSFKSLYTRTTGLEMSLGELKELEIKAAQDLYDHPANQLIAGMQIKHIEQLTESIEKIEKAVLGCARELPLYTKLTTLPGVGTILGMTITMEVGDIKRFAEAGHFASYCRTVEAKRTSNNKKKGPNNSKCGNKYLAWAFVEAANFARRYDEQCRKWSERKAARRGKVIASKALACKLAKAAWHLMALGTDYDAKRMFGQPATAQ

SEQ ID NO: 152781 - protein, 424 aa, unidentified
MKNTAARKLRQVPEGYLIVGVDPHKKKHAAVAITQDLTIRDRFKFDNTREGLEFLLQRVKTEMVKTGCRGIMFAIETGGHYWRNIAYYLDKKSVPFRFINQYTLKRRREGKDLNKRKNDFRDSEVAAQLLCTGEFVESVIPQGVYAELRTAHNAYRRLVKERTRITNLVKGLLDALFPEFVRVFKDPCGLTSLSVLSTCSIPSMIAGMTNDEFIAVIEAQHNGRRLMRKKLGELHNVAKTSIGIEAGARSLSAEISFLVEKLELIRRHITTIEKSLITLVDETEEGKYLLSIRGLNYIAVAGLLAELGCFKAYRSARQMIKMAGTNPTESESAGKKKSRTPMSKQGRPVLRYCAWTSVIPMLRFNPDFRAWAKQRRERPVHANPLGGREVVGAALNRLLRLAFALVKNQTYYQNVKPTLTPVAV

SEQ ID NO: 152782 - protein, 342 aa, unidentified
MEQVSVVGLDLAKSVFQVHGVNAQGEAVLRRKLSRGQLLKLFEKLPPCLVGMEACASAHHWARELAALGHEVKLMPPQYVKPYVKRGKNDAADAEAICEAVTRPTMRFVGAKSPDQQATMMLHRVRKILTRQRTQISNALRAHMAEFGITAAIGRRGLDRLIAAIADQDDARLPDEARACLAVLCTQLGMVKEQILDNDRRILADARKTEAGRRLMKIPGIGPLLASAIVACVPDPAIFAAGRRLSAWIGLTPRQNSSGGKERLGSITKAGNTYLRELLVVGAMAVVRQAKQGSAKWPWVTQLLERKKPKVAAVALANKNARIIWAMMATGEAYREAELAAA

SEQ ID NO: 152783 - protein, 343 aa, unidentified
MQTVTTIGLDIAKSVFQVHAVDAAGKVILRRQLKRRHVLAFFEKLPPCLIGIEACASSHHWSRELQALGHSVRLMPPAYVKPYVKRQKNDATDAEAICEAVTRANMRFVETKTADQQGGLVLHRTRHLCMRQQTSVINAIRAHLAEFGVVAPVGRNGVEELLRVVADPDDKRVPEVARVCLVALGAQLRRLKDQVLEFDRMITAWHRSNKMSIRLDECPGVGPVLATALVATVADPKSFRSGRNFSAWIGLVPKQHSSGGKDRLGSISKQGDRYLRSLFVIGALAVIRYAKVHGTRHRPWLTALLARRPAKVAAIALANKIARMVWAMMAKCERYKEPVALAA

SEQ ID NO: 152784 - protein, 358 aa, unidentified
MQIIGVDLHARQQTIAMLDTVTGELVEKTLGHEGDELRKFYAALPGPVLVGIEATGSMPWFLRLMEELGMECRVGHPAKIRKAETRKQKHDRRDARLLLALLAENRFPTIWMPSTEQRDLRTLLRHRHQWVRMRSRVQHTLQSMALNQGLRLGHSLWSQAGQQALRALPLAPHANHRKTALLALYPRLQESIDELDRQVSEQVKQRPAAGRLLTHPGVGPITALATEVFLGDPQRFADGKAVASYIGMIPSEHSSGGRQRLGAMSKQGNALLRYLWCEAAMHAVQRDPELKRFYRRKLVQKGLGKARVAAARKLGIRLWIMMRDEIDYPEFCRRGQLRQQCGSACAGMPDINSGPAVP

SEQ ID NO: 152785 - protein, 385 aa, unidentified
MQASNVSTPIAGHSGTIFVAIELSQRSWLVTMHSPDKNRFSRHKLDGGDEVGLLGLIERIRVRAAQALGSTPRVVSCYEAGYDGFWLHRWLEAAGITNFVFDPASIAVEQRARRAKTDRIDGELLLRTLMAYCRGEPRVVRIVRVPTPEQEDARRATRERERLIKEQTAHTNRIKALLRLPGLAAGNPRRRDWMAWLERQRDRNGEPPRPQLMAELRREHARLMLVGEQLKELSRASEVAPVSAAAAEMAQRSATLRRLKALGPVFTGTFASEVFYKDFHNRREVAAYCGLAPSPWRSGQTNREQGISKAGNPRARAKAIELAWLWLEHQPESALSRWFHERTGQGRGRIRRIAIVALARKLIVALWRFLTTGLVPEGAVLKAAA

SEQ ID NO: 152786 - protein, 345 aa, unidentified
MDVEHTPPPPAAPVATPAATPVVVFGIDVAKDKLDLARSDAAAAAAAAAAVRTVANDDAGIASIVKDAAAARPAVIVVEATGGLERPLMDALLDAGLPVALVHPGRVRYFAKGLGLLAKTDRIDAAVLVRFGQLAAPRLAERRTANEAELQALVVCRRQLTVTRTQQANRLGATTASKPARRAIEAVIKTLDKQLDKLDAQIRALIDADDDFRHLDGLLQSVPGVGPTLSATLAAEFRELGDLDRRQAGALAGVAPFNHDSGAMAGKRSIRGGRAAVRCVLYMATIAAIKFNPVIRAFSDRLRAAGKVGKVRVVACMRKLLTLLNAMVREGLKWEQLDVVKKLAA

SEQ ID NO: 152787 - protein, 427 aa, unidentified
MKYNQNSKIMQVTESTLIVGVDIAKKVHYARVFDWRGIELDKIKKFESNYIGFLSFKEWLDGIAKKHEKDKVIVGIEPTGHYWYTFAEDVLKEGYMLVQVNPYHVKMSKELDDNSPSKSDRKDPKTIAMLVKDGRYQIPYIPKGIYAELREANNLREEWLKKNNSVKNRIQRWLAIYFPEFGDVFASWEGKTALITLEVLTLPENVCKFSAEDIVLIWREEVKRGVGIKRALKLLEASTHSVGSKEGTDMAVYKIRLLLREYRETKAILHEIEGRLENMVLQIPGAEKLLTIKGIGIKTLAGLLAEIGDINRFSHPKQIIKLAGLNLRENSSGTHKGKTTISKRGRSRLRAILFRAILPLVANNKEFRELHKYYTTRKENPLKKKQSLIALCGKLIRVAYALITKDVEYNSDKMMEDIKRSNVLEVA

SEQ ID NO: 152788 - protein, 370 aa, unidentified
MLNTTTFVGLDVHARSIKAVALDAMTGEVRSATFAYDAAAVAEWVGSLDPAAKCVYESGVTGFDLQKKLTALGVDCVIGAVSKMIKPPADRKRKNDRNDAEFLARMLSVGNIIEVWVPDDECEAARDLVRALDDARDDLKRCKQRLSKFLLRHGLVFSETTPSGQRKGNWTAAHWAWINAISFKERADNEVLAYYVDAVRQKLKDKRRLEALVKDEASKARWRKRVDSIRCLKGIDVMSAADLVFEADEFSRFKNARSFGAWLGLAPSEHSSGESVRQGGITKAGNKHLRRVLVESAWHYLNASAHSKDLAKGQIPDPAARRHAAKGVRRLVKRREGMLERGVHKNKANVATARELAAWVWAVGCIVESA

SEQ ID NO: 152789 - protein, 351 aa, unidentified
MNRGITIGLDMGDKTHSICVLDAEGNIVARTTVTNTSTAIRKYFGTWEPSLVAMEAGTHSGWVSRILEELGHRVLVGNPRKLRAIWDSDVKTDGRDAEMLARIARVDPQLLHAIHHRGQKAQADLNVIKARDMLVKVRSTLIAHARGLVKGTGQRISSCSSETFHLRLLEEMPAELAPALDPVRKSIEELTQRIRHYNKLLEQLCEESYPQTQGLRAIPGVGPVTALAFILTIEESTRFDKSREVGAYIGLTPKRDQSGQIDKQLGITKAGSTYLRCLLVGCAQYIMGAFGPDCDLRRFGLKLAARGGKNAKRRAVVAVARKLAVLLHQLWKSGTPYDPFFQEHRKKAKAA

SEQ ID NO: 152790 - protein, 351 aa, unidentified
MILTQENCTKRKMTFSITPDSLENFYQYLDKNTAVIIEASTNTFKFAEKIITKVHSIHVANTHKLKLISLVKKKTDKVDAEKLAIYLKMQIASHESLMEPVYIPDQTIQDLRSLFTSCRMIRRQIGALKNRIHALLKQNLLPFTKEYIFGKKNREIIKELEMGKTAKFQLLFFFELMEHLEENITKLEDEIYLIGSKFIKEIDILTSMKGISVMTAIAIMADIARIDRFPNSKHFSSYLRSAPGVDSSNETIKIKNTNKFARKHSITLLSQSLNHFRDTNPKLKKWYEKKESTHKKGKLRMALCRRVFTEIYQMLKKNEYHYYRNEELHRIKMEVYYNFLKKRGVIFQKVA

SEQ ID NO: 152791 - protein, 438 aa, unidentified
MERFSLVHPHAAGIDVGDTEMVVAVSPDVCDQNVRTFGTFTCDFGQIVCWLLECKITHVALESTGVYWVQLYLLLEKEGFNVTLANAKHIKNVSGRKDDENDAMWIQRLHSCGLINGSFQPDLPTRGLRDLMRHRRSLVRDQSRCTNRIIKSLELMNIKVQTVISDIDGKTGRAILEAIISGQRDATVLASLADKRVKASRETLIKSLQGIWNDQHLFLLQQQYSTYKFISAQIKETDLQIEKQMPNLIASAHQGELPPINKEHPRKRSTRKNTIPFNATAYLKALLGTDLTQIPGISEVTALEVVSEIGTDMSVWPTENHCTSWMGIVPNTKKSGGRIISNKIMKKKHRAGQALRMAASTLYNSKSPLGDYFRRKQAKGGPSKAILATATKMAISIYMMIKNKTPYQPEKMTEAQLKFKKAQIRKLEERLAKLKAAA

SEQ ID NO: 152792 - protein, 368 aa, unidentified
MAKNTTKAAVRETGKRTTGLDLGDQHSYYYTLDQAGEEVESGRVKTSREAVEKRFGGGEPMRVVIEAGTHSPWVSRLLAGLGHEVIVANPRKVRLISDNEGKDDPVDAELLARLGRVDVKLLSPIKHRGAEAQADLAVIRARDALVGARTQLVNHVRGAVKSLGSRLEKSSTRSFADKMGDQVPEALRAALEPVLEVIKELTSQIGGYDQQIRQSCQEKYPETALLTAVPGVGALTALGYVLTLEDPHRFASSRAVGSFLGLRPGKDKSGQQDPELRITKAGSPLLRRLLVGSAQYLPGPFGPDTDLRRWGLKLAGRGRKNAKKRAVVAVARKLAVLLHRLWVDGEVYQPLYQAERGVAATAVAGARS

SEQ ID NO: 152793 - protein, 337 aa, unidentified
MKFSGIDLHSNNSVVVVSDETDKVMVEKRLANDLPTILATLAPYRDELVGVVVESTYNWYWLVDGLQAAGYRVHLANTTAIKHYEGLKHSGDETDAAYLAHLLRLGILRTGYIYPKEQRATRDLARKRMQLVRSRTQHILAVENIVARETALPIKSNQVKRLTVEGVLALGLRTDVDLAVQSNVAVIRTLTEQIDKLENRLQEQVRPSPEYALLTSVPGIGQTLATTILLETGAIERFCEVGHFASYARCVDSVRMSNGKKKGEGNTKNGNVYLAWAFVEAAHFARRYCAEAKRFFDKKRAKTNNAVATKALAHKLARACYHMLKDKQPFDVKRCFA

SEQ ID NO: 152794 - protein, 412 aa, unidentified
MVEQVTVGVDIGCRRHRVAIAAPDGRIAEEFDMEHGKEGFEKFFGRLSHYRESYQVPVVVAMEGFNGYARPLDQQVREKGYCLLNVNNLKLCRFKEIFPGAAKTDRIDARKIVELVRLHPVLSREKEILQEVREVPEGHQVLKRLTRRRRQLVQEKVCVLNRMQADLQGVSPGLADIVEYKDGLAFLRFLTCRPRLEQLGKIQERELLQIPGVGKAFAEKVRKWQRTSFFSQEVGFVGPMIQEDARRILELREQIEGLEKEIRRLSEESRLGQLVGSIPGFGVVCTGEIVGEIGTMERFPTERSLALYLGMAPLDNSSGNYRGTKVTKQVNRRGRAAMMAAVAHHARSVEESRHYYEKKREEGKTHNQAVRALGRHMVRVIWSMVKRNEPYRVVRMDESLNRELAGSRDLKI

SEQ ID NO: 152795 - protein, 388 aa, unidentified
MGKYSSNENRYVTYVGMDVHARSIAVSAVDVKTGEAFSARFCGNGKEAELCEWVEGLPQPAYCAYESGCTGFGLARELRSLGIDCDVIAVSTLPKSQRDRKRKCDRLDARAIRREICNPDSDYSVVWVPDERTEAERDLCRAYRTAVDTCKQARQRLRMFLLRHGHVWDERTKTGNLKKAWTRDFTKWLDSISFGQPSAEKAYAALRRQERAAAEEVAELRREVLALSREPHNKPYADALSCLKGLDREGAMLAVAEFGDFSRFGSGRGVSCWLGTVPTDASSGEHDRHGRITKCGDKWLRKALVEGWSGAASWKTGRKAVPKGAEPSAAAQAIAARANRRLFERYAHLVGGRGKCHNKAKVAVVSELARWIWVLGLQVRSELQAPAA

SEQ ID NO: 152796 - protein, 441 aa, unidentified
MKKHTYRAKNINGICIEKLVEELNGVKVVVAVDVAKHDYVVGIAGSDGEIVEHVKFTHPEQTRAFMDLLEALRQRGDTEVVLEPTGTYGDALVEQLFERGFAVFAMSPKRCHDAAEVFDGVPSLHDAKATMILARLHVQGLSKSWPRMDEARRAMRAAVARREIYASPLEAHRGRLEALLSRYWPEFGQQLDLSDCKTGLALLVEYPGPEAVAHAPEGAARRMKQYSQGRLTGEKIAKVLATARDSLGVPMCEEERKLLGALAEEMLELWNEVDHIEDEIARMAEAYPASRALSQTVGMVTSAILVAMLGPASAYRSADAYVKAMGLNLKEHSSGSSKRPGTGLHITKRGPGVVRKYLFMATLRLIQRDPVCRAWYERRRAYQRGEKLKAVVALMRKLTRALWHVGHGERFDATKLFDTRHLKKRRTAKADMGRIAKVAAC

SEQ ID NO: 152797 - protein, 428 aa, unidentified
MNYNQNEKIAQITSETLIIGVDIAKFKHVARAQDFRGLEFGAPCHFENTKPHFDLFLSWIKQLMEQHGMRKVIIGMEPTGHYWLNLAHFLKEEEIKFVVVNPMHVKKSKELDDNSPTKNDVKDARVIAQLVKDGRYAEPNIPQGVYAELRVARKIRDLLYVDLQAVQGQIHNWLDRYFPEFLTVFKDWEGKAALQLLKLNALPHELEILSEQEILIHLRKAVKRAVGLSKIQELKRVAKDSIGIREGSRMAKLELRTLLDKYELITKKFEELESDIDGLLERIPGVQQMLAITGIGKETVAGFFSEVGNLSYYSHPRQIIKLAGLSLKENTSGKHKGQTKITKRGRKTLRALLFRVAMPLVAKNTAFKALHEYFTTRKNNPLKKMQSLIAICNKLIRILFTIGTKQCEFSEDRMLKDIPHMALLQKVA

SEQ ID NO: 152798 - protein, 338 aa, unidentified
MGVYIGIDLHSNNCFVTVIEESGKVVYEKRLSNDLPLIVSELEPYRDHCEGVVVESTFNWYWLVDGLMEAGYGLHLANTAAIQQYYGMKYTDDKSDARWLAQMLRLKVLPEGYIYPKGERAVRDLLRKRSQLVQQKVSQMLSIQNLVSRNAGVHLNGNAVKTLTGWDVDRMLPDPLVARAAKSNLRVYRCLAKEIKGIEETVLARVKGNAGFENLLGISGIGKALGLTVLLESGDMARFPGAGHFASYCRCVGSQRLSNGKKKGKGNTKNGNKWLAWAFIEAANFAVRYNATVKRFYERKKARTNGVVAIKAVAHKLARAAYHVLKDGVPFQVGRPFA

SEQ ID NO: 152799 - protein, 415 aa, unidentified
MLRIVYSVCCGMDVHKSFVVACIASTNPQGVTTYKSKRFSTFTGDLRRLAIWLAENDCRDVCMESTGKYWIPIYNILEPTCKNVLAHPKYVKAIHGKKTDKKDAKWIADIFKHDLVSGSFIPPADIRQLRDLVRYHWKLTNFTTGEKNRVQNCLTVSNIKLDDVFSDVFGKASSAIIEHILKDPGEKIKDVSAFRTKGMKASNEEILAAVDGEMCAEQAEKLRIIRSHMDGLELCKLNLESLILSTAEKYLPQINLVLTVPGIQSFSAIGILSEIGVDMSVFPTSKHLCSWAGLTPQNNESAGKKKTTRISRAGAYIKPLLVQCALCAIRAKQNPEIRNRYLSLKKRRGHKKAIIAIARMLLTAIYNILKKNEPYNPDLYHQSDKPPVHREVSADEAIFILQRQGYLVSKPASTP

SEQ ID NO: 152800 - protein, 672 aa, unidentified
MVTGMAAVTAGASPAAGPDRRSPVPARTTGAAAADRSPASARPGRTLRSWPLLVLAAPAAAEVWSGWVGVAQKTGFGLVSPLPGIWPALHLDTTVTLPVGVEAYAAYALRAWLSGEPRIGDRTRRFAKWSAICSFALGMAGQVAYHLLAQAGAARAPWPVTMIVSCLPVLVLAMGTALAHMLRADTAPDAPDSDATGPATAWSPDQSAGDQSGQDQDQHADHGSGPPAVTTRPVQPETRAVVRTTAPEPRDTRTQTDPAHLLARRLAATGKPISRRALRDAGVKDDMLRPACGWLSWQSAPALNRGGLPSTGAPCGVSANRLWSMRRSLMPIVGGMDIHRKQITFDYLDTATGEVMCGQIAPADRAHLRAWLQRFAGIPDVAFAFEACTGWRYVAEELAAAGVAAHLAEPADTAAARGRKKRAKTDRADARLQRTLLADGRLPECWIPPAQVLECRALLETYHALRREHTAWVQRAHAVLFHQGAPVFHALGEADGPQQLAGLARARLSPAGQQQIGLYLRMLEVTEAELGALRGQLTATARRLAGAKALQDKLYGVGPVTGLALTCWLGGKDRFSSARKAVRFTGLDITVYSSDGKRSPGHLSRQGPPVLRWCAYEAGKAHARGSAPDHRYYEQVKDRKDGKRAALSEARKIIRQACHLLAGLGDDAFTTV

SEQ ID NO: 152801 - protein, 339 aa, unidentified
MKYTPVGVDIAKHLIQVHFINEHTGEVVDKQLRSRDFLTFFSNREPCLIGMEACGGSQHWARELTKLGHKVRLLQARFVKAFVMGNKNDVMDARAIWMAVQQPGKEIAVKTEEQQSVLVLHRTRRQLVKFRTAQINSLHGTLLEFGESIHKGRAAMEREFPEALERMKERLPPYLITVLEDQYNRLSELDSLIDDIEKQLTSVARQNETCKRLLDIPGIGPLIATAAVATMGEASAFKSGREFAAYVGLVPKQTGSGGKIRLLGISKRGDTYLRTLFIHGARAAALLTREPDPWITELKKRRPASVAIVAMANKLARTVWAIAAHGRKYDKNHVSIRPY

SEQ ID NO: 152802 - protein, 436 aa, unidentified
MASHCQFYNYKFQEVILLSFKILKFKCCGLDVHKTWIYACIGITDSNNRTEYKQARFSSFTKGLNELCDWLAKYNCTDVCMESTGKYWIPVFNILEQHNLWVTLSHPKYTKPMKGNKTDRKDAKWICDLYMCGMVKPSFIPPADIRELRDLVRYRYKLTCMITGEKNRAQNCLTVSNLKLDDVFSDVFGKSSRSITEQILQHPGEKFDVTPFVHGRCKTPTEEIQAAVDGAISKEQAVKLRQCLDHIDELNKHISEVEQEILRLSDKYEAALNLIRTVPGFDKNPMTAVQMLSEIGGDMSVFPTAKHLVSWAGCCPRNDQSNQKIKSTRISRAGSYFKPVLVQVANALIKSKKHLEFTNRYKRIKARRGHKKAIIAICRMILTAIWHILSDLKPYTPEGFLESHPVKEGKVLSSSQALNFFKQRGYIIKDEPLSVS

SEQ ID NO: 152803 - protein, 337 aa, unidentified
MGLYCAIDLHSNNHVLTVIDEADRRVYERRLPNELAVTKAALEPYRAELVAVAVESTFNWYWLVDGLMEAGYTVRLVNTSAVRQYEGLKHTDDEHDAFWLAHLMRLGILPTGYIYPKSERGLRDLARQRMRLVQHRSSLITSVQNQVWRSTAVRLCADTIKGRGKKPWPELPDPDLALSVKAGRAAIDTLTVQIERLEKLILKRVDLSPQFRLLKTVTGIGPILAMTIALEVGDIGRFAGVGEFASYCRCVDSQRLSNGKKKGEANRKCGNRYLAWAFMEAAHFAIRILPAAKRFYERKRRQRHALLAVKALAHKLARACFYILRDQVPFAPERLFV

SEQ ID NO: 152804 - protein, 311 aa, unidentified
MTLPHRYVGCDVSKHWLDVFDPAEGVPRRIANTPEATATLAAQLAASQAFLVFEATGTYDSALRKALHQAGVPSARLNPTLVRRYAQARGRKAKTDALDAAVLADLGERLHPQPDPVPCPHRARLAALATRRDQLVTMRAMEKNRIAEAADPFVRDDIEQAIACLSAAIARIDAEIKRHIQSHDTLRQQARLLASAPGIGPVAAQILLALMPELGHTNPKRLAALAGLAPFNHDSGQLKGKRCISGGRTRVRKALYMAALSAARTCPSLKAFADRITQSAKVRKVALIAVARKLLVRLNAMLRDGNVYQAQ

SEQ ID NO: 152805 - protein, 449 aa, unidentified
MHIRWGVAPRAPVQGTIRHRGGLAAKGSEGVVTEDVEWFAGIDWASQTHQVCLVDAGGKIVGERGFAHGGAGLAELCSWLLTMTRAAPTAIAVAIEVPHGPIVETLLERGFQVYAINPKQLDRFRDRFTVAGAKDDRRDAHVLGDSLRTDRHCFRRLSAENATVIELREWSRMSEDLQQERNRLANRVREQLWRYYPQALAISDDLAADWFLQLWAAAPTPATARRLRESTVGGILKRHRIRRITAAEVLASLRQKPLTVAPGTAEAASAHIRTVAQRLTLVNRQIKQAHHRLDALSDRITENEGDSDAMGQKSEQRDVTILRSLPGVGRIVLATLLAEASEPLRRRDYRTLRTLSGVAPVTRRSGKYCIVVRRQACHMRLRSAVYHWARVATQHDQHSRHRYAELRKRGHSHGRALRSVGDRLLAVACAMLTRQTPFDPDQPLKQMAA

SEQ ID NO: 152806 - protein, 302 aa, unidentified
MITIGVDAHKHVHMAVALDEWGRIADQWRGENSAAGWDEATQWARALGDERRWGIEGGGGYGRGLAQHLVGGGEVVYDINPRLTATERRRSRRMDKNDAFDAQAIAQVVQREEDKLPRVAAEDETVALDLLTAEREDAQAEATRLRNRLHHLLLQLDPEYHLHLPALTSVAGVQAAATYTTTSGNLVQQERAAVVRRLAGRLRLAMEQVAELGQRIEALAQARYAPLTRLCGVSLLTAGSLAGILGPGRRFASEAQLAAYAGVAPLETSSAGRVRHRLNRGGNRRLNAIVYDTPPLLTFGAS

SEQ ID NO: 152807 - protein, 427 aa, unidentified
MPYQIAGIDVHKKMLAVVVADVEVEGDYHFERLKVGTSPAQLRALADWLVERQVEEVVMESTAQYWRPVWEALEQYWRPVRRTRAGASPVSGTLHLAQAQSNRGAGGRKRDFPDAERLVKRLVAQELTLSFVPDAEQRLWRTVMRRKYQVTRNRVQLHNRLESLLEEAHIKLSSLVSDLLGTSARRMLQALADGETDPATLASLADTRLRATAAQLSDAFGACTTLHPVYRRLLKLTLDEWRLIEDHLGQLDQQMADLLAEHHEAVQRLAEVPGLGVDSAQQIIAEVGATAATFPSPKHLASWMGACPGNEESAGVNYSHRCPKGNRQMRRVLNQAANAAVKAKGTIFAIVYRRLVPRLGHAQAIGAIAHRLCRLIWKILHQRIRYEERGPAVSEEARKVRARKMIRELRSLGYHVERLPAPSGSPA

SEQ ID NO: 152808 - protein, 337 aa, unidentified
MEYFAGLDVSMEETHVCVVDRDGKIILEARTPTAPKTIAAALAKGPPVERVVFETGRMAPTLFHGLAALGMPVVCVESRQAYQALRSMVTHKTDRNDARGLAHLARAGFFKPVHVKSLPSHAVRALLIARKKLVGQRVTLENQIRGLAVAFGVRLPRGLSSGFSEKAMAAGRGIPGLDGAMRGLLAARDAILKAIVAINADMKSLERSSAACRRLMTIPGVGRLTALAFVAAIDDPDRFRRSRDVGAYLGLVPRRYQSGEIDYTGSISKCGDGRLRTLLYEAANVMLTRYRGSLALKNWALDIARRSTLRKARVALARRLAVIMFAMLKHGTEFQPA

SEQ ID NO: 152809 - protein, 385 aa, unidentified
MTIQIQVPRFIPRDYDVFAGLDVDKKSMAVTFADHAGSQRALRMAHQVTPLLNYVRKHFAGQRVAFAYEAGPTGFGLHDELVRRAYTCVVVAPSKVPRAPGERVKTNRLDSRKLAESLRGGQLHSIHVPSGVYRNLRHLVQMRDTHVRQLTSSKLRIKSLLLYEGIAFPEEHEKWTARAMRELQTLPCSETVRFKLDDLLDTLHFHFQAAARATKQIRQYCLDDPELQQSIDLLLSLPGIGWIVGSHLVARLGNPREIKNGRQIAGFLGIVSSEHSTGDKQNRGEITRSGDSRLRNKLIQSAWTAIKRDPELRAFYRRIYQRHPKKVAARKAIVAVARKLTNRIYVVLKEQRPYVIRPDSSIAPLTVEETVGPRERLDAAQNDQS

SEQ ID NO: 152810 - protein, 351 aa, unidentified
MIIIGVDYHPSFQTIAFLMEETGEYVEQELNHSDGEAERFYRKLKEKGVRVRVGMEATGHARWFERLLAELGFELWIGDPAEIKAKRVRKQKTDREDARLMLKLLQENRFPRIWVPSPENRDLRQLLWHRHRLVQMRTRIMNQLQAVAMNEGYRWKKKLFSEKGRALLEKLSLALWASRRRKELLELLDQLDPKIAELTAAVEQEAKKRPEVVQLMTHPGVGPITGLAYVLVIGTPGRFPCGKQIGSYTGLIPCEDSSAGKQRLGHISKQGNTLLRFLLVEASQAAARCNPDWRRRYMHLMMRREKRIAKVAMARKLAVRLYWMWRNNWQYSQLVEFGSNAGKLGTVHGVK

SEQ ID NO: 152811 - protein, 383 aa, unidentified
MTLDRYFRQCVGIDVSKDKFTACLQMYDRASDVGCHTMSIDFDNTKSGFNQFVKWSRKEAVKGFPLTYLMEPTGVYYEPLAYHLHKIGQTVYVVLPNKARSFCEAEGIKTKTDAMDARCLALLGCTSRKLKPWSPPAPIYRELRQMTRFHTDLSQIMTSVMNRMESLNHMEEAYKTVRKNCQKLIDEIDTLMENNDKAIMQKITEDKELEARVKRIAKTKGLGVTTVVCIVAETEGFHLIENRKQLTSYAGLDVRAKQSGREDPKHAISKKGNAHIRAALYMPALVAVRYNPQIKTVYGRICQKHPKQKKIGVTAAMRRLLLLIYTLWKNGEEYDPMRDKTHTHQKKMKEEDTELEYEPEDCIGPKRDPADWNATDEHGNPPF

SEQ ID NO: 152812 - protein, 354 aa, unidentified
MATTSQQSIPALSTIGIDIGKDVFHLVGFDLDGKIVLRRKIKRLDLVRTFKELPRCIVGMEACLSAHFVSRTLRALGFEPRIIPAKYTKPFVKGQKNDYNDAEAVAEAALRPNLKLVQEKTQDQLDLQALHRVRSRLVSRRTATINQIRAFLIEQGITVRPGARALRNSLFAILQNRADEISPRMDRIIIGLYEDWLWLDERIESTTGEIEMISKREGHCQRLMTIPAIGPMISTAVVAAIGTGEAFDRGRDFAAWLGLVPRQYSTGGKPILGRISKRGSRYLRTLFIQAAHIILMRPHNWKHFSFGPWLEQAARRMHKNKLAAALANKLARIAWSVLRKGKDFEIIRHEVTAV

SEQ ID NO: 152813 - protein, 470 aa, unidentified
MTPRYQKKGRWPSAPARLRVTNPHAAGIDVHANVHWVAVPAGDAPAPPPDHPPKLPPHVRSFGACTADLIALADWLKTCRIRTVVMESTGVYWIPLFELLESRGFEVLLVEPRQSRHVPGRPKSDVLDCQWLQRLHSYGLLSGSFRPAEQIIVLRGYLRQRQMLIRYAGQHVQHMQKALEQMNIKLTEVVSDVSGVTGMAIIRAILNGQRNPLELAKLRNDKCRRTQAEIARALYGNWRAEHLFALQQAVTLYDCYREQLCVCDEQMQKYLATCADRSQGRPRPRRHGRARRERRRNDPGFDVAGALFRMSGVDLTVLEGIDPNTALVLMREIGPDVSRFPTVKHFCSWLGLSPQHQLSAGKIRKRRVQRGASRAGRALRMAGQACYHAQNVLGAFYRRIQARAGAPKAIVATAHKLAERVYRLLKHGTEYVCQDLEVYEAAYRQRVVKGLARKAATLGYRLEPTTATAT

SEQ ID NO: 152814 - protein, 321 aa, unidentified
MSQFHLGIDVAKAKLDCALRLPNGKFRAKVVANSQEGFALLVTWLASHKAPQPHVCMEATGIYWEEVAQYLATAGLTVSVVNPAQIKAYASSRLTRTKTDAVDAKLIADFCAERQPSAWQARSEAEIALRALVLRLDALQTMRTQESNRLEVSRDAVRDDIQQHLDWLDADIQQLVETINDHIDHHPDLKQKRELLNSIPGIGERTSAVILAFYSDTERFANSRQAAAFAGLDPRQHESGSSVRGKPRLSKIGHAFIRKSLYMPAMVTLYRTGWGKQFKERLAIAGKPPKLIIGAMMRKLIHVAFGVLKSGKNFDPALHGA

SEQ ID NO: 152815 - protein, 441 aa, unidentified
MNPDMCVSPASQSHDKLIGSQNPGYTGGLVGRQSLSFQKRSVRGGVMYNLFVGIDVSKDSSAAHGLDSSGKSCFVITLSMDITGFSQLYDTIRASCEDLSTVIVALESTACYHINLYSFLTSKGINTFVLNPLLIKNFAKQSLRKTKTDKKCALTIAQFVKEKKDILEQLTVSQDLQDLRDIARERESLCQQISSSKTEMKRLLQTLFPELETICSVTTKIMLNFLKEFPSARSVMMAKPRAIAKALKQRGAGRAISSFTPEDVINKARSSVATISPAKEFILKGKIATIEHLEQRRDELTRVLKEYCQAAVLEDLDIITSIKGIDKGTATTFLAEIGTISSYASCKKLIAFAGIDPSVKQSGKFIGMSTLSKRGNRHLRRVIWLMTINVIQHNKTFRAYFMKKKKEGKHFKKAAFATAHKLIRVIFALLSQRNHFKENCT

SEQ ID NO: 152816 - protein, 319 aa, unidentified
MDNLSHGRVIGIDVSRDWLDLHCLPDGHRARMPNAPAGHAAVADLARDRDAIVCFESTGGQEWQLWALLEAEGVAARQVPPAQVKAFAQSRGTRAKTDRIDAELIARFFVFRPEAGRGLPAEKRLILRALTSKRAQLVEMRKRLLAQIRAHQKLGTAVMFEDVDRELKQRIDGIIEELEDRITRAIASDDHLSEMAVVLRSIPGIGPVASSMLIAEMPEIGTITGEEAAALTGLAPVAHDSGTLRGKRAIAGGRRALRHVMFQAALVAAHHNPNLRSFAARLRKAGKPHKVIITAVARKLVTIANALCKSRQKWAAPTL

SEQ ID NO: 152817 - protein, 391 aa, unidentified
MSMYFIGIDISKYKHDCCIISAANQKVVSKVIIKNNKAGFNELLTIIHSLANPADIRIGFESTAHYALNLELFLENSLLTFMEVNPVLISEYKKSKTLRRTKTDSVDCESIARWLMTVEYKPHSKGFYHAYSLKSLTRLRDKLIRQRSFYLVKITNVLDHTFPEFKPFFNERLSKTALYLLENYGSAEKMARMNSASYEKLRSVSRGKFSPQQFPRLKELAANTVGVNNSIFDVELNSLLSLYKSLVKEIDTIEKEINKLIEEVHPHYMSVPGIGPLSAAVIYSEYGDISNFTNPGQMLAFAGIEPGINESGTESHGGKMVKRGSSQLRYTLINCCLPLIRFDMTFATYYAKKRGEGKPHRVAITHVAKKLIRVIYALERQDIDFNAQKLR

SEQ ID NO: 152818 - protein, 351 aa, unidentified
MSEYIAFDSHKRYTWVDRQDHSTGETRCHRLEHAPGAVRNYLSGCEPGTAVAVEATGNWYWIIDEIEQAGLQPRLVHPRKAKLMMGLTNKTDKLDAQGLNRLQRNGTLPTVWIPPGPLRDLRELTRTRLVLVAQRTRLKNRLSATLAKYGVPASEYSDPYGKRGRAELENHLKSLPEQTHWVSRQLLAQLDFVGAQVKELEQRLGNLVEITPEMQWLLTMPGVGVILAATIALEIGEIQRFPSAMHLASYSGTTPRVHASGGKVRYGPLRVDVNRYLKWAFVEAANSVAVNHVRCPDRHVSQLYRRLRQHKGHPKAIGAVARHLAEAAFHVLRQKEMYQDPSLGRGRTSQA

SEQ ID NO: 152819 - protein, 334 aa, unidentified
MDKVTTVGIDLAKRVFALHGVDGAGRVGLRKTVRREQLMQTVAALPPCLIGMEACSGAHEWARRFQGLGHTVRLMAPVFVAPYRKSGKNDGNDAEAICEAVSRPNMRFVPIKSAEQQAVLSLHRVRQGWIEERTATINRLRALLTEFGIVLPNRAQHVRRGARAAAEALPELARRAVEDLHAHLGVLDERITAYDRELEAQARSSEAAQRLMQIRGIGPLTAVAMVATVGCARDFRSGRQFAAWLGLTPRQHSSGGKTRLGHISRRGDAYLRCLLVQGARSVLLTAMRHSDRLSRWALSVQARRGYHKALVAIAAKNARIAWALLSKNQTLQTA

SEQ ID NO: 152820 - protein, 285 aa, unidentified
MCAGPGMDVHQKSTTFCLFDPSAEKDRQYRTVTRPTTEEEIRQTLAPLGGQCQVAFEVGTQAPWIAAIVRPLAADVQVANPSRIPWLFRDGRKNDRLDARKLVTLLYLKQLPTVHLPKAEVSAWRALINHRRKLVTQRTQIKNQILAILRAFGHRCPFKNLWTFRGQVWLESLVFDEARTLMITTLLDELTFFDQKIGVLEGKLDGIAQAQPNVALLRTLPGIGPRTAEAIAAFTDRVERFKGRRPFASYFGMTPTEDSSGGVRHFGHISKRGPSVVRWVLVEAA

SEQ ID NO: 152821 - protein, 346 aa, unidentified
MKKIFIGIDFSKEKFDATVIKAEGVEERAERQHEVFDNKVSGFRRLLRWVKSVVDEPDTGLWLFCGENTGGYSRALCNYLYGSGYDMWLENALSIRRSSALQRTKSDKADAGIIAEYAMRNYDQMRLYKPLDKNLERLREMFLYRHNLVKLKASMTTRKGEKKLTQEKSDISRFMAMSSKHLISEFNKKIAECDMRIEKIISEDENLRKNFEIITSVPGVGTQNAVCLMVYTDNFNRFDYDSRKIACYYGVAPFGRQSGTSVNTPPHVSPFANKLIKALLTQAALASINFCPQMAIYYHRLVETGKKKPVAVNNVKNKLLHIITAMVRNGEKYNPDHDYYAALEAA

SEQ ID NO: 152822 - protein, 363 aa, unidentified
MFIERTSVGLDVHARSVAAAAIDGVTGELFQTKLTPSYEHIWSWLSNLPGPIAVAYEAGPTGFGLYRHLTAAGLRCEVVAPSKLQKPAGDRVKTDAKDAVHLARLLRIDEITTVSIPTVDQEAARDLVRAREDCRGDLMRARHRLSKLLLRHGIVYYGGRAWTGKHDAWLRTEALAQLSARATRLTFDSDYETVLVTKARRDRLDAAIEEMAATSEFTPLVRRLGCLRGVGTLTGFALAVEIGDWHRFTGNTIGSFVGLVPSEHSSGQSKAQGSVTKTGNGHARRLLVEAAWHHRPRYTVGKTMRDRWDLAPAAARVRGDEGNRRLHHRWVKFIDRRKRGTIANVAIARELAGWCWSLAVLED

SEQ ID NO: 152823 - protein, 412 aa, unidentified
MSIALPNQQFVGKPHKILHNSIDSLTTAVSKIKEAEELYSLESRIFLESTRIYHYPLFCYLRDKGFNCSVINPIITKNSTNINIRKVHNDRFDSKKAALVGLKPDLKVSLMPSDLALNCRNLCREYYDLMDNRSAYVNKLQGELRMAFPQYLGIFSKVTINTSLTLLETYTSPSAFLEADKQEIIDIIRSTARFGLTYAQNKYNAIIQAATDANQFGYIIESNIKRIRLYISFIRKYDEEINSILESLHELVDANEDADFVKQIHLIETFKGAGFLSAVSIMGEIGDFSAFSKPKQLFAYFGLDPAVKQSGKFEGTKVQMSKRDSAIARRVIHTLTLQSISISRNGEAKNPVLREYYLNKCGSKPKLVAMGAVSHKVCNMIFAILRDNKPFKIIAPQEHIKQYNAAKCDIAA

SEQ ID NO: 152824 - protein, 371 aa, unidentified
MQETSRVFVGLDTSKLKISVALAEEGRQGEVRFLGGIDNIPNKMKRLVRKLSGKYLQLLFCYEAGPTGYGLHRQITALGHDCSVIAPSLIPKRSGEHVKTNRRDALTLARLHRAGELTPIWVPDLGHEAIRDLVRAREAAMEDLREKRQQLQSFLLRHGRLYPGLRSWTLVHARWLSSLIFEHPAQYLVLREYRQAIEDAEARLKRLTQQVADVVSTWSMAPVVEAYQAMRGVAFLTAVTFVAEIGDVRRFETPRQLMAYLGLVPSERSTGEQVRRGSITKAGNPRARRVLIEGAWTYRYPARLSRPLQVRQESLPEVVRAIAWKAQVRLCARYRRLMAAGKRQTLITTAIAREMAAFLWAIGQEVQPCSA

SEQ ID NO: 152825 - protein, 340 aa, unidentified
MVHVGVDLHKRMSQIAVLTEDGELTQHRLPNDLAHLEPFFAQLPTRSPIAIEASGTWWWLVDLLERLGHQPVLSHPKETKAIASARLKNDKVDAQRLALLLRGDLLPTVWIPPASLREARELIRHRISLVWLRTRVKNRLQAMLARRNLQPTRAKRWMTVRGQQELQALPLSAIPATIREDCLALLRMLDTQIRRLDLDLQPRWGDDPRVQRLLTIPGIGPFIAIVLVLELGDIQRFPTAKHLASYIGLTPRVRASADRVRTGHISKEGNRLLRWVLVTAATQAARRPGPLRAWFRAVQYRKGKKIARVALARRLAEIVYHVWKEELDYFVVLRRGVVRG

SEQ ID NO: 152826 - protein, 564 aa, unidentified
MIGTAIPKARPLEGRSRQQRRHGYAARFDRRPRGRPGDSNQAPSPAHTLGPTDHIGEITLDGHSNRPEEDHRHAPPALSADHRPGSFLPADPAVQCSRQLSRLAGHRIGQYAHLQQCWRLVVLALILGREDGFRASGPASVVLWWSGRRVGAWVPAWPANRLTPFGLSCESICRPGPRFCGTHRQHRPDLPVLCKRPGFTGPAASGCVPSLNHRKGTAMTIVEDERAITGGVDTHADMHVAAALDPIGGLLGVQEFPATTAGYAGLLGWLGGFGTVALVGIEGTGSYGAGLARHMAAAGVQVVEVDRSDRQDRRRQGKSDPLDAVSAARAAQSGRAAGAPKGRDGAVEAIRALMVARRSARNERTQAINQARSLIVTGPDDLRARFARHTPAQLVTGLAALRPRPGDVPGYATRIALRELGRRAQFLDAQIVYLDELIVPLVTARAPSLLALYGVGADTAALLLIAAGDHPERLRSEAAWAHLCAVAPIPASSGKVRRHRLNPGGNREANHALWRIVITRMSAHPATRAYVDRRSKEGLSKKEIIRCLKRYAAREVYRHLRAGG

SEQ ID NO: 152827 - protein, 375 aa, unidentified
MKHFIGCDVHTRNQVVAWIEDETGEIKKRRLEHEGEEVKEFYAQFPRGTVVGIEATFPAYWFERLLGELGHELWVGDAARIRASEVRYQKTDSRDAEHILDLLRTDRFPRIWVPSLGERDLRQLLVHRMKLVRARTQVKNQLHALAISQGVCRKSKLWSVKGRKELESLALLPWATRRRKELLEALDRLDEQVRELDRAVEEAGREREEVALLRTHPGVGMVVGLAFVLTVGPVERFSNSRKLVSYWGLNPRENSSGGRQRLGSISKQGNTMMRWLLVEAAQTAARLDPQLRRIYLRLKKQKTSGVAKVAVARRLAVRLFWMLRTRNNYAQLVHMSGSPSSAVVPPTAEPKLCLGAGPPRTRRGGRTVNHGARRP

SEQ ID NO: 152828 - protein, 345 aa, unidentified
MIIIGVDYHPSFQQIAFADQGTGEYEERQLNHSEGEAEKFYRDVKLKAANVRVGMEATGHARWFERLLAELGFELWIGDPAQIKATRVRKKKTDREDARLLLKLMLEERFPRIWVPDPENRDLRQLLWHRHRLVQMRTRIMNQLQALAMNEGKRWKSKLWSGQGRADFEKLPLAPWASRRRKELLELLDRMNPTITELTVAVEQEANKRPEVQRLMTHPGVGPLTALAYVLIIGTPLRFACGKQIGSYMGMIPSEDSSGGKQRLGHISKQGSSLLRFLLVEAAQAAVRLDPAWRRRYLHLALRREPRIAKVAMARKLGVRLFWMWRKEWTYQQVVKFGSHAGQLV

SEQ ID NO: 152829 - protein, 308 aa, unidentified
MGVDVASEHLDAAAYGSAGVVRFANTDAAVTKWLRALPAGSIIALESTGRYHERLAFAAHAKGFVVYLLNPRDVRHYARGMGMRGKTDKLDAQILARYVAHEHTELRAWVPPSPELRRLEDLLRRRGTLVKHQAAIRQSVADSAPLRTSVKPLMKEFTKLLDTIDTQIAQAAADLNLDSEGFERITSVPGIGLLSGSALLGLFQRLAERGADAVIAFLGLDPRPMDSGKKVGLRRLSKRGPAEWRRLLFNAAMSASRTKAWSATYERERAKGLPRTAALNVLARKLVRVAFGLFKSGQHFDASKVALV

SEQ ID NO: 152830 - protein, 420 aa, unidentified
MHDSIAGIDVHKRVLMVVVGAVSGAAADDGSEPREPIRFVKRRFGTTTSELLHLLAWLQQHGVQEAVMESTAQYWKPVWLALERHFRLSLAQAWSNRAPRGKKTDFKDAQRLVRRPVAGELTLSFVPDAEQRQMRTVTRRRTQLTRDRVRIQNQLESLLEETRIKLSSVVTDLLGTSGRRILTALGQGETDPAKLAAMGDARLQCAPAELADALTGSVSEIHRRLLQQHLAHLALIDAQMEELSLLAADAMRQHSDAVIRLVQIPGIRVLAAQQIVAEAGPQASAFPSAAQFSSWIGVCPGREESAGENHSSHCAKGNTYMRRVLPQAAQAAVRTKNSYFQQKFQRLMPKLGYAKAIWAMARHISVVIWKILHDGAQYEERGLPTTPQAAKRRIQRLTKQLRALGYSIELKPLSPEAVVA

SEQ ID NO: 152831 - protein, 339 aa, unidentified
MNLTTVGVDIAKSVIQVHYIDVETGEIVNKPVKRAAFLDHFANRSACLIGMEACGGSQHWARKLMAMGHEVKLMPGKFVKAFVMGNKNDAADARAIWMAAQQPGKSVAVKTETQQAVLGLHRMREQLVKFRTMQTNGLRGLLSEYGEVMGKGRAALDRAIPGVLERLVDRLPAILIDTLREQWNGLTHLDQQIAEIERRLQAWLKEDKACRAIAAIPGIGLLTATAAIATMGDAKTFRSGREFAAWIGLVPRQTGSGGKVQLLGISKRGDTYLRKLLIHGARSVLFHTKEPGPWLEQIRKRRPMNVAVVAQANKMARTIWAILAHDRPYEKGYVSVKPV

SEQ ID NO: 152832 - protein, 356 aa, unidentified
MKTSIAVADRYDYVVGVDTHAASHAYAVVATGTGRLLAERSFPTTTAGRSRAATWITKHTRQTPHGVLVAMEGTGSYGATLSADLLEAGYRVVEAPTPERSRRKAKTDQIDAIAAARSTVGTDIGELRDARYSATQQALALLVAARDRATEARTAAINALHAIVRVHELGIDARRTLTPAQLAEIAAWRERPTDDLVARLARREAVHLARQAAELTGQLAANETEIEGIVHEAAPQLLEEIGIGPVTAAVALITWSYPGRIRTKAAFKMIAGTCPIPAESGNKNSRKRLNRGGDRRLNRALHLASLTRMTHDPETLAYTQKLTDAGKTRRDIRRHVKNVLAGRIYQLLENPPTTTT

SEQ ID NO: 152833 - protein, 345 aa, unidentified
MQLQTVGIDLGKTVFHLVGLNERGEVVVRKKFSRKQLLHFTANLKVKLIGMEACGGSHFLGRALREQGHEVRLMPAQYVKPYVKTNKSDYIDAEAIAEAVGRPKMRFVPIKSDDQLDLQSLHRVRERWVMRRTAVINQIRGLLLERGITVRQGRRHIDAALPGILEDASAKLSGTLRALLAQLRLELDHLQMRIDEADAVINKAAGENEACRRLVAIPGIGPVTATAIIAAISNGAAFKKGRGFSAWLGIVPGEHTTGGKQKLLGISKRGNSYLRRLLVQGARAVLQQRAKQSSGLSAWLAQLTTRVHSNVAAVALANKLARMAWAVLAKNEPYRPPVVVGAVPV

SEQ ID NO: 152834 - protein, 300 aa, unidentified
MFAVHGVNMAGKAEMVRPNVPRAKLHELIAALPSCTIGMEACSGAHHWARRFQTLGHTVKLMAPKFVAPYRLSGKRGKNDAADAAAICEAVRRPNMRFVPIKSPEQQGQLMVHRARQGYVEARTAALNRIRGLLSEVGIVLPLKADTVRREAMAQLEDQPGWVNTVIGDLLSEVHRLDERIAEYDRHVALMARHNSQAQQLLRLRGIGETTATALIAMIGSGREFHNGRQLSAWIGLVPGQYSSGGKTWLGRIAKSGDAYLRSLLVMGARAVLNAAKDKTGSISRWATALAKGDKFAIPA

SEQ ID NO: 152835 - protein, 339 aa, unidentified
MTTKMQDGFWLGVDVGKFSVEACVAPCDARTSEWAKLRVASFTHDKDGMRALEKWLAASTGQGPCLGVCIESTGVYSQRFVHAIEELGLPEVSMVNPALPVAFRKSLALRDKCDRVDAAVLALYGVVHRPEPNTRRNPMYAQLRTLYRAYEQYDEDVQRFENRLEQCMDKTVCKEFRKTIAHLKHYREKIWKKMEELIAAHEPLHRDVTLLCTIPGVGEKTAVLVLAQFGDLRKWGRGQIVSYAGLYPKVYSSGTSVNRKPRLAKGGGSRIRRGLYMPAIGQLKTKSPVAIWARELIARGKTKMAAIGAIMRKQLQLMRGVLVSGVPYSHEYEKLPISH

SEQ ID NO: 152836 - protein, 370 aa, unidentified
MNSIIYVGMDVHKASFTLSCFSVTTQETFATVKISPDAKAIKKYLDGVSLSRSEECEFVCGYEAGCLGYTLYHQLTAMNIRCVIMAPTTILRNGKRVKTDRIDAENLARCLAYGGYKSVYIPTAQDEAVRDYLRMRDDHKLMLKKIKQQINAFCLKHNKIYPGNKSKWTQAHVKWLNVLEFDGYLQDAFNEYMITYRELADKVERLESQIEQLAELEEYRDKVKKLICIKGIKTHTALSLIVETGDFSRFQSAERYASYIGLVPGEHSSSEDQKRLGITKAGNRHMRMLLIEAAQCYSRGVPATKSKDLKSRQKGASPEVIAYADKASIRLRRKYIRMELVNKKKANVAKTAVARELACFIWGMMTDNIA

SEQ ID NO: 152837 - protein, 577 aa, unidentified
MKSNTQNAKIEAITEKTLVLGIDVGSETHYARAFDYRGIEYSKKPFKFSNTEAGFVTFKEWILDIKERHEKDKVVLGMEPTGHYWFNLGKFLQDNEMKPVLVNPHHVKKSKELDDNNPTKNDRKDPKVIAGLVREGRYMIPYLPDGVYADLRTASNIRFQLQAELTRIQNRISRWFNIYFPEYKTVYGKPDAKSGILILKAAPLPEDILTLGIDGVNQIWRDAKLRAVGKARAKTLIEAAEHSVGSKEGAVAARMEIRMLLEDYESRSIRLQEVMTLIEGLVKQIPMAEKLLEIKGVGIRTVSGFLAEVGDISRFNNPKELQKLAGLALVENSSGKHKGETTISRRGRKRLRYLLFEVAMSLVAKNPEFRELHNYYTTRRLNPLKKMQSLMAIAAKLIRVFYVMLTKGVNYDPKKMVRMNHFGLSLEESKTRLIYFGRFAADNLKRQGNKPETFDFLGFTHYCSKSRNGNFRVKHKTANKKYRKKCKQMNITIRDMRFEKKKYILAKVNQILIGYYHYYGISDNYQMMDNFRKRVIQILYFWMNRRSQRKSYTWDGFNQFLKEHPIVRPRIYVSLYG

SEQ ID NO: 152838 - protein, 411 aa, unidentified
METIIPRCAGLDVHKETVEADVRRIEAGGRLHHQTRQWGTMTRDLLAMFDWMAAQGVTHVAMESTGVFWKPIFNILESRFTVMLVNARHLKQVPGRKSDVRDCQWIAQLLQHGLLKGSFIPPRAQRELRDLTRYRTQVLEEKTRTANRIHKVLEDANLKLASVASDILGVSGRAMLKALIEGEKDPVKLADFAQRKLRGKIPELEKALEGRLTAHHQFMLRQLWKQLTQEEELIAELDTRIEEETRPRAAEIERLDAVPGVDRRVAEVVLAEVGDDMKPFPSHEHLASWAGMCPGNEESAGKRRRRRILPGNRWLKPTLVQAAWATSHAKNTYLASQYRRLAGRRGKKRALVAVGHSMLVIFYHMLKEGRTYAELGGDFFDRLEPVRLTRYYVKRLEALGHSVRLETLVTG

SEQ ID NO: 152839 - protein, 350 aa, unidentified
MSECTTAVIGCDLGDKQSTLCILRADGRVERPKSIKTVREAFRTFFFARPPAHVVIEVGAHSRWVNALLEELGHRVTVANARRVKLISQNDSKSDQVDAELLARLGKADVELLAPIHHRGMEAQADLAVPKARDALVGCRTKLINTCRGLVKSFGERLPQCSGESFHRQAREYVPAALKPALEPVFQALERIDEAIRKEDKLVARLAKKYPDVEVIAQPNGVGILTALVFLLTLEDKNRFKSSRQVGGFVGLRPRKNQSGEDDPQLRITKAGDPFLRRLLVQCANYMLGPFGRDSDLRRWGLELARRGGKNARKRACVAVARKTGVLMHRLWVTGEVYEPLGYSAKRLAA

SEQ ID NO: 152840 - protein, 403 aa, unidentified
MVKYHIGVDVGKDRHRVCIRDLSKDMYCKNFPVTNDRDGFAALITVLERLSSDKSDFLIGVEACPYALNMSYFLLAMGFSLVEINPFRAGQFRKAQGKKAKTDKIDAHTISAILSLDNHKPLSIPDPILDNLRELTRFRVDLVNEKSTMIIHLQEALSVLFPEYGKVFRQLDSAGSLALLATYPGPEYVISAGEEAVGKTLSLASPHRMSRGMARRIIEAAKCTVGVVQRQQSLGIKISILAKRIASLQSTIQDLDKQITALFDSLPNKPQGFPVGRAPSLATIIAEIGDIHQYPTLKKFLSHLGWCPQSFQTGNYSLKHPKMSHAGNKYVRRIVWMLSIFAIQSVPRYRDYFQRRVGEGKAKMHIIVAVGRKLLSALYAVLKTGMAYDPNWEVNGRLALARR

SEQ ID NO: 152841 - protein, 314 aa, unidentified
MTISSAAGVDVGRDWLDVAIAPSGRHFRIANTPTIVAGLPARLRRAGVERVVLESTGAPAALLVRTLAADGMPTGVVDPRRIRALRAAEGRRAKTDRLDAGLIARFALMMTDAAHPAPTPAMLELRALSTRRRQLVEMIAAEKTRLKQAFEPVILDSLRQTIRRLGEEREQIEARIEARTRATAEDRRKGELLRSIPGIGPTIAATLMADLPELGARNNKAIASLAGVAPHIQQSGAQAARAHIQGGRPCVRAAFYMAALSAVRHNPGFKADYQAMRNAGKPAKVALIAIARKLVVAANAIIKHDTPWENQKQA

SEQ ID NO: 152842 - protein, 389 aa, unidentified
MLDEAGRIIEGRRYRHDERGITALCRRLVRLGVELVAIERPDGLLIERLLDADLRVIAIHPNQVAAMRPRFSAAGGKSDSFDSFVLAELARTDSHRYRILVPDSDQTKALRALTRAREDLVGTRVALANELRAQLQCFWPGAAGVFSEIDSPIALAFLKQYPTPAATRGLGEQRMARFLARHGYSGRKPPRELLGRLHDAAQGRAGTLETQARGQIVLALVAALGPIVAKIAQLTKEIRRALAEHQDGATFRSLFKDPTSAITAATMLAEIGDCRERYPTKATLAADSGQSPVAVESGKSKRARYRWACDHRLRNAIGTLADSSRHHNPWAQDIYQRAIARGASHPHAIRILGRAWCAVIWRLWHDHDTYDPKQHTALQHLLATQTATA

SEQ ID NO: 152843 - protein, 348 aa, unidentified
MTMTIVEAARAVTGGVDTHLDVHVAAALDPLGALLGTERFETDPGGYKALLTWLESFGQVTKVGVEGTGSYGAGLARFLRRADVEVIEVDRPNRAERRRSGKSDPLDAVEAARAALGGRATSISKSKDGAVEAIRVLVVAKRSARGARVKAVVQMRHLVITAPDQLRCRLKGLSVAGLVAESARLRPSRSGDPVMAAHKASLCSLARRIQGLKDEIAELDERIERLLVRTAPELLSRFGVGPDTAAALLVSAGDNPERLHSEAAWAHLCGVAPIPASSGKSNRHRLDRGGDRHANSALWRIVMVRIAHDPETTAYFERKVKEGRSKRDVIRLLKRYVARELYRCLPRG

SEQ ID NO: 152844 - protein, 339 aa, unidentified
MTIVGCDFHPGWQQVAVFDSSTGEIRELKLGNANGEAEQFYRGLPVPALVGFEACGNTQWFEDMLDRLGHEVWIGDAAAIRASYVRKQKTDRRDAGHILRLLMEDRFPKLWRPSATERDLRQLLIHRHRLVGIRIRVKNGLHHLMLNKGIQLKRKLWSEAGQKTLRDLPLDGWAAQRRKDLLHLLGNLDPQIAELNTAVEQAAQQNPRAQLLMTQPGVGPITALAYVVTIGEPTRFQRGKQVASYLGLIPSEYSSSNRRRLGSISKQGNSFLRMLLVESAQTVNRLDEGFRKQYKHRCHHMAKGTAKVAAARKLAVRLYWMLRTNTAYPEIARIESSPR

SEQ ID NO: 152845 - protein, 431 aa, unidentified
MKTDQESTVVYAGYVGLDWSSKEHVFCIYDCATAKRTKRKIPNDPAALLAFLAELRVLFGGEPVLLGLEATRASILPILLQHDFLQMILINPKTASDFREMFRPSCAKSDDLDAYYTCELIRAHSDQFRIWEPHDPLTRQLNACVEHRRELVDLRTQVANALHSALSASFPQLLELLNSQLTTSMAAHLLERWPTLEAAQAAGVDKLRSFFYKHNVRTSDKLEERLKKLAAAKPLLVCAEDREPAGMFIKALATQLGQLHRSIDRFETKIAELVEKHPTAKLFKDVPGAGPQLRPRLAAVFGTQKNRFATAEDLTTYTGIAPIKQSSGETSVTCARWIRPIFIHQTWIEHASCSIRKCAWARGLYEMKREAGKTHFQALRAVAFKWIRVLHSCWVKDTPYNESIHLQNLQKKSPQLWQRLQELQKKKAVNN

SEQ ID NO: 152846 - protein, 352 aa, unidentified
MSEITTVGVDLAKEVIVVCASNAAGAVVLRKQLSFSAFAAWAANIPGCVIGMEACSTAHHWVRVLASLGHSPKLMAAEVVAPFRMSRGAKNDHNDAEAILVAVQQPTMRFVSPKSIEQQAMLSWHRARAGFLQERKSLLNRTRGLLAEFGIWVGRSAAVLIRKMPELADEPRLPDLFKPILLHTLDHLRQLDQRIEECDARIAEHARQSEDPKRIQQLSGIGVLTASAVVATVSDAGDYRNGRQLAAWAGLVPRQNSSGGKSRLGKITKRGDSYIRGLLTQGARSTLQSALKRQAHQRSRLQQWIVALHGRVGYHKTLVAIANKHLRMIWAILAKGEDYDPNAWRRYKQSAA

SEQ ID NO: 152847 - protein, 350 aa, unidentified
MSKITTLGIDLAKSVFQLHGINLAGKVVLRREVRRAQLMKTIAQLAPCLIGMEACGSAHYWARRFGEHGHQVKVMSPQFVKPYRKSDKNDRNDAEAICEAVTRPSMRFVAVKSVEQQDMLTLHRVREGLMKERVALINRIRGSLSEYGIVIAKSASNLRRELPGILEDAGNELTVMARQIFNELYDDLRAREERIAQVERSIRTLGSHHEVVRRLESVPGIGFLSATALFGTVGDAKQYKNGRQLAAWMGLVPRQSSSGGKQRLFGITKRGDKYLRKLLVHGARSITTRAEHKPQPQDHWLNELRVRRGKFRSYVAQANKTARIAWVIMAKGEVYKAPTETLETSVAAAA

SEQ ID NO: 152848 - protein, 338 aa, unidentified
MAIVNVGIDLAKKVFALHGVNEIGQTDLRRPSVPRAKLHELVAALPPCTIGMEACSGAHHWARLFAQHGHTVKLMAPKFVTPYRMSGKRGKTDAADAAAICEAVQRPNMRFVPVKTVEQQSRLMVHRTRQGFVEARTAVINRIRGLLAEFGIVLPQKAQVVRREAARHMDSLPGLGKIVIEDLLAEIRHLDERTKAYDAHVRSMARDCTAAQQLMQIIGIGEVTATAIVAMVGNAREFSSSRQFAAWLGLVPGQYSSGGKTRLGRITKAGDAYLRGLLVMGARAVLNAAGAKDDAVSRWAKNIALRRGYWKAVVAVAAKNARLAWAALTKGESFTMPA

SEQ ID NO: 152849 - protein, 344 aa, unidentified
MQITTIGLDLAKSVFQVHGIDAAGQVVVRKSVRRAQMLAFFSKLPPCLVGIEACGTSHYWARELIKLGHEVRLMPPAYVKPYVKRGKTDAADAEAVCEAVTRPTMRFVPVKSPEQQAALSMHRTRDLLVKQRTQLINMLRGLLAEFGVDIPKGLERALLMARQVIEGNAPEVPIEAARIATTLSQQALDIHVRLRQIDRDLAIWLRGNDVARRLMTIPGIGTVGATALVASVTDPHQFRSGRQFAAWLGLTPLQKSSGGKERLGRISKMGDKYLRKLLIVGMTSLVRRAKYAPDKIDPRLADLLARKPTRVATVAMANKTARVIWAIMARGETYRTGHQPALAA

SEQ ID NO: 152850 - protein, 358 aa, unidentified
MNRNTGMNAGQIIGTMNGMQVIRLDIAKHVFQLHTVDMSTGEIINVQIKRDKVLAHFVNKPACLIAIEACGGAHHWARKLTQLGHSVRLLHAKVVRPFVSGNKTDATDARAIWLAVQQKDTKLVGIKTVAQQATLTLHRQRELLMKMRTMQTNALRGLLYEFGATFAKGTNALFKDIEQALDALSEQLPQMVRDSLREQVARIKALSQDMLAIEKRLTLQLKVDPQMQRIAQIPGVGVLTATAAIATMGEASAFKSGREFCAWLGLVPTQTGSGGKVRLGPISKRGDTYVRTLLIHGARSVLAHAKAPGPWLEQLQTRRPANVVIVAQAAKMARTIWALTAKEKDYQRGFKSVRPIAA

SEQ ID NO: 152851 - protein, 352 aa, unidentified
MRTSQKAAGIIATIGIDIGKNTFHLLGLDKRGAIVLQQKVSRGQLERRLANIPRCLIGMEACSGAHHIGRQLAAVGHDVRLIPAQYVKPFLKGHKNDYRDAEAIAEAVQRPTMHFVAIKTPEQLDLLALHRVRSRLVGQRTGVINQIRGFLIERGITVRQGPVPLRKALAEILSSDTGVLSPRMVGLVTDLVQDWRRLDERIAAVSAEIEALAEQDDGCQRLMTVPGVGPIISSAVVAAIGNGAGFKQGRDFGAWLGLVPKQESTGDRTILGKISKRGNKYLRTLFVQAAHVVLARRPSAAMRGLWPWIEQASKRLHRNMLAIALANKLARIAWAVLARGRAYQPRITADAA

SEQ ID NO: 152852 - protein, 352 aa, unidentified
MIVLGADTHKRSHTIAAVGATSGELLGEQTVPVGRRGFGALLVWARSLDGERVWALEDCRHVSGSLERFLIERGERVLRIPTHLTAKARRSARQRGKSDAIDALNVARAALQEGLDTFPAAHLHGPELDLRLLVDHRERLVRHRVELNCTLLWHLHDLWPELRLPGGALFSKKWATRIGRRLARAEQTMRVRIARDELRRLRELTQAINQLEREITGLVAQIAPQLLSEPGFGPLTAAKLVGEIAGAQRFATSAKLARAAGVAPIPASSGNTQRQRLDQGGNRQINAALHRVIVTRARCHQQTRDYLERRRREGKSTREAIRCLKTYLARRVWRLLQPPHPAEQNPLSPSIS

SEQ ID NO: 152853 - protein, 388 aa, unidentified
MTSSHIIETLAAWPQHDTLFVAFELGKARWKLGLAVPGGRLSRYTLEGGDAEEALRLIAKTRGKLERQLGRPVPVVSCYEAGYDGFWLHRWLVARGIDSRVLDPASIQVDRHKRRAKTDRLDLEQLVAAMMRHCWGDRFACKVVHVPSPEQEDDRRPSRERDRLVNERTQHINRLKGLLHGQGVRDALPRAKQFCAWLGAVRTGDGRLLPGHLLAELEREHARLMLVEAQIAEIENQAEAARQAVPAGSVGAKINQLIELKSLGPASSNTLAHEVFFRDFKNRRQVGSYFGMTGTPFDSASRQREQGISKAGNARARSAAVELAWRWRRYQPGSALSRWFEARVGHHKGRIRRIAIVALARKLMVALWRFLEHGVVPEGAILRATSRA

SEQ ID NO: 152854 - protein, 436 aa, unidentified
MHREFAQVAVWEDGVVRQVGQIALTDEALRIFADSLGPEDEIALEATCNTQAIVRLLEPHVARVVVSNPQKTRAIAEAKVKTDKVDAEVLAQLLAADYLPSVWVADPATQALRRHVARRAHVVRQRTRLKNQVQAILHRNLIPRCPAADLFGIKGRCWLANQPLPPDEALTVEALLRQLDFHGQELRIIDAELGRVALGSPEVKRLMTIPGVDATVALSIVAAVGDFRRFRRPEQLVSYLGLNPRVKQSGGQPASHGRITKQGRAHARGMLVEAAWVATKTPGPLRAFHDRVRSRRGMQIAVVATARKLAVLCWTMIERSEDYAFARPSLTDKKLRALELRAGMPSRRGQKGKAAAYSLKEVRRRERELAEQAERAYRQLVADWQTKRLTQPKPKAGRGRRQWDATEKALSGASCAAGISPRTCASLGVDHALSKP

SEQ ID NO: 152855 - protein, 445 aa, unidentified
MSTYYLGCDVSKGYADFIILDREKKIIEPVFQLDDTFEGHNQFYRFLQVFFKQYSGSTLFSAVESTGGLENNWLSLFKKLSDIMNIKSTRINPVGPNALHKASLERNSNDAISAKLIAEYLITYPEKVNYNVNDPYVSLRKQWNLIEMYKKQKTQLLNQLNILLYTSMPFLIKYCKDGIPNWLLFLVNKYPSPSQLARAKESTLAKIPYISHKRAQLILSDAKQNVGSVDDEATAFIIKSSVEQILNLKNKIEQHKKYMITRCDLPEVKLLQSFKGIGVYSAIGLVLNIVSIDRFPSAKHLASYFGVHPVYKTSGDGTSGFHMSKKGRSAPRQILYMVARSSIIHNPLIIEVYINHLKRGNTKSSALGVCMHKILRIVFGILKHQQEFDPEIDKQNRNNSRIIKKNNTGSDSKRRYQEKSNDAPVSRRQSSKRRKRKQSQNLLEV

SEQ ID NO: 152856 - protein, 348 aa, unidentified
MSQIIRVGMDTSKSVFQLHGVNAAEEVVLRRKLRRKDMVAFFERLPPTVIAIEACGGSHHWARLLSSLGHEVKLIAAQLVKPYVKRGKNDAADAEALCEAMSRPTMRFVAVKTVDQQAVLMLMGVRDRLIRNQTQLSNAIRGFAAEFGVTAAKGTAHLGSLLERLQGDENLPDLARELFSSQATEHAQLQVKIAEIDAKLAAWQKAEPRCHRLMKIPGIAAIGAALLVMKTPTPEMFSSGRQFAAWIGLTPKDHSTAGKVRQGVITRAGDESLRSVLVAGATAVVRHVAGGTSKNAFAPWVMQLLKRKAPKLVAVALANKMARIAWKLMATGQSYARKSAPVTVANTA

SEQ ID NO: 152857 - protein, 359 aa, unidentified
MPRSVPTNTEVITLGADTHKDIHVAVALDGLGRRLGTLSVPAIPAGYENLVNWARGFGPLERAGVEGTGSFGAGLTRFLQEAEGTKVFEVIRPKRRDQYRSGKSDPIDAEAAARSVLAGTAIGQPKDADGEVEMIRTLRITRRSALKARAQAANQIQALLVTAPEGLKSELCELSTARLIEKASRLRPGATLSDVEAATKFALRSVARRYQHLSKEISELDERLNRLVSEVAPQLVAVEGIGTDTAASLLIAAGDNPERLKNEAAFAHLCGAAPIPASSGKTVRHRLNRHGDRDANRALYVIAICRMSCDKRTRAYVERRTKEGKSKKEIIRCLKRYIAREVYRILASLSLNKPPVPVP

SEQ ID NO: 152858 - protein, 343 aa, unidentified
MKITRVGVDLAKSVFQVHGVDRHGQLVWRRQLKRSNWLQVLTETLEPGCEIGMEACGGSHHWARQLQARGFKVKLISPQFVKPYLKSLKNDVNDAEAICEAMSRHHMRFVAIKTVEQQDIQALHRVREGLKQSRTAKGNQIRGLVAEYGLVAPKQMGALRKAIPCWLEDAENGLQVAFRALLHGLWQDLQYMDERLTELDKEILLLSERHPDAKRLKQLRGIGPLTATAMVAQFGDGRQFRRGRQAAASVGITPRHAGTGGKNWISGITKRGNPYLRSILIHGARSVVNKAKHKDDRLSRWVTELAKRSHPNVAAVALANKTVRIAWAMLRNGADYDPEFTTA

SEQ ID NO: 152859 - protein, 435 aa, unidentified
MRSIGLDVHKHFAEVAIVEPGQGIVSRQRLPVSPASLRQFAAGLGPDDQVVLEASFNTWAVADLLAEHAGRVVVSNPSKTRAIASAKVKTDKVDAGVLAHLLAADYIPAVWVPDDATRTLRRMVAEHRGLVVQRSQIRNRTHAILNRNLVECPYTDAFGRAGRRWLTAAPLPEPERREVDRLLRLLAALEREIEQLEIELAQARLQDAGLRHLVTVPGIGLITALALLAVIGDVKRFERPNRLVGYLGLDPRVHQSGDRPAYTGHISRLGQAHARGLLLEAAHSAIRVPGPLHAFYERVRSRRGTQIALVAVARKLVTLAWHLLTKDTDYEWVRPSLKAQKWRLVELRAGLPKGAVHGIWTRANRDQEDAILRQAEAAYRTLVAARRQQTDAVAPMRKRLEGQRPDARRRSHPQPPLFSRGSTASAASIVPGKTG

SEQ ID NO: 152860 - protein, 357 aa, unidentified
MEKRLKQSLGIDVSKLNLSLSLGFLTDKLEKEFKSHPDVPNGLSGYKELLKWLNKSVDNSVELLVVMEATGAYHQGIAHYLHAKGYAVRIMQSGRVKRYAQSLGQRSKTDALDSKMLSMPGLERSIRPWRPPSKELQGLKALSRERSSLLKDRPTETNRQGAIDSGVHDSPEALKGHRDRLKLLNGQIEMIEGDMKEIISKNEALERKVGFPTSIPGISFISAATVVGETLGFETMTNAKQLASYAGYDVALRDSWNFKGKTRISKKGNSHIRAVLHMPSMACVRCNPTLKKFYNRLKSKKARPLVALIAVQRKLLILMYTLWKNEEVYDEAFETKKQQRHEALAARDNNLIAQIVS

SEQ ID NO: 152861 - protein, 339 aa, unidentified
MREVSTIGLDLAKNVFQVHGVDAAGETVVRRVLRRARVVVYFAQLPPCLIGMEACGTAHYWARELGKLGHRVKLIPPAYAKAYVRRNKNDAADAAAICEAVSRPSMRFVEIKSEAQQAAAGIHKVREMLMKQRTMLINALRGLMAEFGIVVGTGTRHVGELTAILVDPEEHRIPALLKDGLRRMAETLRGLERQLQGIDKQIVDWGRGNTTCRHLITAPGYGPILSSAMAAIVVNPAVFRSGRDFSASLGLVPRQDSTGGKVKLGPISKRGNGYLRRLLVNGAMSVLNSKRAKQDPWLVKLLADKERKVAAVAVANKMARVGWALMMRQEDFRATSTAA

SEQ ID NO: 152862 - protein, 351 aa, unidentified
MDTTTVGVDLAKNVFVACVADCAGRIVERREFNRVGFLTWLGTLPAGTMIGMEACGSAHHWGRTAQRLGLAPRLMAAEFVRPYRKRQSVKNDRADAEAILVALLSPGMRFIPVKTEAQQQRLAWHSLRVGWVEERTALLNRVRGLLAEFGLIVDPGPKHLRALLVEREFDTALSPALRGLIQSVRDQLDALDTRIGECDRQITAQQANDPLAKRARDLPGVGLITADAVTASVGDASMFRNGRQFAAWLGLTPSQSGSGGKTKLGRITRRGDDYLRTLLVQGARSVLAATLRKQRRESPEKLTRLQQWIVVLNGRIGYHKTLVAIANKHARQLWAVLAKGESYNPQAWQRA

SEQ ID NO: 152863 - protein, 350 aa, unidentified
MTVYIGVDFHARQQTISYLTTEDGEIKREELDHGEPAKVRKFYEQFAGQQVVVGFESSGYAAWFEELLEELGYEIWIGHATAIRSFARRRQKNDRRDAELILELLIDGDFPRIYRYSPESRAVLQELRYRQRLVKMRTMVMNSLLYMATSRGVALRGQLRSKRGLARLQQIPLPATLAAQREEFCHLLLELTARIEKVEGSLEAQAVRDIRVRRLRTHYGIGLLTGLCLVHTLESVERFANPRKVTAYVGFDPVEDSSGQRRRIGAISKQGSRLLRFLLVEAGQIAVRKDAELAQCYRRVQVRRGHAKAKVAVARRLLVRAFIMLRDEIDYAEFQRRASQLGLPEESHRP

SEQ ID NO: 152864 - protein, 319 aa, unidentified
MESWRDVSKQTAMYVGIDVGKSRFDVTFGVGGRVEAFNTDDEGIAQLVERLSKEQVALIVLEASGGYERQLLASLLGAHLPAVAVNPRQVRDFAKALGKLEKGDNVDSGVLAVFAERMKPEVHPPIDPALEEVKQWLDRRRQLVEMLVAEKNRTHQARGGVRRDINAHIDWLKRRLRDMEKELSDMMKNCSAWDAKVQLIDEQRGLGRLSSMILVASLPELGTLTRRKIAKLVGVAPLSNDSGKHRGQRTTWGGRGAVRAALYMVTLAAVRCNPTIRAFYKRLVARGKLKMVALVACMRKLLTILNAIVRDAQPPITLP

SEQ ID NO: 152865 - protein, 353 aa, unidentified
MTVYIGVDLHPHQQTVAWCDTETGETETVELHHDLEKVREFYSSFNQPAIIGIEASSRAGWFENMIDSTGHTLLVGDAYKIRKRSESRHKNDRRDAELILNLLLNDKFPAIWRRSKEQNEILDILRVRLKLVGHRTAVYNRLQSLAHSVGLPKGKMKNVSFQDRLKAADMDEAGDLQRRHLFELLESLTRHISELERWLRDKAKKDDRVQLLLTQKGVGYLTALALVNTIGDVSRFDRVPKQVTNFIGYDSMDKSSAGKRRFGAISKAGSPLVRFQLGQAAQIAIRYDPKLKAFHKRLARRKPKAVAKTAAARKLLVKLSIMLRDNISAQEFDRRGSAVGNARRSAGSEMTDA

SEQ ID NO: 152866 - protein, 370 aa, unidentified
MGESTTFVGLDAHKKTIEVAMFLPGRNDPVEWQVVHEGASVRRMAKKIQKEAGGHVRVCYEAGPCGYALQRTLQDLGLECVVVAPSLIPVKPGDRIKTDKRDARKLAEMDRAGLMTEVHPPTAGEESVRDLCRCREDAKADQLRARHRILKLLLRRGITWEGGKSSWTKAHRAWLRSLSFDHPADRIVFNDYLLALEHLDERVRGLDAAIQAVAQQEPYKEPVAALRCFQGIDTTTAMTIVAELHDFRRFQSPRELMAYLGLVPSEHSSSERRRLGSITKAGNSHVRRLLIESAWHYRHPPRLGPKLILRRQGQSTAVIAIADKAAQRLYRRFTRLQARGKPLPKVAVAIARELVGFVWSVVYPASSKLA

SEQ ID NO: 152867 - protein, 402 aa, unidentified
MVDEIRWDEKAGLRRDAIRSQVIDVLEAQIKRKPAMKKVSTRAAAQSRNISQQKLTIGLDLGDRNSWYCVVDEAGQIQREQRVHTSGKALQEVLGAMPRSRIALEIGTHSPWISRLLSELGHEVIVANARKVRLIGESRKKDDRLDAQTLARLARIDPELLYPVKHRSAQAQADLTLIRARAGLVRARTGLVNTARGLAKSYGERLRSCNVRNLNPEKAESLSPELQAALEPLLNAMESLSERIVEYNERLENLAQQSYPQVALLKQIKGVGTLIALTFLLTLEDPHRFGKSRDVGCYLGLQPGRRNSGQSEPQLHISKEGDPYLRTLLVQGAQHILGPFGIDCDLRRWGLRLAERGGQSGKKRAIIATARKLAVLLHHLWVSGEAYEPLHNSSRTTVAAAA

SEQ ID NO: 152868 - protein, 344 aa, unidentified
MIYYAGIDVSLRTVNICVINDDGELVAETKLASDVQDIVAYLDDLEFDVESIGLEAGTLTQYLTYGLQAAGFDVVVMEARQVKGALSAMRNKTDKHDARGIAQILRSGWYSRVHVKSMASHHIRMLLSSRKAILSKCVDLENEVRGLFKIFGIKLPPKLGHGAFDPAVRDIIEAGETLSHALLPLLDARLVLYHTFRELDNRTRKMAHADPVCVRLMSVPGVGFITALTFKAGVDDPHRFKRSRTVGAYFGLTARRFQSGEMDIDGHISKCGDADVRGTLYTAANALLTRSSRWSPQHYKRMKLAKTRGHRRAVIAVARKLAVILHRVWIDDTQFRWGTEGARS

SEQ ID NO: 152869 - protein, 336 aa, unidentified
MSYIGIDLHTTQITVCYLKTAEDYQFKKYRLDEIEQFLAELEQTDQAAVEATGNTRWLVNLVKEKVGRVVIVNPREFEVIKQSVKKTDKQDALSLARFLAVDMLPEVRAKSEESETVQRINETRTKFVRLKTALLNKIHALAVSTGRKLKKESLGSERGLEKVLSVEWTASERVELEIIIEQIRALKTGIGKLEKVLEEQSKQMTGFKNLITVTGIGARSAGVLLSVIGEVADFADENKLASYFGIVPKVANSNEKVSHGRITKRGSKTGRTTLVQCTLVAIRHNAYLKKYYEQVKARRGHGKAKIATARKYLGIIYNTLKNNWVFEDFNNFVLAE

SEQ ID NO: 152870 - protein, 322 aa, unidentified
MQANAVLGVDISKKKFDVCLLVGNKERYKVFQNNHDGFEKLVAWCNHHGAELIHLCLEATGCYSEDIVNFMYDLEHNVSVVNPAQIKVFGRSELLRNKTDKSDAAMIARFCIANKPNLWKPAPPEVRRLRDLYRCLQAFKDDKLQQMNRLENKNTDSHCKQAILEVIATIDTQIAALEKEINEHVNNHLHLKNITEKIKTIKGVGHLTAVAVVAEMPSVDNFDNARQFTAFAGLNPEHYQSGSSVSKKSRICKIGSERIRKALYMPAIVVKNHNSYFQKFCQRLASKGKCPKVIIVALMRKLMHVFFGILKNDQPFNGNLVR

SEQ ID NO: 152871 - protein, 363 aa, unidentified
MHEDTTVTVGLDVHARSIRLAAISADELLDERTLPYDLEALERALGRFTKVRCCYEAGPTGFGLYRHLVERGIECIVVAPGLVPQRPGERIKTDPRDARRLARLHAGGLLEPIHVPTAELEAARDLVRAREAARLDRMRDRHRLSKFCLRQGLRLPGASWGVTRRRWLAEQRFSFAAQQQAFDSYLHALDLVDARIAALERAIAESAAEGPWRECVGRLRCLRGIDTLSALGLVVEIGDFGRFASAEEFMAFVGLVPCERSSGEARRRGSITKVGNAHVRRLLVESAWHARRRPTVGYALERRQRGQDALVLERAWRCQQRLHRRWGRMAARGKPSQKIAVACARELAGFVWAIATEQPLRAA

SEQ ID NO: 152872 - protein, 375 aa, unidentified
MNNNNTLYVGLDVHKESITVAYAINSEPVELMGKIGTSPTDIQNLCKRLRSKSSQVSIVYEAGPCGYGLYRRQVKSGFDCMVCAPSLIPKKPGERVKTDRRDAIRLVRSLRAGDLSAVYVPGIEDEAFRDLARAWASARDDLRHARQRLKSFLLVHGVHYVGRADWGPAHRRWLSKYSFESPWRQLAFDEHRRTIEDRQAQCERLESALKEAVTEWRLYPVVEALQAMRGIQFITAVGLISELGDLTRFEHPRQLMSWFGITPSEYSSGGSRHQGSITKAGNSYARKLLVEAAWSYRHPARISPAIQKRQENLPRPVIDRAWDAQLRLCKRYRKLQAKGKNVNITIVAVARELAGFIWDMGRIAMSVAQQPQCHK

SEQ ID NO: 152873 - protein, 314 aa, unidentified
MTACWIGVDVSKARLDVFISRQEQSLGFANTAEGIEQLAQCLLQAEPTLIVMEATGGLERALVARLMLAQLPLVVVNPRQVRAFAKALGRLAKTDLLDARVLAMFAEAVRPTPRPLADEAAQALADQLSRRRQLVEMLVMEKNRLKQAADAQVRKDIKEHVQWLQQRLSASESGLRQTVESSEAWQAKRDLLAGVQGVGEITALTLIGSLPELGQLNRKQIAGLVGVAPYNRDSGTLRGKRAIWGGRAEVRAMLYMATLSAVRFNPALRAFHQRLRAAGKAKKVALVACMRKLLTILNAMLRDRRPWTDDPKAA

SEQ ID NO: 152874 - protein, 421 aa, unidentified
MTQTSHDPFAACIGIDWADAKHDGCLQAAGTAKRECFQLEHTPEAIDAWVTTLRTRFNGQPVAVCLALDKGPLVSALRKYDFLVLFPINPLMLARYREAFTPSRAKDDPTDAELQLELLLTHRDKLHPLTPQSATMRALAQLVEHRRRIVGDKVRMTNRLTSTLKNYFPHVLQWFPDKDTPIFCDFLSRWPTLKAVQLARRSTLESFFRDHHVRSPEVIARRLQAIRAALPLTTDEGGIAPHVLLVQALVAQLRVTLQAITDFDTAIAQRAQSHPDFPLFQALPGAGPVFASRLFVAFGEQRERYPSATALQKYAGIAPVTERSGKKSWVHWRLQCPKFLRPSFVEWAAESIRHSFWAQVYYQQQRDKGQAHQAAVRALALQWIRILYRCWQERTPYDEATYLQALARRGSSLLQNLAKAS

SEQ ID NO: 152875 - protein, 326 aa, unidentified
MAIIGIDISKQKFDCLWLRDVRSLKVKTKVFANRSTGFAELIDWCCAQTGETVEQLQIFLEATGVYHESLALYLHDRGVQVFVLNPARVREYARSLGIQGKTDKQDSLVLARYGATQPVRPWTPERREVRELKALIARHEALQDDLQRELNRREKAEVSGSQGVLASIDNLVQALRQEAERIRQDIDDHIDRHDDLKRDRALLQSIDGIGEVLSRHLLALLHSRDFGNARQCTAFVGLVPRPWQSGKTVEGRTVLSKAGSPLIRAKLYMGAIVAKGCNPDVKALYERLLARGKARMSALGAAMRKLLQIAYGVLKTQRPYQSRQAL

SEQ ID NO: 152876 - protein, 419 aa, unidentified
MTIQQSTPPQAALVAIDIAKNRHEILIEPGSGMRRRRLSVLNSRAEHDRLVATLHALGKPVVVGFEPTGNYHRVLAHRLIAEGFQTRLISSLALARTREALHNGWDKNDPKDAQVILHMLQIGASTVYNDPGCDRLNDLQELSKTHDMVSRAKTELWHRLLTHYLPLYFPEIEKFHGNSRSDWFLALLEQFPTPGSVTALSKEAFATAAWDLVGRKVSKTRLLADIYETARSSTALPVQLDSPAIAMFRMVLAEGRSLLRQRDQIEAQAEVLLANDPDAARLRQLPGIGPINALTILAEAGDLRRFGHHRQFLKFCGFDLATHQSGMFRGQTKLSKFGNARLRRSFWLAAQVAIRQRDNSFRERYGRYIARDPENKHLRRKALTAVAAKMARVAHAIVRSGADYRPFFDRPVPGGRTSL

SEQ ID NO: 152877 - protein, 417 aa, unidentified
MVQVVYERCCGLDIHKKSVVACLITPGPDGNPVKETRTFGTMTDDIVSLSEWLDEASCTHVAMESTGAYWKPLYNILEPLYELLLVNAQSIKAVPGRKTDVRDAEWIADLLRHGLLKGSFVPEKERRELRELTRYRTSLVQERTAELNRLQKVLEGANIKLASVASDVNGVSARAMLEQLVAGSTDAAAMADLAKGRMREKIPQLERALSGQFGAHQRFLVAQQLVHLDSLDELIARVSAEIRERMRPFEAEIARLDTIPGVGRETAEAIVAEIGVDMSHFPSDRHLSSWAGLSPGNNQSAGKSGSGRTRKGDKWLRVALVQAAKALSKSNKSYLSAQYRRLAARRGKNKATIAVAHSILVIAYHLLSRQRNYEDLGPNYFDQRNQEKIRRGLVHRLESMGYKVTLEPANEPPKEAA

SEQ ID NO: 152878 - protein, 345 aa, unidentified
MGYYAGFDVSEEVTSVCVLDGRGAVVDEARVASDPVALAGYLSRWGGELAIVGLEAGALTPWLARELVGVGLPVVAIETRRMKAYARASSVKTDRRDAKMIAQAMRAGLYRPVHVKGEEAHAARLLLSARAMLLGQARQLQVKIRGDLKPFGVRLGKVGSGGFAARLKQRLAGREDLMALVAPMLAMRAALLDEVRGYDRQIRAQATGDPVCRRLMSAPGIGTVIAFAYKASVENPARFARSADVPALLGLVPRIDQSGERERIGSITKTGDAMLRSLLFEAANVLLTRTKKSFALKRWGLRIAKRRGMNRARVAVARRLAIILHRMWADGSTFRLQEETKPLAV

SEQ ID NO: 152879 - protein, 353 aa, unidentified
MSNQASFPKLTIGLDLGDKVSRTCELDGAGKIVKTAAVATTTEAIERYFGGRPPCRVVLEVSTHSPWVSRQLEALGHAAVVANTSEIFSRRRRKRRNDKLDAEFLARQGRADVQLLYPIRHRGAEAQQDLAVLRARDQLVQARTHLINHVRGAVKSLGARIGTCDADVFAKRAPAQLPEPLRPALAPLVETIGVLTRQIRAMDRDVDRMEERYPEVARLQQPKGVGPLTALAYVLTVEDAGRFKRSRDVGPFFGLVPRLDESSDSSPQLHITKAGDALVRRYLVGAARYILGPFGPDCDLRRHGEAIAARGGKNASKRAAVAVARKLAVLLHHLWVSNAVVTRIDGTTPISRP

SEQ ID NO: 152880 - protein, 388 aa, unidentified
MPAAERPVAYLGIDVGKSSHSACALDAGGGVAFRAELANRPDDIDRLLERAGSGALVVVDQKRNIGALVLSRAHAHGNPCAYLPGYAEKQARGMFPGTAKTDAIDAEVIARTALGVPRALRPAPEEPEGTASLRILSSQREFASSARTRAKNRLRATLLEADPALEGAVDPSSRWQVSMLAEFGGAAGCSAAGWRRFSNAARRAGAPAAGARRLWEALLASSRSGRRLPAGEDVAVRMLAREIASLDADIEELDSLVADSLAGDEVYECLLTVPGIGPKTAAALVTSIDISAFRGHDELASYCGVAPSDRRSGSSIRSTSPQRGGNRQLKNLLIFSCNSLIGTDNRFGRYYGECRARGMRHSKALKAVARKRLKVIYAIMRDAVPYAA

SEQ ID NO: 152881 - protein, 347 aa, unidentified
MQILSLDLGKNKTVGCDYERESGQHRFKTAFSTRAGLAQLVKEVKPDRVVIEVCSIAGWVCDLLRELGIEVQVANTSDDAWRWRQVKRKSDRCDALKAAQLSAVNQIREVHIPNIEVRQWRALIAFRQQLVQRRTRVKNHVRDLLLREGQILPRGGKCWTQLGMVQLAAMAQPLSAVSMTELWRGELAIELRQLRAVQAEIEVAEEKLDAIGAADPRVQLLRTIPGVGPRLAEAIVALLDRPERFRKASEVSAYIGMVPKELDSGETQRRGKITRHGSRLVRSLLVEVAWAGLRHNPWVRETFQRISGGKKSRKKIAIVAVGRRLLVRCWAMLRDGTSWRWPAAKVA

SEQ ID NO: 152882 - protein, 391 aa, unidentified
MTYFVGIDIAKYKHDCFIHDHNGVVIHHSFTFSNNLSGFNQLLLTLDSLDKNQKIKIGFEATGHYGTNLKQFLKANHFDFMEINPLLIKQFSKASTLRKTKTDKIDSTLIARYLSTIDYKPTSNQSYHIQALKSLSRLRDSIDKNRSQILVRLTVVLDIIFPGYKPFFDNKLTSSTCIYILENYDSPEKISRMNTESYNKMKKKLRHTISYARFTSLRDLAKNTVGTTDNIYLFELNALLEIYKNINNKIKDIEVKIIEEYRQTHSHIHTIKGISEVSAAGIYAEFGGIHKFTNPNQMLAYAGLESSKNESGQDNFKGHMVKHGSSHLRQIIMNVVDTFALNNPVIYDYQSKKIKEGKHWRVAQTHVARKLIRIIFHIEKNNIDFDPYLLK

SEQ ID NO: 152883 - protein, 385 aa, unidentified
MAPPARPEIVIGLDVGKSSHWACVVTREGELLASKPVLNRENAIDGLYAQYPGALVVVDQVRNIGSLALSRARLAGMPRAYLPGLAAHGASRLFAGDAKTDERDAMVIAKTALGIPDALLPVADRPPEIEAARSLAAQRDFLTCENTRSKNRLRSILLESGPEVGAHADLSDPATLKLMAAVGGPWSISEASPQAVGALTRGCGRAKVAALVESVGSSSRPHPAAVACEDRAVRLLARRISENAAEIESLTSEISALLSADETYRCLLTVPGIGPRTASELVISIDIADFPSHDRLASYCGLAPRNRRSGTSISSVSASRQGNKRLKNLLVFSCNCLARSRNRWGGYYARCRDRGMPHGKALKAVARKRLKVIYAIMRDKVPYSA

SEQ ID NO: 152884 - protein, 424 aa, unidentified
MKNTAARKLKQVPEGYLIIGVDPHKKKHAAVAITQDFTLRDRFKFDNTREGLEFLLRRVRAEMVKSACRGVMFAIETGGHYWRNVAYYLDERGIPFRFINQYTLKRRREGKDLNRRKNDYRDSEVAAQLLCTGEFVESVIPQGAYAELRTSHNAYQRLVKERTRITNLMKGLLDALFPEFTHVFKDPGGLTALTVLSTCPIPGVIAGMTEDEFVATIEARHKGRRLMRKKLRALHYSARRSIGIQAGARSMSSEIAFLVDKLELIRQQIRIVEGTLVKLVDETEEGKYLLSIRGLHYIAVAGLLAELGCFKLYRSAKQMIKMAGSNPTESESAGKKRSKTPMSKQGRPLLRHCAWTAVIPMLRFNADFRAWAKQRRERPAHANPLNGREIVGAALNRLLRLAFALVNNQTYYQDTRPALIPVGV

SEQ ID NO: 152885 - protein, 387 aa, unidentified
MFKVKKTATTIQTNLAAIFVSMELSRSTWLITSLLPGNGEKMSKHTIAAGSIAGLFDLLLKLRERSQAKTGRTYPIITIQEAGLDGFWIHRALVKEGIESHIVDPASVATARKHRRVKTDRIDGETLLRVLLAFKRGEPRVCAMVRAISCEDEDRRRIGRERKALMVERVAHVNRIKGLLFSQGIAGYEPLRRDRRLRLEQLQTGDGRALPKYMRTQIGRELDRLELVIEQIKAVEDERDAFIEAQSADKTKPSPVTMLLEIKGLGVEFVNILWAEGLFRHFDNRRQVAAYAGLVPTPWQSGSIKREQGVSKAGNSRLRTTLIQMSWLWLRNQPASALAKWFKARVERNGGRMKKTTIVALARKLLVALWKYVTSGVEIEGAVMKNA

SEQ ID NO: 152886 - protein, 412 aa, unidentified
MDVYCGIDWAEDHHDIALVNRDGQLLARRRISDDAAGLAQLLDLLAEHGDTAEDLIPVAIETPRGLLVACLRATGRTVYPINPMAVARYRDRHTVSGGKSDHGDSVVLASILRTDIGFHRPLPADSELAQAIAVLARAQQDAVWDRTTAHNKLRSHLREYFPGFLAAFAEAKHGILRPEARTILAAAATPGDAAKLTAAQLRALLKKAGRSRGIDAEAARLRDAFRAPQMRQLPLVEQAMGRQTLALLGQLNAACAAADDLEHAATESFNQHPDAGIITSFPGIGALTGARVLAEIGDDRSRFQHAKGLKAYAGAAPITRASGKTKSVTHRKVKNNRLAAAGYNWAFSALTASPGARAHYDRRRDDGDRHAAAQRNLFGRLLGCLHRCLTTGQHYDENIAFPGTPEKLSQAA

SEQ ID NO: 152887 - protein, 371 aa, unidentified
MSDNAITYVGMDVHKKSIAISLLPGTGGSPVEWQEPNELRAVQRLARRLKRDGGGAVACCYEAGPTGYALLRQLTALGVRCQVIAPSLIPMKPGSRIKTDKRDARKLAELLRAGMLTEVHPPSESDEALRDLCRCRDDVRDDLLRARHRMSKFLLRRHCVFSGTKHHWGTRHMTWLSQLRFDDGASQVTFDSYFLAIQQNEERMERLDARLAEFGAQEPYREPVAWLRCFRGIDTVTAVSIVAELHDFRRFRSARSLMAYLGLVPSEHSSGESERRGSITKSGNRHVRRLLVEAAWHNRHRPGISLPLRRRREGQPDRVLAIADRAQARLSQRYVRMSARGKPNPKTVVAMARELVGYLWATLHPMSTAQI

SEQ ID NO: 152888 - protein, 372 aa, unidentified
MTSIIYVGMDVHTTNYTLCCYSMEDDRFFAEVQVEPDAKNILKYLARIEKQQSRDCRIVCGYEAGCLGYSLYHQLHAHGIDCVILAPTTMMTKPGKRIKTDRRDARLISKCLAFHTYSPVYIPTEMDDAVKEYIRMRDDANSALARVKQQIIAFCIRHGKIHDGKSYWTNKHLEWLSSLDLGNKILSEVLQEYLIRYYQLREQVDMYDMRINDFAQAEPYRQRVEKLGCFRGIAAHTALSFCVEVGDFRRFATAQQFASYLGLVPGECSSGDKQQYTGITKAGNSHLRKLLVETAQVFGRSATKSGKSVALKERQAKCDSLTVAYADKANARLKKKYFKIAMRSKANIAKTAVAREMACFIWGMMTDNISCA

SEQ ID NO: 152889 - protein, 392 aa, unidentified
MYIVGIDIGKNHHEASIVSPEGKQIGRSLRFATTHKGADSLMSFIFNNIGNSSCIFGMEATGHYWYPIYSFLKARGYTIYVINPIQSDSLRKMYIRQTKNDSIDSFLIAEVIRFGQFTTTSMADENILAIRQLCRYRDSVISSRTEIKLRISTIMEQIFPEYEKQFSSLWVSTSMGILEKYLTPDNIENAPIDELFEIIKDKSHNKLTMKKAISIREAAADTFGIKIAQDAFSFQLKQLIDRMNFLDKQIEALDCQILEYYEKFDCYLHTIPGIGMIAAATILAEIGDINRFKSSSALVAFAGIDPTVRQSGEFSSTHNHMSKRGSPYLRHAIFLAATTCSFHNSPLNAYYKKKREQGKHHLTATGAVARKLTTVIYAVLRDGKPYEPKSFC

SEQ ID NO: 152890 - protein, 357 aa, unidentified
MESQEVKYVGVDCGKKSIEVVRINSENSLERRQFSTTESGINNLLQWLTLNDIVGLEAGSQSFRIAKSILNKGVQVIVLNPGNLATIYQSLKKTDKEDSLKIARLIQRHPIEELPTVPIPNDEEEDNRRLCSEHENWTKQLTQGKNRLHSLFTQAGLTQITKKHLRTKVSREASVTLLSDRYKKEAERILKVLDLVELNLKLIEEEIQEALKKNKAYVQTIMSMPGIGMITSLAIMSYMGDCKRFSSAKQAAYYAGLVPRVDISGDTVRYGRIINRGCHSIRRVIVQAAWSLVRCQHGGKVKEFYQRLYLKKGAKKSIIATSRKMIEVLYVMIRTGKLFDSMPENILNRKLTQYGLM

SEQ ID NO: 152891 - protein, 354 aa, unidentified
MTIAKYVGMDVHKESISIAVMNSTGKFVMECVIETKASMLLQFIDGLRGDVRVTFEEGTWAAWLYDLLKPHVSEVVVCNPRKNALLKDGSKSDRIDARKLAELLRGNHLKPVYHGEQGLRTLKELARSYLTISKDVTRVMNRLKALYRSWGIACAGTKVYAPRHRSEWLGRISEAGVRRRAEHCYEQLDVLRLLRQQVRRDLLLESKKHQAWRLLGLIPGIGPIRAALLIALIQTPHRFRTKRQLWTYSGLGLETHDSAQYRVVEGQLRSKKPVTLRGLNQNHNHDLKDIFKGAATRVSSSSGPFHDFYEHLLAQGRKPTMARLTLARKIAAITLIVWKKEVRFDANELKPQAA

SEQ ID NO: 152892 - protein, 330 aa, unidentified
MKNYKEVVGIDVSKKTIDAYCYQAQVHKEFKNDIVGYKSLLNWVLKVSKGVLVFYCFENTGYYSLKLALYLNSQKIVYVEESPLKIKRSSGIVKEKTDRLDASLIARYGWIYREELSPSTVKSTAHLELGRLLALRDQLVRNNAGLKGTLKEMKVFLTSSTTDAGCISLKRSIDYLSKQVKAIEIRIEALIFDDVLMQKNYELLSSLKGVGFVVACQLIYHTGNFTRFDTWRSFSSYCGTAPFAHESGTSIKRRKQCHYLGDRKMKSLLSMASISAIQHDSELRIYYNRKLAEGKDKMLAINNVRNKLIARAFAVVKRGTPYVVLQNYAA

SEQ ID NO: 152893 - protein, 409 aa, unidentified
MPNSLLVGIDVSSTDNKVRLLDSSGNSLSKFSVANNQPGAKTLVSKIINAMTLNRFDSLVIGLEATSVYGEPLVLFLKQDADISPFRPRIHVLNPKQVNAFKKAFLDLPKTDDVDAWIIAENLRFGRINQEVYMDDRILALRKLTRARYYTARNLTREKNYFLNTLFLKFSSLAQEKIFADRFGATSLAIVEEFLSVDEIAYMPIEELSAFVNEKGKGKFGTPEDIAKLIQKAARSSYRLPKTVNDSVSQILAISLVSIRTLKDQLKLFDKAIEEQMKVIPNTLTSVKGIGPVYAAGIIAEIGDIHRFKNQAALAKFAGICWSKYQSGKYTADNTHLISSGNRYLRYYLMEAANKVRMHDPEFKRFYDLKYRETPKTPHKRALALTARKLVRLVFALLHDNRLYIPPKE

SEQ ID NO: 152894 - protein, 344 aa, unidentified
MRSVLSIDVANGKSEVLLITEHGEVLIEPYEVNHCLNELNKLKDKINSFNLDDLTIFMESTSTYHLPIQRFFTNNNFKVQVINPILGKNNTRNLRKTKTDIEDCYNLADLFFKNTVKIYTKEMNTIYSNMIELSRQEKHLTENIVRSKNRFKQIIANAFPEYIKCFTSNDIYSETSLNFIKEFPHADIIKSKRIDALANNIYKSTKGYLLYSRCLTKAKKIKELANNSYPGIEVNSCEVNNLINIVDIIIYNSNKLDEVKKDIINLAKQTPYFDIINSIYGIGETSTAQIIAELGDINRFENIKQLNAFCGLDPTIIQSGKSINYNGPISKRGNRNDMNPVSWT

SEQ ID NO: 152895 - protein, 395 aa, unidentified
MIEVYQPCHLRGSSIGAGALTGLVFLSRSWRPQLNIYRTHVGLDVHARSIVAQAIHSDTGEVTWKKFPYDPAAVIDWVRGLAVPALTTYEAGPTGYDLSRRLTGAGIACVIAAPSKLQRPPGDRVKTDKNDALHLAHLLQLGQITPVRVPTIDEETARDLVRAREDCRHDLMASRHRLSKLLLRHGHVYDGGGTWTRKHDVWIREHRAGTIAYQYAFDASYEAVAQVLARRDRLDAEIERMADASEFAPVVTRLGCLRGMGALTSLALAVEIADWDRFTGKTIGTYLGLTPSEYSSGTSRRLGGITKTGNSHARRLLVEAAWHHRKQLRQQPTSALTLRQQNASQEARLRGQAGNERLHKQWEKFVARRKKATIANVAIARELSGWCWSLAIMTD

SEQ ID NO: 152896 - protein, 358 aa, unidentified
MRIIGVDFHAGQQTIAMFDTETKELVEKTLTHEGGQVREFYSALPRPVQVGIEASGSMHWFLELMEELRIDYQVGHPTEIRAAEPRKQKHDRRDAALLLKLQVENRFPSIWMPSTELRDLRALLRHRHQWVRMRTRVQNTLQAIAMSHGLRRGSSLWTQKGQHAIALLPLAPHAAHRRTELQVLYRTLSTQIDKLDEQVMNQALQRPGAKLLLTHPGVGPVTALATDVFLGDPGRFDDGKAVVSYVGIIPSEYSSGGRQRLGGLSKQGNPLVRFLWCEAAQHAVRRDPELLRFYRRKLLQKGLGKARVAVGRKLGIRLWIMLREQIDYQEFCRRGQMRQKNGAACAGMPEGVHSPART

SEQ ID NO: 152897 - protein, 365 aa, unidentified
MKKIANVGVDYHLNSLSIAVLAEGEKEFHQSIHLKNDDRLIAKYLKKLSKSFDLRICYEACSSGYDFQRKLNAWGYHCDVIAPSLIPRKPGDRRKNDFRDARNLAQHYANGMLSVVHPPTEEEESVRSLIRCRLAFKEDARRTKHRINSFLLTQGYSWKKSTWTKQHRWWLSKLEMPYEYLHKVLDEHLGQLEYLESRLKHLDQQIEEVARSEIYAPSVNKLRAFKGIGTLTAMLLIAEITDFRRFPTPRALMAFLGLIPSEDSSGDKTKGGSITKAGNIRCRTSIVEAVQHYVKKPYISAQMKANLAEVDGKSANVALHCMYRLHKRFWALSMKGKIRPVAITAIAREFVGFIWAMMRPELVEA

SEQ ID NO: 152898 - protein, 412 aa, unidentified
MQDILTCAMGLDIHRDVIVACLAKGELGTDPEIEIRSFSTLIPEMRKLRDWVLEAECRYVAMESTGIYWQPIYEMLEPCFDGQISILVVNARHMKNVPGRKTDMRDAQWIATLLRAGLLKGSFIPDKTFRELRHLTQYRKSIVRDITAQKNRIDKFLQSSGFRFTAFLSDAFGASGQNIIRHLMEYGNISREALDRCLKTQTRKRIDEILIALNGSLSEHQRGFLRMIFGHLEALEQHRHTVEDAITKEITKHEEALSLLCSIPGIDVTAAAAIIAEIGTDMSAFPDSQHICSWAGLSPGNNESAGKRKSAHINKGNPYLKSMLCEVGWVISGKRSLYLSGWYWRIKQRKGAKRATIALARKLLALIYTMLKTGSPYNEDCFEIRRKQSERKRASRMVNELQKLGYFVVAPG

SEQ ID NO: 152899 - protein, 343 aa, unidentified
MNEVITIGLDIAKNVFHAHGADAGGRQVFSRRISRGKLLEFFGSQPRCLVAMEACGGAHHWARQFTALGHEVRLIPPVYVKPFVKRQKNDAADAEAICEAVWRPNMRFVAIKSEEQQAAGLVFRTRDLLVRQRTQLINAIRGHLGEYGWVAPKGRSNATMLGDLLDDELGSSLPPAASAMLKVMVDMLEQLDSKVADLDKEIERRAREDDVCRRLMTIPGVGPIAATAIVALAPPAETFRRGRDFAAWLGLTPLQKSTGGKTRLGRTSKMGERTLRRLLIIGSSSVVLAASRRGAPSGSWLESMMARKPRMVVAVANANKMARTVWALLMRKEDYRAPVTAMV

SEQ ID NO: 152900 - protein, 343 aa, unidentified
MQAVTTIGLDIAKSVFQVHGVDIQCTIAIRRPLKRRQVLPFFKKLPPCLVGIEACATSHHWSRQLQALGHTVRLMPPAYVRPYVKSQKNDAADAEAICEAVMRPSMRFVETKTPEQQSCLMLHRTRHLFIRQQTAVINAIRAHLAEFGVVAPVGRNGVEELLDVIADPKDNRVPEVARECLAALGRQLHMLKAQILEFDRHIMAWHRSNETSKRLDAIPGVGPALATALVASVANPRAFRSGRDFSAWVGLVPKQNSSGGKEKLGNITKRGDRYLRSLFTAGALAVIRYAKIHGTKHRPWLTQLLARRPTKVAAIALANKIARMAWAMMAKGERYKEPIALAA

SEQ ID NO: 152901 - protein, 365 aa, unidentified
MNATAALPVVGIDVAKSVFQLAVADGVWRVLEEHRLTRTQMERWFANRAVGLVVMEACGSAHHWARWLNALGIEVKLLPALYVRAYVKRNKTDSADACALLEAARCADIVPVKVKSLEQQALQGLHRTRSLWMGTRTSRINALRGFCREFGIDIAQGARLGVERIERVLADPHSAVPELIRGTMKLLIEEIRLLEARTAQLERELTLLARRSPACTTLLTIPGVGLLTATAMVAATSGSVAHFRDARHFASWFGLTPRERSSGTTRILGRISKRGDRYLRMLLTHGARSVLHAAARATVAGKPVDGLRQWALGVQQRANHNKAACALANKLARICYATLRDAAPYGEPVRRPEKKIARTSFELAA

SEQ ID NO: 152902 - protein, 346 aa, unidentified
MLYAGLDLSRKRLDFHLLDGEGATVEVGATPPDADGLRGLSDRLARHGEPVRAAIESMNGSRFVHDRLELAGWQVEIADAQKVKGLAPLACKTDRIDAWVLAELARRDLVPAIWLPDPLVRAERERARWRLYLVRHRSSLKQRVHAVLLTHGKPCPVSDLFGVRGRQLLSRLGLPEPWQGTIEASLRLIDELDREIGECERELRRLGAEHRCVPLLCTVPGISWVLAYTIAAEIGDVGRFASPRKLAGYSGLCPRVYQSGERDLRGPLAKQGPRFLRWALVEAATHACTHPIYRDRYQQTKTRIGKQRGAKVAQIDLARRLAEAIWHMLSREQPFAPKGATDSVAA

SEQ ID NO: 152903 - protein, 335 aa, unidentified
MDIAKNVFQVHGIDAAEKVVVRKQLRRGQVMKFFEALPRCLVGMEACATAHYWARELTKLGHEVRLMPAKDVKAYVKRHKNDAADAEAICEAVRRPTMRFVRIKSAEQQAQLMQHRTRDVLIRQRTQIINALRAHLAELGLVAAQGNTGVNELRAIVMDEQDTRLPIDARASAIVLAAQLEALESVIGAIEKRIKMQHRSSEASQRVEAIPGIGVIGATAIVATVTDPTIFRSGRDFAAWIGLVPRQDSTGGKQKLGPISKQGDRYLRRILVVGAIAVLRRAQENPGKYPWLTQLLARRPFKVVAVALANKMARMAWALLAHGGTYRAPELAETA

SEQ ID NO: 152904 - protein, 351 aa, unidentified
MHATARTAIAVIGIDIGKNSFHIVGLDDRGAIVLRQKWSRGQVEARLANVPPCLIGMEACVGAHHLSRKLKALGHDARLMPAKYVRPYSKGQKNDFRDAETIAEAVQRPTMKFVATKSADQLDLQAMHRVRERLVSQRTGIINQIRAFLLERGIAVRQGQRFLREELPRLLAAPPEVLSPRMVLIIEGLASDWRGLDTRIEDLSAEIEDLASRDAGCERLMSIPGIGPIISSAMVAAIGTGDGFSKGRDFAAWLGLVPRQISTGDRTILGKISKRGNRYLRVLFVQAAWVVLVKVKPDRWEGHGLKPWIDAAKKRLHRNVLAIALANKLARIAWSVLARGRAFEASKLQVA

SEQ ID NO: 152905 - protein, 371 aa, unidentified
MQRNTLSFKGQNIFIGIDVHKRSWTVTTIPEFGKQRTHVQNASGKELIDFLNRHYPDGSYTAVYESGFTGMSTYYELEQYGIDCIVVNAADVPTTQYEDLMKTDPIDSVKLAKSLKSGLLRGIYIRRKDDLDDRGLVRARKAICKDLSRVRVRIKHLLMNNGVSVPERFDKSGHWPNAFTLWLRSEAKLLSTTRRSLDVLLDEADSMRKDLLKATRIVRELSRCEKYAADVELMMSIPGIGMITAMTILTEVADFSRFGNERQFASYMGLVPTSHSSGEKTVHGEKTFRGNKEIGPMIIEACWRAIHEDDTLGTTYATLAKRMTPQKAIVRIARKMSNIILAVMKGRKKYEPFSASQDDPKTGTGENTINN

SEQ ID NO: 152906 - protein, 350 aa, unidentified
MNILALDIGKFNTVYCDYICENGEHDFGKVKTTPQAIHDLIVNKEPKRVVMEVSEIAGWVVDIASALGKETETANTSHDAWRWKNVKKKNDKEDALKLAKLSAMNQLPTVHIPAKHVREMRSLIKYRQRLVKNRRSIQLAIRAIFSAQGITGVPRGKSAWTKEGLGWLRKHAQPLEEISDVEQLWRGRLHVELETFEAISKALKRVEDKLNDLGSVDARIKRLQTIPGVGPRLAETVVAFIDDPKRFENGKQVGSYAGLTPKQYQSGQMERQGRISGQGNKLLRNLLVEVCWVSLRYNPWARDTYNRLLRGSPSRKKIAITALARMLVVRCWAMLRDEEDWKYDIREDAA

SEQ ID NO: 152907 - protein, 350 aa, unidentified
MNYVGIDLHKNTIVLCVMNQDLKVLTRRTLACCEPEAIREYFAGLGPFRAVVEATASYEWLVALIEPLADKVILANPKKLRVIDESVKKTDQLDAQVLAEFLARDMVPQAHRPSPRQREHRALVRHRQYLKQCATALKNKMRRIASDYNADRNDLFSAEGWKRLEQVKLSASDRFVLDQLHAQWQSLEKQLWELAKRLKEFAAAAPPREAEARAKLATIRGVGPVTIDVVVSELGDVSRFPSSKAVTAYAGLAPAVRQSAGKGKNLGITKEGSPLLRWALVEASWRVIRQSMAWERIYERIKKRAGGKKAIVAVARRLLCVMYAMLRDGTNYDLLKVGEPPPQSALRAAV

SEQ ID NO: 152908 - protein, 349 aa, unidentified
MKQYIGCDGHKQYSVFVAVDELGRASPAHRVKHERTAFQDYLESLPPSSPIALETSGHWYWMVDAMEQAGHQPVLVHARKAKLLMGLVNKTDKLDARGLATLLRNGTVPAVWMAPGALRDQRELPRLRMTLVRVRTALKNRIHAAFAKYGIALTEVSDLFGAKGRKLLEHRLPVETQRAVCVELALLDEVEEQIDGLETRIRQVVKATQMMQWLLSLPGVGEILAIVIALELGTVERFPDAEHFASYSGTVPRVHESGGHRRYGGAVRKDVNLYLKWAFIEAANCVVLNQAHWPERHAMQLYQRLHRTKGHAKAVVAVARHLAESTYWMLKRGEPYREPARPSRRVPQG

SEQ ID NO: 152909 - protein, 344 aa, unidentified
MNISTVGFDLAKNVFQVHGIDDTGKVIVRRSLRRRQVMAFFDKLEPCLIGMEACGTSHFWARTLQALGHEVKLMPPIYVTPYVKRGKTDAGDAAAICEAVTRPTMRFVAIKSAEQQAVLALHRTRALLVRQRTQLINMIRAQLAEFGLVLATGIQHALKLVDQLVEGVAPDIPALACKIVTSLAEQIRALQARIGTLEEDMKSWFRGNELAQRLKTIPGIGIITASALAASVTDPHQFTSGRQFAASLGLTPKADCSGAKQRMGRISKMGDRYLRRLLVSGMTSQLQAARRKPQAHPWVTRLLASKPNKLVAVAMANKAARIAWVVMTRGEVYRARYPATEATA

SEQ ID NO: 152910 - protein, 337 aa, unidentified
MRYIGVDLHKTQFSVCWMEEDGSNKFERYPMNGEGLSRFREKLDGECEVGVEATGNSKYFYDEIVGTVKKVRVINPLQFKIISESVKKNDREDSRVIAEFLSKGLLPEVRVMDKGRREIKSLIQTRDKLVKLRSSLKNKIHGILLEHGIQSKREMFSSQKGLRKVLDMPVSETSRFELEVIVKQINSLNEGIKELEGKIKDKGKKLKGQKNLQSITGIGELSSTIILSTIGDIGDFENKKKLAAYAGLVPRVHESNGKYKNGRITKRGDKIFRTTLVQVALIAIRYNRYLRSFYERLKVKKGSGKAIIATTRKMLDIIYDTLKNDWEFKDFNNFVLV

SEQ ID NO: 152911 - protein, 422 aa, unidentified
MMDKERSWFVGIDWAAQEHVVSLYDGAGNKIGQRKFSHGGTGLTDMIAWLLKASGGEPGEIHVGIETPHGPIVEALLERRFNVYSINPKQLDRFRDRFTVAGAKDDSRDADVLSDSLRTDMRAFRKLSIADPLIVELREWSRIDEELKVEHGRLTNRLKHQLWRYYPQMLELADDVGAKWFLDLFEAVPTPEKAANVREKTIARILKNHRIRRFDAAHVLAELCKPALAVAPGTIEAATAHIRSLIGRIRIINGQLADAGQQLDRLCKKLSEPVADEDGEAAPGQKPEQRDAAILDSLPGVARTVLATLLAEAPDTLQRRDYHALRALCGSAPVTRRSGKSRMVVRRYACNHRLRNATYHWAQNAIQHDHTSREKYDALRARGHGHARALRSIIDRLLSVACAMLDSGTLFDPEFASKRATG

SEQ ID NO: 152912 - protein, 338 aa, unidentified
MYYTGIDLHKFTSYLTTVDSSGNIVKQADIKNVAHNFVQYFTGLGSENITTVESTMTWYWLNDLLNSLNIPMVLTHAKYVKAIAYAKVKTDKVDSHTLAQLLRMDYIPAAHKISNDKRILRDALRARLKIVQRHTSITNSMQLLLAKYNLTSPDDLEEIPRYQYNQLCEVETLLKGQMLNLEKQLYPSLIPNDDIQRLLWIPGIGKMNAFTIMLEIDDINRFADVKNFYSYCRLVPSARNSGGKSKQRSSKDGSKYLKVAFSDAAIHAVHYYPIIRKYHNSLTRKKNKQIAKTIIAKELASIVYYVLKYKTNFNNTFKGKELDHTKSLQWPRVVSPYA

SEQ ID NO: 152913 - protein, 416 aa, unidentified
MNAAGIDVSSRKSTVAVLRPFGEVVRLPFDVAHSIEGLASLAEQLKALDGETRIVMEHTGRYYEPIAKALHEAGLYVSAVNPLLIKEYGANSLRRVKTDKADALKIARYALDNWADLRDYTPMDTIRYDLKTLNRQFQLASKQRTACSNNLIALLEQSFPGIRKCFDSPVRRDGTQKWVDFAHTFWHVDCVRKQSLNAFSERYRKWCKRHGYFFKQSNADEVYALAKSAVVLVPKSEVTKVLVQQAANQLTSISSSVETYRTEMERLASMLPEYPVVMEMYGVGKSFGPQLMAEIGDVRRFERKQSLVAFAGIDPMPNQSGDKNVRSNKSSKRGSPYLRKTLFNVMGIYLKCAPQDEPVFQFLDRKRSEGKPYYVYMTAASNKFLRRYYAKVRDYLASLENLPPVDMDSTGLQRSN

SEQ ID NO: 152914 - protein, 322 aa, unidentified
MFLGIDVSKSTLDAALLKEGSKPRHKVFPNDVAGHAALIAWLGEHACLRVHACLEATGTWAQEAALALHQAGHIVSLVNPARTHAFGKSQLKRTKTDKADAILIAEFCRMHNPPVWAPQSSQVQQLQGLVRRLEHLEEMQKMEENRLSSGGLSSQVEASLQEHIGYLAHQIEKTRRQIKDHIDQNPDLKSQSRLLESIPGIGATTAALLLAELGDISHFSSARQVAAFAGLVPRIRESGTSVRGRSRLSKVGSSRLRKSLYFPAITALRFNPLIKAFGLRLSVQGKSKMLIIGAAMRKLLHLAYGVLKSKQPFDPAFCHQNA

SEQ ID NO: 152915 - protein, 344 aa, unidentified
MYFIGLDVHKKTISYCVKDAAGRVHQEGKIGSTRRELDGWIRTLPQPRTIAMEATIFSGWIFDHLLPHAEKVKVAHPLMLRAIAAAKKKNDKIDAGKIADCLRCDFLPECHMASTEIRDRRRTLRYRNLLIKQMVQMKNRVSGLLMETGVSYNKQRLHKVGYFAELMSTNEEVPESIRPLLKLSREMIGRSQKLEYALVSSLERDPLLKERITRLRTVPGVGPITALTWALEIGDITRFSSSKQAISYCGLCGDEKSSADKVMRMPLSKQRNKHIQRVLIEAAKLAPRECHELAVIHARELERGNPNRATLAVARKMVCYMLAVERRKQDFVAAEEFSRRTAAA

SEQ ID NO: 152916 - protein, 274 aa, unidentified
MFIDELKNIIIDATLIEHNKNEFDNLFNSIKNYSNLIVVMESTSIYHLPVENYFRSKGIDTVVMNPKLVKQFKDTLNKSKTDKLDCFKIARCYLGTIDNFYYKNGEYFMYNPLARQYWSLFEGQTRLKNRYKQLIEIVFPEFNLVFNDLYDDLALNFIHDFPHSILFVNTRFDDKYQFVSFLGIDSVTSQSGISAYHGAISKTGCKFGRTILFNVVTIILQISAHANTSNSIYLFFRKKQSEGKHHYKCIIACETKLYKIIYKLCSSNCLYENK

SEQ ID NO: 152917 - protein, 339 aa, unidentified
MTVKTVGLDLAKDVFQVHCVSATGRKILNKKIKRAKLLAFFETLPKCVVGMEACGSAHHWGREVRKLGHDVRLMPAAYVKPYVKRGKTDAADAEAICEAVRRPTMRFVEIKSENQQAVLAIHRVRDLVVRQRTQVVNMIRSILREFGHILPTGIEAVSKFAREHGTEDQLKMPEIADGILGVMCHQLNGLNARIDGLTKMIEQHAWLDADARRLVRMPGVGPITASAIVATIGDAKQFETGRDLAAWLGLTPLNKSSGGKERLGRITKKGDRYIRKLLIVGMTSRALMAKNKPEKADTWTAKLLAEKPLRLATVSMANESAWIIWALLTKRAEYRQPIA

SEQ ID NO: 152918 - protein, 345 aa, unidentified
MDQISRIGMDTSKHVFQLHGVNAAEEVVLRRKLRRKEMVTFFEKLAPTVIAIEACGASHHWARLLQSFGHTVKLIPPQLVKPYVKRGKNDAADAEALCEAMSRPTMRFVPVKTAEQQAALMLVGVRDQMICHRTQLANAVRGYAAEFGLTAAKGMAHLVPLLERIQTDESLPALARELFAIQAKEYEQLQSQIDEVDAQLMARHRADECSRRLAKIPGVGPVGAMLLTMKTPAPELFRSGRQFAAWIGLTPRDHSTAGKVRLGAITRAGDEGLRSVLVVGATAVIQHARRHGRASPWLARLLKRKSPKLAAVALANKMARIAWKLMLTGEAYTATPAPAALAGAA

SEQ ID NO: 152919 - protein, 387 aa, unidentified
MQKPHDNSKASPAAFTQDSTLIAVIELSLSNWLVAGLIPGVSREPLKKLEPNPEDLLKLLHGWRDEAIKAGRPITRIAVAYETGRDSFWLARWLRKRGIDAHVIHATSVAVSREHRRAKTDRLDTAMLKRGFLGWLRGERGHCTVAIVPTMEEEDAKRPHRERDGLVHEQTRVINRMKSALIQFGVRNFNPKLRKASVKLETVRTPEGKSLPPNTIAALRRDMERLRIIKEQIKAIERARLQQLEQKPEALANRIVYLLVRIYGLGLETADLLVHELLSRTLRDRKAVARYAGLTGSPDESGSKRREKGLSRSGNARVRKIMIQLAWRMVKFQPDSALVQWFKQRTENAKKSRKPMIVALARKLIIALWRYANDGLIPEGFRLHSAA

SEQ ID NO: 152920 - protein, 425 aa, unidentified
MSEKIVVGIDVSKAFSDICILSPNNDIIKRLKISNDINGMKSLIYVLEKVEDEYEDSAVIIMEATAHYHQILANFFRKHNYEVIVINPIQSGALKNINIRKIKSDKTDAYNIALLYRIKNYNETITHSDTVNSIKKLCRQHKELTDEIVEHINRLIAFLDISFPDFKKVFTDLQGKTPLSLLEKYPTIQEVLSPENKQDIIQLIKENSHKSNSYAEAKYEKLVKAAEKSIEVCIVSLSSAVLIQTTVRVIFSLQEALKAIDDEIKRLSLLDEKFHKEIVLLQSIPGVGEYTACVVLSELGDISNFSKPKELVAFFGLDPGVSQSGTYNRKNNKISKRGSPHVRSILHMLAKSNVYPNRNREYLNPVMRAYFEKKIAEKPYKVVMCAIMRKMVQIIFAVLRNQKSFELRTPEEHQKLIREKSKLVA

SEQ ID NO: 152921 - protein, 416 aa, unidentified
MKEGFAALVALDWADERHIGYLQARGKDEWERFVLKQTPEAIQQWVGELRQRFKGEKIALVVEQRRGALIYALQKYEIFVIFPLNTTAAKNYRKALRASGAKDDVSDAEIQLTFLRNHIQIMRRLDPDTARTRRLRLLVEHRRKLVNRATALGNQLTAELKEYFPLALQCVAKIRSRMACEFLRSWPSLERLKKANEQEVRTFYFQRNCRSKNLIETRISAIRNAVPLVEEKPILQAYELMTLTAVRQIKAVLFCIKAVDKEIEKIFNSHPDAALFKSFPAAAAAMAPRLAVATGEDRTRFESAAALANFSGISPVSIESGKSKTIAFRLAAPKFQRQTFHEYAAMSLRQSLWANAVYQLQRQRGKSHHAALRVVAYKWIRIIYRCWINRQQYDERKYLEVLKKKNPDFYQKLKIA

SEQ ID NO: 152922 - protein, 369 aa, unidentified
MEKDTIYVALDDSKRKLVVAMLRSGAAESEEREIPKDPPHIQRLFRRLEREGPVQACYEAGVSGYDLYRQITACGVTCQVIAPALTPRRPGQRIKTDRRDARKLVRLFRAGELTAIHVPDEAEEAARDLVRCREAVRRDVVRWRHRLLKLLDRHGRLWVTEKNWTQRHWSWIRAQHFELSALQRAFEATVFALEQALARQAALDQEIAALAETAPYRDPVGWLRCFRGIGTLSAMVLLAEIVDFHRFRRPRALMAYLGLVPSEYSSGETQRRGGLTKAGNTHARRVLVEAAWHYRHRPTVGRALASRSQAQPAEVVGQAWRAQQRLHRRYRHLIGHGKRPPVAVAAIARELVGFLWAAMTRRETRPQVA

SEQ ID NO: 152923 - protein, 423 aa, unidentified
MENTAARKRNQVPEGYLIIGVDPHKKRHAAVAITQDFTTRDKFKFDNTREGLEIMLRRARIEMVKSACRGVMFAIETGGHYWRNVAYFLDEQGIPFRFINQFTLKRRREGKDLNHRKNDYRDSEVAAQLLCTGEFTESKIPQGVYAELRTAHNAYRRLVKERTRITNLIKGLLDGLSPEFTLVFKDPCGLTALSVLSTCAIPSVIAGMTEDEFVAAVEVRHHGRLMRRKLRALHQMARASIGIDAGARSVSSEISFLVEKLELIRRHIRIIEGTLVRLVDETEEGKYLLSIRGLHYIAVAGLLAELGCFKSYHSAKQMIKMAGSNPTESESAGKKGTHTPMSKQGRPVLRYCAWTSVIPMLRLNPDFRAWAKRLRERPAHANPLGGREIVGAALNRLLRLAFALVKNQTYYQVSKPELTLVAV

SEQ ID NO: 152924 - protein, 337 aa, unidentified
MEYFAGLDISMKETHICVMDRDGKVILEAKAATLPAAIAAELAKAPVTQRIVFETGRMATTLYHGLEALGLPVVCIESRHAYQALKSLATHKTDRNDARGLAHLARSGFYKPIHVKSLPAHAVRALIIARKKLVGQRVTLENQIRGLALVFGVRLPRGLSPAFAKQVNTASGELPALAGALRGLLAARDALLGAIAAINRDIKRLAHSSEACQRLMTIPGVGHLTALAFVAAIDEPDRFRSSRDVGPYLGLVPRRWKSGEIDYTGSISKVGDRRVRTLLYEAANVMLTRYRGDLALKDWALRIGRRSTMRKARVALARRLAIIMHAMLRNGTEFQVA

SEQ ID NO: 152925 - protein, 422 aa, unidentified
MEEITEEAAELVARVAALDIGKASLVACVRVPHETKPGARRQEVRTFTTTTRSLLQLQDWLVCQGVTLCVMEATSSYWKPPFYLLEDAIAECWLVNAREVKNVPGRPKTDKLDAVWLARLAEQGMVRPSFVPPVWQRELRDLCRYRRTLTQERTREKQRVEKLLEDTQIKLSAVISDIFGVSGRAMLDALIAGQRDPRTLAQLARASMRAKISVLTEALTGHFRDHHGYLLAMMLARIDALTGQIEELTSRIGEAIAPFAHQVAQLDEIPGIGAIGAQEIIASIGVDMTRFPTPGHLVSWAKFAPTARQSAGKAKPGATGKGNPWLGGALGEAVIGAARTKTFLGARYHRLARRRGKRRALVAAGNSILTIAHRLLSDPDAHFTDLGPYWHDRIAPLRRKRQLIAELERLSGKKVLLEDAAA

SEQ ID NO: 152926 - protein, 423 aa, unidentified
MKPSIESSFTALVGIDWSDRKHDFCLQATGSPQREFGVVAHSPEAITLWAKALYRRFGGPIAVCLEIAKGPLVHALQRHEFIVLFPVNPATLAKYREAFVPSRAKDDPTDAQIALELLLRHRDKLQPLQPQSADMRTLATLVEQRRLLVGDKTRITNRLSSTLKEYFPQALDWFEDRDTVLFCDFLQRWPSLKHVKRARQATLRSFFSAHNLRRAPLIEERIHGIRSATALTDDVAVIEPHQLLVQALVAQLRVTLQAIDRFDVEITAVAKRLPDYALFAALPGAGSILAPRLLVAFGEQRERYGSAAQLQQYAGVAPVLERSGNKCWVHWRLACPTFLRQTFVEWAGSTIPRSFWASTYYHRQRAKGCSHQAAVRALAYKWIRILYRCWQTCTPYDESVYLHALKRHGSPLIGAMAATSQNH

SEQ ID NO: 152927 - protein, 413 aa, unidentified
MTIHYKQKHIYVGVDLHKKTHTAVIIDCWHEKLGEITFENKPSAFDELATYVKTFVKRGMTPVYGLEDTGGYGRALAVYLIENKQKVKEVNSALSYAERKSYPTSQKSDSWDAECVARILLNKLDILPDANPQDMYWAIGQLVTRRTALVKSMISLKNQLHMQLSYHYPSYHKFFSDLDGKCALAFWHAYPAPHLLVGVTVEELAIFLRKHSNNACSTRKAEAILTLVQVDGDTKGDYQAQRDFLIQSHVRDIRFKKQEMERVESELKGLMNALNYQLETMPGIDVVTSASLVAEIGDIHRFNSANKLARFAGIAPVKIGSGGREKERKSKQGNRVLHGLFYNLAVQQVQVSKGSKVPRNPVFYEYYHRKIAEGKTKTQALVCIMRRLVNIIYGMMKNKTPYVLPPLEETRAG

SEQ ID NO: 152928 - protein, 405 aa, unidentified
MSELEKDLVFAGVDTHKDTHTLCLLDHMGRAIGTFRFAADAKGYDALAGKIGGPATCAGVGVEGAGSYGAGLTRRLLELGYCVYEVMVPGRARRKPGRPKSDPADAEVAARQVLARANLSKPKDQSGWTEELRQLMIARDRLVQATSAMINAAKSLIVTAPEDLRRSLEGLSRKNLRSALSTLDPAAGGIILALGSLGKAWDLQDREADAIEERMKRVLEANAPALLTIYGCGTVSAAALAVAGGGNPERLKSEAEFASLCGVAPLLASSGKTERHRLNRGGDRRANRALYQIAVTRMSYDQRTKDYVGKRKRDGKSKKEAIRCLKRYIAREVFRALRNPLEIKGPSWKDLRPARQALGITLVEAGKALNVGFQRVSYAETGRLMNVRFLEEYDAWLKSQAKRES

SEQ ID NO: 152929 - protein, 432 aa, unidentified
MQNQSQIVALVGLDIGKNVHEVGSFRSDTLEALHEPFSLYNSQTGFEQLASHLDSLLTTYPRVELGNEPTGIYYEAIGQHIQTRFESAITSGRLAYYLVNPQLVKLSRQALQKGRPRKSDAIDTQAIARCLQLKQVCPARLPTAQNLEIEQWALRYRRGEHYKRQVSNRLLSQLDRLWPGAFVNVKRFQAIHPELEPPVPLVQTRPLERQLVRALLTYCPNPYNVLAHTEAEMLNFLRAHVGGRPGLHTARKVLRNVRQALLPSPDLVAVYVLAITHDWRQYQQLERDQEQLMAEAQRLVPASPAAVLLSVPGISPYHAARYLALVGHVERFASADHLWAFAGFDPVYQQSGDSRWVGHLSKRGDPAFRDTLYLIGQSTARHCPPIQQAFRRAYRGQRRRRVLATIHAAHKANRLLYHLLLHQECYCPAVHR

SEQ ID NO: 152930 - protein, 370 aa, unidentified
MQVEHPVCCGIDVHKDTLTACLRRVDANGQVSKEGGEFATTSTSLLALSDWLVAQHCPVVAMESTGVYWKPVYHVLAGTVEVCIGNAHEMRSRPGKKTDKRDAAWIAELLAHGLIRPSFGPPPDICALRDVTRTRVALVQTRSQSKNRVHKLLEETNLKLGSVVSALFGVTGRRMLAALVAGERDPPVLASLALGALKHKRPQLALALTGQFTAHHGTLLALLLELIEVLDRQLATLDQQIGALVAPLQAQIAQLESIPGVDIIAARDILAEIGTDMSRFGDAARLASWAGVCPGNHESAGKRYSGKTCKGNRSLRRVLVQCAWGARKTPTFLGRTFRRLEVRIGKKKAALAIAHKMLVIVYHLLALGTC

SEQ ID NO: 152931 - protein, 345 aa, unidentified
MLYVGVDFHKNYSFVTEMDKDGEVKDQQKIDNDRTILKGYLSKLPSDTKIALEATCNWYYFYELAEEYDFDISLAHPLKTKAIASARLMNDKISSTTLAHLLRANLLPKAYIPDQETRDIREVLRTHAFLISMRTRIKNRIHAILLKNGIQCPYSDILGKGSLNWLNKLNLRACYQEAIKSYIRLAEAFNTEIKLLKQTIESLAIDNEYVCLLDTHPGISYYSGLLIASEIGDINRFSNHGKLCSYAGLVPTMHASGGKIRRGHITKQGSKWLRWILIECSTHAVKKSSRYYSLYHRVAYKHGKGTARIAVARSMLRVMYYMLKYNTPYEERSGSKKTPVSASGS

SEQ ID NO: 152932 - protein, 315 aa, unidentified
MLYDGIKGRIKTRNIQNNRHSVENILRWLRLQHCSPEDVHVVMEATGVYHERLATELHDAGFQVSLANPHRSREFARGMGIMTKTDKVDAYMLACYVFLKKPHRWEPPAPEIRYLGALLRRRDVLLGDALREENRLEKYLSTDTPADIISSCRRMAQLLREEVSNIERQIKAHIKASPALRRDYTLLTSIKSVGPQLGMHMLVVLRSHNFVSAEQAAAFLGVVPIEKRSGTSVRSRPRMSKIGPPQLRAKLYMSALCGKIYNKRMRNIYDEMCLRGKPKMVAIGALMRKLVHWCYGVLKTGTVFNDEGLKPVLSS

SEQ ID NO: 152933 - protein, 422 aa, unidentified
MEAIVERCCGLDVHQATVVACLLVGAAHEKPRKEVRSFGTMTRDLMQLRDWLQEQRCTVVGMESTGVYWKPVYAVLEDNFELVVGNAYHIKAVPGRKTDVKDSEWIADLLRHGLINKSFVPPKPIRDLRDLLRYRRKLVENRSAECNRLLKLLETANIKLSTVASNVFGVSGMAMLKALLAGESTPQQMAQLAKRRMRSKIPQLELALDGKLQEHHRFLLEMQLARLEQLDEHLARLDQRIDEKLEPYREQRVQLTQIPGIDRVLAGVLIAEIGTDMSVFKSAGHLAAWAGVSPGNNESAGIHKRSQARKGNVHLKTALVQAAQSGSRTKGTYLKDKFFRLKARRGYNRAAVAIGHKILIAAYHMLSTGSDYRDLGDAYLDTLDTRRVTTNLVRRLERLGYQVTLADKPVARADEAPASQLG

SEQ ID NO: 152934 - protein, 343 aa, unidentified
MEHFAGLDVSVKDTSVCIVDEIGKIIREVKVASEPDALLQVLRNAGYHFKRIGLEAGPLSQWLFSALGEANLPVICVETRHMRAVLKAQINKTDRNDARGIAQMMRVGLYRPVHVKTLRSQKLRMLLTHRKLLQSKAIAIENDLRSTLRNFGLKVGMVGTAKFETRIKELIENLPDLILLVEPLLVVRRVLREQLDLLHRRLLAVVRDDAICRRLMTVPGVGPVVALTYRATVDVPARFRKSKSVGAVFGLTCSRDQSGERDRPGAISRCGDEMMRAMLYEAAQAMLLRSAKWSWLKAWAMQIARRRGMRRAIVALARRLAVIMHRIWADGTEFRWTREVAVA

SEQ ID NO: 152935 - protein, 342 aa, unidentified
MKDMMIGVDLAKNVFQVHGALRTGEVQFRKKLTRKQFPAFMAKQEPCLVIFEACGSAHYWAREMETLGHEVKLIAPQYARPFVKRQKNDAADAEAIVIAARQPEMRFVELKTVEQQSRAAVFRGRERLVYQRTADVNALRALLYEHGHVFPAGIRYLDRMKALVEDAASELPGLIREECQDLVTQIAEKTARIIERTAKLKTLAAQSDRARRLQTMPGVGPLTAVAVEAFGPDMAQFKTGRDFAAWLGLVPRQHSSGGKERLGRMTKAGQADIRRLLIIGAMSRLNWLGQRSIVEGSWLSCMLTRKPKMLVAIALANKMARQIWAMLTKNEDYRDPVLASTA

SEQ ID NO: 152936 - protein, 323 aa, unidentified
MQIIGVDLHTRQQTIAMLDTDTGEVVEKTLEHKAEEVREFYSALAGPVQVGIEATGSMHWFLELMEELGIDRLVGHPSEIRKAETRKQKHDRRDAALLLKLQIENRFPSIWMPSTELRDLRILLTHRHQWVRMRTRVQNALQAIALSRGLRRGKTLWSQAGQHAIESLPLPPNAAYRRAELQSLYRTLNEQVDELDKRVSDQAFQRPGAKLLMTHPGVGPVTALATDVFLGDPARFADGKALVSYVGMIPSEYSSGGQQRLGGLSKQGNPLLRFLWCEAAVHAVRRDPELQRFYRRKLSQTGIGQSESNCSSQTRDSAVDLVA

SEQ ID NO: 152937 - protein, 342 aa, unidentified
MQWTVAIGIDTHKHTHVAVALDRLGGQLDVFEAPATSAGYLDLYRWAHGLGEPAFALEGAGSYGAGLVRFLEAAGCPVYECERPKRSERRRGKNDLIDALLAARRLLSGERLGVPRGLSGPREDVRLLLLERRSAIRARTATLNQLQAVVVTAPARLRSRLGGDGSEQLARAAARLRPAQGEQAVVRAVLRRLGRRVLGLDAELGELDRELEAIVSALVPELLAECGVGPVCAAQLVVSSGDPSRMVSEASFAALAGTSPVDASSGQQQRHRLNRGGDRQLNRALHVIALTRVRYHDETAGYYQRLIASGKTTREARRCVKRTLARHFHRKLCSLPALPLTT

SEQ ID NO: 152938 - protein, 341 aa, unidentified
MNINTVGIDLAKNLFAVHGVNDSGKPALVKPKVSRADLLPLIAQLPPCLIGMEACSGAHHWARLFRQYGHTVKLMAPKFVAPYRMTGKRGKNDAADAAAICEAVTRPTMLFVPVKEEHQQIILCLHRTRQGFVEERTASYNRLRGLIAEFGIVLPQKVVCLRREIGAHLEDLPGYANLCVGDLLAHADALDKKIEEYDRAIAKAAREDARSKRLMKLPGIGPVTASAMLASIGSGHDFDNGRQVAAWIGLVPGQYSSGGKARLGRITKAGDSYLRSLLVMGARAVLNSIGDKQDRFSRWARSLEERRGYWRAVIAIAAKNARLAWAVLKYGEDFKLELIKE

SEQ ID NO: 152939 - protein, 350 aa, unidentified
MIIIGCDYHPGFQQIAYVNTDTGELSEGRLGHKEQAEQFYRELSQGGVTVRVGMEASGHARWFERLLLELQFELWIGDAAAIRTKRVRKQKTDRQDAQLLLRLLQEDRFPRIWVPDAENRDLRQLLWHRHRLVQMRTRVMNQLHVVALNEGLRRKKALWRPAGRVELEGLSLAPWASRRRQDLLDLLDRLTPKIHELNGKLEQIVARRPVTRQLSTHPGVGPLTALAFELVIGTPERFACAKQIASYVGLVPAEESSGDRRRLGHISKQGNALLRFLLVEAAQVTVRSDPRWRSQFFHLAMRRGRKIAKVAMARKLALELYWMWRRGRDYDEMQQLGSHAGEPGNRHGVQ

SEQ ID NO: 152940 - protein, 351 aa, unidentified
MPRTTTLHAVTAIGIDMGKTTLHMIGLDARGAIVLRERVSRGRIASRLANVPPCLIGIEAGMATHYVARELTELGHDVKQVPATYAKPFRHGHKNDFRDAHAVAEAVQRPTTRFVPAKTNEQLDLQALHRVRSRLVSERTAVINQIRGFLLERSIIVRQGLRFLRQLLPDILAKRTDVLSPRIVRIVIDLAGDWRQLDERIETVTDEIETLAKSEDSCRRVMTVPGIGPIISSAMVAAIGSGVAFAKGRDFSAWLGLVPKQMSTGDRTILGRISKRGNGYLRMLFMQAARVILLRPANWPKHGFGVWLVRAAQRLHPNVLAAALANKLARIAWTVLVQERSYQARVTKAAA

SEQ ID NO: 152941 - protein, 455 aa, unidentified
MVQRNAKVIPKPVKVARAAALTITHPNAAGIDIGSASHFVAVPPDRDDQPVCEFPSFTADLNALADWRTACKVDTVAMESTGVYWIPLFELLESRGFTVMLVNARHVKNVSGRKSDVLDCQWLQQLMTYGLLSGAFRPVEEVCVLRCLYRQRGMLLRTQGRHVQHMQKALTQMNLQLTNVLADIVGESGQKILRAIVAGERDGHVLGALKNVRVRASVDEIAKSLQGTWRAEHLFALKQALDAFDFVGTQLAECDHEIELQLQVLKLHDGNPAKGKKRGRARNAPKFDLRTQLFRMCGVDLTRIDGVDVTTALAVVSEVGADMSRFPTVKHFTSWLGLCPGTKITGGKVMSGKTKRVVNRAAQALRLAAAALRSSKSALGAYFRRMCSRMDKPKAVTAAAHKLARLIYTMLTKGEEYTDQGQDYYEERYRERVLRALSQRAAKLGMQMIPIEQPA

SEQ ID NO: 152942 - protein, 323 aa, unidentified
MNKFLAISNDQTFIGIDVAKDSLAVFVDSTNHHLSCLNQTKDLTKLAKQFKKLHPTLIVLEASGGYETAAAVVFAEFELPFAIVYPRRVRQFALGVGIIAKTDAIDAAALAYYGRVANIAPKPLPSDRLRHLQALTLRRQQLIEMRLAEQNRLETAHPKMHRNIKKHLDWLVKQIEDLETEIDNQIKADETLQETAQLLQSVPGVGQVLSSTLLTELPELGILSNKKIASLVGVAPFPRESGKWNGKRFCQGGRNSVRRILYMATISATRFNPAIKQFYDNLLEKGKLKKVALIACSRKLLTILNAMVRNNSHWQPKSLPLSA

SEQ ID NO: 152943 - protein, 349 aa, unidentified
MVVLGADLHKRTHTVVAVDDRGRKLGERTVSATREGHLDLRRWASRWRTRRWALEDGRHLSGRLEADLLRAGEDVVRVPPKLMAGARRSSREPGKSDPIDALAVARAALREPDLPTARLAGVEREIRLLVDRREDLVAERTREIQRLRWFLVELEIPEPALASLDRSVVQERVAAVLAGRVELVAGIASSILARVVDLSRVIRELERRIELQIRTLAPALLELVGCGPLTAAKIVGETGGVDRFRSKEAYARHNGTAPVPVWSGNTIRHRLSRGGNRQLNVALHRIAITQARLGGLARTYLDRRRAAGDTKTEALRALRRKLSDEVFRRLQLDATRHVDVPAASTAVAA

SEQ ID NO: 152944 - protein, 381 aa, unidentified
MTTAVTHHEQRNPNEATLFVAFELSEKTWKLGFTTGHGQKPRERTVTARHHEHVLNEIAQAKRRLGLPETAPVVSCYEAGREGFWLHRFLQGQGITNHVVDSSAIEVNRRRRRAKSDGLDVRKLLSMLMRYAQGERQVWQVVKAPSVEAEDQRHLHRDLETLKQERASTTTRIQGLLSSQGLRVTSLTKLPEPLEALRLWDGSPMPPGLRRRVMRVYAHYTFLSEQIAAVEVERRAQLQTSADASLDKIRQLMQLKGIGINGAWLLVMEFFGWRAFKNRREVGGLAGFTPTPYQSGESAREQGITKSGNRHVRWMTTELAWSWLRFQPDSALSVWFRERFGSGGKRLRRMGIVAVARKLLMALWRFLETGVLPAGAVLKEA

SEQ ID NO: 152945 - protein, 413 aa, unidentified
MDVVHPRCAGIDISKRDAKVCVRIQGRGNTPTTSTVTTWGAMSNQILALREHLLTDRVSCVVMEATGDYWKPYFYLLEDTLTVMLVNAHDARNMPGRKTDVSDAAWLADLGAHGLLRGSLVPPAAIRELRDLTRARTALTRDRSRQVQRIEKVLEDAGIKLSSVATDIMGVSGRAMLAALIAGTATPAAMADLAQRRMRSKIPALTEALTGRFTPHHGYLIRMHLDLIDQYGQALADLDVRIGEAMAPLAAARELLISIPGVSRIVAEVLLAETGGDMSVFPTAAHLASWAGTAPGCNESAGRVKSTKTRRGNRYAKTALGTAALAASRTKGTYLSAKYKRIAARRGPMKALVALEHSILVATWNMLTNGEFYRDPGADYFTLRIPAKTKARAIGQLEALGYRVSLQPLTDTA

SEQ ID NO: 152946 - protein, 336 aa, unidentified
MGQYVGIDLHRRTSTIYRMAEDGEVLGVERVLSQPFELAQAMGAAGSEPEVVLESTYGWYWAADVLEDLGAHVHLAHALGNNWGNRRVKNDERDAQDLAAMLRLGRLAEGWIAPPEIRELRELVRYRHSLTRHRTSVKAQIHGVMAKNGILPVVGEMWGPAGTAQLDSLEVPEAYALRLRSLREFLAYYDREITRIDARLHRRLKGESGYKALVRLPGVGKVLGAIFYAEIGDIGRFSSPKQLCSWAGLTPRHRESDAVVHRGAITKQGSPIVRWAAIEAVGNYRAKGNEKLRADYKRIAERRGRYKARVAVARKLLTLVFYAMRDGEVRCLSAAA

SEQ ID NO: 152947 - protein, 342 aa, unidentified
MNKLRIGVDLAHKLIQVCSSTNNKVHSNNEMTLQQFSEYLASLSPSTIIFEACASANYWHQFATSLGHNSLLISARLVMSVRQSQKTDKNDALAVLQASLLPDVHFITAKSINEQQAQSMLKLREHSVKQKVALKNQLSGLLREFNISSGRSICQFVGTIQDALENAENGFCDAFRKMLKVSLDLYLTLTEAIAAYDLALAKWIDETPSCKKLMRLEGVGILNAIHLFINLSSGELARFKAGKDAAACIGLTPTQHSSGGKVSLGKISRRRNTTLRSLLITGAMAVIQQVIKREPKTSKERWLKALIERRGKKCAAVALANKTVRTAFSLINNKTEYKAVLL

SEQ ID NO: 152948 - protein, 334 aa, unidentified
MLRKIEGPNWSPCDWIPVGVDVSEDYFDAAVQMDESLQQQRFARNKRGVNELRNWLKKYDVTDVHIWMEATGHLSSELAEMVYARGWKVTIVNARCIKHFAISQLDMNKRDKADARKILAFAKVANERKFKPWRPKNEVQKQLRDAQIELLGLKKALVCERNRRRSGMTSPEVKRSIDTTIVHLKAQIKLLHKESMRLIRSDWLLKRTYDVLASVRGLGEVTIALLLFRIDFDAFAKGRQLVKYAGLDVLDFESGKSVRKRSRISRIGLSDLRAALYWPAVVAIRDDRATAEFAKAIENRSKSKMIAICAVMARLLRTAFALVRNDRRAIEQGS

SEQ ID NO: 152949 - protein, 411 aa, unidentified
MNNTLFVGIDISKRSNVATFMNCEGKVVGRLTFSNNGSGADRLVAKILSYYEKEDFEAIRIGLENTSVYSKNLVWFLYEHEALNEHKFSIIPLNAIMVANYKKSFLDMDKDDITDSFAIADFIRIRPGLLPFKLDDRQEALKIMTRSRYNYVQALSRMKSQFLTRLFLSFSEMEAGKPFYSIFSKTSLSLLEEEFTLDELAEKPIPELVEFLQEKGGGKFQNPEEIAKVLKKAASSSYRVPAMVRESLNRTMASDMEIMRILENEIHNCDKNIEKLMKSVPAILVSIPGIGPVLAAGIMSEIGDISRFQKQESLGKMAGFKWKRNQSGKKESENKAAVLSGNKKLRYYLVEAANRVRIHDPVFEAYYRKKYAESKTHAHKRALILTARKLVRVIFYLLKENKLYKPDVGIS

SEQ ID NO: 152950 - protein, 315 aa, unidentified
MSQPVTVGIDASKAHLDVAARPGTRFRVANSPDGLVELVARLRPLAPALVVLEATGGYEAGALAALLAAGFPTAVVNPRRVRQFAAGIGQHAKTDPIDAAVLAHFAAVVAPPPAAPADPDRVALAALLDRRRQLLGMRVAEGNRLRPGLPAAVRAGIGAHLAWLDEQVAAIDREVAAAARRVPEWREKDRLLRSVKGVGPVVSRTLLADLPELGTRPPGKLAALAGVAPFAADSGRRKGERHIRGGRREVRRALYMAALAVARVPGPLREFAQRLKARGKPPKVALIAVARKLLRIANAVIRDGRPWDPKMAAAA

SEQ ID NO: 152951 - protein, 363 aa, unidentified
MIVIGTDTHKRTHTCGAVFAGTGQLAGELTAPAREPGFRELLDWGRDLDAERIWAIEDCRHVSGSLERFLIASGERVVRVPPKLMGESRRGERTAGKSDPIDALAIARAALREGPETLPAAHLDEDALQVKLLLDHREDLVKARSEDQQRLRWHLHDLWPELEIPAGALDRMVWLERLARKLARAEQGTRVAIARELLTEIRRRTRRASELERQIAALVKDQAPGLLELEGCGALTAAKLLAETAGAQRLPSDAKFARLAGVAPIPASSGNRVRHRLDRGGNRQLNCALHRIAVTQGRCHAPAREFLAKKQAEGKTRIEAIRCLKRHLARRVWRLLIDSEIDRSMTTVDTQRGSLAPQFAVAA

SEQ ID NO: 152952 - protein, 422 aa, unidentified
MLQETYDTEELIQRVAALDIGKAELTCCVRVPSPTAPGKRSQEVTTYKTMTRSLLVLADRLRELGVTRVVMEATSDYWKSPFYLLEACGFETWLVNAKDVKHLPGRPKTDRLDAVWLCKVAERQMLRPSFVPPQEIRQLRDLTRYRVDLIGVRTAEKNRVEKLLEDAQIKLSVVASDIFGVSGRAMLAALVAGERDPKVLAQLARQRLRAKLSLLEEAFYGRFSDHHAFLLTTMLDRVDQTSAAIATVEAKIEQQIVPFQAAVVRLDEICGVGRAAAQVLIAEIGVDMGRFPTPGHLVSWARFAPGVKESAGKKKGKASTGRGNPYLARVLGEAAVAAGRTNTFLGERYRRIARRRGAKRAVVAVGRSILIIVWHLLSDPDARFHDLGPGFYDTRIDTDRKRRNHVRQLEALGYKVTLEPAA

SEQ ID NO: 152953 - protein, 358 aa, unidentified
MRIIGCDLHARQQTIAMLDTDTGELEEKTLEHEGDTVREFYSALRGPILVGIEATGSMQWFLELMEELGIECRVGHPAKIRKAETRKQKHDRRDARLLLTLLAENRFPTIWMPSTEQRDLRTLLRHRHQWVRMRSRVQHTLQSMALNHGFRRGHALWSQANQHALRALPLAPHASERRAALLTLYPRLQGSIEELDKEVCEEVQQHPQARRLLTHPGVGPITALATEVFLGDPMRFSDGKALASYIGMIPSEHSSGGRQRLGAMSKQGNTLLRYLWCEAAMHAVERDPELKRFYRRKLVQKGLGKARVAAARKLGIRLWIMMRDQIDYEEFCRRGKARQESGRVRAGMPAINSGPAQQ

SEQ ID NO: 152954 - protein, 361 aa, unidentified
MRIIGCDLHARQQTLAMLDTTTGEMVNLTLMHEGSSVREFYSQLPRPVRVGIEATGAMHWFLNLMDELGIECQVGHPASIRAAEPRKQKHDRRDAELILKLLAEKRFPAIWLPTRELLDLRALLLHRPQWVRMRTRIQNSLQAIALANGLRRGAGLWSHDGQNKIACLPLLPHTADRRSALQAKYQQMEPEIANLTQQVAEQAAQRSGAQLLMTHPGVGPVTALATDVFLGDPKRFADGKALASYGGLIPGERSSGRRQRLGKVTKQGSPLLRFLWGEAGAHAVRRDPELKRFYRRKLVQKGLGKARVAVARKLGIRLWIMLRDEIEYQEFCRRGQKQESGAACAGMPETANGANRHRPVD

SEQ ID NO: 152955 - protein, 401 aa, unidentified
MKRLSGGIDVGSESHHITILDEEDHILFNQKVSHQLSEFAESIKLFKQIEKQEGGKLSFALEGKNGYSAPLDKILLNQGFTLYNVDNFKLKRFREAFAGEWRDDERDALMLSKMLKLKEHINSPREKVFIKIDKPSLVTESLKLLSRHQQTLIDERVRLTNRLSKKLLEVCPQILKLGKLKNKKIIAVLAKYPDFSKYKRITLCSLLKIRGIGKKGAFFLLKRLNHIEYMPGLTDIYQTIIFSYAQRILELQEEIKDIDKKLDEIGEESKEVKHLKTIPGVATKLASRLIGEIGDIERFPSEKQLAVYCGVACVDNNSGKVTKAHAVYKANKICKHTLITMAGGSIRFSFQCRDYYLKKRAEGKSHNHTLRCLARQLIRVIYKMLTEDRDYIVRKELRKVA

SEQ ID NO: 152956 - protein, 383 aa, unidentified
MRIVCGLDVHKDSVFVCILNEKGEKFEAKYGVLTPELEELHQLLLTHEVKEVTMESTSIYWYPIWRILSDIECLKLVNPYFIKQLPGRKSDVRDAAWIAECTMKDLIRGSFVPDEIVQRMRQYNRRIFDLNKEKVYKLTKLDALLQRCNIRISNYVSSTDSKSYKDVVKLLSEGIVNAEKLTEAIHGRTVNRVGKEVITAALTGVVNEVDIDLIRQYREEILMDDKHLKECQEKLTEICRKEFPREFDNLQTIPGVKERSGTSILSELGADMKMFITAAALVSWCGLKPRNEESAGKIKSRRITHGNKYIRKTMIECAWGASRTQNCFYSNFSYTQTVVRRKNAMKVKVAIARKMLVVIWHVLSDGVPYNDYKKPEAIAEGNS

SEQ ID NO: 152957 - protein, 430 aa, unidentified
MHNKNYISVGIDVGSAFSFMTILAPDETVILKPFKITHNNKDSLERAVSEIKKAEELYSLESRIFLESTGIYHFPLFCYLVDCGFNASIINPIITHSTKNGNIRKVKNDKIDSKGIAKLGLSKDIPVSQFPAKLVLELRSLTRKYYDLTDERSAHINKLKGDLHTVFPQYLDVFCDVTGKTSTMILRQYGTPDKILRGHKKTMIEKISKASRKGLAKASERYEKLCAAANAAKTFGCQIDSIYFNIFLTLDLVEKLDSALDSILNRIRQLITFNKNEKFIQQIKLLNTIPGVGFLTAVTIMCEIGDFSAFRNPKQLFAYFGLDPEVNESGKFVGTQLHMSKRGSRIALRAIFAVALASIRTKRNGEGINPYLRKYYELKSGQKPKMVAIGAVMHKVCNIVFAVLRDEKAFELRSPEEHCKQYQRPALAAA

SEQ ID NO: 152958 - protein, 430 aa, unidentified
MQEVSDEPLYRDRVCGIDIGKAGMAATIRVPSEKNPARRASETRMFPTTKRGVLELADWLRAWQVPAVVMEATSDYWKPVFYRLEAEELECVLADARQVKNLPGRPKRDTTDSQWLAACFERGSVFPCFVATPEFRIIRLHTRRRRDLTDERSREKQRTEKLLEDAAIKLSSVLTDLHGVTGREIMDRLIAGQRNPRALAECARTRARRKIPQLREALEGAEFFTAHHARLLQSILNRIDSITAEIGELSQVIEELLAPHEEQLQQAESMPGWGRRAAQDVIAETGPDMTRFPTGGHLASWCGRTPLDKQSGARNGQRRHKRGNKYITAVLGETAVAAGKTQTREGARHRKISRKRGKAKAVVATGNTQMKVYHALLSTPGTRYEDLGPDYYERQRDHNRRLSRLVGELGNLGYEVTLCRKPQPEDAPAA

SEQ ID NO: 152959 - protein, 337 aa, unidentified
MKVTLIGIDLAKSIFQVCGVNQAGKRIFNRQVRRAMLLELLVQHPDAALAMEACSGSNYWGRELQQRGFQVKLIPPQHVKPFVKGNKNDRNDAFAITEAARRPNLRCVEPRTLAQTDMIQVHRVLDRMIRQRTALINQIRGFLNEYGVVVSRGKEKLLAALPDLLEDAQNGLTPASRALYQAMYDEWRQMNAAIERVEKVLRRQAGADEAAQRLMQMKGVAEKIATATIACAGNGTSYRSGRHFAANLGLVPKEHSSGGKQSLGGITKRGNRYLRRLLVQGAWSVIRNVERSDDRMSRWAKQLIERRGKHRAVVAVANKMARILWSMLYHQTEFRAN

SEQ ID NO: 152960 - protein, 349 aa, unidentified
MSQNLNSAVAVIGIDIGKNSFHVVGLDDRGAIVLRQKWSRGQIEARLANMPPCLIGMEACVGAHHLSRKLKALGHEARLMPAKYVRPYSKGQKNDFRDAEAIAEAVQRPTMKFVATKTADQLDLQALHRVRERLVSQRTGIINQIRAFLLERGVAVRQGLRFLRAELPRILATPPDVLSARMVQVISDLAEDWRRLDHRIDDLSNQIAVLARQDAGCERLMSVPGIGPIISSAMVAAIGTGDAFSKGRDFAAWLGLVPKQISTGDRTILGKISKRGNRYLRVLFVQAAWVVLIKSMSWDRHGLKHWIEAAKKRLHRNVLAIALANKLARIAWGVLSGSRTFEVSKLQAA

SEQ ID NO: 152961 - protein, 382 aa, unidentified
MKSITTQHDVPTTTVTSDAGKPALPAACHRFALGLDVDLNYCVTALQCDHGAIKPAQKLTRPQLLKWVREQVAAGHQVHTVYEACGFGYTLHEALVTAGAQSLITTPVKLSPERRRKNDRLDARELCVRLARHLDGHAHELRPIRIPTVAERERRELGRQRDFWVREVRRLENHGRALRLEFEHATLPGNWAGPRVWPKLAGDCSAFVREQLAPVVAQIRAAKATIVQLTARVEATVKAEEVPTGLGALTVGLVEGEVCSWQRFRGRKAVGSYTGCCPSEHSSGGVQRFGHIDRHGNAHVRTLLVEAVWRLLRWQPNWHAGVKYRAKLLHGQSLKKKLAVALARQLAIDLWRWRTGRCSAADLGWTTERGTRSAACGMKPAA

SEQ ID NO: 152962 - protein, 483 aa, unidentified
MKPKPQQKSKKAGGQAAPSKWQEMNRRQRREMMRKIQSEDLTLEVMHPDAAGIDIGNESHYVAVPPTRDCQPVCRFGCTTSELKAMADWLKQCQIRTVAMQSTGVYWIAVYDILEEAGFEVYLVNARETKNLPGRKSDVQESQWLMKLHTYGLLRNSFRPSPEIRTMRTYWRQRNDLVRAAGRHIQRMQKALTQMNIQLANVLSDVSGMTGQAIIKAILAGERDPHQLSGLRDWRVKASEEEIARSLEGNWQEDLLFVLKQEQDGYEFCQQQMAECDRQLEQYLQQREDRTQGTSLPEEKRKERLRKKKKGNAPQFDLRAELFRMTGSDLTQIDSIDGTTAMTILSEAGWDMSKWKTEDHFVSWLRLCPDNKISGDKIIGKGRLPTNNRATLALKMAASTLRRSNTYLGAQFRRLRSKLGAPVAIKAMAAKLARLLYRMLRYGMSFIDRGEAFYESQHRKLQINYLKRKAANLGFQIIEAPAA

SEQ ID NO: 152963 - protein, 397 aa, unidentified
MLAVGIDVSKSKSTAAILKSDGTILAKPFTFRHDQPEMNALVKFLKDQNEPLVILMEYTGHYHYPVLKKLEEEGLAVCMINPYLMKKYGDTQIRKAKTDKKDALRIATYALEKAYQLVPHTPLDDKFDHLKFLARQYDQRVSTLVYNKGNLTNILDETMPGLTTVLPLKTRKPDTSLSLMFIRKFGSFDRIRHMGKARFLDSYSRLADKSHNNKSKHLGLEIYELAKNSITTHSDSDYTILAQNQCLDLVTASQKAIDEINIIMQQIATTIPEYKILIDMPGVGDHLGPLLLAEMGDVRRFHSASALNAYAGNDAPVYQSGNFESHNRHISKRGNAALRKYCFEVMQALKLTHPENDPVYLYLVKKEQEGKHPKAAKMAAVNKFLRIYYTRVMALDK

SEQ ID NO: 152964 - protein, 399 aa, unidentified
MNAVGIDVSKGKSTVAIMRPFGEIVAVPFEVNHSETELKQLANRIKKLPGESRVIMEYTGNYFQPIANYLHHEGIFVSVINAILIHDYSHSSIRRVKTDKKDAIKIANYGLDRWIDLPGYIPEGELRQILKTYNRQFSQYTKLKVVLTNSLITHLDQTFPNINTLFGNTPRQDGHQKWIDFSMTFWHCNCVSSQSQKSFVNKYEKWCHKAGYHYQPQKASEIYESASKSVNTLPKSPNTKFLIQESIQELNSLIDSLNRLRKEMNRIASLLPEYPVVMGMYGVGITLGPQLIAEIGDVQRFYNRKALIAYAGIDSCPYQSGTIDIKGRGISKRGSALLRKTLFQVMDCILRQKPGNDPVYLFLDKKRSEGKHYYVYMMAGANKFLRIYYARVNEYLNTL

SEQ ID NO: 152965 - protein, 420 aa, unidentified
MKSASSIACNQLPERPINDVTAGLDWARDDHAVSIVDSRGREVARFSVEHTMAGLGDLVAVLNRHGCNEVGIERSDGPVVEALLEAGITVVVISPNQVKNLRGRYGSAGNKDDRFDAFVLADTLRTDRTRLRPLTPDSDATLALRRACRARKDLVSHRVGVANQLREHLKRVFPGAVGLFAEIDSPISLTFLTRFDCQDRADWLSPKRLTAWLASVGYCGRVDPSVLHARLRAAPHGATGDHGATEAHTTRALLAVLITLTEQIKTLSTQISEQLAVHADAHIFTSLPRSGRVRAARLLAEIGDCRARFPTPEALACLAGVAPSTRQSGKIRAVGFRWACDKQLRDAVTDFAGDSRRANPWAADLYNHARDRGHDHPHAVRILARAWLHIIWHCWQNNTAYDPAKHGALQRFLHDRQHVA

SEQ ID NO: 152966 - protein, 425 aa, unidentified
MNYKQNEKINQVKESTLVVGIDIGSTTQYARAFDWRGIELGKVFPFSNSREGFESFKAWMQHLQDKYKKLDAIVGIEPTGHYWFDLGAYLEDEGILLVMVNPYAVKQTKELDDNSQSKNDRKDPKVIAKLVTEGRYSAPYTPDGVYADLRIMVANRKRLIREMTQIKNRFARWFAIYFPEYTDVFGDYEAQSSMLLLKKVCTPEAIVELGAEKINQIWRDAKLRAVGMKRATTLCETAKRSIGLKKGSSAAQYEMKLLLEDYEYKKAQLDAVMEEIEKLCRKIPESEQMLAIKGIGVITVAGFLAEVGDVRRFESPRQIQKLAGLSLRENSSGKHKGQTTISKRGRSKLRAVLFNAAIPLIAKNPEFKSLHEYYTTRANNPLKKKQSVIAISCKLIRVFYAILAKGVTYDAQKLISDIHRQPQVA

SEQ ID NO: 152967 - protein, 343 aa, unidentified
MMIIGCDYHPAFQQIERRLQHREEAEKFYRDLAAQGMKVRVGMEASGQARWFERLLAELNFELWIGDAAEIRTKRVRKQKTDRQDAQLILKLMLKDDFPRIWVPSWENRDLRQLLWHRHRMVQARTRIMNQLQAVALNEGLRCKKRLWREAGREQLEAFRLAPWASRRRRDLLELLDRLNPTITDLTRTIEQEVEKCPEAQRLMTHPGVGPLTALAFVLIIGTAERFQCGKQIASYLGLVPLEESSGNRRRLGHITKQGNALLRFLLVEAAQVSARSIPEWRNKYFHLAMRRGRKIAKVAMARRLAVQMFWMWRKGWDYEQVRKFGSHAGQPGNRDGVQSNTE

SEQ ID NO: 152968 - protein, 264 aa, unidentified
MENYVGIDISKNTFDVHFTADQRHACFDNTDIQIEAFAELMTQIKPALVVMEATGGYERPLAAKLHEKKIPVAVENPRRIRNFAKAVGLLAKTDMLDAGINARYAAVIKPAAQTAVNIILLKIKELNTRRQQLLDIRTAEKHRTEHAEDESVVRSINTVIAAIEHEIEKIEKRISTPVSQNDKFKQKAAIIWSVPGIGPKTVGMLIGALPELGCLHRRQIAALVGLAPIDRDSGTFRGKRMTRLRRSRRCPKTDLYAYSCRNTT

SEQ ID NO: 152969 - protein, 295 aa, unidentified
MFIPNGKALRVRNAPAAVRRMVLGISAREPSAVFCCESTGGYEKTLLDVCREEGRPVCLMNAQQVRCYAGHLGMLEKTDRIDARMISMAADDKKPAPLVHPTGRQRKLKELWTLRTALVKERDRVRNQLEHLREKEAGAAVRKVVAAIDRQLSSLGERCRVLAEEDKDSAAFLGRVQLVKGVGPVTALAMAALLPELLVLDDKRLAKLAGLAPIAGQSGTMDGPRHIQKGRGPVRRALYFAAVTASRHNRILSAFYGRLVKAGKARKVALVAVMHKLICLLRRIAQNPDFVPAST

SEQ ID NO: 152970 - protein, 341 aa, unidentified
MDKELFFGVDVSKKTLDLAYYDGEAIDWKNAHIQVSNDDAGFKKIGSWVAKVGKDFDTFLFCMEYTGLYNQNFRLWLESKEYIYGMVEPRKMHRFEPDLDDDQRSLDRIKTDELDAFRIAIYCEQNHKKILRNPSKLPSPVYFKLKRLLAERKQNTKQSVLYKQQLHDICAYDTDLSAERKNILLKNMQENQKAIDKEIDSYMNEDTSIRKNYNLLTSIPGIGRIIALEAIVLTENFTAISNPRKYACYIGIAPFKKESGTSVRKKTGVSKKGFSEAKADLSIAVLSAIRNNPSIRDYWIRKRKEKCGGIVLNAVKFKLVLRMFAVIKRGTPYVETDAYKN

SEQ ID NO: 152971 - protein, 408 aa, unidentified
MQLMYARCAGLDVHARQVVACVRIVVKATVTYEHLTVPTTTRGLLELADWLSGHEVTHVVMEATGVYWKPVWHLLEGQVELLLANAQHVQNVPGRKSDVNDAQWLADLLAVGLIRGSFVPPAAIQALRDLTRTRKQLVRETGRHTQRLQKILEDANIKPAETLSDIRGKSGQAILRALIAGETDPERLAGLARGLKASHRQLVDALQGRVTEHHRFMLKLHLEQIDAIETGLSAIEQRLSEALAPFRAARDLLKTMPGISDTVAAVVLAEVGDDSSPFPTASHLLSWGGFAPRLDESAGKHRSTRTRPSAPWLKTTLVQAAWAAARTKDSYFHAQFVRLKSRRGPKKAILAVAASMLTAVYYMLRDGVEFHDLGAQYFAHHDKDQITKRLLRRLRDLGVEVEVKNKAA

SEQ ID NO: 152972 - protein, 311 aa, unidentified
MIIAPGFIGIDVSKNHLDIFDAAIGRSIRIDNSVPALAGLTESWAQREAAFVLFEATGRYDLLLRRALAAGGIRFARVNPGRARDFARAAGFLAKTDAVDAHMLAAMAHCLHPRTEDARTEPREQLALLNKRRDQLVATRQQERTRRHECSDPISLDSIAEHLAWLDAAIEAMQAQIAALIASTPELDRARRLLASTPGVGPVTAATLLALLPELGQRSPKQLAALVGLAPFNNDSGARRRQRSIRGGRKRVRDALYIAAFSAAHHAPRFVAFYKTLISAGKPTKLAIIAVARKLLTVLNAIVRDQQPFRA

SEQ ID NO: 152973 - protein, 364 aa, unidentified
MKKLTTAATNGIEKLQGLTIGLDLGDRSSHYCVLDEKGRILVESKVSTSPNAIKEVFGSKPRSRIAVETGMHSPWVSRLLSGLGHEVIVAHARNVRLIGESRRKDDRLDAQTLARLARIDPQLLSPVQHRSARAQADLTLIRARAGLVRARTALVNTARGLAKSYGERLRGCNVRNMNPEKADALSPELQRALQPLLAGIEVVSEQIHEYNERIECLAQESYPQVALLKQVKGVGTLIALTFLLTLEDAHRFRKSRDVGCYLGLQPGRRNSGQSEPQMHISKEGDPYLRTLLVQGAQHILGPFGPDSDLRRWGLKLAERGGRNAKKRAIIATARKLAVLLHRLWVSGEVYEPLRNNQGTIAAAA

SEQ ID NO: 152974 - protein, 456 aa, unidentified
MQTRVIGIDLAVTASHKAIVLDPASNEFLGRPRSFRSHPAEMDHIWEWAHQDTHEPVQVVVICEATGMAWYPVCVYFSDRGARVYRVHGRKTRDLRRVLKRHAGSDRIDSRVLAQLYAVVGKYLDPWRLPTGDQLALQRACREWDSWRSVDVAIQNRLQAYDQWAWGGLTRLIPVGALNWMRKNWYDPWRVEDAGSTALTKAWQEAYPEQAASTDWIPALVDRAAEMTTLYRLPKRVGYADLQARMQRELAMQAQIREARRELSRTHIQPVYRQLCPERHLETIYGVGADSAAIYIAFIQDIARFRSVERFRSWCGIIPASHQSGDFEAKHMPLTQAGPNLVKATLYVNANIARQWDVQFAALYYRQMVEYGKHHTQAICACASHLASRIYTLLKQQRPYELRDLDQQPITSEQSRDLCLTRYRVSPEVRRRTSVGARKQRVQKRTEQHFLEHQPT

SEQ ID NO: 152975 - protein, 370 aa, unidentified
MLDTTTFVGLDVHARSIKAVSLDVMTGEVRCATFGYDAGAVAEWVRSVDPKARCVYESGVTGFDLQKRLSGLGVDCVVGAVSKMIKPSADRRRKNDRNDAEFLARMLSVGNVVEVWVPDDECEAARDLTRALEDARDDLSRSKQRLSKFLLRHGLVFDERTPTGRRKGNWTRAHWSWIESIRFAEGADNEALAYYVDAVRRAAEDKARLEGLVEAEARKPRWRRRVDSLRCLKGVDTATAADLVFEAGEFSRFGNARSFAAWVGLTPSEHSSGESDRRGAITKAGNKHLRKALVEAAWHYLTCSARPKEPARGQAPDPGARRHAAKGVRRLVERREALLARGVHGNKANVATARELACWVWAVGLMAEEA

SEQ ID NO: 152976 - protein, 317 aa, unidentified
MSKHSMVCAGIDTGKHKLDVALDGHPEQMQVDNTPDGHRVLSTWLRKHRAQRIGIEASGGYEQAVVATLRRNGFVVIVFQPAQVRAYAKFHLQRAKNDKIDAALIALCSAATKTVHAPPDPRLVPFAASLTMIEQITEDIARLKTRRESCRDQRLRRFWNEEIGRLKLLMRGELKQLIAAIRQHPDFAEQLDLIASVEGIGHRTAVAILVRMPEIGSLTREEAAALAGLAPYDDDSGKRLGERHIAGGRERLRTSLYAASLPAAFNWNPQIIALYRRLTAAGKSHKAALVACARKLLIFANTVVARGTPWVSKTATS

SEQ ID NO: 152977 - protein, 421 aa, unidentified
MKNQGREVKVAAMGLDVHYKFSTVTMRDEQGRVVARERLEHTDRAALRGRLAQWPKGVPAVVEASFGWGWLSDELTAAGLEVQLSNCYKVEQMRKARGECKTNKKDADLLSLLPREAQPWWRIWLVPPEVRDQREWMRYRADLVGVQTQTKSRICAVFHRHGIFHDFSDLFGCKGRALLAELCREGRHSGGVLPAGALAALRGQVRLLDQVRQQLSDVARQLRRVLKHDPLTQRLAGIPGIGLILAHVLKSEIGQIERFGGNHNRLACYSLLGPRAEDTGEHDPSKSPLGRHLGQRGNRTLKWAFIEAAHGAVHHGGCWRAMFDRVTKGGKMDRNRGYIRVARELVPVVTAIWKNGTTYQEKPPARPGSGQGDPSATTSPRQRLEKFLNCPARSLGAVKLSSRTRSGTGQLYPPMVPALKA

SEQ ID NO: 152978 - protein, 402 aa, unidentified
MNAVGIDVSKGKSMVAIMRPFGEIVSAPFEIKHTASDINSLVELINSVEGESRIVMEHTGRYYEVLAHQLSEANLFVSAINPKLIKDFDNDSLRKVKSDKADAIKIARYALDKWQNLKQYNVMDELRNQLKTMNRQFGFYMKHKTAMKNNLIGILDQTYPGVNTYFDSPARSDGSQKWVDFASTYWHVDCVRKVSLNAFIDHYQNWCKRKKYNFSQSKAEEIYGKAKELVPVLPKDAITKLIIKQAVDQLNSASTTVESLRTLMNETASKLPEYPVVMAMKGVGTSLGPQLIAEIGDVSRFTHKSAITAFAGVDPGVNESGSYEQKSVPTSKRGSSDLRKTLFQVMDVLIKTHPQDDPVYQFLDKKRAQGKPYYVYMTAGANKFLRIYYGRVKEYLSSLPES

SEQ ID NO: 152979 - protein, 356 aa, unidentified
MISSTKYIGMDVHTQSISSAVMNSVGKVVMESVIETKASTILQFIDGLRGDLRVTFEEGTWAAWLYDVQKPHVTEVVVCNPRKAALLKDGSKGDRIDARKLAELLYMNRIKSVYHGENGLRTLKELARSYLTITKDLTRVMNRLKALYRSWGIPCAGKDVYAPRHRAEWLSKISEAGVRRRAEHYYQQLDVLRLLRQEVRRDLLAEAKKHKPWKLLRQIPGIGPIRAALLVALMQTPHRFRTKRQLWKYSGLGLETHDSAQYHAVKGELQRSKRPATVRGLNKDHNHDLKDIFKGAAMQTSTAAGPLHDFYENLLAKGRKPTMARLTLARKIAAITLIVWKKEVRFDAKHLKQQAA

SEQ ID NO: 152980 - protein, 342 aa, unidentified
MQVTTIGLDIAKNVFQVHGIDAAEKVVVRRQLRRNQVLEFFKALPPCLIGMEACATAHYWARELTKLGHQVRLMPAKDVKAYVKRNKNDAADAEAICEAVRRPTMRFVQIKSAEQQSQLMLHRTRDLLMRQRTQVINALRAHLGELGITAAQGKAGLTELLAIIAGSANERLPAEAHASLIVLAAELQAMRTLIASIEKRIIAHHRLDEASKRLRSIPGIGLVGATAIAATVTDPKAFRSGRDLAAWIGLVPRQDSTGGKQKLGPISKQGDRYLRRILVVGAHAVLKLARQKPEKYPWLTQLLARKPFKVVAVALANKMARIAWALLVKGGPYRARALVAAA

SEQ ID NO: 152981 - protein, 359 aa, unidentified
MREYIAFDSHKHYTLAVHESRRTGRSRQRRINHSPGAIREHLRGCESGTPVAVEATGNWYWIFEEIEQAGLHGVLVHPRKAKLMMGMINKTDKLDAEGLNRLQRNGTLPTVWVPPGALRDLRELTRGRLVLTRERTRLKNRIHATLARYGLTITEVSDIFGVGIRPTLLERIGRLPEETRYMTDLLLRRLDTLAAQIVEVEKRVKALARKTPAMRRLMTAPGIAEILATTILLEIGDVARFPSAEHLASYAGTTPRVKASGDKVRYGKLRPDVNRYLKWAYLEAANSVALNHAKQPGRFVSQRYRRLSVRRNSPKAKGAVARHLAEATWHMLTREEDYRDRGAAAAGEQIVARRKVSGK

SEQ ID NO: 152982 - protein, 378 aa, unidentified
MEKCIKYVGLDVHAASISVAVADEGRDGEVRFLGKFANDSASVVKLVKKLGPPSTLRVCYEAGPTGYVLYWQLAKLGVACVVVAPTLIPTRAGDRVKTDRRDAEKLARCHRSGELTAVWVPDGAHEALRDVVRAREAAKRDQLRARNRLSKFLLRRGLRKPEPMGAWTGPHLAWLRQLHLPHAADEATRLDYLFEVEHQCRRIERLEAAIDEAVAQAPAELREVIAALQSLRGIAKVTAVTIVAEVGKLSRFDHPSQLMGYAGVVPREYSTGQSEHKGGITKTGNAHLRRVLGEASLAYRRPPKVGKQLKRRQQGQREEVIEIAWKAQTRLCGRYRRLVHKGKREHVATTAVARELLGFIWAIGIDVERRQALAHKAA

SEQ ID NO: 152983 - protein, 397 aa, unidentified
MKGRYNLMIYVGIDIAKLNHFASAISSDGTELMKPFQFTNDGDGFQLLNSRLIQLSYEDDSIIIGLESTAHYGDNLVRYLVACNYNVCVLNPIKTSVMRKDNIRRTKTDKVDTLIIAKTLKMQDSYRFVSFYDLDLLDLKQLGRFRQKTIKQRTRLKIQLTSYVDQVFPELQYFFKSGLHQKAVYALLKEAPTPQDIASMHMTHLSHLLVAASHGHFKKELAKELRVLAQKSVGASDSTLSIQITHTISQIELLDSQLNSVEAEMTEIMKFNDSVIMTIPGIGYINGGMILGEIGDIHRFQSPAKLLAFAGLDPSVYQSGNYSAKRTRMSKRGSRVLRYALVNAAHNVVKNNAAFKAYYDKKMAEGRTHYNALGHCAGKLVRVIWKMLTDEVEFNLD

SEQ ID NO: 152984 - protein, 449 aa, unidentified
MPKQRSRVASLPVIEPNAAGIDVGATEIFVAVPADRDPEPVRCFPTFTVDLERLADWLQQCQIRTVAMESTGVYWIPLFQILEKRKFDVRLVNAHHVKNVPGRKTDVEDCQWIQHLHSVGLLRGSFRPDDEVCAMRSLWRHRDNLIQMATLHLQHMQKALDQMNLQIHHVISDLAGTTGLAIMDAILAGERDPHKLAQLRNRHIQACEETIIKSLVGDYREEHLFTLRQSLKSYRHYQELIQEVDLQVKQMLQKLPSKIPAEQKPPKGGKIRRTPWRNEPPQLRNDLYRAYGVDLTEVPGINSLTAQMLLTEIGPDWSRFPTAAAFCSWLRLCPNPKISGGQVLSSRTQPTKNRAALALRMATQGLHRSDSFLGDYFRRMKARMGAPKAMTATAHKLARIIYHMVTTQQEYDATVFQQQEQRRRLQKSARLHAQARELGFQLVPMGVVP

SEQ ID NO: 152985 - protein, 348 aa, unidentified
MFVGIDVHKDTHTAVGISPYGEKLFEITVGNYQKDFETLKEKVDEASGILSPYIGLEDVRGYGERLAGYLYEKYPVYHVPSILVDRARQNATHPEKSDSLDALGVAKVMIQSIDTLLPYTISKESEKAKQVKEISIDREDLVLERTRLKNQVHTLLYRIYNTEYQTKYKDPFSIKALTFWRNAKPTCDPFLLKTMKRKVRRILDIHVEVTDLEKDMTTLLDTGGYTIQTASGCGLVLSSTIIGEIGDINRFTSPGALSKYAGCSPRERSSGKKTRHVKSRSGNRRLNCAFHRMALSQISRSGNEKARAYFKRKISEGKSKSQALVCLRRQMVNIVWMMLKHKTIYRNA

SEQ ID NO: 152986 - protein, 337 aa, unidentified
MIVVGLDVHKRSLTAAAVDELGREQGSWSGPIGVGVLGWARSLADERRWAVEDCRHVTRAIEQTLSAAGEPLVRVPPRLTAPQRRRGRTRGKSDRIDAIAIARAALQEPHLEGPHAGEETLRELKLLVDHRDDLVDERRRAQQRLRWHLHELDPALHVPLGALDRTVWLDRLARQLARRDQSTQTRIARELVGRCRMLTRTILELDRELRQRTQTLAPRLLALAGCGPVSAAKLLCEIGPIDRFRTDAQLARHAGVAPLDASSGKHQRHRLDRGGNRQLNCALHRIAVTQGRVHPPARAYLERKQSEGKSRREALRCLKRQLARTVYTTLKGEPLLT

SEQ ID NO: 152987 - protein, 345 aa, unidentified
MEQISRIGMDTSKHIFQLHGVNTAEQPVLRRKLRRKEMFAFLEKLAPTVIAIEACGASHHCARLLQSFGHSVKLIAPQLVKPYIKRGKNDAADAEALCEAMSRPTMRFVPVKSAEQQAALMLVGVRDRLIRNRTQLSNAIRGYAGEFGLTAAKGKAHLAPLLDRIHADESLPTLARELFAAQAKEYAQLQAQIDEVDARLMAWHRADECSRRLTKLPGVGPIGAVLLTMKTPEPELFRSGRQFAAWIGLTPKDHSTAGKVRLGGITRAGDKGLRSVLVVGATTVIQHAQRGGRPSPWLTELLKRKSPKLAAVALANKTARIAWKLMVTGENYAAKAAPAALAGAA

SEQ ID NO: 152988 - protein, 464 aa, unidentified
MDVLIERPGALDVHKASVTACVRVPREGQRVQEVREFKTTVRGLLALRDWFTESGVTHVAMEATGVYWKPVWAILEDDFELLLCNAAHVKNVPGRKTDVGDSQWLCRLLECGLLRASFVPPKPVRGLRELTRRRKTLVRDRQREAGRLHKTLEDTGIKLDCVATDILGVSGRLMLNALIGGERDPATLAGLAKGRLRIKHAALVEAFEGVRFGDQNALLIGGILRHIDFLDAEVDALSTAIETHIAAQSQPARNADQTAADARTVRPFELAVELLCSLHGIQDRTAQTLIGEFGIDMSRFPSEKHFVSWAAQCPGNHESAGKRRSGRSRKGPEHLNTALNDAAMGAIRVKDSHFERKYRRVKGRSCHGVALGAVKHSLLIAIYHMLKNGELYRPPTPNPEAERKQRERTTKRLIAHLERLGHAVTLQPTSTSTSTPTAPAPAPATATSTAPAPATSTAEAVAVA

SEQ ID NO: 152989 - protein, 358 aa, unidentified
MEYGAIDLHKKESQIRILTEDGEIVDRRVATTRERVTTVFWGRPRLRILLEAATESEWVAQHLETLGHEVIVADPNFTAMYGHRSRRIKTDRRDGAALAEACQRGCYRVAHRRSALRRTVQAQLNIRRELTEARTRAISLTRALVRGGGFRIRSGSTDSFLTRVAALDLPLGMTDTLAPMRRVIELLNTELTTADETFATHVAEDCVVRRLTTLPGIGPITASAYVAALDDAGRFGGAAQVASYLGLVPREYSSGEQQRRGHVMRSAHPYVQALLVQAAWRIVRVKDPRTVALRTWADAIAHRRGKKIAIVALARRLARVLFAMWRDEVAYDPARIRSSPRTLVVASDDGVTESAVNG

SEQ ID NO: 152990 - protein, 352 aa, unidentified
MNQLKYIGMDVHKAMTVISVLNSEGKELAQAIIETKSTTLIDFIHGQRGTLHVTFEEGTQAAWLYDLIRPHVASVLVCDPRKIVTRGNKADKIDARRLAELLRTKGLTAVYHGEHSTRAVKELTRNYQEMMEDSTRVKNRLKALFRARGIDCTGSAVYSPDERKTWTDKLEQAAVRARAGRLWEELDALEKLCEQAEDDLKTEARKHAAIKILQGIPGIGPVRAAVILGIAGTPHRFRSKKQFWTYCGLAVTSKITSEYQMVDGRISRSKKQPLVRGLNRNYSRTLKDVFKGAAKTAAAGAWKFHFDAMVANGQGPPLALLTIARKMASITLALWKRGERYDQKKVEILHAA

SEQ ID NO: 152991 - protein, 312 aa, unidentified
MNRVICGVDVSKDWLDAHIRPSGTFERFSNDATGIGALAALCRAETVELVVMEASGGYERQAFLLLWELGIACALSNPRHVRRFAEAMGFLEKTDRIDAAMIAHYAETKRLSALSPPKAAQLRLSVLMTRLSQVTRDLIVQKQRRSAAGDGAIVESLNEVIALLTRQGSRLEGEIASMIDDDPLWACLNRVFRSVKGVADRTVARLMGELPEIGRISNKAIVKLAGLAPIANDSGKRSGHRPVRGGRSGPRGILFLVAATAARHDPHLAAFRQRLQSAGKPKMVIRIALARKLLVILNAKARDARREFEHAT

SEQ ID NO: 152992 - protein, 338 aa, unidentified
MALYCGIDLHSTNHWLTVIDEADRRVYERRLPNDLAVTLAVLEPYRAELVACAVESTFNWYWLVDGLMQAGHAVKLVNTSAVRQYDGLKHADDRHDAFQLAHLLRLGILPTGYIYPKRERALRDLLRQRTRLVQQRTTHALNVKSILARQSGIDFPSAVILGEKAAPWPILSDPNVALAVEAHRPVIEALNEQIARIEREVRRQVRPDPRYQLLQTVNGIGPVLAWTILLEAGDIERFASVGHFASYCRCVQSRRLSNGKKKGEANQKNGNPYLAWAFLEAAHFALRFEPAAKRFFERKRRERNAIVAIKALAHKLARACYFILRDEVPFMSERLFSY

SEQ ID NO: 152993 - protein, 346 aa, unidentified
MAYFVGLDVSVKETAVCVVDEAGKVLCEQKVLSEPDDIVTLLTSIGVDYGRVGIEAGPLSQWLVNGMAEASLPVICVETRHMKSLLKAQQVNKSDRHDARGIAQMMRVGLFKPVHVKTLASQEKRMLLTARKLVQRKMLDVDADLRGTLRNFGLKVGVVSKLGFEARIRKLVEGLPRLAAIVEPLLTIRRVMRQEFTRLHKMLLDVVRHDPVCRRLMTAPGVGAVVALTYRATVDQPQRFVHSRAVGAHVGLTPRRHQSGEIDYDGGISKSGDTMLRTMLYEAAHILLTQSRSWSWLKAWGMRVAQRRGQRRAIVAVARRLAVILHRMWTDGTDFRWGREPAAEIA

SEQ ID NO: 152994 - protein, 410 aa, unidentified
MSERPYAFYVGVDWASETHQFTVLTPERHLEAERRIEHTGRALSEMADWLTALADGEPARIAVAIEVPRGPVVETLLERGFHVFAINPKQLDRFRDRHSPAGAKDDRRDGFVLADSLRTDRPAFRQVHVDDPLLIQLRELSRAEEELQTELRRLSNRLWEQLQRFYPQVLRLSPAVDEPWIWALLQLAPTPVAARALRRATLARLLARHRIRRVTAETVLAELHSPALRVAPGTTEAAREHIALLLPRLQLLHEQRGRCARRIEQLLDALEGPDAEHRDVTVLRSLPGVGRVIAATMLAEAARPLAERDYHAVRTQGGVAPITRQSGKSVLVSMRYACNHRLRNALYHWGRVSAQHDPSTRRHYRALRQRGHGHARAIRGVIDRLLVVLMAMLRTGTTYDPARRRVPAAA

SEQ ID NO: 152995 - protein, 350 aa, unidentified
MIVLGADTHKRSHTVAAVSARSGELVGERTVQVGVKGFDALVVWARGLGAERVWALEDCRHVSGSLERFLIERGERVLRVTTKLMADARRRARGRGKSDSIDAIAVARAALREGLEGLPAAQLEGPELDLRLLVDHRERLVRQRVALNNTLQWHLHDIWPELRLPGSSLFYGNWGPRIARRLARAEQTMRVRIARDELGRIRELSQAIKALEAEIAQLVAQIAPQLLSEPGFGPLTAAKLVGEIAGAGRFASDAKLARAAGVAPIPVSSGKTNRHRLDRGGNRQINATIHRIAVTRLRCHTETQDYIARKRAEGKSTKEAIRCLKRHLARRLWHLLQPPTPDQDTIKLLT

SEQ ID NO: 152996 - protein, 349 aa, unidentified
MIIIGADYHPGFQQIACVDTNTGEVQERRLEHPEEAEKFYRDLGAQGACVRVGMEASGHARWFERLLSELKFELWIGDAGEIRTKRVRKQKTDRQDAELILQLLMENRFPQIWVPSGENRDLRQLLWRRRRMVQARTRIMNQLQAVALNEGLLCKKRLWRETGRKQLESFPLAPWASRRRQDLLELLDRLTLTIAELTQAIEREVGKCPEARRLQTHPGVGPLTALAFVLIIGKADRFQCGKQIASYLGLVPLEDSSGKRRRLGHITKQGNTLLRFLLVEAAQVTVRSDPEWRSNYFHLAMRRGRKIAKVAMARRLAVRMYWMWRRGWDYEQLNKFGSHAGQPGSGDGA

SEQ ID NO: 152997 - protein, 353 aa, unidentified
MTVYAGVDLHSNNNYVGIVNEANAVLFKKQLPNDLTTVLSVLEPFRKDMAGIAVESTFNWYWFVDGLMDNGYKVHLANPAAIQQYEGLKNIDDKRSALWLANLLRLNILPTGYIYPKEERPLRDLLRKRLHLVRHRSSHILSIKNIMSRSLGLRMKSDEVKKLTENRVKELFPEEHLFLAVNASATIMRQLTYQVGQIEKAVLAKAKLKEEFRGLLMLPGIGDILGLTVMLEAGNIRRFPEVGDYSSYCRCVKSTRSSNGKNKGEGNRKNGNKYLSWAYVEAANIAKRYYPIVNRYYQKKLAQTNEAVAIKAISNKLARASYYILRDQVAYDEKKLFGGRAEPVMGLVNNRKT

SEQ ID NO: 152998 - protein, 342 aa, unidentified
MELSVLGIDLAKHVFELYGIDGRGKEMLSKRLTRKKLLSFVARLPECLVVMEACGASHYWAREMAKLGHRVKLLKARDVKAYVQGNKDDRHDAAAIAEAGTRGHLREVTINSVEQQDMQSLHRIRELLVGQRTALANQLRGLLAEYGVVMGKGLGVLRRRIPEVLEEAENGLTAGFRACVAEMYERLRGFDERVSDYDRRIGGAARADERCRRVLEVEGLGPMSASALVAAVGDARQFDSGRQLAACIGVAPAHTGTGGKNRVLGLSKSRGNRYVRTLLIHGARSVVRHAANKTDPRSRWINRLVARSDANVAAVAVANKNARIAWALLTRAERYQPAQATA

SEQ ID NO: 152999 - protein, 327 aa, unidentified
MNHIGIDVDSQFLVCQIRRTDQGTTSKQFRNNPSGHRQFVQWATANQQPARVCMEATGVYSLAFARHISECERIEVMVVNPKAMKHFATARLTRGKTDLMDAAVILEFLERMEFKPWQPPPAATLQIQYLCRRIVQLQREYTREENRHQAALRLGDIGQLVANDTAVNQRHLQRRIARLEKTVAALIDDLAPLQHQLQQLTSITGIAAKTGPRILAELATLPDDLRGPQWVAYAGLDPRPYESGTSIHKPRRITKQGNAYLRNALYFPALVASRHDPHVKAFYDHLIKKGKKPIQVILAIMRKLLLAIWGMFKNNETWDGNKFYRIA

SEQ ID NO: 153000 - protein, 338 aa, unidentified
MSHIKVLGIDLAKDVFQLHGTDTKGKVVLRKRMSRTKLINFMSNLSPCLVGIEACGGSHYWARKFISMGHTVKMMAPQFVKPYVKSNKNDANDAEGINEAVTRPTMRFVPIKGVEQQDALLIHRVRELAMKQRTAHGNQLRGLLNEYGIVIPKGISHLNRLPEILETNKDKLSHASIELFNLLYEQLKTYTKQIEQYNKKIEEHADTDPRCVAIQKVDGIGPITASAMVATISDPSVFKNGREVSAWLGLVPKQHSSGNKVVLGGITKQGDRYVRKLLVHGGRSVVRTCREKTDKKNEWVKDKLQRGGFNKASVAVANKNARTIWALLATGECYRNPA

SEQ ID NO: 153001 - protein, 426 aa, unidentified
MKKLDFLSTLFVGIDVSSKSNVVCALDFQSNKLLQFSVPNNQPGAEEFVTKLISILEGSRFKTVVLALESTSFYGIHIANFLSSSSLLMPYNPYVYCLNPKMIANYRKSFIGLSKTDPLDAFVIADFARVGRINIEPWHGSQYLALQRLTRHRLHLVECITREKTYMVSNIFLKFSELSILKNEAHPFTSNHTATASAILTEMLSLEDLVSMPIEELVDFVCKTSKNRFTDPAKVADILRQAARNSYRLDKCLYEPLTISIASSFNCVSAYQTEIKIIDKAIEKAIKGLNPLEYQCLISIPGIGPVYASGILAEIGTISAFHSHEALAMYAGIVWKQNQSGDFRADDTKMSKAGNKFLRYYLIEAANSVRNNIPEYRDFYLKKYLEVKTHQHKRALALTSRKLIRLIFGLLAKNQLYSSKRVNQTE

SEQ ID NO: 153002 - protein, 445 aa, unidentified
MSASTGATLATVAESLQGGAMKRDLSVENEFSVYVGLDWGTEFHRACVLNSRGEILRECRIDHSGQAISDFVRGLNEMGNGKPDHVAVAIEVPRGPVVEALLEGGLVVFSINPKQLDRFRDRYTVAGAKDDSRDAYVAADSLRTDQHCFRRIVADHPDVVRLRELSRTEESLGEDFRRVVNQLYQLLLRSYPQLLQLNSTPDEPWIWALLELAPIPQRGARLTVARLKAWLSKHRIRRWTAEALREAIATPPLPLAAGSADAISEHTLLLLPQLRLLYSQRKEVRDRIEALLNRMTLQGSERSECREHRDVGLLLSLPGLGYLIAASLFTEASDPLAQRDYYALRAHSGIAPVTKQSGKSRQVVMRHGCSERLRNAMYHWARCSVQHDPLSKLHYARLRKVGHKHGRALRGVADRLSSILIAMLKTGQPYDAKRRQNAATSADTA

SEQ ID NO: 153003 - protein, 353 aa, unidentified
MKKLFIGIDFAKEKFDAAIIEACGLKEFGNREYGTFTNDKKGYRQFFKWVKTNADKSVENEWLFCGEDTGSCSLGLSKWLYGKGLDIWIENAYSIKHSSGIQRVKSDKADSSMIAEYAWRHQDKAVLFEPLSESLSQLREVFLYRHKLVQQHIAMDVRKQDKEAAEPSKAISFIKRKSKHLMSEIDNAIKECDLMIDRIIESDAELKENYAIITSIKGVARQNGACLLIFTNNFRRFDLDARKIACYYGVAPFGKDSGTSIHSPAKTSHFANKLIKSLLGQAAHCAKKINPEIREYYNRLIGRGKKPQVALNNVKNKLIRIIVALVRKKVYYDPKTYMFYNAKFTDVKQMLNS

SEQ ID NO: 153004 - protein, 338 aa, unidentified
MQVTRVGLDIAKNVFQVHGVDEHGKVVIRKQLTRAKVLAYFAQLPVCRIGIEACGSAHYWGRELQKLGHDVRLMAVQLIKPFRTKQKNDRNDAEAICEAVSRPQMRFVPIKTVEQQAVLTVHRARELLVSERTAVANQVRGLLLEYGVAIAAGIQRLRRELSAVLATAAEPLPTLARTVVTELHARLLELDDRIAGYDRQIAQLAKQSTAAQRLMAVEGVGPITATAVVATVGDAKAFPHGRQFAAWLGLVPKQFSTGGKSVLGRITKRGNVYLRTLLIHGARAVLQNSAKRTDAKSQWVEALRQRRGDNIAAVALAAKHARILWALLAGGQEYRVAD

SEQ ID NO: 153005 - protein, 427 aa, unidentified
MDLIYDCCAGLDVHKRTVMVCVNRYDRGAGKVRKEVREFGTMTEDILALGDWLREQGVRHLAMESTGVYWKPIYNLLEDAFEVLLVNAQHIKKVPGRKTDTKDCEWIAELLQHGLLRGSFVPPRPMRELRDLTRHRVQAVGDKTRVVNRLQQVLEDANIKLGSVASDVVGVSGRSMIEAIIAGEEDPEELAELARRRLRGKNPQLKHALRGRVTAHHRFLLETLYEQLKSLEATIERLTRRISAVMAQETRSTEEKESGVLPFDRAATLLTTVPGIGRVAAETILAETGTRMAQFPSAAHLASWAGISAGNNESAGKRKSGKTPKGNRWLRRILVQVAQAAGRSKNTYLSAQYRRIAARRGRKRAAVAVAHTILVIVYHMLRTAAPYHDLGPNFFDQLDPQRLTRYLVKRLEALGNKVTVEPLEPAA

SEQ ID NO: 153006 - protein, 404 aa, unidentified
MIFVGVDWAEAHHDLAVKDAAGKTLAKRRISDNLEGVRHLHEVLASYTDDPSEVLIGIETDRGLFVSALRSAGYRVFAVNPFSASRYRDRHSSSGAKSDPGDAEVLADLVRTDSHNHREIAGDSELVEAVKILARAHKSMIWNRQRQTSSLRSILREYYPGALAAFGDDLDAKQAIEVLLIAPTPALGRGLLRSRIAAALRRGGRKRRIEERSIEIQEALRAPQLEAPALISHAFGETVKASASVIAELSRQIETLEAELASHFEKHPDAKIVRSLPGLGTVLGARVLGEFGDDPDRFANAKCRKNYAGSSPITRASGTKRIVLARYARNRRLADALYLWAFASLSTSPGARALYDRHRDAGDSHHQALRALANRFVGILHGCLESGTPYDETVAWTTRAETAA

SEQ ID NO: 153007 - protein, 321 aa, unidentified
MNKSTIFVGIDISKDVFDIYNSEEGHQQFTNDVSGFKSFVKVLSQSHWCVMEATACYHYRLALYLFENNIRVSVMNPLVIKRFIQMKLNQVKTDKSDAKMICLYGQQQELQLWHPDPVYVEQCKMLHTVTQLYFKQTTAIKNKLHALISKGHIKGKMIRSLKRQLKQIQKEIKLLETEMESLIRDHEPELFTRITSIPGIGKKTAILLIITTNSFKDFESSKQVASYLGLAPNERTSGSSVRGRSRISKTGNPMVRNHLFLCSFTASIHNPQCKALYERIVAKGKSKKLALIAVCNKLIKQAYGISKSGIPYDKNYVSKLA

SEQ ID NO: 153008 - protein, 415 aa, unidentified
MDKNDDSRLEEFRQLKREIRGSTRYLVVGMDIAKERHHAFFGTPAGKVLLHRLVFDNTKEGFEKLCFQTDILKTQHGLGRVVFGMEPSSDYHKPLGEYLIRHGHPVVLVAGTAVKKNRELLDNRWDKNDTKDAANVADLITQGKCLFYEFPSLSLRELRSLLSLKRRLKKSEQGYKVRIRNHLIAQYFPEMDAYLNYAEGLVRYLDPKKLAGLQFREFVRMVRGNKEERLGEIYAKAAASIGCEIHPSVAFEASILLDGLKGLHLMIRETDRKIAEVCGRFPEYPCLLSIPGFGPDISAKVLGAIGNPHRFENHRQVLKMAGLDLSADRSGKRTDVTPVISKKGKAGLRYGLCQAALVASTRSTQFMTYFTDKLKGREREKGIAMKMRVKLAAKMLVIAWTLMKKKEKFDPGRTA

SEQ ID NO: 153009 - protein, 348 aa, unidentified
MAVYIGVDFHARQQTISYLTTEAGEIRQLELLHEDPAKVRAFYEQFAGQRVIVGFESSGYAAWFEELLEELGCEIWIGHATYIRQFAKRRQKNDRRDADLILELLVSGDFPRIHRYSRSTRQMLQQLRYRQRLVKMRTMVVNMLLFMASSRGHSFRTQLQSKRGQARLGQLPLPEPLAQQRDELLSLLAQLDQKITTIERWLEQQTAEDVAVQRLRTHPGIGLLTSICVRYTLEDVGRFATTRKVSAFAGFDPMEDRSDERRRMGAISKQGSRWLRFYLVEAGQVAMRKDADLARVYQRISRRGGHAKAKVAVARRLLVRAFIMLRDEIDYAEFLRRGVAARSSRGSA

SEQ ID NO: 153010 - protein, 401 aa, unidentified
MSTMRDNATRVKRFRELKATLRTNRQRLLVGLDVAQAEHVVQMRLAHTRIVGPPLTIPNSTRGFTQLWTRIQQAQRATGCAEVVCGLEPTGTYHEAVATFLEGQGADVVLISSSVAYWNRRTQDGTWDKHDRKDAANCAELVEQGKILFYSRPDGPLAELRRLVKCLRRARAELAACKARWRTTLRPALGPMGEPLPNRLRAELSAVLQAWEPAALGRPARAKGRLPLGLATACADLGAQVTAVQARIAALEAACMPVAERLPAYPLLRTIPGVGPTVGAILLAEIGDIAWFTQFSQLRKLAGLDIVRVQSGQFAGQARISKCGRGLLRWALYHAAMGLARTATGRARLAALKAKRQGDRYAGFKAIVELAAKVLRIVWGVWRSGTPYDPTRTGGLCRQPR

SEQ ID NO: 153011 - protein, 306 aa, unidentified
MDKRKYVALDVDSANIVAGVFDSQGRLLMHTHLRTEAKVIQEFFKMLRGTVHVTFEEGAQAAWLYELIAPLVAEVVVCNPRENKLLKAGNKSDHIDVGKLGRLLRLGELKPVYKGVKSNQGLKQLVHSYEELVADTTRTKNRLKALYRGRGITCKGEGIYGRQQRERWLGKLETKEMCTRAKALFSQLDSLAQLSQQAEKTMCSAARREAAYKWISSAPGIGSIRTAQILATAITPLRFRGKRQFWPYCGLAVVTRTSSDYEWVNGESRRKRKPIQTRGLNQNYNRTLKAVFQRGRSISGAAARGG

SEQ ID NO: 153012 - protein, 342 aa, unidentified
MLYVGIDIAKNKHDVTALNVPGKTVLKPLTFSNNKAGFELLDLSIRQINQDCLIALEDTGHYAFNLLNFLHEQGYKVYTYNPLLIKEFAKSLSLRKTKTDKKDAHGIALKLLSDPNREQFQHDNRQVDLKILARHIHRLKKNSLIGKYNTLVVLISSFLSWIKSLESIQNIPTNLLTRYPNPQKRLEARFDKLIEIKRLTASKIQDILSIAPRSIGTTSPAREFEIIEIIKHYKRLIDKAETCVNDLMAEFNSVITTVTGIGGRLGAVILAEIRNIHAFDNPAQLQAFAGLDSSIYQSGQIDLAGRMIKRGSPHLRWALIQAAKACARFSPAFKAYLKTKLE

SEQ ID NO: 153013 - protein, 409 aa, unidentified
MNALYTGVDVSKRELVCQFMDQHGDTVRPVLAVENNHRGGTELVNTIKSLSQRLNTSVVHVGMEATSMYWYHADQLLREQLSDLETRFYVLNPAVINGFKRSYTTMPKTDAVDAWVIADRLRFGRVEPSPAPDMEYEVLKRITRFRFQLGGTLRREKQRALDLVFLKFTNYHDEAPFGIFSKASMALLEHFSPGEIAETDVIELATFLARHSNNRLGGDRTPEDLATDLRRAARNSYRLHPEMEDAVDVTLAMTFDNIRFAQRQLKKADAVIERQLAAIPQTLTTIPGMGPVLGAGIVAEVGDIRKYHGQAALAKVAGLTWTRYQSGPFDAQETSLTRSGNKYLRYYLIEAANKVRMHTPEYRRYYQKKFAEVPKHQHKRALVLTARKLLRLVFALLSNGQIYRHEGGR

SEQ ID NO: 153014 - protein, 407 aa, unidentified
MEVVYRCCCGIDVHKKMIVACLDDGGKRELREFGTTTSAIKELANWLTVSGCEMIAMESTGVFWKPLYNLFELMDLDAIIVNAAHMKALPGRKTDVKDAEWIADLLRHGLLKASYIPSREQRELRELTRYRKSLIEERCRETNRLQKILEGANIKLDSVVKDINGKSSRKLLEKIIANEMPDSDEVSRMIHSRMRPKLDQLMEAIDGITTPLQRRLLAQIIDHIDDLNRRVAVLDEMVKGYRAEYEAAIAAIDEIPGIARRSAEVILAEIGTDMSRFPSAAHLCSWAGVCPGNHQSAGKRKQGKTTKGSKTLKSILTQCAKSAKTSKSSYFSAQYQRISARRGKNRATIAVAHSMLIAIYHVLKNNVPFHDLGSNYYDTFNREHKIKSYLKRLQALGWQPDAGGLSA

SEQ ID NO: 153015 - protein, 483 aa, unidentified
MSKRSKSTFERLNLDLMNRRERRELKRRLFSSDPGLAIVNPNAGGIDVGNESHYVAVPPDRDPEPVQEFGCWTADLNRMAEWLKTCRIDTVSMQATGVYWIPLHDILERHGIRVVLANARDTKNVPGRKTDVQESQWLMKLHTYGLMRDSFRLPESMEWVRTIWRVRARHVEEAGRAVQHMQKALTKMNVQLANVISDIGGVSGQAIIRAILKGQRDPYQLADLRDRRVQASREEVAHSLEGNWREDVLFELQQAVDSHDFAHQQIRQCDQKLELYLAWLPTRTIPGGSPAPEPGQARKRAPKPRGNAPVFDLKTTLHRIAGVDLTTIDGIDVMTAQTIVSEVGPDLRRAFATEERFASWLALTPNKDISGGKVIRSRSRKVQNRVAAALRMAASTLRNSRSYLGARYRHLQRSLPSKASAVKAMAHYLALLVYRLLTKGQAWVDSGAARFEHKREQREMASLASRAAAKGFKLVALNAEPLA

SEQ ID NO: 153016 - protein, 420 aa, unidentified
MKVVYQTCCGVDVHKSFLVATIIKTSSGVQPSYQKKRFSIFNNSILEFKKWLLDNSCRDVCMESTGKYWIPVFNLLEDEINVTIANPKWVKAVKGNKDDTKDSKWIGDLFRLGLVPGSYIPCKPIRILREFTRYRYKLTSCRSSEKNRFQNALTVCNVALDSVVSDIFGKSATSVIDYLLKQSDNSINHEEISSRLLRSLKKKSESVLESIEGYQMTDAQKYRMRLVHAHMDYITSTLADIDSMIDSLMEPYENAVQLLCTIPGVDRSSAISIISEIGTDMTQFSNSKRLCCWAGLTPGNNESAGKKKSVRITRAGVYLKPTLVQAAHAAVKSNKSPYYKAKYERIAKRRGKKRAIIAVARMILTAVYHMLSTGEAWNPTDLYKIDMPEPLKNKQKEKAVKQAMKLLIAEGLIKESQLAS

SEQ ID NO: 153017 - protein, 420 aa, unidentified
MKIVYQTCCGVDVHKSFLVATIIKTTSGVQPSYQKKRFSTFNHSILEFKKWLLDNSCQDVCMESTGKYWVPVFNLLEDELNVTIANPKWVKAVKGNKDDTKDSKWIGDLFRLGLVPGSYIPCKPIRILREFTRYRYKLTSCRSSEKNRFQNALTVCNIALDSVVSDIFGKSATSVIDYLLEQSDNSINHEEISSRLLRSLKKKSKSVMESIEGYQMTDAQKYRMRLIHAHMDYITSTISDIDSMIDSLVEPYENAVQLLCTIPGVDRNSAITIISEIGTDMTQFSNSKRLCCWAGLTPGNNESAGKKKSVRITRAGVYLKPALVQAAHAAVQSNKSPYYKAKYERIMKRRGKKRAIIAVARMLLTAVYHMLSTGEAWNPTDLYKIDMPEPLKNKQKEKAVKQAMKLLIAEGLIKESLLTS

SEQ ID NO: 153018 - protein, 341 aa, unidentified
MKVTTVGLDLAKQVFSVHGVDEHGKAVLRKRVSRGKLLELFAQLPSSLVGMEACSGAHHWARELERLGHRVGIMAPRFVVPYRKSQKNDGNDAEAICEAVSRPSMRLVPVKSTEQQGLLVLHRVRQGLTAERTGAINQLRGLLAEFGIVLPKGRYQLRAHIGAVLEDAENAIPGLARRAFADLNARIGELDQKILAYDRELEALARQSDAAKRLQQIPGIGPITATALVASVADAKQFNNGRQFAAWLGLVPRQYTTGGHVRLGRINKRGDVYLRTLLIHGTRAVLSSTKEKPDRLSRWAEAVRARRGTRKAAVALAAKNARIAWVLLARGEDYQLRRAAG

SEQ ID NO: 153019 - protein, 412 aa, unidentified
MLFIGDDWAEDHHDVELVDDEGRVLARRRLPEGIGGIAGLHALIADHLPEDWVDLEPEQVQSLVKVGIETDRGPWVAALVAAGYEVFAINPLSVARYRERHSTSGAKSDAGDAHVLAEIVRVDRAHHRPLAGDSQEAEAIKLVARTHQSLIWERSRHVLRLRAALRDFFPAALEAFPDLDAPEALELLAAAPDPGRAGRLNRRRITAALKRAHRRDVEARATEILRIFGAEQLRRSDPVEAAYAAIVASQATIIATLNTQVEQMAAVVDAHFGQHPDAEIYTSQPGLGVVLAARVLGEFGDDPHRYTDAKARKNYAGTSPITRASGKKKIVLARYARNRRLGDAVQQWAFCSLRGSPGARAYYKQLRAKNVGHQAALRQLANRLVGILHGCLKTHTPYDEHTAWNHHLSNAA

SEQ ID NO: 153020 - protein, 337 aa, unidentified
MTDVHILAIDLAKRSFQICATAPGGAVLFNRTVSRAKLETHLREQAPCIVAMEACATSHFWGRFAQALGHDVRLIPPIYVKPFVKRQKNDAADAAAIAEAAVRPNLHYVAVKSAEHQARAVAFRTHQSFVGQRTQLINALRGHLAEFGLVVAQGPANLKSVVGMIDDGAIDLPDAVRDVARLYLDQIALLTNKIEELHSKLVHSTKVDDAMRRLCTVPGVGPVTAGAIMAFAPDLRTFASGRNFAAWLGLVPRQRSTGGKTRLGSASKMGQADIRKLLIVGAMSRIRWIVRKGVLPDNWLGHVLGRKPRMVAAVALANKMARMIWAMMTREENYRMA

SEQ ID NO: 153021 - protein, 347 aa, unidentified
MKILALDLGKFKSVSCVFDTELQTTEYWTLRTDRPYLTAVLQKHQPELVVIEACSISAWVHDLCSELGFRILVCNPNQEAWRWRNVKRKTDRDDALKIAKLAALGQLTPVHIPVRATREHRWLVKYRKTIVGRMNRVQNIVRALFQQHGLALPVGARCWTHASLEAIAAQSKPLADCGPEELWRGQLAQELAAYHQLHSELAGLEKKLTALAEQDQRIGLLQTIPGVGRVTAEIVVTHLDRPERFTNARQVSSYAGLTPRQYQSGLMDRQGGITRRGSRLLRSALVECAWATLRYNAWAREHYLRLVRGQKNRKKKAIIAVARKLLVRCWAMLRDRQPWSAPAPAAA

SEQ ID NO: 153022 - protein, 349 aa, unidentified
MQIKLQIRSIGIDLGKTTFHLVALGIRSQVVIRKKFSRSQLLEFTANLPASLIGMEAGVGSHFLGRALREQGHEVRLIPAQFVRPFVKSNKNDYCDAEAIAEAVERENMRFVPIKTEDQLDLQALHRVRDRLVARRTSVINQIRAFLLERGISFRKGPASLRRQMPEILENADAKLSTAMRCLLDFLWQEWKGLQLQIDTLNTHLEQIASSDASCIRLQQIPGVGPLVSTAVVSAIGNGAAFKRGREFAAWLGLVPRQWSTGGKAKLLGISKRGNPYLRKMFIHGARAAVLRVKREGSSLGTWMSGLETRAARNVVIVATANKLARISWAVLASGNDYHPRHSALAVSN

SEQ ID NO: 153023 - protein, 388 aa, unidentified
MHTVTSTTVVATAARANDITLFASLELSKSKWVVTINSPGSEKFSKHVVEGGDGAGLLDLLSRSRAKAEQRYGVPIKAIVIQEAGLDGFWIHRLLLADGIESHVVDAASIAVNRRHRRAKTDAIDGETLLRTLMAWARGERRVCSMVRAPSPEEEDRRRLTRERGTLLKERIQHTNRVKGLLSGQGVRDYNPLRRDRFERLEALRTGDGRELPPLLKAEIRRELDRIAVVETQLAAVERARDALVRTEAAEEPNTPAAQLLKLKGIGPEFASLLWLESLFRSFGNRRQVAAYGGLAPSPWQSGGIERDQGISKSGNRRLRKTMIELAWFWLRHQPDSALSRWFRARVGAGKGRIRRIAIVALARKLLVALWRYVTQGVVPEGAVLKAA

SEQ ID NO: 153024 - protein, 295 aa, unidentified
MAPTGLAWRCPNTPAGQAALVARLRGLTPQRIVLESTGGYERPLVAALADAALPISVANPRQVRDFARGLGTLAKTDRIDARLLARFAAIVNPPVSTQTDAATRDLAALVTRRRQVVAALVTERHQAGTALPIVAASHATVIAALVAEGERLAAEIAARLTLDPVWVAKATIVGSVPGIGPVTTMTLLAHLPELGRLDRKQIAALAGVAPMPRESGRTSRPAHIRGGRAAVRTALYMPTLAAIRHNPVIRSFYQRLLANQKPKQLAVIAAERKLLTMLNAMVRDGTRWMPPAAQA

SEQ ID NO: 153025 - protein, 338 aa, unidentified
MSVSAIRIDLAKNTFSLHGIDGHGKVFLKKTVTRNKLLLTLANVPPCLIGMEACSGSHYWAREISKLGHEVKIMAPKFVIPYRKGGKNDNNDAAAICEAVTRPDMRFVSAKSAEQQALLSLHRVRQGLITQRTALINQLRGLLTEFGIVIPKGRYQTHDHVPDILEDGENGLPALARELINDVWQRYRTTCEEVLSADRKISALARESDQASRLMTIPGIGELIATAMVASVDPKQFANSRQVAAWLGLTPRQYTTGGHIRLGRITKQGDNYLRMCLVHGARAVVANLRDKQDKVSCWIRELIARRGYKRAIVAVAARNARLIWTLLVKQEDYRVLPA

SEQ ID NO: 153026 - protein, 339 aa, unidentified
MKLYAGIDLHSNNSYLAISDKENKRHYKQRLPNQADVILAELERYRDDLVGIVVESTFNWYWLVDVLMDNGYRVHLANPAGIQKDKGLKYSGDKHDAFWLARLLRLGILAEGYIYPKEWRPVRDLLRKRGHLVRLRTSLINSLQGIISRNCGCHLSGREIKQVRKNHISPLLESQGDLALSGAVSKKCIDYISQNIREIEVSVENRVEILKPFTGLKTVPGIGRILSMTIMLETGDISRFAKVGNFSSYCRKVPTSWTSNGKKKGRGNSKNGNKYLAWAFSEAAEMFRRYDQNARSFYNRKSARTNFMVAHSALAHKLCRATYFIIRDEVDYDPDKLFS

SEQ ID NO: 153027 - protein, 324 aa, unidentified
MSKNTIFFGIDISKDVFDVTDSNDNYRQFTNNYNGFRNFLKLVDDSSHCVMEATGYYHYQLAYFLQENSIKVSVENPLSVKRFIQMKLSKIKTDKSDSKMICAYGVYSDLKLWQGHSKQQQECLQITRLINTYTKQCTMLKNKIHGENVLGVPSKLVLGSLKRGLRQLQKEIVNLESHLLKLVKVNYQDLLSRLETIPGIGRKTAIMLIVLTDGFERFKTASELCSYSGLTPIIRQSGSSVNGRARISKIGNKKLRNLLFMCSFNACKYNKTCKAIYDRIVAKGKSKKLALMAVCNKLLKQAFAIAKSGLVYDQNYKSVLVREA

SEQ ID NO: 153028 - protein, 413 aa, unidentified
MKNNFLSTLFVGIDVSSKTNVLCALDFQGNKLLNLKSLNNQPGAESILHSVLSCLNSNSIKYVVIALESTSFYSTHIDNFLSSNEALLAYTPMVYCLNPKTIANYRKSFVDMDKTDPLDAFIIVDFARCGRITSQPWRGAQFLSLQRLTRHRLHLIESISREKAYMVSNIYLKFSQLAVVDKEDKPFSNTYGATSEAVLTEFLSLDDIAYSSLEDLVDFIRTAKLLQKAARDSYRLDKVLYEPLNVSIASSFNVINAFETDIKTIDKAFEKAIKGINTAEYQSLIFIPGIGPVLASGILAEIGSITSFDSNDALAKYAGLTWRTNQSGNYTSDETNMTKTGNKYLRYYLIEAANSVRNNVPVFNAFYYKKYDEVTTHQHKRALALTSRKLVRLIFGLLTKNQIYSSNKAGEIQ

SEQ ID NO: 153029 - protein, 341 aa, unidentified
MKLYGGIDLHSNNSVFNLVDENANVVLKKRISNDIEAIILLLEPYSDAVEGLVVESTYNWYWLVDGLMDAGFKVHLANTAAIQQYSGLKHGDDDSDANWLANMLRLDILPEGYIYPKEERMIRDLLRKRFQLVQQKTINLLSMQGLYARHLNMKLNSDQVKRLTERQLTIDFSDLNVRLAVSANLVMLLCLTKQIQQIERVLKQQLKLKAEFVRLTSIDGIGLILALTIMLETGDISRFNKVGQYASYCRCVNGGRYSNGKKKSKTNTKNGNKYLAWAFIEAANFAIRFNDTVKRFYQRKLAKKSIVIARKTVAHKLARACYYVMRDQVEFDVNKAFGYSK

SEQ ID NO: 153030 - protein, 367 aa, unidentified
MKKLSTVTANGIRDFSQQKLTIGLDLGDRSSWYCVLDEAGQVMLEEKVATTPKALRGRLAGMPRSRIALETGTHSPWVSRLLSELGHEVIVAHARNVRLIGESRRKDDRLDAQTLARLARIDPQLLCPVKHRSAKAQADLTVIRARAGLVRARTALVNTARGLAKSYGQRLRGCNVRNMNPEKAEGLSPELQRALEPLLAAIESLSERIGECNEQIEKLAQQSYPQVALLKQIKGVGTLIALTFLLTLEDAHRFRKSRDVGCYLGLQPGRRNSGQSEPQMHISKEGDPYLRTLLVQGAQHILGPFGIDCDLRRWGLKLAERGGKSGKKRAIIAVARKLAVLLHHLWVSGEVYEPLRNSGGCAVPAAA

SEQ ID NO: 153031 - protein, 341 aa, unidentified
MKNKSFIGIDISKNVIDVSIFCEETPIKDFSHDVFNNSRKGFGEMCTWLKKNHVVLSNSLFGMEFTGSYSMELEKFLNTRNYQFCMLSTHVVKHYPMGPKDKSDKIDSAKIADFLYRYNGTECVKPYNMPDKTMQRLKALMNERKFLVEQRTCFMNRRQLCITKEDAQLYDGYIKKFSRDIENIELEEQKLLATDDNLLSTYKNLLTIPGIGFVNAINVIVITRNFTAFETARQYASYVGVAPHFRTSGTSVKWRPRPSARCDGQAKADLSMAATVVVQYDAELQSFYNRKLGGKQDSDTKRKALNAVKFKLVLRMFAIGKQNRKWKPLDSKSSNEKLAIS

SEQ ID NO: 153032 - protein, 416 aa, unidentified
MLRIVHPVCCGLDVHKSFVFACIATTDGNGVTTYQSRKFSTFSHELMEMAEWLAVNNCKDVCMESTGKYWYPVWNILEPTCRLVIAHPKYVKAIRGKKTDKKDAKWIADLFKHDLISGSFIPPADIRQLRDLTRYYRKLVGFNTGEKNRAQNCLTISNIKLDDVFSDVFGKSATAITDRLLESPGVVFDVAPYVHGRCKTPIPEIQAAVDGSICFEQAEKLKIIRSHMGNLDLCKAELESVILGLAQKYLPQLELILTVPGIRDPFTAASIIAEIGVDMSVFPTVGQLCSWAGLVPQNNESAGKKKTTRITHAGTYIKPLLVQCAVAVSHSDKHPEIRTRYLSLRKRRGHKKAVIAIARMMLTAIYGMLKKNEPYNPELYRKADNPPEHRQVSVQEAIYILQRQGYLVTESQPLAE

SEQ ID NO: 153033 - protein, 356 aa, unidentified
MSQKSSSAIAVVGIDIGKNSFHVVGHDRRGAIVLRQKWSRGQVEARLANLAPCLIGMEACVGAHHLSRKLQGLGHNARLMPAKYVRPYSKGQKNDFRDAEAIAEAVQRPTMKFVATKTADQLDLQALHRVRERLVSQRTGIINQIRAFLLERGVAVRQGLRFLRAELPGILATRTDVLSLRMMRIIEDLSADWRRLDARIEGLSGEIETLARQDQHCERLMTVPGIGPIISSAMVAAIGTGDVFSKGRDFGAWLGLVPKQISTGDRTILGSISRRGNRYLRSLFVQAAWVVLVKVGPKHWERYGLKSWIEAAKKRLHHNVLAIALANKLARIAWAVLNKGRAFAGDKTDAMAYRPA

SEQ ID NO: 153034 - protein, 418 aa, unidentified
MSESKIAFYVGIDWGTTAHQVCILDATSQPVAEFSAAHDAAAVRRLCTRLQALAESGAVAVGIESPASPVTEPLLEAGLTVFSLNPKQLDRFRDRYFPAGAKDDRRDAFVLATSLRTDPRCFRALTIEDPRLGELRALSRLNQTLKQDRLAYSNRLRDLLVSYFPELLTLCSAADEAWLWGLLEFAPSAPRAARLSLARLRSLLQRHHIRRFSPEDLYQQLRQPALPLPASSFQRGAHQIQALLPILRALDVQQRDLLGQIEALLEQLAGAENDADPGPGQHRDVNVLLSLPGVGITVAAAMLSEAHEALASRDYHALRAHAGVAPITRQSGKSCSASIRRACNQALRNAVYHWSRVSVIHDPRSRAHYARLRQKGHSHGRALRGVADRLLQLLCSMLRSQTCFDPSRRLPPPTPAPA

SEQ ID NO: 153035 - protein, 341 aa, unidentified
MDKELYFGVDVSKKTLDLAYYDGEAIDWKNAHIQVSNDDAGFKKIGSWVAKVGKDFATFLFCMEYTGLYNQNFRLWLESKEYIYGMVEPRKMHRFEPDLDDDQRSLDRIKTDELDAFRIAIYCEQNHKKILRNPSKLPSPVYFKLKRLLAERKQNTKQSTLYKQQLHDICAYDTDLSVERKKLLLKSMKENQKAIDREIDSYINEDASISKNYDLLTSIPGIGRIIALETIVLTENFTAISNPRKYACYIGIAPFKKESGTSVRKRTTVSKKGFSEAKADLSIAVLSAIRNNPSIRDYWIRKRKEKCGGIVLNAIKFKLVLRMFAVIKRGTPYVETDAYKN

SEQ ID NO: 153036 - protein, 352 aa, unidentified
MEYIAFDCHKRYTYAVVEDEKGRVHWEGKIVHERGALAAFLKEECHPGSPVAVETVGNWYWIVEEIEQAGCVPRLVHAAKAKLMLGMTNKTDKLDARGLNKLQRAGTLPTVWIPPGDLRDKRELTRARITLVRQRTQLKQRIHATLAKYNLAIPEVGDPFGVKGRKLLKEKIAELPPETGAVTRMLLEQVEILDQRIAELEKRMEEVLAPSREVELLMTLPGVGFILATVIALEVGDVQRFPGPEHLASYAGMVPRVQQSGGKVRYGKTREDVNRYLKWAYSEAANVIARYHQKYAFRHVGQLYARMRERKGHQKAIGAVGRHLAEATWWVLHTGRPYQDPVICRLGRVMGA

SEQ ID NO: 153037 - protein, 320 aa, unidentified
MNASEPSFVGIDVSKLSLDVWMLPSGECRSFPNDAAGHVVLCQWLLQCTPRLVVLEATGGYERHCASTLSLAGCPVRIVNPRQAREFARSQGQLAKTDRLDARLLAQLAEVLERSPKQASRLHTPPDAARTDLEARVARRRQLIEMRTAETHRLATAAPGIRKSIQQIIKALDRQIKDIDLHIDTHLRTHHALTRELLDSVKGVGPGTIATLIADLPELGHLPGRKLSALVGVAPLNCDSGRRKGQRHIWGGRPQVRAALYMATLTAVRFNPVLKRFYDRLLVHGKPKKLALIACMHKLLLILNAIVRNQQPWNPDLHEA

SEQ ID NO: 153038 - protein, 377 aa, unidentified
MKNVRFVGLDVHAETIAVAVAETNGEVRSLGTIPNRAESLGRLIGKLGSRASLRVCYEAGPTGYVLYWQLSELGVACEVVAPTLVPVKAGDRVKTDRRDAEKLARCYRAGDLTAVWVPDAAHEALRDLVRARLAAKRDQLRARHRLSKFLLRHGQRAPEGIAAWSSRYLDWVRSKVRFEQPAQVTTLLDYLHEVEHAAARITRLEQAIDAVLPTLPTTMRAVIDGLQSLRGVAKVSAVTLIAELGQLSRFAHPRQLMGYAGIVSREHSSGERIRRGAISKAGNAHLRRVVVEAAWSYRHRPAVGSTLAVRQKNAPATVTALSWKAQHRLHARYVRLIGRGKSKQQTVTAVGRELLGFIWAIGLEIEGAASTTLARAA

SEQ ID NO: 153039 - protein, 391 aa, unidentified
MGQTRNRSMSGISLPAFPFEFSVEQASNRMIDIRGLLKVLKQLQLSFFVLLFIDKVMKKIDYYIGIDISKLTLDISILCSCEERAQTAHYKIENNEKSIAQFVKKKLGNYPFQHLLFCFEDTGIYSFPLAYYLKENNLTYCQVPALEIKRSKGITRGKEDKTDSRDIAFYACTHRHKLQPSRMSTKSIQQLKLLFSEREKVLKSLSIFERTSENKGFISKEVFGAVASVNSTVINQLKKSLEKIEKKMLEIIASQVQLSQQYRLVTSIPGIGMQTAIYLLIATKGFESFDNWRQLACYAGVAPFPYQSGTSIRGRTQVHPLADKKLKSLLNICAICAIRHDRELKSYYERKVSEGKAKMLVINNLRCKLLARVFAVINRETPFVNTYKFAS

SEQ ID NO: 153040 - protein, 391 aa, unidentified
MSLYFVGIDISKYKHDCCIISATDQKVISKFSIKNDKVGFEELITTFNSLSSPEDIRIGFESTAHYALNLELFLENAHHSFMEVNPVLIKEYKKSTTLRRTKTDSVDCESIARWLMTVEYKPHSKGFYHAYSLKSLTRLRDRLIRQRSFYLVKITNVLDHTFPEFKPFFNERLSKTALYLLENYGSAEKMARMNSVSYEKLRSISRGKFSPQQFIALKELAANTVGVNNSIFDVELNSLLILYKTLVTEINTLEKEINLLIEEVHPHYLSVPGIGSISAAIIYSEYGDISNFDNPGQMLAFAGIEPGINESGTESHGGRMVKRGSSQLRYALINCCLPLIRFDMTFATYYAKKRAEGKPHRVAITHVAKKLIRVIYALERQNTDFCVQKLR

SEQ ID NO: 153041 - protein, 446 aa, unidentified
MSKVNGLTRGDVRRNARKAALRELVPAGAAVVGVDLGERKQALVVTGADNRVVARRSLRAGVHELGVHLDWARDKAVAAGYGTVTVACEPAGSRWMVVQELCAARGLALVCVQPLVSHLAREQQDLTGDKTDEGDCELIAGLARELRCYVPEVADAGWAELRAAGRDRAALITRATAAKQLIRDQLGLVAPGLLAVHSDPLESATWLACLQAAVDSGGPAGGCAAGDAAFAAAAAAGLAGWGGRRLGPTAAKFHALLSGPAPVPRMARAARRRLAGALEDLQYARRRRERLEAGMVAMLGELGIDHERICQIPGLTPAGLAAILAEAGDPRRFASSSSLVKHAGMAPARNESGSFRGATRMSHRGRPGLRLAAWRATWAVLRHCDVLAAKHAALTTRDQNRLADGQARVACAASLLRWIRALTVHGTRWNPAIAAGQLSHHHATAA

SEQ ID NO: 153042 - protein, 344 aa, unidentified
MKVTTVGIDLAKNVLQVHGVDGRGKTVLRKQVKRDQVAAFFANLPPCLIGMEACGSAHHWARKLQSFGHTVKLMAPQFVKPYVKTNKNDVADAEAICEAVARPNMRFVPIKTAEQQSVLSLHRARQSFVKARTGQANQIRGLLGEYGVVIPQGIGYIAERLPQILEDGENGLPGQFRRLLERLGENLKEMDRQVDELEREIKTWHRESEASRTLEEIPGIGPITASALAASVGDGKCFESGRQMAAWLGLVPRQHSTGGKQTLLGISKRGDTYLRTLLIHGARSVVRVCERKPETDSWLIRLTGRRNRNIAAVALANKNARIAWALLAHERQYASDYLPTPVNG

SEQ ID NO: 153043 - protein, 379 aa, unidentified
MDRTTTSADLRDTLYGAMELSKNTWLLAIQFPDRPQPSLYPIAGGNTEDLVAKLIAASDRWAKVSGKRPSITLCYEARYDAFWLARFLKTRGIECLVVDAASLQVNRRGRRAKTDRIDVEMLLRALIAWCRGERHVWSVVRIPSIDEEDLRRSHRERSRLVQERTAHINRIKGLLFAQGIRGINVRSKYKRLEVSKLVTGEGRPLPPRLAREVVREIERLTLVQQQLVAIERERDEAPTPCTSTEKKRLQLSLLNGIGPTVSAIMAREVYYRQFTNRRQVAGFLGLATSPHDSGAVERSQGISRAGSGPVRVTMIQAAWLWVKHQPKSEITRWFLQRTDRQSGRIKRIAIVAVARKLAIALWRYVEQGLVPQGAILTSR

SEQ ID NO: 153044 - protein, 336 aa, unidentified
MTTVGLDLAKHIFRIHAVDADGKIVIATALRRKNVIAFFGALPPCVIGLEACGSAHHWARELVKLGHDARMMHPNYVKAYVRRQKNDAADAAAICEAVTRPSMRFVPIRSINNQALLMHHKVRELLVSQRTQLLNALRSHLAEVGIVAAQGPNGAHVLVAAILEGDSSIQLCVRDALAPIVRQLQMLDHEIAASDRAIMGLAKTDETARRLMSVPGIGPITASAIAASVQDVSAFSGPREFAAFLGLAPRQNSSGGKERLGRVSKMGNRYLRKLLVVGAHAVLFHRRSHRDGLRTWAAKLMETKPFKLVAVAIANKLARIAFAVMRDVSIYGGAVA

SEQ ID NO: 153045 - protein, 356 aa, unidentified
MSRILAIDLGKFKSVTCLLDSDTNQTEFWTMATDRHYLLAVLKNYHPDLVVIESCGLAGWVHDICTEEGYEVLVCNPNQEAWKWKHIKRKTDRDDALKLAKLAALGQLVPVYIPCRRQREYRRLVKYRQVMVGRINRVQNNIRAIFAQRGMEMVRGQKAWALERLELIAEHRKPLAECSLDDLWRGELDLELIQLEHLRQHQHEIHKQLRALARADERVQLLETIPGVGRKTAEVVVAYLDNPHRFQNARQISSYAGMVPRRYQSGEMDRHGRIHKRGPRQLRSALVEAAWLMLRYNPWAKTVYERLTSGQRTRKKKAIVAVARKLLVRCWVMLLRKEPWNKETMIRQPAGIAVAL

SEQ ID NO: 153046 - protein, 412 aa, unidentified
MFVGDDWAEDHHDVEVMDEAGRRLSKATLPEGVAGMARLHAMIAAQLDPDTDLDAQAGQVLIGIETDRGPWVQALIAAGYQMYAVNPLQAARYRERHSVSGAKSDPADAHLLADMVRTDSHQLRVVAGDSELAEAVKVVTRAHKTLIWERTRHTLRLRSTLREYFPAALAAFEDLTASDTLELLGKAPDPASAARLTAAQITAALKRARRHHRDRRAGEIQAALRTPQLGQPPVVAQAYAVAVRAQLAILGVLNEQIEVLQGQVETHFGRHPDAEIYTSQPGLGQILGARVLAEFGDDPTRYADTRARKNYAGTSPITKQSGKKKIVLARYVHNDRLLDALGRQAFAALTRSPGARAYYDKQRDRGLGHQAALRQLANRLVGILHGCLKTGTRYDESTAWSHHAQQDQQAAA

SEQ ID NO: 153047 - protein, 411 aa, unidentified
MRLFVGDDWAEDHHDVELQDEQGRVLARKRLPEGVAGMARLHELVGEQLGEDADDAEVIIGTETDRGPWVAALVAAGYVVYGVNPLQASRYRQRHGVSGAKSDTGDAHMLTDMVRTDSRQLRAVAGDSPGAGAVKVVARAHKTLIWERTRQVQRLRHQLREYFPAALGAFEDLDAPDALELLARAPDPARAAKLTRAQISAALKRARRRDIPGKATVIMAALRGAQLGQPPAITAAYAATVRSLIAVITTLNEQVKILQGEVEADFGRHPDAEIYLSQPGLGPVLGARVLGEFGDDPHRYASGKARKNYAATSPITRASGKKKVVMARFIHNDRLIDALMAQALSALGSSPGARAFYDAQRAAGTEHNAALRKLANRLVGILHGCLKTRTLYDEATAWPHREKTPQSDIAA

SEQ ID NO: 153048 - protein, 503 aa, unidentified
MAEIFDRAGSLKKVLIVALDFAKSKHLCLMCNGAGDQLLKPFPVHNDRAGFEHLLERLETTCKRHAIGRENVIAGGEDNPAYAENFLYALHCHRQGPLVVRVNAWKAKKHRENLQASSDTLDLSSIAKTIISRDAYLVFDDEGPRANEYADHQAMRALTRTRDALVKVRTSLSNRIHNEIKILFPGFLDTGCGNPLTPFSKASLSLMEKADFHAATYARKRPATLAKTLSKFSLSDPAEKARALIARAAETLPPRPQSVICHQQCLQRLVSAYRHIDSQCAQLEALNAPVLARTPAAMLTSISGIGVVTASALGGELGHVDHLGPLAHMVSYAGIVPGHEQTGGPDKPGITTRVKPRCNRRLKKHLVHAVFQMGNRIGAPEFIQAYGKLKNDGQHADFVMARRLLHSAKAMMRQRYIYLPPELRGNDPIERALLFEHLMELWPKLLAKWRCLGALAKAFAEDAPLGFWRQCIKELHGIELPLDNTPPHMLEEHQAQALSSEIH

SEQ ID NO: 153049 - protein, 355 aa, unidentified
MDSRKYIGMDVHQASISIAVRDANGKLVMESVIETKAATILECIRGIRGNLWVAFEEGTSAAWLYDLLKPHVAQVIVCDPRKNALLKTGNKNDRVDARKLSDLLRAGLLTAVYHGESGVRTLRELSRSYLTVTKDLTRVMNRLKALYRSWAIPCAGEKVYSPRHRCAWLEKLSEVGVRRRAEQLYQQLDMLLQIRREARRELLRESRKHPAQELLRQIPRLGPIRVALVIALVQTPHRFRTKRQLWAYCGLALQTRSSGEYRFTGGQLQHSQKLPALHGLNINPNHDLKNLFKSVATNVSTSTGPLGYFYRNLLVKGMKPAMARLTLARKMAAIVLTIGKKGERFDPGELKRQAA

SEQ ID NO: 153050 - protein, 406 aa, unidentified
MQIMHERCAGLDVHKKTVVACVVTPEGQEIRTFSTMTVDLLGLSDWLLVCGCTHVAMESTGDYWKPVFNMLEGSFEVLLVNAQHVKAVPGRKTDVKDAAWLAELLQHGLLRASFIPPVAQRELRDLTRYRSTFIRERTTLVNRVQKLLEDANIKLAAVASDIMGVSGRAILAALLAGHADPHALADLAKGRLRSKRDQLAKALDGRVKAHHRFVLTELLCQIDSLDETIARFDTQIQEISTPFEAAIGLLDTIPGVARPTAEMIVAEIGTDMSRFPSADHLAAWAGVAPGNHESAGKRTSGKTRQGNRFLRTVLVQAAHAAARTKSTYLSAQYRRLATRRGKKRAIMAVAHSMLVMAYYMIQRQEPYREAGGDFFDRLQPEDTARRLVKRLEHLGYHVTLQNSSTD

SEQ ID NO: 153051 - protein, 322 aa, unidentified
MNVLTNMKTILHSQAPVHIGVDVAKAELVADLQGSIKRYPNTATGIARLLRAATRIPGSHLVCESTAGYEKPLVSSALQAGIPASIVPPQRVRQFAKSMGTLAKSDPIDASVISRFASQAMPQPMAARSANRSRLDSLMRFRAELLESLHRETCRHEHHDDPLVTKLAKARIAQLKRDIGKMDQAAAAVIKADTELSRADAKLREVTGVSHQSTRVLLAFLPELGTVSRTRIASLAGLAPFDHDSGKSNGKRFIQAGRAHIRRTLHMAAISAASFNKVLRPIYLRLRKAGKPFKVAIVAITRRLLIHLNSIMADLLKIPVAS

SEQ ID NO: 153052 - protein, 367 aa, unidentified
MHNPTRFVGLDVHSKTVAIAVAEEGREPARLLKQVPNDLSRILKALDRLGPREALRCAYEAGPTGYGLQRALSAAGIDCIVIAPSKMPKAAGDRVKTDKKDAVRLAHFLRSGDLVAIHVPDEACEAMRDLLRAREDAKRAQLRARHQLSKYLLRHGRRWPKSNWTRDHHEWIERQNFEHPAQNRALQEYLHTVNEATARIDRYDALLAELVPSTEQAALIEALQAFRGIQLLTAASIAYELGDLRRFRAAKKLMSFVGLVPSEDSSGDRVRRGSITKAGNGALRRLLIEAAWSYRHAPREAYRLKKRAEGVAPGVRVIAWKAQVRLNKRYRRLVARGKPKQKTLVAVARELAGFLWDAARQEVLLAK

SEQ ID NO: 153053 - protein, 370 aa, unidentified
MQFIGIDLHTNKFTCSYRDEKSAPEPKKGKRSETFELTDRGIAAFCQTLTSETYVLVEASITTFSFVRLIQPFVKEVIVANTYELKQISMARVNTDKIDADILSRIMKMQALSGEQAVSPVAVPPQGIQELRGMFTTYRLYKKQTTQIKNRIHSLLKEKLYGFTQEEIFDGKSREKIRGIETGTPLSFQLKELFDLLEYTEGRIEPLKERIMLLAEPYMNEIRILTSMKGVSVFIAIAVIADIIRVDRFRNSKAFTSYLRSAPKVSNSNTSVNIRGTNKKGRKISSTLIVQSLNHVLQASRKLNRWYTELAAYKKPGLVRAGLRRRVFAEMYQMLKKGEYHYARDERNHEAKMLQYKRFLKRKKTLCETT

SEQ ID NO: 153054 - protein, 345 aa, unidentified
MAEAYDGRQVVGMDLHRRRSVLVRMTMDGRKLETVRVTNSPAALRAVLARCGEHPLVVLEATYGWYWAADVLEAAGAEVRLAHPLGVKAFSCRRVKNDERDAADLADLTRMGKLPEAWIAPAPVRALREVIRYRHKLAGQRTSCKNQVHAVLAKLGVPVTHSDIFGTGGGLWLDQLVLPAPYAAKVASLRALIAVLDGQIARLGQEAAGMLAGDKGYAAVRELDGIGPVLAAVICAEIGDVTRFGKAGQLCSWAGLTPRHHEPDTKVIRGHCSKQGSRMLRWALAEAVQHAPAPARPGQARDAIIARRGPQARNIAKTAAARVLLTQVFCALRDGRVRSAGRPAA

SEQ ID NO: 153055 - protein, 346 aa, unidentified
MKITTIGIDLAKAVFQIHGVDERGRVAVRRQLKRSEMASYFANLGPCLIGMEACGSAHHWARKLSGYGHTVKLMSPQFVKPYVKTNKNDMADAEAICEAVSRPNMRYVSVKTVEQQAILSVHRARAGFVKARTAQANQIRGLLAEFGVVTPQGNRTITKRMPEILEDGENGLPGTMRNLLARLTENLKALDCQVVELEQQIQLWHRENEASQRLAAIPGIGPITASAIAATVGNARDFKNGRQLAAWLGLVPKQNSTGGKQNLLGISKRGDTYLRTLLIHGARSVIQFAERKPDERSWLRRLMARRHKNVAAVALANKNARTVWALLAHDRTFRPDYMPADGAAVA

SEQ ID NO: 153056 - protein, 420 aa, unidentified
MQPWKEITHYAGFDWAKDHHSVIVVDATGQLVADFEFAHSQAGWEEFSKRLAPWPHLAVAIETSRGAAVDQLLQRKYSVYPVHPVAAKSYRERKAPTGTKTDHLDAWGLADALRTDGHGWRVLQPLDPLTEQLRLLCRDEIALIEQRTALVNQLQQALAEYYPAALEAFEDWTDDFTWDFLIEFPTPELLVKAGPRRWEKFLHTHKLWRSQTVDKRLQLFAQADQFKASTAVVVAKSRLAISLCKLLRTLARQLADYRKEIEQLFEQHPDHDLFGSLPGARQTLAPRLLAGIGSDPARYGDASVLQCLAGTAPVQYQSGKVSLVHVRWACDKFLRYTVHLWADSFRKASAWGQTYYAKKRKEGMSHACALRCLGQRLLKIVFRMISDKKPYDAELHARNQQKHGSWVLQLNSQEEAAAGA

SEQ ID NO: 153057 - protein, 319 aa, unidentified
MAQNDRVVVGIDVAKDKVDGCIRSLSQRRTFPSTVEGRRQLISWLRKHKVTKAVMEASGGYEREWAKALREKEVEVRIVDPKRVRHFARSAGRLAKNDDIDSDTIAWFAETFGEAKGQAYDAAREKLVQIVYARQGLLDLQTSLQNRGEHAAPQVVQKMQGRLLKKIALELAGLEAAIAAMIKATAHFAERAAIIESVPGFGGITAAGLIAAMPELGQVSNKVAAALLGTAPYDDDSGRRRGERHIKGGRRRVRNLFYMACLGAATRHNPMLKAFYQRLLAKGKEKKVALVACMRKLIVILNTMIARGEKWDAARCARS

SEQ ID NO: 153058 - protein, 342 aa, unidentified
MFYAALDVSLRSVAVCIIDDDGKVRLERSVPSDVPDLVRCLKEFGEPVHQVGLEAGTLTQHLTYGLREAGFDVVCMEARQVAAALSAMRNKTDKHDARGIAQILRSGWYSRVHVKSVESHHLRALLTSRKVMQRKCIDLENEIRGLLKIFGVKLPMRLSRGAFDVAVRDSIENDPALSHALLPMLQARQILFDTFMELDRRVRKAAHEDEVCARFMGIPGVGEITALSFKAAVDDPARFKSSRTVGAHFGLTPRRFQSGEKDNPGRISHAGDSDVRATLYAAANAMLMRSIKWSSLKAWGMRLMKTKGRRRAIVAVARKIAVVLHRMWVDGTEFRLGSEAAA

SEQ ID NO: 153059 - protein, 412 aa, unidentified
MEVLYPRCCGIDVHAKMLVACLIVNGRRDTRTFSTMTDDLMNLLDWLVANECTQVAIESTGVYWRPVFNILEGAVEVMLVNAREAKGLKARKTDVIDAEWLADLLRHGLLRPSFIPPRHIRELRELTRYRESLVREQTSLANRIQKLVESGNVKLGQVATDALGVSGLQMLRALAAGETNPDKMSRMARGRLKQKQEELKRALSGQLTEAQRWVLSQLLDQYDRVKEAIAKVEQKIREEVIAAPDPFVSEAVKLMDTIPGVGETVAQILAAEIGVEMSQFPSDKNLSSWAGMCPGNHESAGKRKSGKTTKGSRYLRTALVEAAWAASRTKNTYLSAQYRRFVKRMGKKKALVAVGHSILVIAYHLLTNKRTYQELGGDYFDKRYAEKRRTRLIKQLQSLGLKVTVEEVPQAA

SEQ ID NO: 153060 - protein, 369 aa, unidentified
MEKTIKNIGLDVHKNSISIGIADEGRDGEVRYYGKIDNDMNQLDKVVRKLISKGAVLRFVYEAGPCGYTIYRYLTKNAMDCVVIAPSKIPQQSGNRIKNDRRDCLSLARLHRAGELTPVHVSTEEDEALRDLVRAREDATRAVRTAKQQLGAFLLRHDIVYSGRTKWTKAHFNWLADIAMPHPAQQIVFQEYIDTVTNCCNRVQRLTEQIRFQSGQSRQHELIEALQSMRGISLIIAATIAAELSDLTRFENPEKLMAFVGLIPSEHSSGDRVSKGSITKTGNGHVRRALVAAAHAYRFPARKSRAIRKRQEDLPEGVIDISWKAQCRLCTRYQYLTAKGKNVNVTKTAIAREIAGFSWAIAQELSKAA

SEQ ID NO: 153061 - protein, 343 aa, unidentified
MEHYAGIDVSLESASVCVVDASGRIVREAKVASEPEALITWFGKLGVEVSRIGLEAGPLSQWLYAGMREAGLRVELLETRHVRDAFKAMPVKTDRNDARGIAQLMRLGWFRPVHCKSLPAQELRAVLTARKLVQGKRHDIEMSLRGILRGFGLKVGPTTPRSFEGRVRQLVEGHPTLLAVADALLLARATLGEQLGKLQKRLVSLARNDMRARLLMTTPGVGVLVALTYVAAIDDPARFRSSKATGAHFGLTPKKYQSGETDITGRISKIGDASVRTALYEAANVILTRPVKGSSLKSWAMRVAKRAGMRKAKVALARKLAVVLHRMLADGTQFAAGKAAAAI

SEQ ID NO: 153062 - protein, 442 aa, unidentified
MSMSLSVLDPLATFVDVGSEQMHVSIAGGPPEVFGTFTTELHRLRDWLSERKVKSVAMEATGVYWLPLYGVLENAGFKVSMVNGKQTRNLPGRKTDMKDCQWGATLHAHGLLQAGFVPSAQIRRLQDYLRLRGDHLSSAATSVQHQQKALERMNVKLHDVISSLVSDSGIRVIEAILTGERDADRLLALCDVRIQNKKAQRVKESLRGTWEEEHLFALRQAVENWQHYQRQIAACDRQIEAVLRQINGPDAPGEDKTKAHKRGGINAPQIEDLHHLVSKLCGGKDLTVLPAHTDYSLLQLIGEVGTDLSLWSTEQHFTAWLGLAPGSRQSGKRKGSVQRKRNRAGRLFCMMARSLVQSKNIALGGFYRRMAARRGGLVANVALARKLAVLFWRVMVKGLDYAEAGLKAYEEQVLETKRRALSRLAKQLGRIVLPSLAELQKA

SEQ ID NO: 153063 - protein, 354 aa, unidentified
MKKNIIPASRIPELTIGLDLSDRSFQFCELNATGEMVGEGQLKLDRPVLRKYLAGQPKARVALETGGQSAWVKQVIEELGHEAVVANARELQAVTGRSHRTDHHDARQLARLARVDRELLNPVKLRDAQPQADLFVIRGRALLVELRTMLINFARAVTKTTGQRLPASVSHRFAERMREAVPEALRPALLPLLRVLDQVGEELESYEESIEALADQRYPETRWLRQVPGVGTLTGLTFVLTVNDPARFAHSRDVGPFVGLVPRRRQSGEQDPHLRISKCGDGYLRKLLVQCAHVVMGRFGPDCALRRWALDHARQSRTAKKRTVVAVARKLAVLLHRLWSRQEVFQPFPAAIAA

SEQ ID NO: 153064 - protein, 406 aa, unidentified
MNGPVITVDVSKGSCHFQPYIENGKPMCKPKVLKDTIEGFDNLANTMGKLMERSSSSTVSVVFEATGVYHRCLQKYLDDNKIPYYIISPLMSAAYRKTNINSNKTDDLDCGHIAKCFYGEQDLRVYKKQANIYEELRHTNRYYESELNFLRQRKTSFRALLDIIYPLIDKCFKGHSSLYDEVPMTVLKLYPHPKLLLRHKEETIVNRVTSKVNHDKKFVEKIVSLMYEGASRCYPGCDEDDKEVNRLKETIMSLQEQVAKCDEILKELIEQARKVPYFKYVVSITGVGLNLASRLVAEIGDITRFENRKAITAYAGLNPKIRQSGDIDGTHLAISKKGNRHLRCLLYLGATCNYRLKKHDSLYEFNQKKRQQSTNPLKKKAANIATAHKLLVIIYALSKNNQEYNS

SEQ ID NO: 153065 - protein, 458 aa, unidentified
MNGKRKKKAGNEQQDWKVNLEVVHPNAAGIDIGNASHYVAVPPDRDAEPVRQFACFTEALQQMAAWLKSCGIDTVAMQSTGVYWLPVYEILTEEGLQVFLVNARHTKNLPGRKTDVQECQWLLQLHTFGLLNNSFRPPEEICVLRAYWRQRAEHVASASTCIQRMQKVLTEMNVQLANVISDISGLTGLAIIQAILAGERDRYKLADLANFRIQASREDIARSLEGNWRKELLFILQQELNLYQTYQQQIAECDTALAAHLQTLEDKVEAGTQPPAAKANKRAGSNAPTSFDLRGELYRISGTDLTQIDGINIMNAQTIIAEVGVDMSRFPSEAHFASFLGLCPDNQITGGKVLRRGTRHVENRAATAFRMAATSLWRSKTYLGAKFRRLRARLGAPKAITAMAHMLARLVYRMLRYGEQYVDKGMKYYEEKYREHEIRSIQKKAKDLGLVVTLTAAA

SEQ ID NO: 153066 - protein, 382 aa, unidentified
MRRAAKRGPGPSHLLITPDHAGNVVGIDPHKQTLTATVVDPCGGIVASEHFKVSGDGHRALEAWAKQFGAIARWGVEGAVGWGRHTAMFLTGRGYDVRDVCANRTARNDRGRQRGKSDVLDSERIAREVLAHPLLPKAFKRAGQDQGPDEQHQLLAIWHNRRQSILKSRQHLVGEAETLLCELPLQLREQLPASKAVRPRLNALAARNRRRRYDPPTKLRLRMLDEYHVQIAALDREEKQVVAHLAELVRQSGSTLAELCGLDTRSVAELLVEVGDVRRFTLGGFARFNATAPLPASTAEGPGEPVRHRYNPGGNRRINAVLHRMAVTQLRCEPRAQAIYANARANHHTKKEARRVLKRHLSDVVYRRMTSDLAAHTQTLAA

SEQ ID NO: 153067 - protein, 339 aa, unidentified
MYPFYLGIDLHLKRTYMVLMDAKGEVIDKGRISNQKIKEYLEEKVPRDTYAVLEATRNWPFMYDLLNEHVEQVDLVHAKGVRAIANAAVKTDQIDASTLAHLARMNYIPKAYAASKEMRDLRQLLRHREWMVNQRTRAKNRIHAVLAGYNLVSPVTDLFGVAGRAYLAEVMKKELRPSARQVVEDHLAMLDHLGERIRSLEKGISLNEKQNHIVNILKSMPGVGKLNALTILAEIGCITRFHSPKSLCSWAGLTPRVHNSDAVVQHGHITKEGSCYLRTAMVRAATVACRISPRWYMTHEHLALRCGRRAARVAVARRLLTVIYYMWKRDQPYQENYGQ

SEQ ID NO: 153068 - protein, 338 aa, unidentified
MFYIGIDIAKHNHEVSIIDDNGKALGKSFSISNSQKGVDKFNTYLDSFNITSENCVIGMESTGHYWINLFSFLVNLKFNVFVINTIQSDAFRKMYIRKTKNDSKDSYIIAQIMRFGEYSSSNISDENIFALRQLSRYRTSLVDECSSWKRKIISILDQVFPEYSNLFSDTFGVTSKELLSKYPLPENMLELSTEELTNLLTKASKGRLGNEKAQEIKEFAKNSFGVSFAKQTFSFQIKQIINQISFIESQLKELDNEISNILKELNSEITTITGIGDVLGACILSEIGDISRFEKASQLVAFAGLDVVVKQSGEFTGTEMRKKLNYLILMSYAYRFIV

SEQ ID NO: 153069 - protein, 343 aa, unidentified
MQIRSVGIDLGKTTFHLVALGDNGKVLLKKKFTQKQLITFTANMQTSLIGMEACGGAHFLGRALREQGHDVKLIPAQFVKPFVKSNKNDFIDAEAIAEAVDRQNMRFVPIKTDDQLDLQALHRVRDRLMTRRTSVINQLRAFLLERGLVFAKSPARLRERMPEILENADEDLTPRMRNLLALLWNEWKDLELQIVEMNDEVEQIATSDPACTRLRQIPGIGPLVATAIVASIGNGAAFHKGREFAAWLGLVPKQYSSGGKAKLYGISKRGNNYLRKILIHGARAVVLRSKRERIAMGAWMTSLETRAPRNVLIVATANKLARIAWAVLSSGEDYRAVQELVAA

SEQ ID NO: 153070 - protein, 407 aa, unidentified
MKMFCGIDWAEGHHDIALIDDLGQLLTKKRINETAAGFAELTAMLAEAGDTSVDPIPVAIETPRGLLVATLRATGRPVYSINPMAVARYRERHTVSRGKSDHADAMTLANILRTDQHIHRRIPADTHLAQAVAVLARAHQDATWRRTKASNDLRSLLREYYPAFLEAFAGKTASNLATPEARAVLAIAPTPAAAGKLSKARIASALRRAGRQRRIDTTTAQLHAALREPQLRQPDLVEQAMGHQALALLATLDTECHNVDELGQATAELFQQHPDHAIITSFPGLADNTGARILAELGDDRTRFTDARSVKAYAGSAPITCASGRSISITHRRVKNDRLAAASWAWAFAALAHDEHANRHYRHRRDHGDRHPAALRHLFNRMLGQLYFCLQTGQHYQPHKAFAAPAA

SEQ ID NO: 153071 - protein, 350 aa, unidentified
MLIVGCDYHPGSQQIAYVDSETGEFQEQRLAHREEAEKFYRDLAAQGMKVCVGMEASGHARWFERLLAELNIELWMGDAAKIRAKRVRKKKTDREDARHILKLMLKDDFPKIWVPSWENRDLRQLLWHRHRMVQMRTRIMNQLQAVALNEGLRCKKRLWRKHGRAQLESIRLAPWASRRRRDLLELLDRLNPTISELTQRIEQQVEQFPVAQRLMTHPGVGALTALAFVLIIGEAERFECGKQIAAYLGLVPEEDSSGESRRLGHISKQGSGLMRFFLVEAAQVTVRSDAEWRNKFFHLAMRRGRKIAKVAMARRLAVRLYWMWRQQWDYAQLKKFGPHAGQPGTGVGVQ

SEQ ID NO: 153072 - protein, 347 aa, unidentified
MIHAGLDLSRRKVDICLLSAKGEHLDQLAVPPDPHSLKALASRIEEVHQEPVSAVVESMTGARIVHDTLEQAGWDVEIADAQKVKGLAPLACKTDRIDSMVLATLSQRDLVPAIWLPDPTVREERELARFRLHLVKHKSALKNRIHSTLINFGRPCPVTDLFGVEGRALLKRLEVPEPWRGNLTASLSLIDDLERQIAEVNQRLKQGHADHPYIALLMSAPGIGWVLAFTIAAEIGEIERFASPAKLAGYTGLCPRVNQSGDSDRRGPLSKHGPTYLRWALLEATMHALKHPAYSERYQRTKRRLGKQRGAKVAQIDIARRLAHAIWHMLSRSEEFAPRGAAFRLAA

SEQ ID NO: 153073 - protein, 364 aa, unidentified
MKTYYVGMDVHRASIVMVVLNGAGKVVMQSVIETGAERVGSYLKQLRGKVYVTFEEGTQANWLHDVVRGLVTEVVVCDPRHNKLLQSGNKNDRVDAQKLAELLRLGSLKAVYHGDNGVRTLKELVRTYDCLVSDTTRVMNRLKAIYRGRAIACGGHDIYRQDRREQWLAKVRERGAKQRAGFLYEQLAALKPLRHKAKLVMVKEARRQTAYLWLMSVPRLGAVSVAQLIAVVGTPYRFRSKRQFWTYVGLAVVTCSSADHEVMNGILRRSTRPLATRGLNRNHNHLLKRVFKNAATSACHSGPFKAAYDARVAQGMAPSLARLTIARQLAATTLALWKRGEQFDPERMKQQAAKEELTSLRSVV

SEQ ID NO: 153074 - protein, 345 aa, unidentified
MEYYAGIDVSLESASVCIVDDKGNIFREGKAASEPAALIKWLKDGGVELSRIGLEAGPMSQWLYAGMAKAGLPVELLETRHVRAAFRTMPVKTDRKDARGIAQLMRLGWFRSVHCKSLPSQEIRALLTGRKLMQGKLQDVERSLRGILRGFGLKVGKTTPRTFEGRILELVAGQPVLQEVADALLAARAVLAREFRSLDQRIHKTARQDERVRLLMSVPGVASIVGMAFVAAVDDPARFKSSKKVGAHFGLTPGRYQSGETDVPGRISKCGDAGMRALLFEAAHIVLTKPVKQAGALKRWAMAIEKRAGRCRAKVALARRLAVIMHRMWVSGTPFDATKAAAASA

SEQ ID NO: 153075 - protein, 427 aa, unidentified
MNEVDAIRIEQFRQFKEKIRGSREYEVVGIDVAKEKHHAFFGTAMGKTLLRRLVIGNDLEGFRTLIAQAEALKVQAGLSKVVYGLEPTGDYHKPLGEHLIKCSKLVVLVSGVALKRNRELLDGRWDKNDTKDAANVADLIAQGKCMFYEYPDSNVRDLRVLLSLKMQMRKREHGLRVRIRNHLVAQYFPELDRVWGQSETENLAIVRWCLDPSVIAGLELDDFVRRVCTRDRGVRQHARLRGIWKAAVDSVGCQAPEAVSIECKVVVEGLRRLREEIKEVAEEIHQICLRFPEYPFLLSIPGFGPEVSAQVLGAIGDPRRFSNAGEVLKLAGLDLGAYRSGKTAETAVPVISKRGKAHLRYMLYQAALIASCPNRPLMEYYTKKLEGRQQERGIRTKMRIKLAAKLLVIAWTLMKKKEPFDPTRLRV

SEQ ID NO: 153076 - protein, 309 aa, unidentified
MMITPDVIGIDVSKHHLDIFDGATTKASRLPNDLPSIETWLQGLGEDRRVIFEATGAYDAALRQALSEAGVRFARVNPTAARCFAKAAGYLAKTDQVDARMLAAMETALRPRLAEPRSPAAERLARLHKRRDQLVGARKQERTRRREAREAELLTSLERHLAFLDAEIAALEAQIAALVADEPALKRDARLLVSLPGIGPAVSACLMALMPELGQRSPKTIAALAGLAPINQDSGLKRGQRCIRGGRKRVREALYMAAVAAARSKSRFGDDYRRLRAAGKPAKLALIAIARKLLVTANAVIRDQQPFAA

SEQ ID NO: 153077 - protein, 412 aa, unidentified
MRLFAGDDWAEDHHDIEVMDQAGKVLAKKRLPEGAAGMAQLHALIGQFVPEDDMDSTEVVIGIETDRGPWVAALVAAGYTVFPVNPLQASRYRERHGVSGAKSDAGDAHMLADMVRTDSHQLRAAAGDSPEAAGIKVLARTHKTLIWERTRATQRLRHQLREYFPAALEAFEDLDAADTLELLGKAPEPARAAKLTRAQVSAALKRARRRNIPDKATAILAALRSEQLGQPEALTAAYAATVRSLLAVITVLNQQVKALQGQVGEHFGRHPDAEICLSQPGTGKILGARVLGEFGDDPRRYRDGKARRNYAATSPLTRASGKKKVVSARFIHNDRLVDALNAQAFAALSASPGARTLYDELRTRGIEHNDALRRLANRLVGILHGCLKTRTLYDEATAWGHRQNLPQSSVAA

SEQ ID NO: 153078 - protein, 343 aa, unidentified
MERYIGMDVSLKETSICVVDDDGEILCEGTVISEPAAIAGFIETNAVNAKRIGLETGPTTTWLWHELRALGMPVICIDARHAKAALSMQINKSDRNDAVGLARIMQAGWYKEVQVKSLPCHEVRAVLNSRAQLVKIKCDLENQIRGLLKNLGLVIGKAGGKVFHRRAEELVGEHRLLQEAVRPLLAVREFVRREIASLTRKLLALARDNDESRRLMTVPGIGPINALAFCAAIDEPSRFQRSRSVGAYFGLTPRRHASGEVDWTGRISKCGDAMVRTYLFEAAGVLLTRVPHWCRLKAWGLRLAKRIGFKKARVAVARKLAVILHRMWRDGTDFIWSTKEAAA

SEQ ID NO: 153079 - protein, 386 aa, unidentified
MQKLNDLSRSLTALEPNGTLIAVIEMSLSSWLVAGIVPGVERQPLKKLAVDESALLKLLHRWREEAEKAGRRIERIAVAFEAGRDGFWLARWLKARGIEAYVIHASSVAVSREHRRAKTDRLDTELLKRSFLGWLRGERDHCKMVEIPTMQDEDAKRPNREHDSLIGERSRIVNRMKAALVRLGIRGFNPKLKRATTRLDGLHTPEGEPIPPNALAELRRDMERRRLVNNQIRQIEEERLERIEQAPCDGAHVMVRLLARVMGVGIETADMLVHEVLSRNMRDRRAVARYAGLTGSPDESGRKRREKGLARSGNVRVRRGMIQLAWRFLLHQKNSALTKWFRSRTENARGTRKPMIVALARKLLIALWRLVREGLVPDGVVFRAAQ

SEQ ID NO: 153080 - protein, 466 aa, unidentified
MKQFYLGIDVSKGYADFMIINPKKQPVVQGFQLDDTFDGHRSLYNILSRFLVEHPNSTLFAGMESTGGYENNWYNSLIEFQGSLNIQTARLNPFAVMHNSKADLKKNTTDKISAQNIAEYLVAHPEKVVYQQHDRLASLRKQWGFIKMLTKQCTQFLNQLNGLIYSANPELLSYCQNGVPGWVLKVLVKYPSAANLKRAHAKTLTKIPYVSIHQAQQLIASANCSVASATDSTTEQLIVATARQILHLKKTIGEQINRMLRECSIPEVELLKTFPGISDLSAVGLIIEIQTIKRFAEAKKLASFFGVHPVYKISGDGVGGFKMSKQGRTAPRQILYMIALSAIQCNPLIREIYQKHQKQGKHNMAAMGICMHKILRIIYGMLKHNKPFNPHIDIANKRRSVRIKNDKSVDNTNRRFQDYDQKAPVSRRQKKKRLERERSHSVCDTNFGITAPVPLANILANILPQW

SEQ ID NO: 153081 - protein, 340 aa, unidentified
MKAHVCGIDIGKTVFHLVGLSKEGQIVAKRRFTRKQLVIHTANMPTCLIGMEACPGAHYLARVLTAQGHEVKLMPAEYVRPFVKSNKNDYIDAEAIAEAVQRPTMRFVPIKTEAQLDLQALHRVRDRWMGRRTAVINQIRGFLLEHGITIAVGPAHLKRQIPSILEDADNLLSPRMRALLVELRDEWEKLETQIEEIDREFSQAVKQEENCRRLLTIPGIGPLTATALTAAIGNATAFHKSRDLAAWLGLVPRQHSTGGKSRLLGISKRGNPYLRRLFIHGGRAVVARAKRENHTFGNWLDQLEARSPRNAVVVAMANKLARIAWAVLTRGQDYRATACP

SEQ ID NO: 153082 - protein, 348 aa, unidentified
MYVKEDIILAVDYHDENLVIRQFNCHTGEERLLKYHTTARNIRKVISDSANEVAEVGGRVFWIMESTTGWARVKKAIGSLGTMLVANVLQMPLPPKAYRRKTDKIDTGRILREFLNGSLPLAFQPSDELRQIRRLVATRESLVSRRTALRNWINRYLAHETWRSRAGLWSAKGMRSLKRFAASVEGPDKVVLSVKLKELEHLVELQTIVETEMLAIYKQWPQAQWIDEIPGIAQISAVSILARVGPIERFDSPEELISFAGLAPGIQQSDGSKREGRIGGGGTDKHLRHYLIEATFWARRVPRYFKTYERMLDKRGPKIARVVVARMMLRSIHKMLRAQVRFNRLRAA

SEQ ID NO: 153083 - protein, 362 aa, unidentified
MSVYVGIDVRRKRSQVAVIDADGEVLANRNVPNGVEPILSVIGGLPAGTPAAFEAAFGWGWLLELLEDYGFDPHLVHPLQCKAIASARLKNDKVDAAILAQLLRADLLPEAWIAPPPVRQLRALLRHRAQLVRLRTLLRNRIHAVLAGHGHGQPQGCWSGPGRAWLGSLPLPAVSREVVEDDLALIDALQQPIDRLDWEVHQRAKAEPAVKVLTQLPGVGPFTAMVILAETGDISRFGSARKLAAWAGLTPTVRGPDRTVRHGHISKQGSAWLRWILCEAAQTAKRHPDFAATYQAIARRRGKKIATTAIARKLLARAYHLLTDAQITAPQALTPAVPTDREGVATPRASSQNRMSRPCRAR

SEQ ID NO: 153084 - protein, 370 aa, unidentified
MNNPSQIWVGLDVHKESVSVAAFREGEDRPMHQERLGPSDEALRRVLRRLSREGKVRACYEAGGFGYVLQRKLAAWGYACDVVAPSLIPRKPGDHVKTDRRDALKLAEFNRSGHLTHVYVPTPEDERWRSVVRARRAFQKDTHRVQQRILKLLQARGHFYREEGKHWSQKFMHWLADLPLAEDDRFLIRSYTAQRDMQLQLAQGVGARIETLIEHKRWGKPMGRLQCLRGVDLLTSSGLVVEIVDIERFAGPRELMGWAGLGVTEFSSGEHVSRDRITKSGNSEVRRLMIEAAWNNTHPPRIGEPLRRRLEGQDPAVVAHAWRAQQRLHDTWRRLGPRSPKLAATAMAREMLGFVYALWRARPEDLQSRS

SEQ ID NO: 153085 - protein, 331 aa, unidentified
MEEVKRFVGIDVAKVALDVFIGSAGAAFSVTNDEVGIRELLRHLAPDDFVILEATGGLEMPVASALAAAGIAVAIVNPRQVRDFARATGQLAKTDRLDAEVLARFGEAVRPAARPLANEQAQALEALVTRRRQLVEMLTAEKNRRARASKILHHSIDEHIRWLEKRLTGFDDELGELIRETPLWRERDELLRSVPGVGKVLSITLLAQLPELGMLNRKQIAALAGLAPFNRDSGTLRGSRCIWGGRAQVRRVLYMATVAGVRCNPTIRTFYLRLRTNGKHAKPALIACMRKFLVILNAMLHNKTHWQTPALTSSTIALSPLPGAVSEHGCC

SEQ ID NO: 153086 - protein, 384 aa, unidentified
MQDVIVAVDPAKRSHTIEVLDQRERTLATLRIENTTAGYRELRAFAKRWPSRRWAVEGAQGVGRQLAQRLVADGERVIDVPAKLSTRVRVLDTGHGRKNDPADAHAVGVAALRHHDLVEMTLDDETVALRLLSDRRRELVRTRTQTLNRTHQLLMELIPSGAPKRLSATKAKQLVATVKPREIAGRTRRAMVVELIDDVVILDRKIKAITKQIREAVDATGTHLTDIVGIGPVLAAVILGEVGDVRRFPSRHHFASFTGTAPLEASSGEIVRHRLNRLGNRQLNHALHTAAVVQLAHDERGRAYYQRKKAVGKGSLGALRCLKRRLSDAVYRALNADRTAVSPGGHLGATLTASAADQIPTVSTSDKPLTGLTADPTPALAAMS

SEQ ID NO: 153087 - protein, 341 aa, unidentified
MKNLFIGVDFSKEKVDVAIIFADGLTETAARVFNEFKTTVSGYKLLVKWVEQNSYGIDSSLWLFCGENTGDYSKGLCNFLYGKGYDMWLENAKSIKDASGLRRLKSDRADASMIAEYAMRNYDKAIMYEPLSESLAQLRELFLYRQMVVRHRCSFQVRRGEKRLTMEKSPVKTMISQSGRHIVSELNKEIEKIDKRIAELIKSDEELTEVYTIVTSVPGIGTQNAVCMMVYTDNFRRFNYDSRKIACYYGIAPFGKDSGTSVHSDPRVHYMANRQIKAMLTQAALAAVNFNPVIARYYMRLVERGKKKQVVLNNVKNKLIHLITAMVRNRQLFSPEYKISA

SEQ ID NO: 153088 - protein, 346 aa, unidentified
MDMSITIGLDIAKSVFQVHAVDAAGRVVVRRRLRRAEVLKFFSKQPPALVALEACGGAHHWARQLGGLGHEVRLLAPSHVKPYVKRGRKSDAADAAALAEAVGRAQMRTVPTKTAEAQALASLHRTRELFVRHRTTLICALRSHLSEFGIVSAQGKGGVRQLRTWLDTLSADIVPALAIEACRLIVAQIDDATTRIDAIEARIVATQRSCEAGRRLATIPGVGPITASALMAFVPDAARFASARQFAAWLGLVPGQRSTGGKERLGRITKTGNQYLRKLLVIGATGLIRYRRATVPGGTAWLQGLLARKPARLVTVALANKMARIVWAVLARGERYRAPAASAAAA

SEQ ID NO: 153089 - protein, 408 aa, unidentified
MNPLYVGIDVSSKSNVVYFMLPDGSKHSNFSVANSHTGSSQLVKRILSAMTSCSLDSVLIGLEATSVYGDNLVYFLREDAALARFNSKIHVLNPKQVSKFKEAYNDLPKNDLIDSFVIADCLRFGRINKEVYIGDYRYKALQNLTRARYFAVSNLIKEKQRFMNILFKKYSTMTQEKVFSDTFSTTALAVYDEFESAEALADMDLHELTAFIMEKGKNRFPNPNAVAKAIQKAARSSYRLPKTVNDSVNQVLSISITSIKALEAQIKEFDKAIATQMELLPNVLISIPGIGPVFSAGIMAEIGDINRFHNQAQLAKYAGLAWKQHQSGDFEAQTTRLINSGNRFLKYYLCEAAFSLVRCDKEYSDFYHLKYKEVNRYQHKRALALTARKFVRLVFRLLKDNRLYTSAE

SEQ ID NO: 153090 - protein, 340 aa, unidentified
MRLVGCDLHAAQQSIAMLDRETGAVIEKTLKHEGEAVRTFYASIPPPGVVGIEATGSMGWFLRVMEELAIEYRVGHPVAIRKAETRRQKHDRRDAALLLQLRAEDRFPAIWMPSTEPRDLRALLWHRHQWVRMRTRVQNALHAIALAHGVRRGHTLWNREGQAWLASLPLAPHTAHRRSELQALYQHLAQQVDRLDERVKRVAEERPRATLLMTHPGVGTVTALATELFVGDPARFPDGQAVASYVGMIPSEYSSGRRQRLGALTKQGNPFLRFLWCEAAAHAVRRDPDLQRFYRRKATQKGFGKANVAAARKLGIRLWIMLRDQIDYAEFCRRGLARQS

SEQ ID NO: 153091 - protein, 344 aa, unidentified
MEYFAGIDVSLRSCALCIVDGKGKVLLERELPCEIDDITKCLAEFAHPIERVGFEAGTMSQHLYFGLNAEGFDVVCMEARQVNAALSAMRNKTDKNDARGIAHVLRTGWFSPVHMKSREAHGVRALLSTRKALLKKTMDLANEVRGLLKIFGIRLPMTVKHGSFDGVVRPLIEMDDVLTHALVPLLDARVVLYQHFLELDRRVKRAASQDEVCMRMMTVPGVGPIASLTFKAAVDDPTRFKRSRTVGAHFGLTPRRYQSGEHDNPGRISKAGDRDVRATLYAAANALLMRTMAGSQIKTWGMRLLRTKGRRRAVVAVARKLAVLLHRMWIDGTEFRQDQVGGTA

SEQ ID NO: 153092 - protein, 344 aa, unidentified
MWIIGCDFHSGFQQVAIFDNQTGVIEEKKLCHPAQATEFYRRLAGPVRVGMESGCPSQWFRRLLAECGHQLWIGDAARIRAAETRQQKTDRKDAELILKLLLEDRFPRIWVPTEGERDLRQLLLDRHHRMRLRTKVKNQLQALALNQGLQKGRRLWSIEGRQQLQELPMLEHAARRRDQLLKSLTELDAQILALDGVVRQQAEGREEARRLMTHPGVGPQTALGMVLTVGEVSRFATSKQLASYLGLTPREHSSGGKQRLGHISKQGSSFMRFLLVEAGQTAVRGDERLQRAYRRLAVRKSRGVAKVMVARRLAVRLYWMLREQWTYAELTRHAGKLESSCGEQ

SEQ ID NO: 153093 - protein, 412 aa, unidentified
MKQIRQKVGGLDIHRDSVVACTRVTAPDGSIEVAKGRFKTTQAGLAELTAFLMDAGVNTVAMEATGIYWRTVYYALEGLFEELWLCNAQHVKNVPGRKTDLSDAEWLADVAAHGMVRSSFVPPPDIRELRELTRYRKTQVDARTKEIQRLEKILQDAGVKLTSVASTVWSKSSRAMIEAMIAGERDSVILADMAKGVMRRKTDRLEEALESNFGSHHAILCRQVIDHLDFLDASIATLSAEICARLVPFEPQVALLTSIPGVSATTAQIIVAETGADMSRFPTAGHLCAWAGVAPASYESAGKKRPAGTRKGAPWLRRTLIEAARSAARTKGSYYSALYARIARRRGPNKAAVAVAHSMLETAWHLLSTGALYQDPGADYFERRHDPVIEAKRLQRRIEALGFAVTITENAA

SEQ ID NO: 153094 - protein, 356 aa, unidentified
MQTQVTKKIDFKGKDLFIGLDVHKKSWSVTILVEGMEHRTFTQPPDPRTLYNYLQKMFPGGTYYSAYEAGFCGYGTHRALNDLGIKNIVINAADIPTSQKDQIHKLDPVDSRKIARALEKGLLRAIHIFDRDKEELRSLNRTRFYLMRDLRRSKNRIKSFLQYYGIQIPLEYDNNLWTLKYIAWLKQIQMKTSSGQDAFSNLIRSFEYHREQILILSRQIRIRMREYDKELYNLLKTVSGIGPLTSSALITELGDINRFPHINHLSSFVGLIPRVKQSGETSYNAGMTFRCNEYLRTLLIESSWQAIRQDPALMQYYQQHVINNKGQKVIVKVAHKLLNRVRYVMKNRQPYVTRVA

SEQ ID NO: 153095 - protein, 346 aa, unidentified
MNNHNAKGIIKVLGIDLAKQSFQLHGVDKTGGTVLKKKLSRNKLTAFIANLPPCLIGLEACGGAHYWVRVFKSLGHSVRMIAPQFVKPYVKSNKNDAVDAEAICEAVQRPNMRFVPAKSVTQQDIQCLHRIRSQLVARRTAQANQIRGLLLEYGVIIPKGISYVRKEIPLILEDAENSLTSLFRELLSELYDEMVHLDERVNSLEGKLEIICRQNEDCQRLLSIPGVGLLSATALIAAIGDISVFKNGRELAAWLGLVPRQHSTGGKPTLMGISKRGDCYLRTLLIHGGRTVVRVAHLYTDKRNLWINELDQRRGKNISAVAVANKNARIAWALLSKKQSYEPSLI

SEQ ID NO: 153096 - protein, 417 aa, unidentified
MREDIDWFVGFDWASQTHVVCLLDRNGRVTAERQVAHGGADLAELCDWLVAKSGAPPARIGVAIETPHGPIVEMLLERGFLVFAVNPKQLDRFRDRFTVAGAKDDRRDAHVLADSLRTDRRAFRPLAVDDAIVIELREWSRIADELTQERNRLGNRIRQQLWRYYPQMLQLGDDLTAENFLALWECAPTPAKAAKIDEASLARVLKAHRIRRFEAAEALRVLRQKPLQAAAGASEAAVAHIRVVAERARLINRQLKEAHRQLDALCARLEQPKESEAGQSSEQRDVAILRSLPGVGRINLATLLAEAAEPLRRRDYPVLRVLSGVAPVTRRSGKARFVLRRLACNARLRDALYHWARVAMQVDPDSKRRYAALRRRGHSHGRALRTLADRLLAVACAMLESQTLFDPNHKAAPPAAA

SEQ ID NO: 153097 - protein, 356 aa, unidentified
MQTQVTKKIDFSGKELFIGLDVHKKSWSVTILVDGIEHRTFTQPPDPKTLFNYLQKMFPGGTYYSAYEAGFCGYGIHRELNSLGIKNIVINAADIPSSQKDHLEKRDPVDSRKIARALGKGLLRAIHIFDRDMEELRSLNRTRFYLMRDLRRSKNRIKSFLQYYGEPIPPEFDNNQWTLKFVSWLKQVKMQTMSGQDAFSNLIRSYEYHREQILILSRQIRLRIREYDNELYNLLKTISGIGPLTSSALITELGDINRFPHIDHLSSFVGLIPRIKQSGETSYSGGITFRCNEYLRTLLIESSWQAIRQDPALMQYYHQHIINNKGQKVIIKVARKLLNRIRYVMKNRQPYVTGVA

SEQ ID NO: 153098 - protein, 402 aa, unidentified
MVAGQLWAGVDVGKEHHWVCVVDDTGAVVLSRKLVNDEQPIRDLVAEIDQLADEVSWTVDLTTVYAALLLTVLAAADTQVRYLAGRAVWQPSAVYRGGETKTDAKDARVIADQSRMRGADLPVLTPDDDLITELRMLTAHRADLVADRTRTINRLRQQLVAVCPALERVAALTADRGWVVLLSRYQRPKTIRNSGVSRLTKILTDAGVRNAASITEAAVTAAKTQTVRLPGEDVAAGLLAELAQGVIALDDRIKATDADIEGRFRRHHLADVITSLPGIGFRLGAEFLAAVGDPAKIGSADQLAAWAGLAPVPRDSGKRTGRRHTPQRYNRRLRRVMYMSALTAIRRDPQSRAYYQSKHDQGKKPIQATICLARRRTNVLYALIPDHRTWQPDSPPITESAA

SEQ ID NO: 153099 - protein, 366 aa, unidentified
MTNLSNWIGIDDHADKWTIAQYRGTSGEPEREWELKPGESGYRKLIGWLKEMRGSVRIVYEAGPCGYELYRRLRRSGLDCQVAAPSLTPRKPGERIKTNGRDARKLARMLRAGELTLITVPDSRQESIRDVVRAREAANKDVLRARHQLSKLLLRQGYRYRDGKPWTQRFWAWVDQIELGEQYSREVLSQHVRVIGRRVELVAEYDRIIESVARESEYTPMVKALGVLRGVDWLTAMTILVEMGDLRRFATAPQLMAALGLVPSEFSTGDKTQRGSITKTGNAHARRVIVEAAWHYQRSFTRPGPRIRRRRLGQPTARLDIAERCDRRLHRRFTRLTSRGKRSTIAAVAVARELAGFIWAIGQIAY

SEQ ID NO: 153100 - protein, 412 aa, unidentified
MKDLLEISCGLDVHKEKIVACILTGPLGKPTRSEIREFSTLIPDMIALRNWIVSKNCHHVAMESTGIYWMPIYEILEDAFSGDITLLVVNARHMKNVPGKKTDMRDSEWISTLLRAGLLNGSFIPEKRIREFRDLNRYRKSVIRDITSQKNRIEKFLQSSGFRLSSFISDIFGASGRNIILHLIEHGQIDKTALDSCLKTKTRNRIDEILMSVNGTLSEHQKAFLRILMTHYDSLKKHLAEIETSLDEDMAPFALQVEQLNSIYGISTTASCAIIAEIGIDMKPFKTAEHICSWAGLCPGNNESAGKRKSTSVTKGNPYIKSMLCEIAWVIAGKRNTYLSAWYWRIKQKKGAKKAIVALARKLLVIIYTMLKQGTLFDESCFETRRKHCEQKQLSRYIRELEKHGYHVEAQS

SEQ ID NO: 153101 - protein, 318 aa, unidentified
MTHYIGIDISKRDFHACFTEGGDVLIFTNDTTGIKKFIKYLKSIKCTTGNTIIGLESTGSYHLPVAYLCTQAGYTINVINPLITKRQNQTSLRRVKTDKQDAKLIRYCTVNGAGYSFCESAQTLGLKVLVRQRSQYSMLRHRARLRHADVQEREKYLNISITSVNQDLYDFLDNKIKLLDIVLRKYESKTQKLLQTIPGVGPQTAVTCVSEIGDINRFPDAQKLTAWLGLDPRVHQSGTSINGKGYITKRGNKLLRTRLFNAASVAVVHPPNIFYEFHQKKLSEGKPYRVALCAVMHKMVHVIHAVWRNEAPFVNKFK

SEQ ID NO: 153102 - protein, 372 aa, unidentified
MDERIKFFVGLDAHKDSTSVAACESSRDPARFVGTIGPDVRVLLKLLAKAGDPAQVSVVYEAGPTGYGLYRELCQRGYRCEIVAPSLIPRRPGDRVKNDRRDCARLAELSRAGELKAIWVPDEAHEAMRNLWRAREDAVSMRLKARQQLKAFLLRQARRYPGKTSWTKSHERWIADQRFDHEADRIALAEYQLAAQSAEQRVQRLTIALTEATQGWRFEPVVAALRALRGIDTVSAIGLVSEIGDIDRFGSARQLMGYLGLVPSEHSSGNSIHRGSITKTGNAHARRLLTEAAWSYRFPARLSRNLRDRSDSVPEAVRSHAWKAQVRLCGRFARLSSRGVQVNKVCVAVARELAGFVWAIAHQASPAASTVH

SEQ ID NO: 153103 - protein, 368 aa, unidentified
MNCAAQPFRWRQQEELEMNPKRSKSRHGRKMPLVHPNAAAIDVGATMHMAAVRADRAPEPVRSFGTFTADLHRLIDWFTQCGVETVVMESTSVYWIPVFELLDARGFTVCLVNARDAKHVPGRKTDVSDAQWLQRLHSFGLLRASFRPKGQIAELRSYVRQRVLKELSIHRGRDHGAVPPPRRRHRTDQVNALAFDVRAALFALLGKDITAIDGLGAYLSLKLIAECGDDLSSWPSAKHFTSWLGLAPSNKISGGKMLSSRTRRSGGRAAALLRLAAVAVGRTDTALGAFYRRLSSRIGKAKAVTATARKVAVLFYNAVRHGMEYVDPGASSYETRYRTRVVNNLHRRAKAFGFVLQPLEPKAGAAVS

SEQ ID NO: 153104 - protein, 355 aa, unidentified
MTSTKYIGMDVHKESISIAVRNDAGKIVMECVIETKASMILQFIDGLRGDLHVTFEEGTSAAWLYDLLKPHVTKLLVCDPRKNRSMREGNQSDKIDARRLAELLRLNHLNPVYHGEHGLRTLKELVRSYLTITKDVGRVMSRVKAMYRSWAIPCTGKQVYTSRHRAEWLGKIREPGVRRRAEFYYQQLDALRLLRQEVRRDLLAESKKHKAWERLCQIPSIGPIRSAELLGILQTPHRFRTKRQLWTYCGLGIETHSSADHRVVEGQLKRAKKQVEVRGLNVNCNHDLKNLFKGAAVVAATKPGPFEEFYAELLAKGMRSEMARLTLARKIATIVLIVWKRGVSFDAQHLKPQTA

SEQ ID NO: 153105 - protein, 323 aa, unidentified
MQGKMTSEAGAVTTVYAGIDVCKAWLDVYLHPIGRSFRVPNSKEGCKRLALELTGVAAGLIVMEATGKLHRLCHRELSGAGFAVAIVNPYRSRKLADAFGQLAKTDAIDARMLALYGEAIGPKATPVPAKTLAEMQELVLARQAAKAGETALKNQHGAAESPALKRLLKAQLDAQARLIEGLKAAIDALLSKDAGLKRRYEICASIKGIGPIVAVTLVACLSELGVLSGGQIALLAGVAPINCDSGEMRGQRHIKGGRAPVRSALYMAAVSAIRCNPDLKAFNSRLRAAGKAPKVALTAVMRKLVLLANTLIHEDRFWTPKHA

SEQ ID NO: 153106 - protein, 450 aa, unidentified
MDKSSKKKSSVKKITQFEIIRHQVAGIDVSDNAGMLVAYPFNDHEIAIEEFECYTCDLRRLSSRLKEYRIESVAMEATGVYWIPLFLLLQEDGFEVYLVNSKHVKNVTGRKDDESDAEWIQKLHRCGLLSASFQPDNLTRSLRSLIRHRSDLVATRSCYLNRMQKALEQMNIKFHTIISDLDGKTGLQILHAIFEGERNAEKLASLCAPRIKASREEMVKSLEGFWSETHLFELRQCYKAFHFQNDMIEECDRELEKILMEMIAMKNEGIIPEMEEVKRKKNYKRQIRMNVTAYLKELNGINITEITGISEISALTILSEAGTDMSKWKTDKNFTSWLGLAPNTKISGGKLISSRVPKKKHYAGQSFRMAAMSLKNNKGPLGDYYRRIRIYAGAPKAIVAVARKLAVIYYHMMTSGQTFNPVELEKSQKKYNEQKIKQLERKLEKLKNAS

SEQ ID NO: 153107 - protein, 412 aa, unidentified
MKRIRARVAGLDVHRDTVVACCLVQQSDRSVEVTKQAFSTTAKGLGELAAWLSDAGVETVAMEATGVYWKPVYYCLEGLFDELWLCNAQHVKNVPGRKTDLTDAEWLADVAAHGMVRPSFVPPPEIRELRDVTRYRKTQVEARAKEIQRLEKTLQDAGIKLSSVTSKVWSQSSRAMIEAMIDGERDPKVLAQMAKSRLRAKIPELEEAFSGRFGSHHALVCRQVIDHIDFLDRSIATLTADVTQRLCPFEPAVTILCSIPGVSRTTAEVMIAEMGIDMARFPTSGHLCAWAGVAPASHESAGKRHPAGTRKGSTWLQRALVEAARGASRTKATYLSAQYSRIARRRGPNKAVIAVAHSILDVAWYLLTDGALYDDPGSRFFELRHDPAVEARRLQRRIEDLGFKVSITPAAA

SEQ ID NO: 153108 - protein, 340 aa, unidentified
MRYIGIDLHSNSFTVCYMEEGKQEVLQTFNLQDELDVFLSSLRSTDEIALEATGNSMFFRDAVLPLVKRVVIVAPHQFKVIRNSVKKTDKHDARAIALFLSKNMLPEARIKDPQHRQLLGLAQTRDQFVKTKVALINRVYGILNGHGLKIKKAQLTTIKGFDKAVALEELSPLEKASIAIIRDELASLRKHIKELEKLLVEYAEHIPGYKNLLSIKGIGPLGAAIFMAHISDIGDFKDPGKLAAYFGITPKVSQSNNKCINGHITKRGSKLARRTLVQCALIAKKYNPYISDFYERVKKRRGPGKAIIAVARKLLNTMFYTLKNDWIFEDFENFKINSCN

SEQ ID NO: 153109 - protein, 387 aa, unidentified
MEVRMESTPSAGTNNDPVHCFVAIELSKSSWVVGFQTPLSKQTSRYQVKACDAEPLLELIERVRTRVTREVGRPVEVTSCYEAGYDGFWLHRVLEAHGIHNHVLDPASLQVNRRARRPKTDRIDADRMVRALIRHLRGEPEACSVVRVPSPEQEDARRLHRERGRLIAERVGHVNRIKGLCATQGIYNYEPLRSDRLERLDKLRTGDGRALPARFKAEIVREIKRLEVVLEMISTVEAERDAILKDKKSTHLNADKIKMLAKLKAIGAGFSTTLVGEVFYREFANRRQLGSYVGLASSPFCSGSLDRDQGISKAGNSKARAMMIELAWTWLRYQPDSALSRWFQARVGNLKGRPRRIAIVAMARKLLVALWRYLQTGVIPTGAELKA

SEQ ID NO: 153110 - protein, 299 aa, unidentified
MSIVILGVDLGKNACSVVGVDAAGAVIVRKSMRRQTLIDYVTKLPACVIAMEACCGAHHLGRLFAAQGHEIRLMSPEYVRPYVKAQKNDDRDAEGIAEAASRPTMRFVELKTQEQLDIQTLHRVRSRLVAERTNLINQLRAILLERGTIFPAGRRKLELGIDAMLAAEDTTLSPRLKQLVGELRAEWHELDTKVEALNGEFVELARNDAAARRLTSIPGIGTLNATALIAAVGDASSFAKARDLGAWLGLVPRQHTTGGKPRLLGISKRGNTYLRTLLIHGARAALPSLARSETPLDVG

SEQ ID NO: 153111 - protein, 346 aa, unidentified
MEQIIRIGMDTSKSVFQLHGVNAKEQPVLRRKLSRREMVKFFEKLPPIEIAIEACGASHYWGRVLSCLGHTVKLIAPQLVKPYVKRGKNDAADAEALCEAMSRPTMRFVPLKSEEEQAALMLIGMRARLIRNRTQLVNTIRGYAAEFGITAPKGMCRIEALLDRIAADESLPTLTRELFALHAKEYAELQGEIEQLEGKVMAWHRANECSQRLAKIPGVGPIGAALLMMKTPDPHLFKSGRAFAAWIGLTPRDHSTGGKTRLGRITRAGDEVLRSTLVVGATAVVSHARRTNGKNASSWLRELLERKKPKLAAVALANKIARIAWKLMVSGEHYKRLLQQPGAAAV

SEQ ID NO: 153112 - protein, 349 aa, unidentified
MTLVGCDLHTRKQQVAVLDTETGAMYERHLSHAGDAVEQFYRALPGPVTVGIESTGYALWFHELMQRLGHTLLVGEAAKIRAMVVRKTKTDRRDALHLLDLLKHERFPLVWIPDPATRDLRALVTHRMRLVRMRTMVKNGLHAIAMNRRLTLGPSLWSQRGLAQLRDLALSPHTTQRRDESLQLLTWLTARIEALDDRVAAAAQADPGARLLLSHPGVGPLTALTTVVVLGPVARFPDSKHVVSYTGLAPAVHASADTCRLGQITKQGSPLLRFVLGQAGLIAAHAEVDLKRHYRTLLRRRGRPKAIVAIARKLLVRLYIMLRDQIDYEEFRRRGRTPRGQEVPPPALA

SEQ ID NO: 153113 - protein, 358 aa, unidentified
MKKGYHLPKPDKMKVLLKQTVGIDVAQNELVVSLGKMDEQINIEVYDYKVFPNTKKGFSSLVSWVNKQTSNTTEVRYVMEATGVYHESLAYYLCSIQKQVSIILPNKISNYAKTLDIKTITDKSASQAIARFGLERKLEVWLPPLKIFNDLRQLCREREQLVQERTMLKNQLHAERTSATSSKNSVQRTKKRIALIDLQEKEIREEIAILIKEDQTLVEKMKMVSSIPGIGNLTAVTIIAETNGFELIKNKRQLVSYAGLDVREKISGTSVKSKPRISKRGNRNLRKVMHFPALAAIRTDERFRDIFLRLVSKHGIKMKAIVAIQRKLLELTFILWKNNSYYKSEHQYQIIPFQEVTE

SEQ ID NO: 153114 - protein, 337 aa, unidentified
MIHVGVDLHQRFCYVTAVDASGQKLAQRSLANEAVTLQKWFSQLPEPRQVVVEACSFWPAFRRSLGPLGAGLVMVHPARVKAIAAARLKNDRVDSETLAHLSRCDLLPEAWMADEATRQLRLQVRLRVKLGRQRTRLKNLLQSVLHQEGLRKPVSDVFGKAGRRWLATAAMSPAARLNVDSYLELIDHLDTMLRQQERALGKLAQQDERARWLRTIPGIGAYSAMVILAELGEVSRFASKQALASYAGLVPRVRESAGKRHYGGITRAGSETLRWIMLQVAQVAVRKSPAARAYQQRLRQTKRPQVAKVALARKLLTCVWALLRHGVCFEEQVFAAR

SEQ ID NO: 153115 - protein, 395 aa, unidentified
MKYGVGIDISKGKSTIAILSIEGEVIKEPFEFSHSQNDLDNLDLLLNQYLKEDLKIIMEETGTYHLPVLSYLLEKGYCVIAENAFRIKKYLDRGLRKAKTDKKDSLKLAEYACDNWYKLKMPIIEDSKYKDLRFLSRQYFAFNSIKVQQKVNFSNLTDMLFPGYYGLLDENNYILGLKVFQKYSLETIKNKKLETFINEVDKIAQKIGHKRAGITFAKKVYELARQSVPSCPSSEYTQLIIDNCVVALIQSIETTKEIISKMQEIANTLPEYETVRSMPGAGPRLAPLLIAEIGDVRKFKDSSSLIAYAGIDAPPYQSGQFEATNRHISKRGNKYLRKTGYEVMKAIKSFYSIGNEFYDYMLKKESEGKKKKVAKIAALNKFLRQYYAKLIKLYN

SEQ ID NO: 153116 - protein, 411 aa, unidentified
MDILHARCAGLDVHKDFVTACVLLPGEGSEPSKHLEQFGTTTQELRRLSQWLEQEQVTQAAMESTGVYWKPVFNMLESSCEVVLVNSRQVRNVPGRKTDPADASWLARLLRHGLVEASFVPERQTRELRDLCRMRTTLVRESVQTGNRLRKVLEDANIKLDSVASDSLGVSGRSMIEALVRGETDPIVLAELARGRLRAKRPELALAWEGRVTPHHQFLLGEWMRLLHFLEEQIARLEAEIEGHMPPFEAAATLLMSMPGVDRTSACALLGEIGRDMTRFASARHLASWAGVCPGNHQSGGRRMSGKSHRGNRWVKGVLTEMAWAATRTKNTYASALYRRLMIHKGKKRALVAVAHHLLEAVWHMLTLGAPYRELGSDYFDRLDRDRLKRNLVRRLQKLGYTVDVQPVSAA

SEQ ID NO: 153117 - protein, 416 aa, unidentified
MDTMYERCCGLDIHKKTIEACFRSGKKKTHMSFGTTSAELRKLTMWLVENDCQSVAMESTGSYWKPIFNILELSGTDMKIIVVNARHMKNVPGRKTDVNDAEWIAELLQYGLLRPSFIPDREQRELRELSRYRKSLVGERAREINRLQKMLEGGNIKLTSVVSEVTGYSSRRLLDRLLRNDEPMTEDVISGLVHTSLAGKSKELEIALDGLLSELQKELLIKVLDHIDDMSRRIADLDDFCRKQMKKYEDALDKLDEIPGIARRTAETILIETGLDMSRFPTAKHLARWAGLAPGNNESAGKRSSGRTTKGNPTLKSTLIQSAKVAARKKNSFFKARYQKIAAKRGANRASVAVAHSMLIAIYHILKSGERFKDLGEDYYNQFNREKKKNYYLKKLTKLGVNLKEATLSISIQTAT

SEQ ID NO: 153118 - protein, 344 aa, unidentified
MKHYAGLDVSVKETSVCVIDETGKTIREVKVASEPEAILSVLVDEALTIGRIGLEAGPLSQWLYSGLAETGLPVICVETRHMKAALSAQLNKSDRNDARGIAHMMRVGLYRPVHVKTLASQKRRMLLTSRQLLQAKAVDIENDLRGTLRNFGLKVGVVGTAKFEARIHELVADHPDLAAITEPLLIARRTLREQLGVLHRRLLAVVRQDEVCRRLMTVPGVGPVVALTFRATVDVPARFKNSKAVGAVFGLTPRRHQSGEIDRMGSISKCGDAMVRTMLFESAQVMLTRTIKWSWLKAWGMKIARHRGMRRAIVAVARRMAVIMHRMWADGTEFRWSNTNAATA

SEQ ID NO: 153119 - protein, 460 aa, unidentified
MSQRRKCKKKKAPIQQLPVINPHVAGIDLGATIHYVCGPATEGDTANIRDFGTTTPELLKIADWLKGQQVTSVAMESTGVYWIPLFEVLDQAGFDVHLVNARQLHNVPGRKTDCQDCQWIQLLHSCGLLRKSFRPADEICRIRELTRAASELVQLRSQAVLHMQKALDQMNVLVHRALSDITGTTGQAIIRAIVGGERDPEVLAKLRDPRCKKSVDQIAEYLTGNWRDEHLFNLRQALARFDMFDRQIEDYASELRSKLESMVPEDRDDEAPPPHPKPNKLKAIVRAGDDALRDVLYRFSGIDLTVIDGISVKAGQTILSEVGPDISAFPDENHFVSWLRLCPKKPITGGRVKNAKSRNGHGSNRIATALRMGALTLNRADCALGAEFRRIARRHDRRVAIMAVARHMAKLVYRMLRYGQAYVDIGAEAYESQRAQMQKDRIQRQATRLGFELVPIPTEP

SEQ ID NO: 153120 - protein, 406 aa, unidentified
MKKRILKFSLGIDVSKDKLDCNLSYINELQEVKTKASRRFNNTQAGIRELIVWFKRHWKEVAPLVVVMEATGVYHENVAYNLDDIQVDLAVVLPNKSKKYMESLGYKSKNDTIDARGLAQMGAERSLPLWQRPSKSIYMLRSLCREHVSLQDDLTEIRNQIHAMDHAYMKNTRSYKRLEAKLKFIKKQEKINKKDIEETIKNDKELSTKVENITAINGVGLISVATVIGETNGFAQVEKQGQLVSYAGYDVVEKQSGNRQGKTRISKKGNSHIRRVLHFPALNVVRYGTEPFVSFHQRLIDNGKLKMQAYTAVQKKLLVIMWALWKKNERFDPKHINPDLKKDIEEQESNPGDSNTIKENSTSTEVNVLHKIDSGLPEPSFFESKVNELLIEVDEKENIKEVHCHC

SEQ ID NO: 153121 - protein, 305 aa, unidentified
MKFYIKQHKHYCGIDLHARSMYLCILDSKGRVKLHKDIKTSSKALMKAIKPYLDDLIIAAECMFSWYWVADFCEDNNIKFILGHALYMKAIHGGKAKNDKVDSHKIASLVRGGTFPMAFVYPRDMRATRDLLRRRMHLMRKRAELLCHIHNTNTQYNYDQIGKNLRYKSNRKLVDGRFADPSAQKNVDLDIQLINFYDEQLAGVERYIKKHAKINDYQSHMLLNSVPGIGKIISLVILYEIYDIKRFPRVQDFASYARLIKCKAESGGKSYGTSGAKTVYIKQVVAFFHKNFRLFPQKSLMTSDG

SEQ ID NO: 153122 - protein, 463 aa, unidentified
MPQIKRINGRLGSRSNRMQEVIPVKRKTPYCLTNVKDIAVEPLVAAHPGQAVIVGIDVAKNELVACVYWSNRSFERPWCVESPGQIPLLLQQLQRLSAQAPVTLAMESSGTYGDVLRQAATDAKLPLHRVSAKAVKDHAETFDGVPSQHDGKDAAVIAELCWLGKSVPWPWQDRCTDDQALRYWVRRLDMAQRIKQMYCGRLESLLARHWPEVSGLLKLTSPTLQGALRRWGDPRQLAADAQAPKVLARLGGYYLKPQKIAQVMAAAGSTLGVRMNPWQVRELRQTAHALLKKRRLIARCKRELRRLTKNHPVIQAQTPALGLTTACVLWMCLGDVANYPSAAAYRKAMGLNLKEHSSGKFKGKLSLSKRGQRLARKWLYFSALRWMRDARVRPWVKNKRARDGGKGSRAMVGVMRRLALAAWHIAKHGEAFDPARLFPSVKKISAQTHCGRQAPVTPGPGPA

SEQ ID NO: 153123 - protein, 342 aa, unidentified
MYYIGLDVHKKTISYCIKDVSGQVHREGQIGATRRELEGWMKTLPQPWTVAMEATIFTGWIYDHLLPHAQEVKVAHPLMLRAIAAAKKKNDRIDAGKIADCLRCDFLPECHMASTPIRDRRRTLRYRHLLVRQMVQMKNRVSGLLMETGVSYNKQRLHKVRYFRELLSTNEEVNESIRPLLRLSRDTIVRLQKTEYTLVSSLQRDPLLAERIRHLRTVPGVGPITALTWALEMGDVSRFHSIREAISYCGLCGDEKSSADKMTRTPLSKQRNKHIQRVLVEAAKLAPRQDHDLALVYETAKQKGNSNRATLAVARKMVAYLLAVDRVQRDFVPAEAHRGAAA

SEQ ID NO: 153124 - protein, 342 aa, unidentified
MPPRPPSPTAVPDRWSVAQAAAGIAAVVARLTALAPTLVVLAATGGRQVPVVAALAVAGVPVVAVNPRQVKAVGTAVGQLAKTDALDAALLARVAETVRPPVRPLPDAATQDLSAILTRRRQVQSRRIAEENRRETALPVVHAVHAVHAVHAVHAVHAVHAVHAVHAVHAVHAVHAVHAVHAVHAVLAVLAVHAEELSEPDPELARQIGASPVWRERDALLRSVPGVGVVLATTLLAELPELGLLSHKAIAALVGVAPLNHDSGGQRGQRVVWGGRSRLRAVLSMAALVAKRCNPVIRAFAERLQAAGKAKKVVITACLPKLLTILNAMLRHGEPWRTPTAA

SEQ ID NO: 153125 - protein, 320 aa, unidentified
MEQHCIYVGIDVAKARVDVAVRPVGDRCEVSNDEAGIAELVAQMQHLKPAALVLEASGGLELPLVAALAAASLPVVVVNPRQVRDFAKATGRLAKTDSLDSAVLAHFAEAVRPPLRPLRDADTQVLNSLVPRRHQVMTMLVAEKNRLSSATTAVRPSIEAHIAWLKQELDDLDQGLRQTLRQSAVWREKDDLLRSVPGVGEQISLTLLAYLPELGTLNRRQIAALVGVAPFNRDSGTLRGKRTVWGGRARVRTALYMGAMVASRFNPVIRDFYQRLLSAGKPKKLALTACMRKLLVILNSMLKHGSSWNQAATKSLTHSY

SEQ ID NO: 153126 - protein, 372 aa, unidentified
MKNLSIFVGLDAHKESVDIALVEGDRNSAVRYFGTIGGDLVDLDKTVKKLKKAHPEASFHFVYEAGPCGYGIYRYLKKAGHDCMVVAPSMIPKRSGNRIKTDRRDSIMLASLHRAGELTPVFVPKEEDEAMRDLVRARQDAVKAARVAKQQLQGFLLRHGIKFVGKGDWRQSHVTWLAGLTMPIPAQQIVLQEYINTVKDCVERVARLTYQIQEVLPTWELAPVVKALQAMRGVSLQVAVTTVAELGDLKRFDNPRQLMSYLGLVPSEHSSGGSRRTGSITKAGNGHVRKALVEAAQTYRLKARISKELLVRQDGLPKQICDIAWKAQVRLCGRFRKMEARGKKHQTIICAIAREICAFMWAIAREVKPTTT

SEQ ID NO: 153127 - protein, 482 aa, unidentified
MMGSAVSPEVDHHNGASEPELEFDRAVLSTLDCRHGSPSGPGARLLDFMTRTATPTAQLEMEAIMEVLHERCAGLDVHKNTVVACVRVMHGGKIRLEVRTFKTTTRDLLALSEWLDGHGARHVVMEATGVYWKPVWHILSDGEVELVLANAAHVKNVPGRKSDVSDAQWLADLEAHGLVRPSFVPDGQTQELRGLLRTRKQLVRERTSHTLRIQKTLEDANIKLDSTISNIIGLSGRRMIEAMVAGESDPETLAGLADKRIKASPQDLCEALRGRITKHHRFLLGLHLGHIDAIDAAIDKIDQEIEAGLAPFRDAVELLTTIPGVSDLAAQGIVAEIGLDMSRFPTAGHLVSWAGLCPRSDESAGKRRSTRLRKGAGWLKTLLVQCACAAAKSKATYLRSQFARIKARRGAKKATVAVAASILTAAYHMLKTGTVYNDLGPQHLDRRQKEARARSLLASLRRLGYVANLAPLQPPPSPVVSC

SEQ ID NO: 153128 - protein, 346 aa, unidentified
MKYSTTVGVDLAKNVFQVSVVSGRGKELSNRSLTRRKFAEFLGKQKPSLVAFEACATSHDWARAAERNGHVARIIPAKFVAPFRQGHKTDSNDALAVAEAARRPSIKEAPMKTVEQQGLQAIHRSRQLLIQECTALSNHLRGLLMEFGVIIPQGFASLLRTLPEVLEDGENELPDLYRPTLHRMYMRLLELREHIEAMTREVEVLVKEHPICSRLTALEGLGPIGALLLYATLGSGTAFSGSREFAAYLGLAPRQYSSGGKTNIVGLSKKIGNCRLRSILILGARAYTYRLKEPKSSKDRWLKAVIERNGHSRAAIALANKNVRTAWAMVTQGTEYQRRGQLKVAA

SEQ ID NO: 153129 - protein, 381 aa, unidentified
MDTATRDQQCSSEPILFMAMELSASKWKLGFTVGLGQKPRERTIDAGDLDGLREAVARAKRRFRLAEDARVVSCYEAGRDGFWIDRYLRGHGIGNVVIDPASVEGNRRRKKRKTDRLDLGKLLRCLVRWHRGEEKVWAVVRPPSEEAEDARQFHRELEVLKGERTRHVARIKSLLVSQGIQVKRVGTDFVTELEAARTWDGSPVPPQLRDRLMRELARLQVLRQQICELEGQRREAIRKVTDRRMEQIRHLMRLRGIGENGAWLLVMELFGWREFRNRGEVGSIAGLTPTPWASGDEDREQGIDKAGNRRVRAMMIELAWCWLRYQPRSELSMWFEQRFGGGSKRSRRIGIVALARRLLVALWHFLRDGWVPKGAVLTAPG

SEQ ID NO: 153130 - protein, 384 aa, unidentified
MNKHNILFIGLDTHKEFVEVAYIEDQRGAQAVHFGRISSAKTAIAKLAKQLQSKYSQATLHFVYEAGPCGYWIYRLLTSLGHCCYVVAPSLIPKKPGDKIKTDKRDSLKLAKLLKTEDLTPIYVPEPEDEAVRDLSRARETAMKDLKDAKYQLKALLLRNNINYAGTANWSAKHLRWLTELVLPHPAQQIALQEYLHTINERVARLKRLDNELTHQVQAWRYYPVVKAVQAMRGVRLLVATGLIAELGDIRRFDHPRKLMSYLGLVPSEHSSGGKRHIGAITKCGNGRARRLLIEGAHSYRYPANISSDLQLRQEGLPKAIVDKAWQAQLRLCRRYQRLMHKGKHYNVVVTAIAREMIAYIWAIAKQVVLVDVNPKLRLARVPA

SEQ ID NO: 153131 - protein, 414 aa, unidentified
MNQQEVAAWIGLDWADKKHSIHLQVRDGKREHRMLEQKPDIIHEWVAELRQRFDGQRVAIAIEQRKGAVVHALMTYDFIVLYPINPKALARYREAFRTSGAKDDPSDSELLLDLVSKHGDKLRAWVPDTVEARKLQLLCEQRRKIVNHRVALTNRITSLLKQYFPQALDWVGDVASIQACDFLANWPTLSAVQRARKETLRKFYRQHNCRKASVIDERLLQISNAVSLTNDPAIIEPLSLSVQTYAVQLRSLIRAVQQFDKHIAETFAQHPDHDVFDSFPGAGQVCGPRLAAAFGTDRSRWQSAVEMQSHSGIAPVTERSGDSKWIHHRLACPKFMKQTFHEFSDQSIRFSKWARAQYDELRSRGKDHHAALRALAYKWIRILFRCWKDRKPYSEEKYLAALQKRGSPLVEKIA

SEQ ID NO: 153132 - protein, 350 aa, unidentified
MEDVTLLAIDIAKTVFQLHGLNKKGKCVLKKRLSREKLVEYINPLPSCRIVMEACGSANYWSRVFKRWGHEVNLISPQYVKPFVKGNKTDRNDSEAIAEAASRPLMRYVKAKTVEQQDIQCLLRIRAQLIAERIALSNQTRGFLAEYGVILNQGARAFRQGIPLVLEDAENELSDLMREHVQRLYERFCALEKEIVFYDQVIRQVVKQSETAQRITQIEGVGPIIAAAILSLGDLKRFKNGRHFSAFLGLVPREKSSGHKQIRLGMSKRGDVYLRQILMHGSRSVLLRINKKQTTQSAWLKNLVAHKGMNRATGALANKIARHIWAVVAQECEYDRNRGYGIQKMDSASA

SEQ ID NO: 153133 - protein, 348 aa, unidentified
MEHYVGIDVSLELSSLCVLDVAGKVIREAKVASEPEALVAFLRGLDLPIARVGLEAGPLSQWLYDGLHEAGLGPVLLETRHVKAALSAMAVKTDRRDARGIAQLLRMGWYRPVHRKSVSSQEIRALLGARKQLQIKVIDLEQTVRGLLRGFGLKVGDVSRGKLPARIRELAAGHFMLEKIVEPLLAAREAMWREFARLHREVLVIVKEDQVCRRLMTVPGVGALVSLTYRAGVDDPGRFAKSKSVGAFFGLTPRRYQSGETDVTGSITKVGDAAVRTALHDAANALLTRATRFSTLKRWALDVAKRRGMRRAKVALARKLATVLHRMWADGTEFVRGKDPAAAAAPAA

SEQ ID NO: 153134 - protein, 392 aa, unidentified
MMKQDLEESNGGRTVVGIDPCSEFLQLAILAPNKATEFKKLPLSPSITEEIVKSTDPKTTQIVIESYGSYGKLFIYDLLRKGYDIREVNPHISKKLSSLYSEEHSDQKDAESLAKALLLIPDLPKILITDKKQWLAKLTRTRKKLVKDLNGYLNRLHIALTESYGVVYKALFKSLSAKKALKFFEDFPTINDSASDESVMRRLGEEKWVLLIQAGKWEDDFYLEALRTEIRGLIEIIRAVNSTKLAIDKKIHETADKIEEMKILRTFPGIGGISGAALLSEIGDIERFGKESNLSAYCGVSPVIWQSGIGRIRTKRRKRYSRRLKGILYFISLSQIRINPESRAYYERKIKEGKTHWQAMNALSRQLIKIIYYILKNKKPYQRNLSVNKLLT

SEQ ID NO: 153135 - protein, 338 aa, unidentified
MKLYGGMDLHSTNVVTQLIDEGDKVLYRKKQSCDLDQILNGLEPFKDNIEGIAVESTYNWYWLVDGLMAAGYRVHLVNTAAVKQYEGLKYTDDDSDAFWLAHLLRLGILPTGHIYPKESRAVRDLLRKRGQLVRQRTAHILSIENLYARNSCDRLSCNAIKCLTEEQIQKQFDDPNVALAIDSNRILMNALDQQIKVLEQALLKQTKLNPRYRKLLTIDGVGEVLALTITLETGDIGRFAQVGNFTSYCRCVGSEKLSNGKKKGQGNSKNGNKYLAWAFIEAANFAIRFNEQAKRFYQRKAAKRNRVVALKAVAHKLARASYSVMRDQVPFDSAKLFV

SEQ ID NO: 153136 - protein, 344 aa, unidentified
MEITTVGLDLAKRVFQVHGVDATGGVVVRKALRRAQVLPFFAKLPPCLVGIEACGTSHHWARELIGLGHEVRLMPPAYVKPYVKRGKTDAADAEAICEAVTRPTMRFVAVKSRQQQAALSMHRARNLLVKQRTQLVNMMRGLLAEFGIDIPEGLERALLMARQVIDGVVPDVPIEAAKIIGMLSQQALDTHVRLREIDRELVALQRTDDVARRLATIPGIGPIGATALAASVTDPAKFRSGRQFAAWLGLTPLQSSSGGKERLGRITKMGDKYLRKLLVIGATSLVRRAKYNPRMVDPRLADLLARKPVRVATVAMANKTARIVWAVMTRGDVYRPVHLPALAA

SEQ ID NO: 153137 - protein, 318 aa, unidentified
MLIHYIDIAKRNFVIAVSSLSKTKTETNNPKGIAHTIEYLKKHKVALVVTESTGGLEIPAAKAIRRAGIAVIIANPRQTHQFAQSQPLTKTDAKDAKMPAFFAQMKAQKEDSQTMPYQPPTEAEEVLEALVNRRNQSADMRTAEKNRLHQVHETQVGSVKQLIAHFDRLIDELDKQIDNHTHTHFDGKAQVAEQIKGIGSITTATLMAMLPELGRLSHKQIASLAGIAPHPRESGETKFKSRCFGGRSAVRKALYMATVAATRFKPLIRDFYQRLPSEGKPYKVAVTACMRKLLTISNARMRDYFAENDTAENGIRTA

SEQ ID NO: 153138 - protein, 339 aa, unidentified
MNFYFIGLDIAKDTFVASIFHKPKESILTKENISNDKCGYDELILWLKEHGITRTNCQVCLEATGVYSQGISYYLLAQGYKVSVECPLKVKRAFHPAGHKSDPVDSRQIAEYAYRFQDELIPWQPKEELLEKIRQLLTLREEFTRQKSATKCSIKAYELERVQLQLIKDAQEETLKGLERQITRIDKELDKLIKEDPHIKNRLDNLKSIPGFGMLLATHLLVMTNNFNKIEEYRPLAAFIGIVPYEYTSGTSVYKRPHIRHYGPKASRKLLRLAAQSVATHDVSFKKYYLRKLAEGKAKALVLNNIANKLLKVACAIVRDNTRYIKEHRSIHPMYVKSI

SEQ ID NO: 153139 - protein, 355 aa, unidentified
MNDAKYIGLDVHQATISVAVLDSAGNLVMEAILETKAETILQFIHGLRGSLHVTFEEGTCAAWLHDLLKPHVAKVVVCDPRKNALLKAGNKNDRIDARKLADLLRSGLLSPVYHGENGVRTLKELARSYLTLTRDTTRVMNRLKALYRSWAIPCAGQRVYAPRYRSEWLAKITEAGVHRRAEIYYQQLDALRSLREQVRRDLLAEGRKHRAMKLLRQIPSIGPIRAVLLIALMQTPHRFRTKRQLWAYCGLALKTSTSGEYRIVEGQLKRSKKFLAIRGLNANHNHDLKNIFKGAATRAAAVGGPFQEFHAGLVARGMKPTLARLTLARKIAAITLVVWKKGVSFDAGHLKQQAA

SEQ ID NO: 153140 - protein, 347 aa, unidentified
MVTFGGDSHKRSHTLVAVDENGRQLAERTVPATSSGHMEALDWARQWSERRWALENCRHLSRVLERDLLSAGEAVVQVSPKLMGVARRTGRELGKSDPIDALAVARAALREQHLPVAQLEGRSREVKLLVDHREDLVGERTRIQNRLLWHLHELEPGYQVVASGLLRRVVLAEVSSHLESQTGVVAEIARDLVARLTELTESVRRLQRRIEALMNELAPSLLSLPGCAALSAAKLVAETADVSRFRSSAAYAMHNGTAPIPVWSGNQERHRLNRGGNRQLNVALHRIAITQMRLGGPASDYIARRLTMGNTKTEAIRALRRQISDEVYRRLRQDHSQRSTALIAVAA

SEQ ID NO: 153141 - protein, 482 aa, unidentified
MKKKNIYTNQSQELLTLFEKAGNGAKIMCVPIDYAKKDHVAMLCNGNGHILRKPFSVKNTPEGIEYLIKQVTRSCSHRQIDLKHVFFGGEDVGSYAENFVNTLRSGGWIVAGVNAHDAKEQRANMQASTDRLDLMGIASMLLNRRGNCSPAQSGIYRNLRTLVRHRKKLVAMSTEVKNRMHTVVDRLFPGFLDEKKSGILSFSKSSLYLMEDRFSPRQIRRRKRKKLIEILKRYGTAKPESTTAKLQEYAARVLNTPNEYVDTLQLSLAQHVKHFKCLQDSIEQLEHEIAVWLAQTQGAFLTTIRGIGIVLAAGVSAEIGNPQEQKPLNNLVSYSGIIPRVKQTGGSEGKTHTGKVAKRCNHILKDYVVQSGNHMGLHGPEELMADYKRREAADQHADFGIGRRYLRMAMCLMRTSQIYMPEQLRNTKVKPEERAGYYLTIWPYLRIKWKKAGALEAAFEKDRPLGQWRCMVQELYGIKLKL

SEQ ID NO: 153142 - protein, 391 aa, unidentified
MIFVGIDVAKDKHDCFILNSEGTVLADVFTIANNRIGFETLLSRIQSCSQGESKIKVGLEATGHYSYNLLGFLLDSGLATYVINPLHTNLYRKSLSLRRTKTDRIDARTIAMMLMSDVDLKSYSNTAYHNEELKSLTRYRFDKVKERAKLKSSVARLVNILFPELEKLVSSLHIAVVYALLSNYPGASYIANANTEELAETLCTASKGRYTKSKTAEIQVTAGVSIGSKMPAKSMELKHTIALIRELDKEISEVESAIDKITSQMDSPIFTIPGIGRHMGAMILAEVGDFSNFASADKLLAYAGLSPSTYQSGQLQNCYAHMEKRGSRYLRYALFNAAKYVCLWCPTFSAYLEKKRSEGKHYNVAISHAAKKLVRLIFAMQRSGKAFLADY

SEQ ID NO: 153143 - protein, 391 aa, unidentified
MDRAWVGIDVGKGFHWVHVLDTSGSELLSRKLENDEAGISKLIDEALSLAEEVVWAVDQPGGSAALLLALLRERDQRVLYVPGLTVYRASDTYRGESKTDARDARVIADQARMRPDLGELEPGEEEVAQLRILLGRRRDLVVDQNRTITRLGEALLLLSPALERALDLNRRGPLTLLTRYQSPAQLRRAGRKRIAAYLRNRRVKGFDGVASKALTAAKSQSITLPGESVAARVVAELAAEVLVLKDRIELVDEEIEQRFFDRPEAEILASLPGMGPLLGAEFLAAVGNLSAFASADHLAAYSGLVPAANDSGKRVGNNRRMRGGNKNLKRVFYQAAFASLRSSPESRAFYDRKRAEGKRHTQALIALARRRVNVLWAMLRNGTTFEPRSAV

SEQ ID NO: 153144 - protein, 400 aa, unidentified
MFAELGGSSLVMLGRGLGRLAVQSLRHGGRAVVEHTTTYVAFDNSKDTLDVAIADGGLREEVRFWGTIPNQAEAVRKLVTKLAAKHPVLSFCYEAGPCGYGLYRQILALGHPCLVVAPSLIPTKPGGHIKTDRRDATMLASLFRAGELQGVWVPDADHEAMRELIRGRQTAMQEVRRSRQLVLSFLLRHDRAISTRQHWTRAHRAWLARQSFSHPAEQIVFEELIQRMEVACARQGRHEDAIRRLLPAWSLAGVVAAVQSMRGVALMSAVTLVAEIGDFGRFASPRQLMAWLGLVPKEHSSGRKVARGNITKAGNIRARRVLVEGAWTYRLPARMGEDITRRNDGLPEAISAAAWKAQVRLCTRYRRLQNTGKPQNVIVVAIAREMAAFVWAIARMAQPA

SEQ ID NO: 153145 - protein, 338 aa, unidentified
MAIVMGLDQHRAQITAEWIETSTGEVSRGRVAPADRAGVRRFLERFTGEQLEVALEATTGWRFVVEELRRVDAQVHLAEPAETSARKGNKKRAKTDRADARHLRELLMIDRLPESWIPPEHILDLRARVRTRHTLSHQRCEWQQRIQAVLYHHGCPSRRSLMVGDGRQWLTAQRLPETAREQVTIAIAMIDALEAQLAPIDKQLRGYARRQPGCKALMAHYGIGELTSVTILAELGDARRFHNSRDAVRYAGLDITVYQSDQRRAPGKLSRQGPPALRWALYEAAQQARHPRSPDRAYYLQAAERLGGNRACLALTRKLLKRCYHTLRELGDEALLPA

SEQ ID NO: 153146 - protein, 413 aa, unidentified
MAVFCGIDWAEDHHDIALVDQDGTLLAKRRIGDDAAGFAALLQLLVEAGDDPDAPIPVAIETSHGLLVACLRATGRPVFPINPLSVSRYRDRHSVARRKSDAGDALVLANILRTDLAAHRPLPADSELAQAIAVLARAQQDAVWARTDAHNKLRSLLREYYPAILLAFATKRGGLLRPEARALLRAAPTPRAAARLTLSQLRALRHRAGLQRGIDTEALRLQQLLRADYLHHPTLVEEAFGRQALALLRQLDTACGNAEDLADAATEHFAQHPDAAIITSMPGLAALTGARILAEIGDDRARFADARGLKAYAGSAPVTRASGKTTAVMHRRVKNQRLASVGYVWAFAALTASPGARAHYDRRKAAGDRHVAAQRNLFNRLLGCLHHCLHTRQTYDEATAFPTSSSTPAERAA

SEQ ID NO: 153147 - protein, 349 aa, unidentified
MTKVTIGVDLGDQYSQLYVVDAAGTCVETGRVRTTRAGLERWFAGQAPARVVLEAGTHSPWASRALQALGHEVLVANPRKLRGLYENDSKDDRVDAEYLARVGRLDPALLKPITHRGAAAQADLAVLHARDALVRTRTQLISHTRGVVKALGGRLPRCSAEAFARRASGDVPAELQPALAPVLAQVQQVTAAIRAFDRELERRCAEQYPATARLRQVSGVGPVTALAYVLVLEDPRRFARSRAVGAYLGLRPRRSQSGERDPQLGITKGGNPFRRRLLVQGAQYILGPRGPDCDLRRHGERIAARGGKNAKKRAVIAVARKLAVLLHRLWISGAVYEPLRHSTALAQAS

SEQ ID NO: 153148 - protein, 281 aa, unidentified
MEHYVGLDVSLKLTAICIVDRIGKIVREGVVTSDPETIVAFIKSHAPHVARVGLETGATSTWLWTELNKMGLPVICIDARHAKAVLKIQINKSDRNDAVGIARIMQCGWYKEVHVKDLDSHATKALLVSRALLVKIKRDLENQIRGLLKNLGLVIGRAKMNVFAARAAELAEARPELAAAVEPLLKAREAVERQIADLDRKVLRLARNDAQVRRFMTAPGVGPITALCFLATVDDPTRFKRSRSVGAYVGLTTRRYASGEIDWTGRISKCGDAAKLPLRGS

SEQ ID NO: 153149 - protein, 341 aa, unidentified
MQIKILGIDLGKNLCSLAGLDGSGQVVVRRRVRRENLLKVVSHLRPSMVAMEACGGAHHLGRLLRDAGFEVRLMSPEYVRPYVKAQKNDDRDAEAIAEAATRPTMRFVELKSAEQLDMQVLHRARDRLVAERTALINQLRAVLMERGIVIPQGWRKLNRALAAILEGDEPALSRRVRMLINDMRSEWGELDRRIHAFDNEFAACVRADEGALQLTTIPGIGALNATALVAAIGKGQSFARGRDLAAWLGLVPRQQTTGGKPRLKGITKRGNVYLRKLLIHGARAAMTSLSATNTALGKWLRGLRARAHVNIVVVALANKLARIVWAILRTGRGFEAKEATP

SEQ ID NO: 153150 - protein, 356 aa, unidentified
MVYLGIDLHRKRSHVVALDQAGQVLLSRRIGSRPDEFRRVFGELEPQPIEVAFEATFGWGWLADVLADAGIPAHMAHPLATKAISSARVKNDSVDAKTLAHLLRTNLLPEAWMAPAEVREARRLVRMRAALMRISSRIRCQVHALLGEHGVVPPATDIFGKAGRVFLQAVRLPEISQQRLEACLRLLDTVAVEVAQADREIQERFRSDPRMGRLLPIPGIGPTIAATVLTEIGTHSRFDSPDRLCSWAGLTPREHSSAEQTRRGHISKQGSRWLRWVMVEAAIRGLRDPRLRDFYSGIARRRGPKVARVAVARRLLTIVYYALRDEGGCRAYPASAASTRVKARSFAVMASANGRP

SEQ ID NO: 153151 - protein, 392 aa, unidentified
MVISVGIDVSKDKHDCFIVSSEGEVLADVFTIPNNMDGFHRLLQRIQDCTNSQDKIKVGLEATGHYSYNLLGFLLDNGLTTYVLNPLRTNLYRKSLSLRKTKTDQVDARTIASMLLSDAGLKPYTSTAYHNEELKSLTRYRFDKVKERAKLKSSISRLVCILFPELEKLVPTLHMTSVYSLLEEFPGAKQVAAAHLTRLKTLLETASKGHYKRDMALEIRDAARNSIGSRMPAKSLELQHTIRLTRELDREIDEIEEQIQSIMGELHSPITTIPGLGFRMAAMILAEVGDFTRFDSPDKLLAYAGMSPSTYQSGQLKNCYPHMEKRGSRYLRYALYNATKYVCYWDPAFADYLAKKRAEGKHYNIAISHAAKKLVRLIFAMEKSMQPYCSAS

SEQ ID NO: 153152 - protein, 350 aa, unidentified
METTTVAIDLAKDVFQVAMANRAGRILDRQRLTRRQFERFLETLDSGVDVVMESCGTSHYWGRRLQSRGLRVRLLPVQYVRPYVRRNQTDRTDTDALVEAARCEDIRPVPVKTVEQQTRQALHRVRTQWQTTRVARINAMRGLLAEHGYAIPVGARTGCRRVGAILADPDTTVPAVLRQTLALVVEEVRVLEAQIVGIDRQLAALAAAHPIATRLPTIPGVGLLGATALVGAVSHIDRFRRGRECASWLGLTPRESSSGGTRRLGRISTRGDGHLRCLLVHGARAVLRSANYHTERSPDRLTRLHQWALSVAAHRGFHKAVVAVANKLARIVWAVWKYEVAFHPQPAAAA

SEQ ID NO: 153153 - protein, 348 aa, unidentified
MKNKSFVGIDISKNVIDVSIFREDTNIKMFPHEVFNNTRKGFGDMCSWLKKSRVVLSQALFGMEFTGCYSLDLEKFLTSKNYSFCMLSTRIVKHHPMGTIDKRDKNDSAKIADFLYRYDGTECAKPYKLPSKAMQQLKQLVNERKFLVEQRTNFMNRMQMFETKEDSAMYESYIKKLNHDIEKIDQEECELMSKEEDVFDTFQNLLTIPGIGFVNATNIIAITRNFTAFDTARQYARYVGVAPCSHTSGTSVKWRARPSAHCNGQVKADLSMAALRAVEYDVEMQMFYNRKLGGRKDSDTKCKALNAVKFKLIRRMFAIGKQKRKWEVLNTSDDRKNLHIEKSKASEL

SEQ ID NO: 153154 - protein, 337 aa, unidentified
MEYFAGLDVSMAETHVCVVTRNGAVIHQAKVPSTPADIAAELAQVPTCRRVLFETGRMAPMLYHGLSQLGLPVVCVESRQAYQALKSLATHKTDRNDARGLAHLARTGFFKPVHVKSLSAHAVRSLIIARKKLVGQRVTLENQIRGLAVVFGVRLPRALSPAFIKQALRASEGIPGLSAAMQGLVAARAAVLAAILAIDGDIRRMVRASDACRRLMSIPGVGQLTALAFTAAVDDPKRFRRSRDIGAYLGLVPRRYQSGEIDYTGGISKCGDRRLRTLLYEAANVMLTRYKGPLKLKGWALAIAKRSTMRKAKIALARRLAIIMHAMLRHGTEFNPA

SEQ ID NO: 153155 - protein, 446 aa, unidentified
MDVVFLRCAGLDVHKKSITACRIVPDPTGQEAEGIAELRTFGTMTLEWLALADWRTEASMTHVAMESTGEYWTPVYNLLEGAFTVFLVNAAHVKNVPGRKTDKADARWLAKLMRFGILQASFIPPKGQRDVRDLTRYRTKLVQERVREVNRVQGVLERANIKLASVVSDIMGVSGRAMLEALIAGKADPATMADLAKRRMRSKLPLLEQALTGVVRDHHRQLLAMQLAHIDFLDEQIDALNNTIETALRALSADEPLSPQPPPRAAASSALPLTVSTPLTCTRAVELLDTIPGVDQRGAEVIVTEIGIDMARFETAPRLAAWAGVAPGNDESAGKQRSGKTRKGNRPLRAILTQLAHAAVRTKGTYFSALYQRLAARRGKQRAIIAVAHSMMRSVFHMLSRNEAYRELGANYFDERRRHYTVDRLARRIEHLGYRVSLEPVAAPAV

SEQ ID NO: 153156 - protein, 351 aa, unidentified
MIIIGVDYHPSSQQIAFMDQETGECGERELNHSDGEAERFYRELKERGVGVRVGMEATGHARWFERLLAELGFELWIGDPAEIKTKRVRKQKTDREDARLMLRLLLENRFPRIWVPSPENRDLRQLLWHRHRLVQMRTRIMNQLQAVAMNEGYRWKKKLFGQQGRALLEKLSLAPWASRRRKELLELLDQLNPKIAELTAAVEREANKRPEVVRLMTHPGVGPITGVAYVLVIGTPDRFPCGKKIGSYTGLIPCEDSSAGRQRLGHISKQGNTLLRFLLVEAAQAAARCDADWRRRYMHLMMRREKGIAKVAMARKLAVRLYWMWRNNWQYSQLVEFGSNAGKLGIGHGVK

SEQ ID NO: 153157 - protein, 368 aa, unidentified
MGRKSSKVYVGMDVHKESIDIAVAEEGGDVRHLGQITGDTNSLQRAVRKLESHGRQLVFVYEAGPCGFGIYRDLTARGHACWVVAPSNVPRRVRDRIKTDRRDSLKLASLARAGELAPIYVPDVDDEAMRDLVRAREDAVVMQRQARQRLSALLLRNDVRYAGKTTWTVAHRRWIADVKLTRSAQRLAFEEYVQAVEEASARVERLSQCVAQEVTHWRWRAVVNALQACRGIQLIHAVRIVAELGDLSRFRHPRQLMSYLGLIPSEDSSGERRRQGAITKAGNSSARRALVEAAWSYQYMAKVSGLIARRQTGVPRVALDIAWKAQVRLCTRFRRLAARRLNRNKIVVAIARELAGFVWAIAQRVKPV

SEQ ID NO: 153158 - protein, 353 aa, unidentified
MRTYYVGMDVHQATIVIVVLNGAGKTVEQTVLQTSAARVRSYLMRLCGKVYVTFEEGTQAQWLYDIVQPLVSKVIVCNPRHNKLLAVGNKSDQIDAQKLAELLRLGGLKGVDHADHGVRALKELVRNYDCLVSDTTRVMLRLKAMFRRQAIDCQGHEIYRQDRRERWLAQLAERGAKRRATYLYKELKALKELRHEAKLEMLREARRQAAYGLLMSVPRLGAVSVAQLLAIVGTPHRFRCKRQFWTYVGLAVVTRSSAEQEVVNGVMRRSRRPLATRGLNRNHNRVLKRVFKSAATSACHSGPFQAAYQARVERGMDPALARLTIARQMATLTLSIWKRGASFEAERMKQQAA

SEQ ID NO: 153159 - protein, 307 aa, unidentified
MAISVGIDVSKHTLDWCPGPSGKIQQTRNEPRGIASLVRRVAAIEPQRIIVESTGGYERKLVLKLAEANLPVIVVNPRRVRSFGEGMGMLAKTDAIDAKLLALYGEKAQPPIRPILQGRDRLLADLTARRRQLIATVVSEKNRRETAARPVQRSIATLLRVLDREIKRIDQQIDQSIEEDVDRSELSELLQTAPGIGPGVTRTLLIDLPELGHLGRREIAALVGVAPFAKDSGQYRGRRSIRGGRASVRTALYLAAMTASRFNPTMREVYQRLRDSGKPPKLAFIAVARKLLIALNAIARERRAWQP

SEQ ID NO: 153160 - protein, 344 aa, unidentified
MSEVTTIGLDIAKNVFHAHGADAAGRAVFSRKLTRGKLLDFFAAHPRCLVALEACGGAHHWARELQAMGHKVRLIPPAYVKPFVKRHKNDAVDAEAICEAAQRPSMRFVAVKSEEQQAAALVFRTRDLAVKQRTQIANAIRGHLAEYGWVAPKGAFHLTMLADLLEDGEIGETLPEAARPMFAMMVDMLGDLDKRIAVLDKEITRRAREDEIARRLMTIPGIGPITATAIAAIAPPAETFAKGRDFAAWLGLVPKQASTGGKQKLGAISRMGERTLRRLLIIGSSAVVLQASKRGAPAGSWLEGMLARKPRMLVTVALANKMARMVWALLVKQEDYRAPVAVAA

SEQ ID NO: 153161 - protein, 340 aa, unidentified
MNSTQVAVDLAKSVFEVAVSSRPGKVHESHRLSRGQFQRFFAVREPVEVLMEACGTAHHWGRTLEAMGHRVTLLPPGDVSRYRDGNKTDRADAKALLEAARNDAIDAVPVKSIDQQAIAALHRIRSGYQQTRTARINAVRGHLREFGIMIPMGASRVVAMARVALEDDGVPAYLRDVLEEVLDEIETLSEKAKAVHRRLERLSQQMPEAQALMTVPGIGVLTATALVSFVGDPRRFRSGRQLAAYLGLTPREFSSGTKRRLGRITKRGNSYVRMLLIHGARSALHAGKRSDEPDDLRAWALDIERRRGHNIAAVALANKLARVAWRVWRDQRPFERRLPA

SEQ ID NO: 153162 - protein, 344 aa, unidentified
MDQIIRIGMDTSKHIFQLHGVDAAGRPVLRRRLRRNEVLAFFAKLPPTVIGMEACGAAHYWARELRKLGHEVRLMAPQHVKAYVKRNKNDGRDAEGLCEAMSRPTMQFVPVKTEEQQAALMLAGVRQQLIARRTQLSNAIRGYAAEFGLTAAKGLDKIEPLLARIAQDETVPESARELFAFQGRDYARLQIELKAIEVKLRAWHRANADSRRLAQIPGVGPIGATALVMKTPDPRAFASGRHFAAWLGLTPKDHSSGGKTRLGKITRAGDEVLRRLLVEGATAVIQQVRRGRGHPSPWLLALLKRKPPKLAAVALANKIARIAWKLMATGESYDGARMPGAPAA

SEQ ID NO: 153163 - protein, 340 aa, unidentified
MSEIKTIGLDLAKHVFQVHGVDAAGECVLRKRLRRGQVISFFAELPRCLVGLEACATAHYWARELQAAGHEVRLMPAQYVKAYVKRNKTDAADAEAICEAVRRPTMRFVPIKTAEQQAAVLLHRGRERLVRQRTTLVNALRAHLAEFGVVAPAGLRNVSQLIAIVRDASDRRLPDLARPVLRVLATQVELAQAAVAKVEKELTAWHRSNPLSQRLATIPGIGPIIATAIAAMVVEPSGFASAREFAAWLGLVPRQHSTGGKARLGGISKRGNRYLRRLLINGASANLLRSKATNADPWVIGLRRRRPSLVVAVALANKTARIAWAVMHRQEDYRSLAAAA

SEQ ID NO: 153164 - protein, 340 aa, unidentified
MSEISTVGVDLGKNVIHVCGMDAAGAVVLRKRFSRRQFQRWAARCVRCRMGLESCAGAHYWARTLVGYGHDVKVIHPRYVKPYVKTNKNDTRDAEAIAEALSRPTMRFVAIKTVTQQESRMRHRVRQRVMRERTALSNQMRGFLLDFGLPVARGRAPLRRRLPAILADGDNGLGDRGRALLWELWHELQGLDDRLAVLDEQIAAECQADTAARRLRTVPGIGPLTATATVAAIGDGRDFDRARGFAAWLGLVPRHDGTGGQTRLLGISKRGDRYLRTLYIHGARAALRTAARHDAHWARWALALAERRGRNVAVVALANKLARMAWAVLTSGETYQPQPA

SEQ ID NO: 153165 - protein, 412 aa, unidentified
MKDLLEISCGLDIHKEKIVACILTGPLGKPTHSEIREFTTLIPDMLALRDWIISENCHHIAMESTGIYWIPIYEILEDAFSGDITLLVVNARHMKNVPGKKTDMRDSEWISTLLRAGLLNASFIPEKRIREFRDLNRYRKSIIRDITSQKNRVEKFLQSSGFRLSSFISDIFGASGRNIILHLMEHGQIDKISLDSYLKTKTRKRIDEILMSVNGTLSEHQKSFLKILMCHYDSMKEHLIEIETHLQEDMLPFALQIEQLNTIYGISTTASCAIIAEIGTDMKPFKTAEHICSWAGLCPGNNESAGKRKSTSITKGNPYIKSMLCEIAWVIAGKRNTYLSAWYWRIKQKKGARKAIVALARKLLVIIYTMLKQGTNFDESCFEVRRKNCEQKQLSRYIRELEKHGYTVEAQV

SEQ ID NO: 153166 - protein, 341 aa, unidentified
MDVYVGMDVHRKRSQVAIVDAAGVPQRNRNVANDPAKLVPILGALPPGTPVAFEAAYGWGWLVDLLEELELEPHLVHPSRCKAIASARLKNDKVDAATLAQLLRADLLPEAWIAPQATRDLRALLRHRASLVRLSTLCKNRIHAVLADRGIGEDQVLWTGPGRAWLADLALPPTPRAIIQDCCGLLDTLATPIARLEGEIATLAKPDPRVQALMVLPGVGKLTAMTLVAEIGDIARFPTARKLCAWAGLTPQVRNSDRKVRHGHITKQGSPWVRGILQEAAQTAKRHPMFAGAYAQLARRRGRNIATTAIARRLLARSFHILTQLEATSEKAGTGRARVSA

SEQ ID NO: 153167 - protein, 418 aa, unidentified
MERVRDTRAREERYIGLDVHKHYITVGGMNIQQEIVLRPRDVEMERFKIWAELNLQKTDDVVLEATTNTWDVYDTIVPLVRRVVVAHPAEVKQIANSRVKTDNQDVIRLIRLLIADIVPEVWVPPVEVRELRALISYRWRLVKMSTAIQNRMHSLLHRHNIQAPEGKIDTGENREWWEKLKLSKLETLRLKQEIKTLRLIREHIVEMEAELGRLSTGERWGDQAVYLMQIPGVGVIVTMTILSAIGDIERFENPKKLVGYAGLGAGVHDSGQTHREKGITKFGRKELRWALVEASWQAIRANPRWRAQYDALCKRKHPNQAIVAIARKLLVTIWHLLNGQEAYDCSSDEELAYKMLTWSWHIDQTALNGMTRQQFAKYGLLQLGRGEQLTRIVRSGRPRRIASTEEVLALKPALHLKQ

SEQ ID NO: 153168 - protein, 477 aa, unidentified
MGKQTGSATSKRKTARDAERRKRAKDKKDKAVLGLPVLHADTAGIDIGATEIYVAVPADRDEEPVRCFGGFTEDLRKIAEWLRQCGVQRIAMESTGVYWIPLWQVLADAGFEVCLVNARHFKNVPGKKTDVEDCQWLQFLHSVGLLRGSYRPDQAICGVRTLLRYRGELIQFAAQPIQHMQKALEQMNIKLSHVISDLTGVSGLAIVDAILAGERDLRKLAKLRDPRVRASEETIMKSLEGDYRPEHLITLQYSLDLYRYYQTQIAELDKKMETFMSELPDRVDMDKCPLPPWRKRSRQHKQHNAPAFDLRTHCYRILGVDLTAVDGLDEVTAHMVATEVGADFSAFPGAGDFCSWLRLCPNNKVSSSKILSRKTKKGKHRLAVALRNAAQTLHGSQSSLGDYYRRMKSKFGPTKATTAAAHKLARTIYAMVTKHQEFDPEVFAKQDQKQKRKTENRVRRQALELGYQLVPIQVASA

SEQ ID NO: 153169 - protein, 338 aa, unidentified
MAIVFVGVDLAKNVFAVHGVDEAGRAVLVRPKVAREKLLELIAALPPCSIGMEACSGAHHWAREFERLGHGVRLMAPKFVAPYRLSGKRGKNDAADAAAICEAVQRPNMRFVPVKSVEQQGRLMVHRARQGFVEQRTATLNRIRGLLAELGIVLPLKAATVRSQAAARLEELPGWANTVIGDLLSEVHRLDERIAQYDRHLVEMARQDERARRLMQLTGVGETTATALIAMIGGGHEFSSGRQLSAWLGLVPGQYSSGGKTRLGRITKAGDAYLRSLLIMGARAVLNAAKGKADGISRWAVQLEQRRGYWKAVVAIAAKNARMAWAVLQRGEAFVKPA

SEQ ID NO: 153170 - protein, 394 aa, unidentified
MKLVGIDVGKNSHHFCVMDKETGEFNVTPTSFSNNKEGFDFLINSLKPYSKKSILIGMEDTGHYHVALLKFLLSNGYTVALINPKTTDLTRKMEGGITKNDKLDTITICDVLDTPERKKQYRITKVDRFDLYEQRQLTRHHHNLKEELNVYCNRLQKSIDLVFPEFNTLFSSKYSIVYMNLLKTFGSAEAIASTDIRTIRKCFEIKGRGNRISLTPEKLKECAKNSIGISSEVETIQIRHLVSQITLIKEQIAEIDKKIEEFSITNNSPILSIPGISHFSGTSILAELGDIGNYSKPSQIIKFAGVAPYHYESSQYNAQHTGITKKGSKYLRKTLYQIILTVINNNPVFKKYYLLKISQGKGHHCAQGHCIRKLLRIIYHLLETGQSFDPALLR

SEQ ID NO: 153171 - protein, 343 aa, unidentified
MEHFAGLDVSVKATSVCIVDDTGRIVREVKIASEPDALLQELTSLADHFKRIGLEAGPLSQWLFSALAEAGLPVICVETRHMKAMLKAQINKTDRNDARGIAQMMRAGLYRPVHVKTLRSQKLRMLLTHRKLLQSNAVAIENDLRATLRNFGLKVGVAGKVKFEARIKELVENLPDLAVLVEPLLIVRRTLREQIGVLQRRLLAIVRDDDVCRRLMTVPGVGPVVALTYRVTVDVPARFRKSKAVGAVFGLTPSKHQSGESSRTGGISRCGDEMMRVMLYEAAQVMLVRSVKWSWLKAWAMQLARRRGMKKAIVALARRLAVILHRIWVDGTEFRWTQETAAA

SEQ ID NO: 153172 - protein, 539 aa, unidentified
MCLASSPNRPYSRSEVIHRAGDESLFSAFERERPRIVNNFAASASSGYELSSISVKMNSTRLSNLPVVLGSGNEYSDEDESALETITSGYKEFASGSSPREQPYPHLSNMNESVCEQPLSPKVAAFVGIDWADQKHDVVLRSAADQAKPEHQVIKSELNALAEWIAQMHERFAAKGKVLVCLEQSRGALIYQLMAYELFELYPINPSQLANYRKTFFSSGAKDDQPDADLLSELVMCHRDRLKAWRPDDQLTRELASLNEGRRHAVDRRTELANEIKSQLKVYFPVALQILDHDITTALAADLLVQWPTLAELQKVSPAKLRKFFYGHNSRQEKKILERLALIKEAKPLTTDLAIIRPNALSVKLLAQQLKSLLPFIAEYERRIAELFGSHPDRFLFDDLPGAGPALAPRLLTAFGTDRDRFEVVGDLLELSGIAPVRIASGKKTGKHASVHCRRACPKFLRQSFHEFGACSIRYCPWAQACYQAQRSRGKGHHAAVRAVTFKWIRILFACWKQRTPYDPQRYFQALQTRGSDYAQTTA

SEQ ID NO: 153173 - protein, 374 aa, unidentified
MSVSACYEGQQFVGIDLHRRRTVLVRMTAAGERLGAMVRFPSTPEALRREMVAALSPAGPAPQVVVEATYGWYWAVETLQQLGARVHLAHPLGIKGFTNRRVKNDERDAADLADLLRMGRLPEAHTAPEPVRALRELVRHRAKLARWRSAVKNSIHAVLAKRGVSVPMSDLFGAEGTALLDALCRPARGPAGGSRLEPEYAARVGSLRGLLATLEGEIAEFDRRIAAALAGHPGYRTLQQISGIGPVFAAVFIAEIGDVSRFATADKLTCWAGLTPRHRESDTTVHRGRVTKQGSKLVRWAAVEAVQRSSEPAVAAIRTRIAERRGRPGQRTGRNIAKVAAARVLLKLVYYGLRDGQIRTLDRGPASPGVMNAA

SEQ ID NO: 153174 - protein, 398 aa, unidentified
MTESSDCESVQVFIGVDVGKDTHHAVAINRSGKRLFDKALPNDENKLRSLISDLKQHGQILLVVDQPAIIGALPVPVARSEGVLVGYLPGLAMRRIADLHAGEAKTDARDAAIIAEAARTLPHALRTLKLADEQIAELSMLCGFDDDLAAQTTQASNRIRGLLTQIHPALERVLGPRLEHPAVLDLLQRYPSPEKLASLGEKKLAAQLCKLAPRLGKRLAADIAQALAEQTVVVPGTNAAAVVLPRLALQLITLRKQRDEVALEVEQRVLAHPLYPVLTSMPGVGVRTAARLLTEVACRAFASAAHLAAYAGLAPVTRRSGSSIRGEHPSRRGNKALKRALFLSAFAALRDPLSRAYYTRKMSQGKRHNQALIALARRRCDVLFAMMRDGTFYTPQGS

SEQ ID NO: 153175 - protein, 367 aa, unidentified
MKKVSSAATKQSRNFSQQKLTIGLDLGDRSSCYCVLDETGQMVKEQKVSTTPQALQATFAAIPHSRIALETGMHSPWVSRLLSELGHEVIVAHARNVRLIGESRRKDDRLDAQTLARLARIDPQLLCPVKHRSARAQADLTVIRARAGLVRARTALVNTARGLAKSYGERLRGCNVRNMNPEKAEGLSPELQAALEPLLAGIESVSERIREYNEGIENLAQQSYPQVALLKQIKGVGTLIALTFLLTLEDPHRFPKSRDVGCYLGLQPGRRNSGQREPQMHISKEGDPYLRTLLVQGAQHILGPFGVDCDLRRWGLKLAERGGKSGKKRAIIATARKLAVLLHHLWVSGEVYEPLHNSNQRAMPAAA

SEQ ID NO: 153176 - protein, 345 aa, unidentified
MKHFAGLDVSLEETAICVVDETGTMVREARVSSEPEALVAFFRGLGLGVERIGLEACSLSAWLHESLVAASLPAVCIETRRAKAAMGAMPNKTDRNDARGLAQIIRTGWYRAVHVKSPTCRSWRALLTARRLVLNKMRDLENGLRALLREAGLKLGTPARKEFAARLRELTAADPVLSIMTEPLLTIIAAMTRELAQLTKRVLDIVRDEPVCRRLMGVPGVGPLTALTFRATIDRPERFRRSRDVGAHLGLTPKRYQSGETDVQGGISRCGDELARTALYEAAHSLLIRSRKWSTLRAWGMQVAKRRGMARARIAVARKLAAILHRMWADGTEFRWGEADAAVAT

SEQ ID NO: 153177 - protein, 571 aa, unidentified
MKILGVGIDTARYGHMASFIGEDREPLAAPLLVKEGREGYEKLEHRLHDLCEKFPQAQLVVRIDAAGQYAANLQSFLRRLPLPIAVSVGEPKRTRDYHRSLFPKNKSDKSESWALARYAVAERPRETPATDPAFAALQEVAGRLQAQSRETTRHINQLHNLLSRTFPELEHQVSDLSAAYCLKLLIQYPTAQRIAAARPSSLQKIPHLNESKTQKIQAAARESVGCREGKVIEELVKEATLKVRESLKRKQFLQNLLIEAFRELPEMGQQFVETVGGIGEATAAVLVSKIVSIDRFETPKQLVSYFGAFPEAYSSGVHQDGTPKSPRMVMSKKGNDLVRAYLWNAACAAIRCNPDVQALYARKRAEGKRGDTALGHCMRKLLHQVFHVWKKQQPFRPHTVTATVAQQSKMPTTKKPAKKMAVGPKVVNATSRKEVTTAKNSLTKGRASENRSRLDFARLRSQASLRQMLIRLNLFDSLRGDEHQLRGPCPLHRSKSPHSKSFSVNLDKNIYQCFAPECQSKGNALDFWAAYQRLPLREAALHLAQNFHLTQTEKRNPYQTKKTGDITPDPH

SEQ ID NO: 153178 - protein, 323 aa, unidentified
MNKDIKYFGIDISHLVFDVTDSDGNYYQFKNRVSGFKKFVKLLNENSHCVMEATGYYHYQLAYFLLESGIKLSVENPLAVKRFIQMKLSKIKTDKSDSKLICEYAKQVELKLWQGNSKHQTECLQMTRLLSMYTKQSTMIKNKLHGEEVLGYPSKAVVQSLKRSLKQAKKEMKTLEDKLLILVKQEHQDMLTRLKTIPGIGAKTSLMLVVLTDGFERFTSGSELCSYAGLTPVIRKSGSSVKGRPRISKIGNQKLRNLLFMCSFNACKYNKACREIYERIVAKGKSKKLALIAVCNKLLKQAFAIAKSGLIYEDTYRGNLVKN

SEQ ID NO: 153179 - protein, 403 aa, unidentified
MRAFAGVDWAAEKADVCVQAPDGGVLAERAFAMSEAGIVELAEALISHGVSRVAIERPDGVLVERLLAAGLTVLAIHPNQVKAARPRFTAAGGKSDRFDAFVLCELARTDSHRFRVLAVDGDDTKALRALTRAREELVDARTALCNQLREQLLAFWPGATIVFADLNSPIALAFLERYPSPPDAHGLGPKRLQAFLDRHAYCGRQRPEVMLTRLRAAPTGHAGELEIDARRATVLGLIAALRPIVAQIRQLTSQIHGAVRAHPDGQIFLPLFRDHKTAICPATLIAELGDQRARYPTAAAMIADAGHSPVAVESGKRKVACFRRACDKRLRNAVATLADSTRHWHPWAHQIYTHARARGHNHQRAIRTLGAAWLRVLWRCWHNHTPYNPTRHGALTRQLARAG

SEQ ID NO: 153180 - protein, 347 aa, unidentified
MAVTIVETRAITGGVDTHADMHVAAALDPVGGLLGVEEFQVTPAGYARLLEWLGGFGTVCLVGIEGTGSYGAGLSRHITNAGVRVAGACRSDRQDRRRAGKSDPLDAVSAARAAQSGRARGAPKGRDGAVEAIRALMVAKRSARSERIQTINQARSLVHTGPDDLRARFTGHTTVALVAGLASLRPRPGSTIGYATRLALRELGRRAEFPGAQMERPGELIVPLVTAHAPRLLALYGVGPDTAALLLIAAGDHPERLRSEATWAHLCAAAPIPASSGKVTRHRLNPGGDRQANHALWRIVVTRMSSHPPTRVYVERRSKEGLSKKEIIRCLKRYVAREVYPCLRIAD

SEQ ID NO: 153181 - protein, 330 aa, unidentified
MENVLHFLGADLSKKSIDLVCHQFKSHVQIENGGSGFKQMLKWMHQLKIDSSKMMLVMEHTGLYSFCFEEFLHKQGIAFCKVNALEIKRSVGLIRGKSDKLDAARIAAYGFAKRDRLKPDVGASKALQRLKLLNASRELLVRHRTGLKCVIKELNNIGVPEKDLALHSQIQVIKSLDKQIEKLEIEIKRVIYQEESLAKNYDLLNSIKGVGPVVATTTLIKTQNFSRFENARKFACYCGTAPFEHTSGTSIRGKTRVSHLADKKMKSLLDLAARSAITSDKELKAFYERRLELGKGKTSTINIVRNKIIYRMFAVIKRQTPFVNDFLQVA

SEQ ID NO: 153182 - protein, 404 aa, unidentified
MLADVSGERFVALDVHKHYVVVGAVNTTQQVVLSPRRVDLDDLPSWSQQHLCSTDAVVLEATTNAWHLCDQLHPLVSSVTVAHPNLVKLITTARVKTDARDTLHLARLLAAGLIPAVWIPPQNVRELRGLLAHRARLIRQRTQAKNRLRSTLHRYNIVPPSAGLFAPAQQSWWENLSLSAVEKLRIRQDLSLIESLEPLIGEVETELTRLSGTEPWASQVVFLLQVPGIGVINALILLAAIGDITRFPSAKQLVGYAGLGASVHASGQIYQTGHITKQGRRDMRAALVEAAWMAVEHHPHWKDQFERLAMRIGKKKAIVAIARKLLVIIWHVLSKQEADRQADQAMVTRAIMEWARNKSTATRQGLSRVEFVRRELDRLGIGAHMESFVFNGRTYHLPASTRSG

SEQ ID NO: 153183 - protein, 397 aa, unidentified
MIAVGIDVSKSKSTVAILNGDGSIRAKPFDVHHVADELQALVDYIKRTSEPPTILMEPTSHYHYPLLKAFTEAELPVCLINPYQMKKYGDTELRKAKTDKRDSLRIAQYALEKSYSLIPYTPQDQKYEDLRFLSRQYSQRISTLTVAKVQLLSLLDETMPGITTILPLKSRDPDNCVLLRFIKRFKSFDVIRKMGKTRFLDSYQVLVKKTKDRFAGSKGLAIYELVLNSVTTRGENPLSAMTQDQCVDLVSTSQKAADEINLQMRIIAETMPEYKVLRSMAGVGNRLGPIILGEIGDIRRFHSGKALNAYAGNDAPPYQSGQFESRNRHISKRGNPALRKACFEVMQALKLTKPQDDPVYLFLLKKEQEGKPYNVAKMAAVNKFLRIYYAHAMELYK

SEQ ID NO: 153184 - protein, 366 aa, unidentified
MKKISTVQVLGNEISQEQKLTIGVDLGDRWSFYCVLDEAGKIILEQKLATTPEATKQTFGKIPRSLIALETGTHSPWLSRLLTELGHEVIVAHAQKVELITKSNRKDDRHDARTLARLARIDPELLGPVRQRSAKAQIHLTVIRARAELVSARTALVNAARGLVKSYGERLPKCGTYQVNEKLAEGVSAELRDVLAPLLREVESLNERIKEYDERMEKIAKEVYPEVFLLKQVKGVGTQIALTYVLTIEDPYRFQKSREVGCFLGLRPGRRNSGQSEPQKKISKEGDRYLRTMMVQGAHYILGPFGADSDLRRWGLKLAERGGKNAKRRAVVAVARKLAVLLHRLWVGGEAYEPLRNSQKAMRAVA

SEQ ID NO: 153185 - protein, 365 aa, unidentified
MGMLAERVDHVIGVDTHRDAHAAAIVVARTGEVLIGRTQPADAFGYKRLLRFARMHATGRRVWAIESSGSYGSGLASFLLAHGEWVVEVDRPSRPARRNGAKSDELDAVRAAHEALGREHLAQPRRRGDREAIRVLLVTRRGAMRARTKAINHLKALIVTAREELRHQLRNIPTDELVNRCARLRTLPSHSDEHRATVMALRHTARRVLMLEAEANDLETELERLVKRAVPMLLDEIGVGPISAAQLYCSWSHPGRLRNDGAFAMLGGSAPIPASSGQTVRYRLNRGGDRQLNCALHTIVLTRLKHDPATRAYAARRAAEGKTPREIKRCLKRYVARHLFRILEASGPNTMTERPPRTRTIGICS

SEQ ID NO: 153186 - protein, 422 aa, unidentified
MKNTAARKRKQVPEGYLVVGVDPHKKKHAAVAITQDLTIRARFKFDNSRDGLDLLLQRAKSEMDKSDCRGVMLAIETGGHYWRNIAYYLDDKGVPYRFINQYTLKRRREGKDINKRKNDYRDAEVAAQLLCTGEFIESVIPQGVYAELRTAHNAYRRLVKERTRITNLLKGLLDSLFPEFVGVFKDPCGLTSLSVLSTCSIPGVITGMTDDEFIAVIEKEHHGKRLMRRKLRELHAIAKTSIGIEAGAHSLSVEVFFLVEKLKLIRGHIETIDQTLVRLVNKAEEGKYLLSIRGINYISVAGLLAELGCFKSYPSAKQMIKMAGSNPTESESAGKRKSRTPMSKHGRPVLRYCAWTAVIPMLRLNPDFRNWAKERRERPAHANPLNGREVVGAALNRLLRLCFAMVKNKTYYQSPYLVEAVS

SEQ ID NO: 153187 - protein, 380 aa, unidentified
MSSPSTTRSIIYLGLDVHKDSITIAVLPEHAKNAARVDRLSNDLPKLKRWLDRAARDGELRACYEASGAGYVLHRALREWGYACDVIAPSLIPQRPGVQRKHDKRDACDLARLYRAGELTSVRIPSEAEERVRDVVRCRETFQREILKSRHYILKFLARRGFVYREGCNWRTGHLRWLEHLTSETSPLAPADRLVFREYHALLAYKLQRRDELDRVIEQLALEPALAAAVGRLQCFRGISLHTAMVLATEIVDWRRFARPGQLAAYLGLVAREYSSGDRERRGSITKAGNSHCRHVLVQAAWTYHYRPHLSVEIKRRQQGQPAAVVAHAWKAQQRLYQRYNHLAYRKQPQIAVVAVARELVGFLWAIMQDVQTSEVAAAA

SEQ ID NO: 153188 - protein, 452 aa, unidentified
MEVVHPRCAGLDVSKRDVKVCVRIQGSGSRPTQATVTTWGSTTRQILALRDMLVAEGVGMVVIESTGTYWKPFYYLLEDHLALTLVNAREAKTVPGRKTDVADAEWLADLGAHGLVRASLVPPPPIRELRDLTRTRATIARDRAREVQRLEKLLEDAQIKLSSVVTDLCGVASRRILTAMMSGVSDPAALVLLRGGLKVSAADLAEALTGRFTEHHAFMTQLLLNRIDQHNAAINHLEQRIEQKINSVHAPRDLLTSIPGVSRTVADIIIAETGADMTAFPSAAHLCSWAGVSPGQHESAGRRKTAPTRPGNCHLKAALGTAAMSTTRQRNTYLCAKYRRIAARRGKLRAVVAIQRAILTAVWHMLSTGTYYQDPGPDYYSRHDPSKRAARAMRALRALGYQVTVHPVAVALSRPAHQFRINEKVRGSNLFSSTHVWQSRYFVPLLVMLTGC

SEQ ID NO: 153189 - protein, 356 aa, unidentified
MSIVAHSRPFVIGVDAHARNHALAILASPNGALLDEQQFPATAAGLERAIAWVARRTGADLDTLWVIEGVGTYGAQIARAAADAGYSVAEAARMNARANRGVGKSDPLDARRIAQAVLPLEEGQLRRPRGDDGVRAALRVLIASRDHISTERTAAINALIALLRVVDLGVDARSTLNGGQIATIAAWRRRTEELATGIARAEAVRLAKRIRAANDELSAITHQMTALIKESPAAGLLDQPGIGPVTAAIAFAAWSHPGRVRSEAAFASLAGVNPIPASSGNTVRHRINRGGDRRLNRALHMAIVTRMRMDPDTRAYIEKRTAEGRTLREIRRSLKRYLARQIYRHLNAATAATSAA

SEQ ID NO: 153190 - protein, 418 aa, unidentified
MKSMEITAVGIDVSKSKSTVAIRRPGGVIVARPFDISHSNHDLEKLVSILKTTGGDIRVVMEHTSNYWKPIALTLKEAGFYVSVVNAMLIHDFSDNSIRKLKTDRADSLKIANYALTFWNELPPFNDEDETRLVLREQSRMYERLASTATSLRNGLIALADQTFPSIDQAFGHAIKNADGHEKWVDFFSIYWHKDCVLRLSIEKFTESYRKWCLRRNYKFRTNTAHKLYALAQDAVPTLPKNNGTKALVLQACKSLNAVCEAKQSTQEEMNRLASLLPEYEVVMQMEGTGPITGPALMAEIGDVRRFKNKKALVAFAGIDAPPFQSGNFESKSRHVSKRGSPHLRRAVFLVANIILTLSHKDNSVFCFMDKKRAEGKHYYVYTIAGSAKFLRIYYARVTEYLRTQEIPVAASCLNGNS

SEQ ID NO: 153191 - protein, 376 aa, unidentified
MSKDTLYVGLDTDKKSIEVALAEALPGGEVRAWGKLANDARSVLRLVKRLQAGGRQLEMCYEAGPCGYGLDRLLNDQPGVRCTVVAPSLTPRRPGDRVKTNRRDALMLARLLRAGELTAVWVPDPAHEAMRDLVRARGAATGDLVRCRQRIGGFLLRQGIGYVGKPWTRKHRAWLGQLVATLPLAAHRLMLGEALQALDEATARRDRLTDHIAELVPGWSLAWLVDALQALRGFALINAATLAVEIGDPRRFATPRQLMAYLGLVPSESSTGDKVRRGGLTKAGNGRTRKALIEAAWNYSRPARAPSDNRQHAPAVVAIATKARHRLSQRYRRLIARGKRPVIAVAAIARELSGFAWAIAQVAGPTATAPQPPAKR

SEQ ID NO: 153192 - protein, 300 aa, unidentified
MNDMMIGVDLAKNVFQIHGALRTGEVQFRKKLTRQQFTAFMARQAPCLIIFEACGGAHYWAREMEAPGHEVKLIAPQYVRPFVKRQKNDAADAEAIVIAARQAEMRFVEPKTVEQQSRAAVFRGRERLVHQRTADVNALRALLYEHGYVFPVGMRYLDRMTALVDDDTSDLPALIREECQDLLAQIAEKTARITERTAKLKALASQSDRARRLQTMPGVGPLTAIAVPAFGPDMAHFKTGRNFAAWLGLVPRQHSSGGKERLGRMTKAGQADIRRLLIIGAMSRLGWLGRHTIAQGNCPA

SEQ ID NO: 153193 - protein, 345 aa, unidentified
MEIRTIGVDLGKTVFHLVAVDARGKVVARKKCSRTQLLRFTSNLPPCLIGMEACAGSHFLGRALREQGHDVRLMPAQYVKPYVKTNKNDYIDAEACAEAVTRPGMRFVPIKTDDQLDLQSLHRVRERWMARRTAVINQIRGMLLERGITIARGRRRIEESLPGILEDADNKLSGALRALLGELRLEMQYLHRQIGESNKQIERIAGELEDGQHLMTVPGIGPMIATATIAAIANGSAFKKGRGFAASIGVVPGERSTGGKQKLTGTSRRGNKYLRKLFVQGAHAVLQRRTKQDPVLRAWVERLAARKRPQLVAVALANKMARMAWAVLSKGEVYRPPLAAQAAAA

SEQ ID NO: 153194 - protein, 257 aa, unidentified
MKSYEKVVGIDVSKETLSISLYDGKSHTGYETRNTVKSFFNDFVKKEKGIDFSKVLFMLENTGVYHLRLATHLSKECGYIVSVANPLVIKRYSQMNLKRAKTDKADARLIAEYGYINGDDWLFSPRDIDYYKIDMKLKAVEDFHKQINMLSNQIEAIEYLPFKDNSTLNAYKKLIENFKKEIKKIEKELDILLREKYVEEYKLLSSIPGVGLKLTGVILGKLNGFANFDRGKDVTSFVGICPSIYQSGTSVNGRGKT

SEQ ID NO: 153195 - protein, 342 aa, unidentified
MSKYTLVGGDGHQLLDLLARLKSRAEQRIAAPVKVVAIHEVGLDGFWIHRLLEANGVESQVVDPASIAVPRRHRRAKTDAIDGETLLRTLMAWQRNEPRVCAMTVPPSPSEEDHRRISRERATLLQERVRHTNRIRGLLFGQGITNYNPLHKNRRENLEALRTGDGRSVPAHLKSQILREIDRLELVLRQIGEVETERDEMLQLAQPSSPAALLMRLKGIGAEFATVLYLEGLFRQFENRRQLAAYAGLAPSPWKSGSIDQEQGISKAGNPRLRTTMVELAWMWVRYQPGSALSCWFRQRVGSERGRIRRISIVALARKLLIVLSRYVSHGEIPAGAVMKAG

SEQ ID NO: 153196 - protein, 464 aa, unidentified
MAKKGKKNTPSPENMPILHPHAAGIDVGAEEHWVCVPADRDAQPVQKFSAFTCDLHRLADWLTACRMTTVVMESTGVYWIPLFQILEARGFEVALVNARHVKNVPGRPKTDRFDCRWLQKLHTYGLLAPSFRPPADICQLRSLLRHRDNLLRMTVKHIQHMQKSLDQMNLHLHHVISDVTGVTGMRILRAIVAGERDPQTLAQYRDYRIQSSEDTIAKALEGDYRAEHVFTLTQSLALYDFTQQHIAACDQEIERVLATFDSLVDPEEHPLPPPTTAHRRPQRNEPAFDLRTHLYRITGVDLTQVPGLQAPTMHIVLAEVGLNRHTWPTDKHCVSWLGLCPDHQSSGGTVLATRRRRVHNRASRALRMAAQSLRTSPSSLGAFFRRMRSTLGPAKATPATAHKLAKILYHMLKEKAPYRARSAEDYLHKDHERQLRQLRKQAKYLGVDVVPQTNHESPRYCSDD

SEQ ID NO: 153197 - protein, 482 aa, unidentified
MKPKPQEKTKKATDHPTQRHWREMNRKQRREMMRKIQSEDISLEVVHPDAAGIDIGNESHYVAVPPSRGSQPVRRFGCTTAELKAMADWLKQCGIRTVAMQSTGVYWIAVYDILEQASLEVYLVNARETKNLPGRKTDVQESQWLMKLHTYGLLRNSFRPSQEIRRMRTYWRQRDDLVQSAGRHIQRMQKALTQMNIQLANVLSDVSGVTGQAIIKAILAGERDPHKLAMLRNSRVKASEEQIARSLEGNWQEDLLFVLQQEQDGYEFCQKQMAECDRQLNHYLEQREDRSQGAPLPEEKRKGRLKKKSGNKPQFDLRTGLFRMSGTDLTRIDGIDVVTATTILSEAGWDMSKWETEDHFVSWLRLCPDNRISGNKVIGKGRLPTNNRVTIALKMAASTLRLSDTYLGAQFRRFRTRLGAPVAIKAMAAKLARLVFRMLRYGMTYVDKGAACYQAQHRHLQIKQLKWKAASLGYQLIQVPAA

SEQ ID NO: 153198 - protein, 411 aa, unidentified
MEVIVERQSALDVHKAQVTACVRVPGPDGQRVQLVEQFATTVPGLLILVDWLKAHEVTNVVMEATGDYWKPVWHILEGAFELMLVNARDVKQVPGRKTDVGDAAWLCQLAEAGLLRASFVPPKPIRDLRLLTRYRRTQIDERRREAQRLHKALEDTGIKLDCVATDILGKSGRAMLDALVGGTTDPEVLAELALGKLRKKIPALREALQGRFEALHALLIGAILSHLDFLDEQITSLSEAIEEQMRPFSKAVDLLCTMPGVAQRTAEVIIAEIGTDMTVFPTAGHLASWAGQCPGNDQSAGKRRSGRTRRGSKHLNAALKDAAMAAMRTNDSYLQALYRRKKPQAGHGRAIGAVKHSMICAIWHMLSTGEIYTDLGGDYFARRNPERQTKRLVAQLERLGHSVSLQEANAA

SEQ ID NO: 153199 - protein, 405 aa, unidentified
MKIWCGIDWAEHHHDIAVVDEAGTLLVKRRIGDDLDGFGQLIGVLTDLAGAQHLEVPVAMETANGLLAASLLEAGYSLFAINPLAVSRYRDRYSPSRAKSDAADAYVLANILRTDPAAHRPVPADSEQAKAIRVLARAQQDAVWERQQAQAKLRSLLREYYPAFLAAFPDLADRDARAALAIAPSPAAAARLRRPSLRAALARNGRQRNLDHQVERILTELRVEHMRQPARVEAAMSAQALAHLRSLDAAVANAAALEASTAAEFATHDDAAIITSMPGLGPVLAARVLAELGDDHSRFADAKSLKAFAGTAPVTRASGLKRSVTRRVVRNKRLGQAGHLWAFSLLTSSPGARAHYDRRRAAGDSHNAAARNLANRYFGVLHHCLQNRVPYDEAKANPTPRAVAA

SEQ ID NO: 153200 - protein, 318 aa, unidentified
MNTNTLQNINVGVDTGKSQLDIYIRPLDIYFTVPNTEKGISDAIKTIKKHKPQRVVIEATGRLEMPFILACDKAKLPYVIANPLRIKRFAGAIGQRAKNDRLDAALIAHYAERVQPELTKLKSENIRLMSDLVTRRNQLLTMQTMERNRLQILPKNISSTITPILTALKNQMEKVEAKIAKLIESCPEYQAKSTILQSMPGVGKVLAASLISNVPELGFITNKQASSLIGVAPITRESGRFKGKRLIQGGRTQVRTVMYMAMMSAIQCNPVFRATYERLLTAGKPKKVAIVASMRKMVVILNSMLRDGVMWDTDSLKN

SEQ ID NO: 153201 - protein, 388 aa, unidentified
MSQPNDLSRSLTPFVQGTTLVAVIELSLSSWLVAGAVPGVARQPLKKLEPDEAQLLRLLQRWRDEAARSGRTIERIVVAYEAGRDGFWLARWLRAHKIEAYVIHSTSVAVSREHRRAKTDRLDTAMLLRVFTGWLRGEPGHCVMVAVPTIDEEDAKRPHRERENLVGERTRIVNRMKAALARLGIRGFKPELRRAPKKLDGLRTPEGLPIPPNTLDEIRRDLARLAMVREQIDGIEQARLARLEQAPQTGPNAMVRLLASVVGVGVETADMLVQEVLSRNLRDRRAVARYAGLTGSPDESGSKRREKGLAKSGNARVRRGLIQLAWRFLLFQKDSALAQWYRARTGGANGARKTTMVVALARKLLVALWRMVTTGEVPDGVRLRPVAA

SEQ ID NO: 153202 - protein, 409 aa, unidentified
MESSVPVAGIDVSKRFSDMCVLSPQNDVLLRQKIYHDITSMRLAAKKLREIESRCGAKPVVVMESTSHYHLILFQFFTDAGFEVVVVNPIQSGALKNINVRIAMLYRLKVLRPSQIPTSTLRGLRLLTRQRSELMDDVTRFKNRLTAYLDQIFPGYCEVFSDVGGVSSRAVLRRWPVPDVLLAVSMDEIAEFIGKAGNKGRKFGAEKAAKLRDAAMSARVISVRSASNARLIENVLDIIDGLLAAIQRVEDEIKALLKQEPGFDEDVQLLCSIPGIGFNSAVVIVAEMGDISLFRKPKQLAAYFGLDPGERQSGTFKGRKNKLSKRGSPQVRAVLHMAAVSSVSRNRNGTYKNPVLADYYEKKCAEKPKKVARVAAMRKLSNIIYAVLRDRKPFELRTPQEHMRLLAAA

SEQ ID NO: 153203 - protein, 367 aa, unidentified
MSSIAHRGFVHLGMDVSKDAIAVAVLSPDRDTAEVDKIFHDTDSVRRLVKRLGKPKEIWACYEAGPTGYDLHRLLTSMGVRCDVVAPSLIPKGSGDRVKTDRRDARRLAGLHRAGELTAVAVPTPAQEGVRDLCRTRGDMVQDLTRARNRLSGFLLRHSVVWRGGSPWTERHRRWLATLTFEDPAIATTYAHYLATVKLRDTELESVEADLVPWCTQGPFGEQVPRLAAYRGVTRVGALCLAAEVFDWRRFPRARPFMSFTGLVPGENSTGLTQRRGSITRAGNAHLRGQLCEAAWAYQHSPNVGAGIRERQQGAPPETVARSWAAQIRLSRRFRQLAAHKNVRSVVAAAIARELAGFLWAEMVAEV

SEQ ID NO: 153204 - protein, 343 aa, unidentified
MNNTTVGIDLAKDVIQVCVYTNNKVHSNTEMTPPEFTAWLASHKPATIVFEACGTSNYWKQKATSLGHDARLISAKLVAAVRQNQKTDKNDALAIVQATLLPDVTFISGKSIEQQQLQSIMRLRELCVKQKTAMSNQLTALLLEFNIKTSSRNGGLRGAVESTLEDAENGLSFEFREAIDTAWQQYLSCVTSIKAYDDCLEKLMETHRDCKKLLKIEGVGTLNAINLYIALGCADLGVFEKGKDAAACIGLTPIQYSSGGKTKLGSIGKYVKNSILRSQLITGAMSAVHHATNRQAITKKDLWIKSMVERRGKKCTAVALANKTVRTAYAMLTQNTEYSAELI

SEQ ID NO: 153205 - protein, 392 aa, unidentified
MIFVGIDVAKDKHDCFITNSDGEVLYKVFTITNNLEGFHDLYQKISSVMVDAAKVKVGLEATGHYSYNLLGYLIDKGLTAYVINPLHTNLYRKSLSLRQTKTDKVDARTIASMLMSDVNLKSYSETSYHNQELKSLTRYRFDKVKERAKLKVSIARLINILFPELEKLVPTLHMASVYSLLSEFPGASHVASAHLTRLTNLLSEASKGHYDKDTAIHFREAAKHSIGSVMPAKSLELKHTIKLIQELTTEIDEIETAVKRIMDEEIRSPILTIPGISYRMGAMIIAEIGDFHRFDSADKILAYAGMSPSTYQSGQLDNGYSHMEKRGSRYLRYALYNATKYVCHWDEFFGAYLEKKRSEGKHYNVALSHAAKKPVRTIFAMEKSGQAYKATP

SEQ ID NO: 153206 - protein, 435 aa, unidentified
MEEVEDEPLFCDRVAGIDIGKATVMVTIRVPSEARAKGRQQETREFGTTRRELLALADWLRGWQVERAGMEATSDYWKPVLFTLEQEGFDCLLYQASQVKALPGRPKTDKLDSVWLARITEQGSLAGSFVPPEEIRRLRTHTRCRRKLVQMRTAQKERCEKLLEDAHLKLSAVISDIHGVSGRDMLRAIAAGERNPKVLAQMARGVMRSKIARLEQALDCSFFTGEHAFILTMMLDSIDSLTAQAGVLDARIADMCQPYQRQLEQLDEIPGFGTTTAQDLIAEIGTDMNVFPTAGHLASYARQAPRVKESAGKRKGKNATGRGNPYIGGALGEASISAGRTQTFLGEKYRRLTRRMPKRKAQVAIMRSQLVIAHALLSDPDARYQDLGPDYYERKADIRRRARNHARALERLGYKVTLEAIDPGTGELHLIATAG

SEQ ID NO: 153207 - protein, 343 aa, unidentified
MSIVGGFDVHRKQITFDYLEVETGRVWCGQIAPADRAHLAGWLERFAGRGDVEFAVEGCTGWRYVAEELTRAGVVAHLAEPADTAALRGPKRHAKTDRADARHLRRVLADRRLPECWIPPSHVLECRALLGLYRDLRVEHTAWVQRIHAVLFHQGVAPAGDLRTVQGRDTLRTVAAAHLSAAGQVQIATALDMLAVLEGHLDAVHRRLLHAARHLSGARVLTERLYGVGPVTALALTCWLAGAGRFSSARKAVRFTGLDVTVYSSAGKRSPGHLSRQGPAVLRWCVYEAGKAHARRTATDHGYYARVKDRLDGKRAALSEARKIVRHACHILTELGDDALTTT

SEQ ID NO: 153208 - protein, 370 aa, unidentified
MMNVTTFAGLDVHARSIKAVALDVVTGEVRSATFGYDACAVAEWIRSIDPGARCVYESGVTGFDLQKKLTALGVDCVVGAVSKMIKPSADRKRKNDRNDAEFLARMLSVGNVVEVWVPDDECEAARDLTRALDDAREDLKRCKQRLSKFLLRHGLVFSETNAKGQRKKNWTAAHWAWIRSISFPDKADDEVLAYYIDAARQAMEDKARLERLVEAEASKPRWKKRVDSVRCLKGIDVTSAADLVFEAGEFSRFKNARSFAAWIGLTPSEHSSGESVRQGGITKAGNKHLRRVLVESAWHYLGCSPHSKDLAKGQAPDPGARRHAAKGVRRLVGRRAAMLERGVHKNKANVATARELACWCWAIGRMVENG

SEQ ID NO: 153209 - protein, 414 aa, unidentified
MDVIVDRCAGLDVHKKTVVACVRSPGSGRQKRHSEVRTFGTFEHELVALREWLLGQGVTQVAMEATGVYWKPVWHVLDDGHTFEAVLLVNPAHIKNVPGRKTDVNDATWIGQLLECGLLRGSFVPPTEIRQLREMTRYRRQLTEERSREVQRLQKLLEDANVKLSSVASDILGVTGRMILDALCAGERDPDVLAAMAQRKLKAKTDYLRQCVPGRFGEFHTVMTRQLLSHIDYLDRAASDLDDQIDRLMIPFVEARDRFDTIPGIGKRNAEIIVAEIGIDMTQFPTPAHLASWAGLCPGNNESAGKHKSTATRSGNPWLTSALVEAAWSAVRTKDCYLAVRFRRIAKRRGDQRALIAIAHTILVICWHLLVDQTTYTELGTDYLAGKDQPDRRRKQLVAQLEQLGYHVDLTHAA

SEQ ID NO: 153210 - protein, 416 aa, unidentified
MNAVGIDVSSRKSTVAVLRPLGEVVCLPFDVTHDIAGLASLAEKLKAIDGETRVVMEHTGRYYEAVAKALHEAGFFVCAVNPLLIKEYGANSLRRVKTDKADAIKIARYALDNWADLRDFTPMDAIRYDLKTLNRQFQLASKQRTASANNLIALLEQSFPGIRKCFDSPVRSDGTQKWVDFAHSFWHVDCVRKQPFPAFCERYRKWCKRHAYLFKLSNAEEVYALAKRAVVLTPKSKVVKVLVQEAANQLISISRSVEVYRAEMDRLAAMLPEYPVVMAMYGVGKSYGPQLMAEIGDVRRFERKQALVAFAGIDPMPNQSGDKNVRSNKSSKRGSPYLRKTLFNVIRTYLQCAPQDEPVFQFLNRKRAEGKPFYVYMLAAANKFLRRYYAKLRDYFASLDTLQSVDPIPATLKASL

SEQ ID NO: 153211 - protein, 368 aa, unidentified
MKEETVTSNGSSQANVVNQGNRVLKLGLDTHYRQVTVAMQEDGGRIKAAGKMRHADFLNWVHKKLEESWEIYSCYEAGASGYWLHRQLKQMGVKNLVVVPKAMGQGGKKQKTDKRDSGELCDSLDRYLRGQDKALSIVAVPTEDQEQKRALIRYHRQIMADRGRCEARGKGLLCAQGIEVHGRWWQGEGWIEVQHNPRLKDWMKEQLIGWRNKILSTDEEQSGLRERIAALAPAILPKGVGAYSAALLEFEMRGFERFKNRRQVASMTGLCPGIHLSDGRGKEGSINRCGIGIVRWTLVEMVWRLMKWQPQYPPVRRLALGLVKSKRAKKRLAVQAARRLAIDLWRLSTGQTTPEKLGLIMHCTHPEQ

SEQ ID NO: 153212 - protein, 503 aa, unidentified
MKTKPSAKSAASIYRNQNDLLRALFERASDPHKVLCVALDYAKRKHVALCCDGNGDILRKPFAVDNTAEGVAFLCEQISATARRRKIPKCDIFLGGEDEPSYVANFTQALRARQYLVLRVNAAEAAENRENQIASTDLLDLLGIAKTLLSRRARATGAVVFAGAKGKKAPEDIYFQIRELTRCRRNLVRQQTAASNRVHAIVDQLFPCFLEHAKSGLTSFCEASMALMKERFSATEIARRRPRTLASFLARHGVRAPDEIAAKLIALASGALPPAPHRLAALQRTLSATVDLRECLARNANELRAQAAILLASTPYSMLTSIPGIGFTLAAGMAGELGNPIRLSPVDSLCAYAGIVPHTFQSGGPDQPACQGHTPARCNHILKDWTVQSAQKIHLYGPPELKDRITRWNANGQHGIFAGARRYLRLLRSLVLNQVPYLDPRSRSSTASDQDRADAALHAWLILIRKWRIIPDGIALIAKETNPLGFWRRVVMESRSVHLPLQP

SEQ ID NO: 153213 - protein, 317 aa, unidentified
MQELTLCIGVDVSKAELVIAMGPDQRPFSIANDEAGIKSWLGDIAPDALIAMESTGRYHGLLAHLASKAGFKVYVLNARDVFFYARALGTRAKTDGVDATVIARYLAEHHAQLHPWCPASSVQQQLQDLLTRRAQVVMHRAALRQVFTGVQAQGLKLAALQEGFDDLLKSMDEQVQRLIASDVQMAQGCERLRTITGIGPQTSALLATLLSRIDFANADALVAYSGLDPRPNDSGTKRGRRRLSKKGPPLLRRQMYLAGFAASHSKVLKPLYQSIRAKGFASTEAFLILGRKLLRVAFAVWKGNEVFDPTRLVPKQV

SEQ ID NO: 153214 - protein, 440 aa, unidentified
MAMRRREEEVFPNAAAVDVGASSHWVAVPPHSTDAPVREFGAMTDDLNALADWLLACQVEVVVLESTGVYWIPVYEVLESRSLKVWLVDARQVKYVPGRKSDVQDGQWLQKLMSYGLLRAAFRPTAEVCVIRAVARQREVLLTEQARWVQRMQKSLVQMNIQLTEVISDVMGLTGQAIIRDIVAGQRDPQVLAKHRHRRIKASEQEIVRALTGHWREEHLFVLGQALAMYDDIGRHLRECDARQQVLLAERSAKRVEIGKMPRTGSKARTEFDLRQQLANWAGVDLTRINGLGLDSVRKILSEIGVDLSHFANVKHFCSWLGLCPATKISGGKVLSAGTKRSANRVRQALKMAAMSLSHSDSALGAFYRRLCGRMDKPRANTATAHKLARMVYFMLTRGEAFVDQGQQHYEEQQRQRSITALKRRAAALGFQINPLGTAA

SEQ ID NO: 153215 - protein, 332 aa, unidentified
MFNCIGLDISKKLIAVHIPINKADIEIENNIESIKALYSKLKKLYKKEINDLVFIFEPTGSYSFALTKFCNEKSIKCFMVNPKQFSNYAKALGQRNKTDLIDAQVLSQAIHLAKDGEIKVPYINHVVEEMKELISYYKFISKKTTKTINHLEAITAKDGNTYMINDLKKSIKEYKKKEAEILSKVKNIISSDEKLLKGFNNIKSIYGIGEIGAIVLLHLFIKYPKANQRQIASLAGLDPIEKTSGTSVHKKSKISKAGSRVYRGSLFMGVLTAIRFDENFKNFFERLKSNGKHTTLAQIAVMRKMIIIAHSLYKNDRKYDKEFHKKCCGVQE

SEQ ID NO: 153216 - protein, 379 aa, unidentified
MTTAADLRDVCCAALELSKTGWVCAFTAPGEGRASLHRMKAGDTDRLMGLLNSGRAKAEREAGRPLQIVLCYEVGYDGFWLARLLIARGVRVIVFDPASFLMPRRGRRAKTDRLDAEGMTRTLRAWLGGNREAAREVQIPSIDQEDAKRIERERKSLVEERTSIVGRIKGLLALHGIWLTGKLIGQGLRARLDSMKTGDGRILGQFLRREIERLLTRYDMIRQQIAEVEAERKAALSSEANQFPSAEKVRVLSKLGGVGETTATVLVAEVYHRTFATRRHLASFLGLSPSPYSSGDVERDQGISKSGNKLARQTLVELAWFWLRYQPDSKLSLWWRERFGSKGMRARKVGIVALARKLAIALWRFVEAGVIPEGATLKV

SEQ ID NO: 153217 - protein, 440 aa, unidentified
MHYQKVLKMPESIPYLSVGFDVGADFTWMSIMLPNGILIGKPFKIIHSDPQSRELAISKIKEAQEMYSLESRCFLESTGIYHIPLLCFLRDKGFDCAVINPIITKNSTNMNVRKLHNDKFDSKKAAFVGFKPDLKVSLMPSDLALNCRNLCREYYDLMDNRSAYVNKLQGELRMAFPQYLGIFSKVTINTSLTLLETYTSPSAFLEADKQEIIDIIKSTARFGLTYAQNKYNAIIQAATDANQFGYIIESNIKRIRLYISFIRKYDEEINDILESLHKLVDSNEDTKFVKQVHLIETFKGAGFLSAATIMGEIGDFSAFSKPKQLFAYFGLDPAVKQSGKFEGTKVQMSKRGSSIARRVIHTLSLQSISISRNGKAKNPVLREYYLQKCDSKPKLVAMGAVSHKVCNMIFAILRDNKPFEIITPQEHIKQYNAAKCDIAA

SEQ ID NO: 153218 - protein, 396 aa, unidentified
MTVVVAIDVGKNEFAVSVTTGARRRLLKPRLGCPMTAPSVREVVGRISRLLPSGAVVKVGIEAAGHYYLPLLAAAVWPTGWELLELNPAHVTEQRRVLGKRTIKTDVIDLEAMTELLLAGRGLPVTATEVVLVELTAWSAHRTRRIEIRSGLKNQLLGQLDRSFPGLTLALPDVLGTKVGRLVAAEFADPTRLVALGSSRLIRFGATRGVQIRKPIADKLLAAARDALPMPDAAIARQVLAADLALASDLDRQVAQAEVELARLLPLSPFRTLTSVPGWAVVRAGNYAGALGDPARFGNPRQVYRSAGLNPIQYESAGRRHDTRISREGSVELRRALIDLGMGLWLNEPAATARAVELRARGKKGGVIACAMAHRANRIAFAMVRDQAVYDPSRWT

SEQ ID NO: 153219 - protein, 371 aa, unidentified
MGNRSMFVGMDVHKETIDISVAEGGRQGEVRHYGVIAPDLEALDKVVRALQAPSRVVHFVYEAGPCGFGIHRHLTTKHGLDCVVVSPSMVPKRSGDRIKTDRRDSGMLARLHRAGELRAIHIPDALDEAMRDLVRAREDAVVVATQAKYRLKAFLLRQGRRYPGRAGWTIPYRRWLAALSFSSAAQHIALQEYRDAIDETERRIERLTEQLRQLAPTWRWAPLVAALQALRGVSFITAIGVVAELGDLTRFGHPRELMAFLGLVPSEYSSGPSVRRGGITKAGNPHVRRLLAEAAWAYQGIPRIGRQQLNRQEGLPKVVRDIAWKAQLRLTGRFRRLVARGKAKPKVATAIARELTGFIWAIAREVNPTTA

SEQ ID NO: 153220 - protein, 324 aa, unidentified
MIDGILGIDVSKNTLDVSISSSTKVRTKSFANTSDGWHHLLDWLIAHKIRRVHACLESTGRYSLGIACALHEAGHVVSIINPAQIRDFVRTKLGRNKTDGVDASHIREYCELFKPQPWVPPSEAHRRLGELQTIRAGIIAGLTEWKNRKNSGIVDAEAQTLADATISHFTSQLGTVDQAIALTIENDSHLRSKRDLLLSINGVGETLAGVVLAELPGPDVLHSSAEVVAYAGLNPRQHQSGTSVDRATRISKIGNAVLRAALYMPALSAMRYNPAIVALVTRLKSRGRLKPKQIVVAAMRKLLVLCFGVLKTGKPFDPTVAMGC

SEQ ID NO: 153221 - protein, 324 aa, unidentified
MLPTLGLDISKDSFQVELSVNNKLRHRRFANRKEDFAELGVWLAKHQAGAVHACLEATGPYSEPVALYLHAQGHTVSIVNPAQIKAFGQSELLRNKDDRPDAGLIRRFCEKQQPPAWTPAPLPLRELQALTRHLENLLETRQQQINRLEVTTTKAVAKSLRKLVTHLDTEIQRTEQRINDHIDRHPELKQQCQLLASIPGIGRRTATRLLAEIEDISHYKSARQVAAYAGLTPRNSRSGTLRGQTRLSKTGNARVRKALFMPAIVAKQHNPVVRNFCQRLARHGKNKMQLVGAAMRKLLHIAFGVLKSGKVFDPNHEMLFNSGS

SEQ ID NO: 153222 - protein, 366 aa, unidentified
MATIPVPPTPVSPVDMVVIGVDTHSDFHVAAALSSIGRMLGSKSFATTPSGLAELLLWSKSHGSVSAFGIEGTGSYGAQLTRALQSHGQEVVEVDRPDRKARRLTGKDDHLDAEAAARAVLSGRASTIPKGRGGQVEAIRTLRVARRTAVSGRTAAMNQLKALLVSAPGDLREQLRGLTAGKLVQTSSRLRPGDDLAQPLNATKYAMREIAQRHEFLTAQLKRLDAALGELVAAAAPALIARFAIGTDTAGALLVAAGDNPERLRSESSFAHLCGVAPLPCSSGKNAGRYRLNRGGDRRANNALWRIVLVRMGTDPRTKDYVARRITQGMSKPEIMRCLKRYVAREVYAALNDPTTLQAVQPLDKL

SEQ ID NO: 153223 - protein, 340 aa, unidentified
MSQVTTIGLDLAKQVFQVHGVDAADQVVLRRQLKRRQVIPFFTKLPTCLVGLEACGTAHHWARMLQGLGHTVRLIPPAHAKAYVRRNKTDPADAEAICEAVSRPRMRFVPIKSEADQAMAAVHRVRERLIAQRTQTINMVRSQMAEFGLVAAKGPPHVRELMAALVEPESVPEALRQVLLGLVGLLAELRAQIAALDKQILTWHRDNPCSRRLGAIDGFGPILSSALALRVQQPQRFACGRDLSAWIGLAPKQSSSGGKVRLGAISKQGDVYLRRLLINGAQAVLNSKRAKTDPWIARLLQSKPRLVAAVAVANKMARIAWAVMVRQSEYQTDFRRAPAA

SEQ ID NO: 153224 - protein, 340 aa, unidentified
MKQLYVGIDLHSNNNYLAIIDEQDKRIYKHRWPNKPDIILAEFEPFKENIVGIVVESTFNWYWLVDILMDEGYKLHLANPTAIQKYKGLKYSDDSHDAFWLAHLLRLGILPEGYIYPKTERPIRDLLRKRGHLVKLRTSLINSLQGIIYRNYGYKLNVNKIRQSNENHVRPILSGQYNLELSGEVSKDTIDYLTRQIRKIESVILKEIKLRNSFKKLQTVPGIGKILALTIMLETGSIKRFPKVGNFSSYCRKVPSKWTSNDKKKGKGNSKSGNKYLAWAFSEAAEFARRYDKSIRAFYNRKAARTNRMVAHSALAHKLTRAAYYIMRDNVEFECQKLFA

SEQ ID NO: 153225 - protein, 416 aa, unidentified
MKLFIGLDVSSQKLDTCFLTDSKEILFEDSLSNDLIGASEIKQKILNYQETCDFSRIVIGMESTSVYSFHPSMFFYLDEDLKQLPVEVTVENPYRIKQYSRMFDQDKTDKIDARIIADYLRVDLHTLSPIKEEIYVGLQRLTRSRYQLVTQMVEAKQHFLENLTYKCNTLSKELANEDNKTSVFGTTIMNLLTEDITLDEFSEMPLEEAAELLQKLGKGRFKNPEQLVKSIKKAVRSSYRLGKVTKNSIDLVLGIIANEIKFLKKQIKEIEKAITALLETIPEAQCLLSVPGLGPVYTAGLIAEIGQIERFDDQSKLAKYAGLTWTKNQSGNSQSENTPLNRSGNRYFRYYLIEATNRVRITLPEFKEYYQKKKNEVPKHKHKRALVLTGRKFVRLIDVLLRNGQLYQPTKVVIEK

SEQ ID NO: 153226 - protein, 367 aa, unidentified
MKKNLFFIGLDIAEADFAASIYKTPDQPIVTKEAIPNNPEGFDLLLLWLKEHHIDKTNSRICMEATGVYSQAIAYYLLFAGFPVSVEPPLKVKRAFDPVGHKTDPVDSKQIAEYAYRFQDELTSWQPRDEILEKIRQLLSVREQFTKQKVALKNAMQAYSKQRVQVALIKKTHQETLAQIEKQISRIDKELAKLIKQDPQILQKADYLKSIPGYGMLLATHLLVITENFTKIQNSKRLASFVGIVPYQHQSGTSVFKKAKIRHFGPGPSRKLLRLAAQSVATHDVTFRRYYLRKLAQGKAKALVLNNVANKLLKVACAMIRNNTRYIKENRSIHPMYLKSLKSAWQSHSVSQWQYFRSLALRTILSK

SEQ ID NO: 153227 - protein, 399 aa, unidentified
MVSVGIDVSKGKSTVCLMRPFGEIVAGPMEITHVDSELKTLVKLMKSMSDEVKVVMEATGIYHLPVLTYLKDNDIFTAVINPYQMKQYRVQGLRRVKTDKADSMTIAKYGLDNWDELKDFVSSEDKYRELTLLSRQYRHYMRIHVASLQELTHILDYTMPGVKKEFKSWAPESGKDKLSDFVEKYWHYDNIRRKSERQFVENYLAWAKKKGYHRNQNKAAKIYSMAKEGIPTLPADQTTKMLVIQAIEVLRRVDETLNTILARMQEIAKTLPEYPVVRSMGGVGDVLAPKLIADIGDVRRFHNSKALIAYAGIDAPPYQSGQFISTNRNISKRGSSAIRKTGYEVMKSLKSHPMPEDGAVYQFILKKEAEGKPKKVAKMAGLNKFLRIYYARVMEVYSC

SEQ ID NO: 153228 - protein, 423 aa, unidentified
MNVVYQICCGVDVHKRFFVATLITTEGIEPKYKKERFSTFNKEILKFKSWLLENNCRDVCMESTGKYWVPVSNLLEDSINVTIANPKWVKTIKGNKDDVKDSKWIGDLFRIGLVPGSFIPSKDIRILREYMRYRFKLVSAKSSEKNRYQNVFTVCNVALDAVVSDMFGKSASYVTDYIINSDTFDPVHCVSLLRGSLKQKADEIIESIDGFQMTDSQKKRAKMVREHYDYLAEHIKKLDAVIDVLVKPFESAVTLLCTNPGIRRNSAITIISEIGTDMSQFGSSKRLCSWAGLTPGNNESAGKKKSVSISRAGVYLKPALIEVAHAAVKDNKNPYYRIKYERIAKRRGKKRAIIAIARMILTAVYHMLSTGEVWNPVDLKQIDMPPELKEKELQKSLRRAAKLLVSHGIISPDIVQFPDVVSG

SEQ ID NO: 153229 - protein, 420 aa, unidentified
MKVVYQTCCGVDVHKSFLVATIIKTISGVEPSYQKKRFSTFNNSILQFKNWLIENQCQDVCMESTGKYWVPVFNLLEDDINVTIANPKWVKAVKGNKDDTKDSKWIGDLFRLGLVPGSYIPCKPIRILREFTRYRYKLTSCRTSEKNRYQNALTVCNVALDSVVSDIFGKSATSVIDYLIERSDNSINHEEIASRLLRSLKKKSDSVIESIEGYQMTDSQKYRMRLVRAHLDYITSTINDIDTMLDSLIAPYENAVQLLCTIPGVDRNSAITVISEIGTDMTPFSNSKRLCCWAGLTPGNNESAGKKKSVRITRAGVYLKPALVQVAHAAVKSDKSPYYKQKYERIMKRRGKKRAIIAIARMILTAIYQMLSTGEAWNPTDLYKIDIPEPLKEKQKEKAIKQAKKLLIREGILSESQLAS

SEQ ID NO: 153230 - protein, 342 aa, unidentified
MDKVTIIGVDLAKRSFQVHGASADGSVLFRKKLSRAQVVPFFAQQPVCIVAMEACATAHDWGREIGALGHEVKLIPPIYVKPFVKRHKNDAADAEAIAEAASRPTMRTVAVKTHDQQSRAVLFRTRDLLLRQRTQLINALRAHLAEFGKVAPKAATNIKRLKEVLEDPENGLPQIVTDTGSVYIEQIATLTEQISKLEKQVRTEATKDDAARRLQTMPGIGPITAMAVSAFAPPMEIFRRGRDFAAWVGLVPKQHSTGGKQKLGRTSKMGQRDIRRLLVIGAMSVVKVAVHKRAPDGSWLQRMLERKPRMVVAVALANKMARRLWAMLVKNEDYRDPAIAAA

SEQ ID NO: 153231 - protein, 356 aa, unidentified
MSREIKYIGMDVHKEATVIAVRNSRGDLVMESIVETESNTILQFIHGLRGELHVTWEEGTWAAWLYDLLKPHVHEVLVCNPRRNALLKEGSKNDKVDARKLSDLLRTGMLRPVYHGEHGLRTLLELARSYQTISKDLNRVMNRLKAVYRGWGIACSGTQVYAPRYRAEWLAKIPHAGVHRRAELLYEQLDGLQALRRKLRPELLAESRKHKAAKLLRQIPCIGPIRAARLIALMQTPHRFRSKRQLWTYSGLGIETHDSAQYRFVRGQLQHSKKPQQIRGLNQNHNHEMKEIFKGAATRASCGMGPLREFYVALLNKGMKPEMARLTLARKIAAIALTLWKKEERFDAELLKTQAA

SEQ ID NO: 153232 - protein, 371 aa, unidentified
MKSIIYIGMDVHKKTYSLCALLKETGEIIGETKIPADVSLIIKFIENAKKSVDSDDVQIKTGYEAGCLGYSLYWQLAEKGIECDILAPSTMHRSAKNKVVKNDRRDAKNIATNLANGTYKSVHVPTDEDVEIKEYIRMMHDFKIELKKVKQHINAFLLRFGHQYPGKSKWVPAHIKWLKELELSDMHREILDEYLSQLEILSEKIERFKHRLEELSQKETYNEKIGQLRCIKGIDTTAAMTMHAETSDFDRFPTANAFASYCGLTPGEDSSGDSYHRLGITKQGNSMIRTTLIEAAQVLVRGAIGKKGKKVKSKQKDQDVKVIDYADKAVIRLQKKYHRMIFRGVKRNIAITAVARELACFVWGIETGHIS

SEQ ID NO: 153233 - protein, 322 aa, unidentified
MPEELTQPDSTTPCYVGIDVAKAWLDVGVRPSGAQWRAANAEAELPTLVEHLGRLAPQVIVLEATGGYERAIVAALAAAGLPVAVVNPRQVRHFAQATGKLAKTDVLDAHVLAHFAEAVHPQPRPLTDEATQRLAALLERRSQLVAMLTAEKNRHQQSLASVRPLIEAHIAWLEQALDQLTQDLDHTLHASPLWREREDLLRSVPGVGPILALTLLAELPELGMLAHKQLAALVGVAPLNRDSGSSRGTRVIWGGRARVRAALYMSTLSAVRYNPVLRAFWTQLREQGKPPKVALVACMHKLLTILNAMLKRQAPWQPALAA

SEQ ID NO: 153234 - protein, 340 aa, unidentified
MDNVATIGLDIAKSVFQVHGVDAVGAVVIRRKLTRGRVLGFFERLPRCLVGIEACSSSHYWARELIARGHDVRLLPAQYVKPYLKRQKNDAADAEAICEAVTRPTMRFVPVKTPEQQSVMMLHRVRLMLNRQRTQVSNALRAHLSEFGVVAPIGRNGIEQLLVVINDDNDTRIPADARLCLRMLEAQLRVVKEQILENDRRVRASARETELGRRLMEIPGVGPLLASAFVATVADAHAFKSGRCLSAWIGLVPKQNSSGGKEKLGSISKAGNRYLRQMLVVGAMAVIRYAERNGTRRPWLVQLMARRTTKVAAVALANKTARMVWALMTSGERYREPIIA

SEQ ID NO: 153235 - protein, 327 aa, unidentified
MEQITRIGVDTSKNVFQLHGVNAEEKPVLREKLTRTQMLAFFKDLPPTVIAIEACGSAHHWARHLGSLGHEVKLIAPQLAKPYVKRGKNDAADAEALCEAMSRPTMRFVPVKTADQQAALMLVGMRDRLVRNRTQLANAIRGYAAEFGLTAARGISRIELLLGDIASDGSLPELARELFAFHRREYELLQAEIKKVEAKLMEWHRNDECSQRLARIPGVGPIGASLLMMKTPDPRLFKSGRDFAAWIGLTPRDHSTAGRARPGRITRAGDEHLRSVLVVGATSVLKNMRAGRGKNSSPWLVKLWNGARSPNLWPSLWRTGSHASPGS

SEQ ID NO: 153236 - protein, 375 aa, unidentified
MEKIIWVGLDVHKDTIAVAVAEPGRRGEVRGLGVISGDLQAVEKLTARLRRQYEAKLSFCYEAGPCGFVLARRLRQLGHECIVAAPSKIARAAGARIKTARRDAAKLARAHRAGDLESIYIPEATDEAIRDLCRARTDAVDDLRRSRQRLKSFLLHHGYHYQGKGHWGAAHMRYLRELVLPHPAMKAILEECLMAINDAASRVERCEKAMGDLLVDWRLRPAVEALMAFKGFQIVAAMITVSELGALGRFEHPRKLMAYLGLVPSESTSSDKRRQGSITKCGNPHARWLLIECSQHYATPPKVSKELSRRQDNVAPEIIKVSWAAQNRLHRRFMSLMARRIHRNKVLVAVARELTGFIWHALRNLPCYQQSTQPA

SEQ ID NO: 153237 - protein, 334 aa, unidentified
MEKITTVGIDLAKSVFSVHGVDGAGRVVLRKTVRRDQLERLVAGLSPCVIGMEACSGAHEWARRFERHGHTVRLMAPKFVIPYRKSGKNDGNDAEAICEAVSRPSMRFVPVKSVEQQALLALHRVRQGFVVERTATINRLRGLMAEFGVVLPLRAQTVRRQAGAAAELLPELARRMVVELLEQLRLLDERIGAHDRELGAQARLSEPAQRLMKIRGIGPTTALAIVATVGNAREFDNGRQFAAWLGLVPGQYSTGGKARLGRITKRGDAYLRNLLVYGARSVLHTAAAHRDRISRWALELQGRCGYHRTLVAIANKNARIAWALLARGEALRCE

SEQ ID NO: 153238 - protein, 346 aa, unidentified
MEHYVGIDVSLEFSSVCVVDATGRVVREAKVRSDPEALVAFLAGLGVAVTRVGLEAGPLSHWLHAGVAAAGHETVLLETRHVKSALSAMVVKTDRRDARGIAQLLRMGWYRPVHSKSLAAQELRALLAGRKMLLGKLLDLELSIRGILRGFGLKLGETTRSRFAGRVRELAAGQAMLETVVEPMLRAREALRAEAAELHRRVLAVVRGHAVCRRLMTVPGVGAVVALTFVAAVDDPARFRRSRDVGAHFGLMPRRYQSGETDVVGGITRVGDASVRVALYEAANVMLTRATRFSALKRWAMEVAKRRGARRAKVALARKLGTVLHRLWVDGTEFRWGKAPAAGAAA

SEQ ID NO: 153239 - protein, 341 aa, unidentified
MKDYIGLDVSMKETAVSIRRNGERVWRGKCVSDPAVIAQLVRKRAPAVDRIVFETGPLSVWFYHALRAAGLPAICIDARHAKSALDMAPNKTDANDADGLAHLAEIGFFREVRVKGFDSMLARTLIAARNRMVRITVDLSNHIRGFMKTFGLLIPAGKGSTFEGHVRRLLSDHPKLSEILLPMLEAWCATRLQAARLARQIAAEARHNDGCRILMSIPGVGAITATSFVTAIESPDNFRKSRSVGAWVGLTTRRYQSGEIDYKGHISRRGDHHLRGLLYEAASVILTRSSAESDLRTWGLKLRERIGFKRAAVALARKLAVTMHAMLRDGTLFDRGLKPTS

SEQ ID NO: 153240 - protein, 313 aa, unidentified
MTPSTIVVGIDVSKDRLDLAWRPTGERWAVPNTERGIRAISRRLRTPAPTLIVLEATGGLELPLTGALAAAGLPVVVITPRQVRDFAKATGRLAKTDAIDAAVLAQFAEAVRPEPRPLPDAATQARSALLTRRRQLIAMRTAEQHRLETAPAPVRTGIRAHLTWLEGRLAELDEALATTIRESPLWRETDDLLQSTPGVGPVLARTLLASRPELGTLTRQQLAALVGVAPLNRDSGRFRGSRRVWGGRAHVRAVLYMGTLVATRCHPLIRAFYQRLCAAGKAKKVAVTACMRKLLTILNAMLKHRTPWTINVA

SEQ ID NO: 153241 - protein, 457 aa, unidentified
MNRKRTKSKVDRTIPMVHPNAAAVDVGATIHMAAVSADRTPQPVRSFGTFTTDLHRLVNWFKECGVETVVMESTSVYWIPIFELLDARGFTVFLVNARDAKHVPGRKTDVSDAQWLQRLHSYGLLRASFRPKGQIAELRAYVRQRERLLEYAASHIQHMQKALTEMNLQLHHVVADITGTTGLRIIRAILAGERDSKALAHLRDYRCHASAETIEKALTGSYRAEHLFALEQALALFDAYHEKVSACDVRIEAVLKELSICRSRGSGSLPSSRRRTDQTNAMAFDVRAALFALLGKDVTQINGLGPYLSLKLIAECGDDLSAWPSAKHFTSWLCLAPSNKISGGKVLSSRTRRSGSRASALLRLAAVTVGRTDTALGAFYRRLSARIGKAKAVTATARKIAVLFYNAVRHGMEYVDPGASFYETRYRERVVDNLHRRAKAFGFVLHPAEPTPSVAVS

SEQ ID NO: 153242 - protein, 418 aa, unidentified
MLGVGIDWAEDAHAVALGTPDRGVFEIATVAHNPAAVDALIGRIATLEPDPAEVRVVLETRHGLLVEKLVDAGYTVVPVNPDLIARRRGPANKKDDPEDARIACLLALDRFTTLKPLIPHGEAATEVRAIARDDSRASKDQRRLLNRLRADLLAVFPAAMHIGGDDLGAPTFLKLLERWPTAQSLAEASRDDIATFARTCRHGWPDRFADKVAAALATEQFEARPALVRAKADTIGLYVTQLLAIGHQRRAWEKRMGQLLVGDGANQDDTPGQKFPGGEIYLSMPGLGVRLAARVAGEIGDHPGQFDTPNALQAYGGKAPVTRRSGKSELIVAKRLACNRYLDGAVQDWAFCSLRWSNWAREYYDELRGRGKGHHAALRSLGNRWLNILWHCLDRNALYDENLHQANRQRARGQLAAA

SEQ ID NO: 153243 - protein, 367 aa, unidentified
MSVTIVPCQSFIGVDLHKNTVTLAAVRPDGTPIDRVKIPTKCRNRIEDWLLSQPRPSHMAVEAVGFVEWFIDEFRECVDRIDIADATELANRRGKRRKNDPNDARDIAQRLARGECPLGYIADDELMQLRKLGRHWHQLSRLLSRSKHSMRSMLLAANIAGPKLDGPAAQKWILAFGHLLKPVQQQAFVNFLDIIQLVERQRARLHLQITFANRAERFRKIVELLKSVPGIDEIWACIIAAEIGPFDRFPNADALEFWAGLTSDLQESAGRTQSGNITKAGSRTLRWALCKAALTLCRSDQKQEAVRRRLIRRIGRPKANVAMGRRLLRILYAMIRDEKPFTRGPATKHNLGANRARMARKQRKEAA

SEQ ID NO: 153244 - protein, 356 aa, unidentified
MAEGTWVGLDVHARKVVAGVLDARTGELRTLRVPAPLAETVGWLRQLPAPVRVAYEAGPTGYGLARACSEIGIACTVAAPSKIPRAPGDKVKTDRRDAERLARLLRLGELVAVRVPEPHEEAARDLVRAREDARGELMRARQRLSKLLLRHGLVYDASAWTGAHDAWLRRQRFEAKPLALAFDESYAAVAQAKLRRDALDRAIVELAAEPPFVEIVGRLVCLRGVATLTALALTVELGDWTRFRPQSLGPFLGLTPSEDSTGERRRLGAITKTGNTHVRRLLVEAAWQQRRPLRESATLAQRRQGQPAAVRARADQSARRLHERWHALERRGKRRTIVAVAVARELAGHCWSLATM

SEQ ID NO: 153245 - protein, 408 aa, unidentified
MTAQQHPAVFIGLDVGKAEHHAVALTAAGKKVYDKALPNDETRLRGILDELARAHGPALLVVDQPATIGALPVAVAQACDGVEVAYLPGLAMRRIADLHPGSAKTDAKDAAIIAEAARTMPHTLRSIRVDEEQIAELAMLAGFDDDLAAQITATSNGLRGLLTQIHPALERVLGPRITHPAVADLLGRYPTPAQLRTAGPGHVRARLRKHAPRLAASLTEQIFQALDEQSVVVAGTQAAATVVPILAEQLAGLTRQRAGLASQVEAAVEAHPLHPVLISMPGVGIRTAARILTEVVGKDFVDAGHLASYAGIAPVTRRSGTSIRGEHVARGGNKRLKRALFLSAFASLSHPPSRAYYDRKRAQGKRHNQALIALARRRTDVLYAMLRDGTLYQDPTAPPAPSSVALAA

SEQ ID NO: 153246 - protein, 339 aa, unidentified
MTSRPFRVNSNHFVFYTKKILLQSVGIDIAKDKFDVCFMEIKSERTIVKGTKSFNNDSKGFETFLYWCSKRNQANSSLIFVMEATGVYYEDLCYFLYSKNEKVSVILPQKVKYFAKSLNIKTKTDQVDAKLIADMGLERHNTLQLWSPPSKQFKEIRDLTREFCRLKKSKTVIASQVHLHSAHNTSKDALRIALKHLAYTDKLITELDSILLKTVKKDNQLYDKIKRIAEVKGLGILTIVKVIAETNGFLLFDNIRQLVSYAGLDVVQHQSGAYEGKTKISKKGNAHLRAALYMPAVSAATHNLTLKPFYNRLNEKFNHKKQSLVGIKPNCCGGIQLVA

SEQ ID NO: 153247 - protein, 342 aa, unidentified
MQISTIGIDIGKNSFHIVGFDTRGGIVVRRQCSRTQLIRALANLPPCLVGMEACCGAHHLGRILVAQGHDVRLIPPQYVKPFVKSHKNDLLDAEAIGEAVQRPTMRFVPLKTMEQLDLQAIHRLRTRLVGRRTAVINQMRGFLLERGVTCPIGREALVKRFPEVLDNPALGLSVRFCRLLKQLRDEWRLLDDDIEDVDQEILSLARDDEACDRLMQVPGIGPLTATALVAAVGNGAAFAKGRDLAAWLGLVPRQHSTGGKTVLRGISKRGNAYLRSLFIHGARAVCRHHRQKPHRLGRWLANLEARAHPNVVAVALANKLVRTAWAVLQRNSHYDGRLLANA

SEQ ID NO: 153248 - protein, 392 aa, unidentified
MRERISEMQVMIEGQSHFQPFGLSCWGFADLNKGVESMTASYDYHIGVDYHKSYSHLVVQDSSGKTLRSGRVKNDRHSLGGFLERYRANSHAVIEATRNWMVMYDWLDDICDDVVLAHPLKVKAIADAKIKTDKIDAKVLAHLLRADLVPEAWAPSEKPRELRVALRERMFYVRLRTMTKNRIVTVFDRYPEQTAQLKKLGDLFGKAGRIQLAEVNVSDIDRVQIDRGLAFIGDINERIKQSETTIRAMTKANANVKLLKTIPGIGEFFARLIDAEIDDVSRFRNAKKFAAYAGLVPSTYSSGGKTYHGNITKQGNKWLRWAFVEAVAPAIASDAQLRTQYEQLKIRGTNKARVAIARKLLTIAFQILRDQRAYEPRGITTTEGASTISRLS

SEQ ID NO: 153249 - protein, 397 aa, unidentified
MTKKHTQTTLDVSIKYSAIGLDLAKYDVSLAAVTLNEGEIICIDRVTYAELYELADKLSPTLFAVEPCCGYSQLALELEARGHEMRVINGKVVKMWIDTHMSGQKTDINDALALARLTADPDLRPIRAKSLEECRIMTVQGVRQQLIGQRTKTLVSFKGFAQTWGIHMPAGRRNLKKMREAVEAKADMMGDAAVSALTTMLDRVKTLDDQIHQLDKDLEALVSANANGRLLKSVMGVGTQIAARFITVVGDVKRFETSRSLVAYIGCVPKNYITGHVNKPRQKKSSAPDLSSKGQGRISRRGDKLLRSLLMQGAACIYMQYCKRQLPDCQLTKWIDKQLAVRKPYGKIMVSLAAKLIRIAWAVLTYGKKFDIHRAGVPRSVLAAMAVQPSNEAAAVA

SEQ ID NO: 153250 - protein, 432 aa, unidentified
MKHKLKQKQNQRITRITEHTLIVGADIAKKTHVARAIDSRGVEFGKACQFHNDREGLTKLVTWMKELCHTHNKRDILFGIEPTGHYWFPLANFLKEQGILTVVVNPYHVNATKELEDNSQTKSDYKDAKVIAKLLRDGNYSVPNLPTKRFAELRVLMNCREKVMSSLNQVKARVVGWLDRYFPEYAVVFKKWDSKTSLLTLKHCPIPGEIVSLGARGVLAHWRTEIKKGIGIKRAEQLCEVAAVSIGLTEGLSAARLELATLLEQFDLFVKQEETLMAEVMSILATIPGTAQMLSIPGIGALTVAGFLAEVGDLNNYDHGQQIIRLAGLNLKENSSGFRKGETGISKRGRSRLRALLFRAILPIVANNEEFKALHKHFTTRRENPLKKKQSLIALCGKLIRVLYTLGTKQVEYNASDVLGPVRRVQLQQSAA

SEQ ID NO: 153251 - protein, 410 aa, unidentified
MGYETLIRRAHVMTKKNTLKSLPTDTEFRVVGLDLAKSDVSVAAIPVDDNTPSLVDRMTYADLLDWAGKISPTLFAMEPCNGYSLLCLQLENLGHEIKVISGWTVSMWINTHLSGQKTDLNDAIALARLAVSDAELTPIRHKSITEIRIQTVQAVRQQLMSQRSKSIVSFKALAQQWGIPCAAGHRNLKKLRESIEAKVDLITGPVANAMLFLLDAVKSLDRQIGQLNQTLQELVMSDERGRLLQSVLGVGTQISARVITVVGNIERFNSPRSLVAYVGVAPRNFITGHKNLTKKKHGNCPDLSHKGQGKISRRGDKLLRSLFIQGAACLYMQFCKDQLPECQLKRWILKQLASQKPYGKLIVSLAAKLIRIVWAVLTYGEKFNIQKAGMTRSMWSEMALETPLNKEVPA

SEQ ID NO: 153252 - protein, 422 aa, unidentified
MLTTTQDNEEIIERVAALDTGKAELMCCVRVPDQDHPGRRLQEVQAYPTMTRSVLRLAGHLARLGVTRVVMEATADYWKPVFYLLEAAGFEAWLVNAKDVKHLPGRPKTGKLDAIWLCKVAERQMLRPSFVPPPPIRKLRDLTRYRAGLVAARTAEKQRAGKLLEDACIKVSSVVAGIFGVSGRDMLAALAAGERDPKVLAQLARRSMRAKITVLEEAFTGHFTDHHAFLLATMLRRVDAISADIAALDERIAGQAAPLAAAVARLDEIPGISLASAYVILAEIGTDMTRFPTAGHLASWARLAPGISDSAGKKKGKGSTGHGNAYLASILGNAAAGAAKTGTSLGEKYRRIARRRGSKRAIVALGRSILVIAWHLLSDPDARFCDLGPGYYATRINPERRRQSHIRQLEAPGYTVTLQPAG

SEQ ID NO: 153253 - protein, 405 aa, unidentified
MKQPPRLHYAGIDWASRTHAVCVVDQHGAIRARFQVPNTGKGFTGLCRRLAKLGVAAVAIERPDGPLVEALIAQGLQVVVVTPRQVKALRSRYRASGAKSDPADALLLADVLRTDGHRLAPLTPDSDPTKTLRALSRTRKDLQEARVALCNQLHAQLERCFPGAIGLFADLHSPTAVAFLRRYPTSHAAAGLTQAKLAAFLRRLHYPGRTPVATLVSRIQTAPVAGTSPAEAAGRAICVLALLDAIQACARQERELEAEIIERLELHADAHVFTSLPKAGHGVRAAALLGELGDVRARFPDNDCLAALAGAAPVTITSGKRRVVKFRWACDKKLRNALIDFADDSRHASPWAAKVYADALARTGRHPHAVRILARAWIRVIWRIWQDGVAYDPAKHRGAVRLLAA

SEQ ID NO: 153254 - protein, 398 aa, unidentified
MWLDRAWAGVDIGKGHHHVLVLGADGEKLFSQRTANDEPALAAVIEQVSALAGVVTWAIDLQGSESALLVALLLERGQAVVYLPGLAVSRAASSYRGAGKTDARDALVIADQARMRRDLAVLRGDEELIVELRMLLARRQDLVTDRTRAVNRLHDQLLAISPAVERALDLTNRGPLVLLTGFQTPAALREAGACGVEEWLRARGVRRAAALAAAALRAAESQRARLPGEQLAASLAARQAEEVIALDEQVKEVDELIRDRFRRHPSAAVITSMPGIGILLGAEFLAATSGDMTAFGSADRLASFAGVAPVPRDSGRISGNLHRPQRYHRGLQRVFYTSALISIHCNPQSRRFYDRKRREGKRHTQAVMALARRRVNVLWALLRDGRSYHLTPPTLAAA

SEQ ID NO: 153255 - protein, 351 aa, unidentified
MSEKTGSHIAVVGVDIGKNSFHVIGLSSRGAIVLRQKWSRAQIEVRFANMPPCLVGMEACVGAHHLSRRLKALGHDARLMPAKYVRPYSKGQKNDFRDAEAIAEAVQRPTMKFVATKTVEQLDLQALHRVRERLVSQRTGIINQIRAFLLERGIAVRQGQRFLRTELPGILASPADVLSPQMARIIEGLAADWRHLDERIDQLSNEIHAMAREDTGCERLMCVPGVGPIISSAMVAAIGSGDAFSKGRDFAAWLGLVPRQMSTGDRTVLGPISRRGNRYLRVLFVQAAWAVLIRPGSWERYGLKSWVESAQKRLHRNVLAIALANKLARIAWSVLAHGRGFEASAIASSIA

SEQ ID NO: 153256 - protein, 418 aa, unidentified
MLRIVYPICCGIDVHKKFVVATVGTTNKSGVTDYQTRQFSTFTESLHQLSDWLKAQSCIHVCMESTGKYWQPVFNILEEDCDVVVANPKYVKGIRGKKTDKKDSIWLCDLHKHGLVPSSFIPPLSIRQIRDLMRYRFKLINFKSSEKNRIQNSLTVSNIMISSVVSDTFGVSSMKIINHILDNPDDKDFDVSPMLHASMQDKAETITKSINGNLTKPQADKMRVCLHHFENIEKHIADIERVVLGLAQPYLPQIEIILSLPSIKDVFTAIAIIGEIGSDMAVFNSSKHLCSWAGLTPQNNESAGKKKSVRVSRAGVYIKPLLVQCANAAIKSKKCTHFKIRYDQIKKRRGHKKAIIAIAHTLLNCIYHMLDKNETFNYDLYKIDSKPKQTYASQITEEMAIRYLQTLGYQIPDMSDTT

SEQ ID NO: 153257 - protein, 316 aa, unidentified
MVNVIVGIDVGKWRLDVSVSQGPVRSFANTPAGIVALVDWVASLGASEAVCEPTGGYEREVVRRLRESGMPVHVAHPNKVRHFARAAGREAKTDVLDAQVLSHYGEVFPMADSQPGDGDNQELKDLLKRRKDLVDERVRESNRLEKGLRGGARRSTERHIGWLNKEIERIEKEYRKALSENARLSEAAALYRSVPGVGELTAASLVAYLPELGKLEGKELTALVGLAPWSRDSGAQRGYRSIRGGRGAVRRVLYLAALSAVRCNEELGQFYRRLQNRGKTGKVALVAVMRKLLVLLNAVPLRATAFNNSPPAAQAA

SEQ ID NO: 153258 - protein, 340 aa, unidentified
MINNFLGIDISKDRFDVSLSFISNKGKRETRKRSFKNNDHGFQGLLSFLQKHNVEQVKACMEATGCYSEALAEFLHNTGHFVSVVNPACIRFYAKSKLIRQKNDQTDAEIIADYCQRQEPIRWAPPSPELKKLKHLYRCSAALKDELTLVNNHLEKKERLPKEVANAWEDLAMNIKQKIERIENSLRELLNKHKELLENFQLLLTIPGIGEESAVAILAEVPNIKAFKDARQLAAYAGAIPRNITSGTSVHAKPRLSKSGSRTLCKAMYFPAIVAKNHNPTIMTFCKRLKEKGKHNMAIVGAAMRKLLHIVFGVLRSKKAFDPDHIKNYRARSLAESLVL

SEQ ID NO: 153259 - protein, 363 aa, unidentified
MSAIIIGVDPHKRSHTAVVLDDCEQVASEIRVTASGGQVDELLAWAPAGERVWAIENANGLGRLLAQQLVAKGETVVDVPAALACRARKLSGHSARKTDEFDARAVAIAATYNRGLRRVQADNVSAVLGLLVERRWQLVSQRQRAICQLHALLTDMVAAGAKGHLTSKKAAALLRTIPAGDVVTLERKLLARELIDDVRRLDRRIPPARRRLTAALTAYGTTLTDIHGIGDVGAATIIGIVDDPTRFPTSGHFAAFTGTAPLQASSGDVERHRLSRRGNRQLNKVLHTAAKTQIRRGGPGRDYYQRKLAEGKSPMEALRALKRQLSDVVYRRLLADHQQRGPGWTDEDEPEGRVTGFNLNTGP

SEQ ID NO: 153260 - protein, 386 aa, unidentified
MPKLNDLSRSLTRLDPDGTLIAVIEMSQSSWLVAGIVPGVERQPLKKLAVDESALLNLLNRWRMEAEKGGRKIDRIAVAFEAGRDGFWLARWLRAHGIEAYVIHASSVAVSREHRRAKTDRLDTELLKRAFLGWLRGERDHCKMVAIPTTKDEDAKRPNRERESLIGEQTRIVNRMKAALIRLGIRGFNPKLKKAAGRLEELRTPEGEPIPPNTLAELRRDMERRRLISDQIRQIEDARLECIEQAPGDGPHAMVRLLARVIGVGIETADMLVQEVLARNMRDRRAVARYAGLTGSPDESGTKRREKGLARSGNARVRRGMIQLAWRFLMFQKESALAQWFRARTETARGTRKTMIVALARKLLIALWRLVREGVVPDGVVLRPAR

SEQ ID NO: 153261 - protein, 399 aa, unidentified
MISVGIDVSKEKSTVCILKPYGEIIAQPYEVRHTDQELGELATMLHRLNDEVKVVMEATGIYYLPVVTYLQEHHLFVSVINPYLMRQYRRQNLRKGKTDKLDSIAISNYGIEHWFSMQEYRASDETYESLKILSRQYRHFMRMHVEGLLGLTHLLDYTMPGIKKQFSSWDYTSGKDKLSDFVDEFWHYRIITDQPEEQFIEKYVKWAKEKGYRQNQDKAAKIYSLAKEGIPTIPADQTAKMLTHQAVEVLRRVDETLGTILARMTELSKMLPEYSVVRSMGGVGEVLAPRLIADIGDVRRFHSGKALVAYAGVDAPPYQSGKFEGTNRKISKRGSSAIRKTAYEVIRSLKSHKEPEDNAVYQFVIKKEIEGKPKKVAKMAGVNKFLKIYYARVTEVYTG

SEQ ID NO: 153262 - protein, 371 aa, unidentified
MVWTAPYGISCARMRLLRSQTREPSVNQIIRIGMDTSKHFFQLHGVDAAERPVLRRKLRRNEVLAFFARLPPTVIGMEACGAGHYWARELRKLGHEVKLIAPQHVKAYIKRNKNDGRDAEGLCEAMSRPTMQFVPVKTDEQQAALMLAGVRQQLMTRRTQLSNAIRGCAAEFGLITAKGLDKIEPLLARIAQDESLPALAREMFTLQGRDYARLQVELKAVEVRLMAWHRANADSRRLAKIPGIGPIGATTLVMKTPDPGLFPSGRHFAAWIGLTPKDHSTAGKTRIGKITRAGDEMLRSVLVAGATAVIQQAKNGRGRPSPWLLALLARKPPKLAAVALANKTARIAWKLLTTGESYDGARMPGASALAA

SEQ ID NO: 153263 - protein, 353 aa, unidentified
MEFYKREHQYYCGVDLHAKNMYLCILNQKGEKLLHRNVKTNPQALLKAIKMYLEDLVMAVECMFTWYWVSDFCHENNIEFVLGHALYMKSISGGKAKNDRIDSFKIASLLRGGLIPIAFDYPKEMRSTRDLLRRRNHLMRKRAELSAHVKNTNSQYNLPDIALNLRYKKNRDTLANRFPDQSAQRSVDLDLALIDFYDQQLKKVEWFIKKELRIFDYQSYYLLKSVHGIGDILAQTILFEIYHISRFPTVQKFASYCRLVKCRSESDGKCYGSSGAKIGNAHLKWAFSEAASLFLRGNPEGQKYLEKLTNKHGKGKALSILAHKLNRAVYFMLKQKKAFNKQQFLNMGGDGVD

SEQ ID NO: 153264 - protein, 463 aa, unidentified
MMDAAGRTLATARLPEGAAGMARLHAMIGEQLGEGAEDAEVRVGIETDRGLWVMALAAAGYLVFGINPLQASRYRERHSVPGAKSDTADAHVLADMVRTDSHQLRQVAADSAGAQAVKVVARAHKTLIWERTRHTQRLRHQLRDFFPAALVAYPDLDAPDTLELLARAPDPASAARLTTARISAALKRARRRDIPGKTALIRAALRAEQLAQPPAVTEACAAVVRALAAVLTALNEQIKVMERQVEAHFRPHPDAEIILSQPGLGPVLGARVLAEFGDDPARYACARARKNYAATSPITRQSGKKKTVLARYVHNDRLPGALDGQAYAALNASPGARAYYDRQKAREVSHHAALRQLANRLVGILHGCRKPALSTTRPPPGPCPPARKTRPPLDNPSPWDVLGRPGRRAPALSHRHAADQPGSPGHATGYCTGRLPQCVIVPLPAAASRSALRAVASDPMPRS

SEQ ID NO: 153265 - protein, 347 aa, unidentified
MTIVGNPDAVVGGVDTHADVHVAAVVNHLGGVLGVESFTTTSNGYRQLVSWLRSHGELVLVGVEGTGSYGVGVARYLQREGVTVVEVDRPNRQTRHRKGKSDPVDALAAARAALSGSATGSPKSRDGNVEAIRVLMIARRSAVDTRIETLNQLRHVVFTATPEIRAKFSGLTAIGLVNKATALRPREGDDPVRYTTLMTIRALGHRVQYLREESKRLNRMLRPLIRQTAPTLLEVYGVGYDTAAKLLVAAGDNPERIRTEAAWANLCGVAPIPASSGKTKRHRLNRGGNRQANSALYHVVITRMRHDQRTRDYVARRLTEGKTMGEIARILKRYVAREVFKHLPHPA

SEQ ID NO: 153266 - protein, 412 aa, unidentified
MTLMIGVDPHKGSHTAVAVDETEQALAELKVRSGPAQLEQLLSWAQRFPERSWAVENATGLGYLLAQQLVAGGERVIDVQPKLAARVRLLDSKSVNKNDPHDARSVAIAALRSPTPVEVRPEDHSAVAKLWSKRQRDLARARNKVACRLHSLLCELVAGGVPDEIYAAKAATLLASISPDGAVAAARVELAEDLLEDLRRLDAQIKESRRRLEAVVTASRTSTTKIFGVGPVVAATAIGITGDVTRFPNRDHFASFNGTAPIDVSSGGKKVYRLSRRGSRQLNHAIHMAAVTQIRHRHSEGRAYYDRKVAEGKSHKEALRCLKRRVSDALYACMVEDAKRDDRLVEKGPGGQPGNVSVASAAGSHPGTPALRLSHSRTRRQAITARRSSPAQKTRARARSVTTTRKATRSGS

SEQ ID NO: 153267 - protein, 367 aa, unidentified
MKKVSTAAVKATKNFSQPKLTIGLDLGDRSSWYCLLDEVGEVLQEQKLGTTPKAMREVFGSMPRCRIALETGTHSPWVSRLLSELGHEVIVAHARNVRLIGESRKKDDRLDARTLARLARIDPQLLCPVKHRSAKAQADLTVILARAGLVRARTALVNTARGLAKSSGERLRGCNVRNINPEKAEGLSPELQAALQPLLAGIESLSERIRECNEGIEKLAQESYPQVALLKQIKGVGTLIGLTYMLTLEDAHRFRKSRDVGCYLGLQPGRRNSGQSEPQMHISKEGDPYLRTLLVQGAHHILGPFGADSDLRRWGLKLAERGGKNGKKRAVIATARKLAVLLHRLWVSGEVYEPLRNSHRIALPAAA

SEQ ID NO: 153268 - protein, 334 aa, unidentified
MKSGIVHIGVDVSKEKLDVFVPAHKEGMRPTAKELDNSVAGFRELRNLARKAKATVCVEPTGGYELELIAFLHRFEVPVAYADAMRVRQFARAEGCMSKNDSIDAALISRFADKIGVRVLEAQEVEAVELKRKAKFRQTMMDSRTAMINRLETEIDPEMKALLKEQVRLMSKVVDKAEQLCLETVEKDERMNALRKRFTQVGGVGDLTAISILAGLPEIGRLPDAKLNRLVGIAPEERQSGTKEWQRRIWGGRKDVRNALYMACIASIKWNSILGKYYHKKRDEGHLHKWAMVPTMRKLLSLLNKIARDPSFVPRPEPESTRRNANVGRKRKAA

SEQ ID NO: 153269 - protein, 443 aa, unidentified
MEVIYARCAGLDVHKKNVVACWMHTKANGHKEQEIRRFGTTTGELQELLAWLQEKGCSHVAIESTGVYWKPVYNVLEDHVEVLLVNARHVKQVPGRKTDVSDAEWLADLLRHGLLRASFIPPREQRDLRDLTRQRSKLVAERAAVVNRLQKVLEDANIKLASVATDVMGVSGRAMLRELVRGQTDPAALAELARGRLRNKRPALEQALTGRVQAHHRFLLAQHLTHIDFLDEQIEEFSSAIAAQIERMSAAPASSTPEPSRDEARPAAQQAPLTYAEAVQLLDTIPGVNRWLAEVIVAEMGIDMSRFPSARHLASWSGVAPGNNQSAGKRRSGKTPPGNQALRKGLVQAAHGASRTKNSYLKARYHRIAARRGKKRATVAVAHSILVSAYHMLLRREPYHELGDNYFDENKRQFVARHLLRRLEKMGYQVAIAAQPDTLATVT

SEQ ID NO: 153270 - protein, 403 aa, unidentified
MEVLYPRCCGLDVHKRTVVACIIIKKDRKTRNFSTMTDDLLNLKTWLLECKVTHVAMESTGVFWKPIYNLLEDSLTLLLVNAQHIKALPGRKTDVKDAEWIADLLRHGLLKSSFVPDREQRELRELTRYRRSLIQERATAVNRIQKVLEGANIKLSSVATDITGVSGRMMLNAMVSGVTDPKELAEMAKGVMRKKKDVLEQALKGLMGKNQKIMLKSLLRHLDFLDKEIAQLDEEIGRRMKPFEEIIERLDDIPGIDRRGSEEFMSEVGKGVERFASGDHLASWIGLCPGNHESAGKRKSGKTRHGNRWLCSTLVQAARGAARKKANYLSAQYHRLASRRGDKRAIVAVAHSISIIIYKMITMETRYQELGNLFLDKLDRERVINRAVQRIEALGLKVTLEPV

SEQ ID NO: 153271 - protein, 310 aa, unidentified
MDAIFVGIDVSKDRLDVHVRPSREAFAVARDGKGLEELIDCLRALEPQLIAIEATGGFETIAAAAIAGAALPLAIVNPAQVRHFAQAVGKRAKTDPLDAEVIAHFAEAVKPPVRPVPDEQARLLAELVARRRQIIEMIVAERQREKRAAIARVRKGILRHVRMLEKELLDVDTDIGTLVRGSPAWREKEELLVTVPGVGNTLARTFLAELPELGSLNRREIASLAGLAPFTRQSGRWKGKSMIGGGRASLRAALYMAALSAIRCNRSLKVFYQRLLSAGKPKMVGLIAVARKILIILNAMLRDKTQWQPT

SEQ ID NO: 153272 - protein, 344 aa, unidentified
MTYYTGIDVSLRSVSICIVDDKGEVCLEAKVAAEIDAIVDRLRQFSSDVKTVGFEAGALTQYLTYGLQAAGFEVICLEARQVSVTLAAMRNKTDRNDARGLAQILRTGWYSRVHVKSLHSHQVRALLASRKAILKKCVDLENELRGLLKVFGIRLPSRVGHGAFDAELRDRVSSDEMLACALVPMLDARTVLYKTYLKLDNAVRGLVRIDPVCRRLMSIPGVGPVTALTFKAAVDDPSRFKSSRTVAAHFGLTPRRFQSGELDNPGHISRAGDADVRSALYVAAHSLLTRNAQWSTLKAWGVGIAKVRGHRRAVVAVARKLAVILHRMWIDGSEFRWGLAPASA

SEQ ID NO: 153273 - protein, 336 aa, unidentified
MNKRVLVIGVDISKDDFHVCIKEKIIGSNVKIKGTRSFSNNSKGFIELMEWVSKRTLPNSSVLYIMEATGTYFENLAYYLHENGCLVSVVLANKIMHYAKSLNLKTKTDKVDAAMIAGIGIERDFPKWKPMSKDFKELRDLCREMLSLKKERSRAKCQLHAMEYSHEKTVSVLKIKKNQIEFYENSIQEIEFEIKRIVDGDSDLKARIDKIATVKGLGLITIVIVLCETNGFELFNNIRQVVSYSGLDIQMKESGNFKGKTRISKKGNVRIRQCLFMPALTATMHNEKIKSLYERINERNPDIKKKGVVAGMRKLLILIFVLWKKNEEYDPQYQWS

SEQ ID NO: 153274 - protein, 411 aa, unidentified
MRLFVGDDWAEDHHDVELMDEAGRVLARKRLPEGVAGIARLHALIGQQLGDDADDAEVVTGTGTDRGPWVAALVAAGYTVYGVNPLQASRYRERHGVSGAKSDTGDAHMLTDMVRTDSHQLRAVAGDSPDAGAVKVVARTHKTLIWERTRQVQRLRHQLREYFPAALAAFEDLDAPDALELLGKAPDPARAARLTRAQVSAALKRARRRDIPGKAAAILAALRSEQLGQPPAVTAAYAVTARSLIAVITTLNEQVKVLEEQVRAHFGRHPDAEIYLSQPGIGPVPGARVLGEFGDDPGRYASGKARKNYAATSPITRASGKKKVVAARFIRNDRLTDALMAQALSAISASPGARALYDAERDRGAEHNPALRKLANRLVGILHGCLKTRTPYDEATAWPQRENLPQSDLAA

SEQ ID NO: 153275 - protein, 346 aa, unidentified
MEHYVGLDVSLKLTAICIVDRTGKIACEGLVSSDPEAIAEFIKSHASHVERIGLETGPTATWLWTELRKLELPVICIDARHAKAALKMQINKTDRNDAVGIARIMQCGWYKEVRVKDLDSHAIKALLVSRALLVKIKRDLENQIRGLLKNLGLVIGRAKMNVFLLRALQLTEGRPELAAAVAPLLKAREAIEQQIADLDRKVLRLARNNAQVRRFMTAPGIGPITALCYLATIDDPTRFKRSSSVGAYAGLTARRYASGEVDWTGRISKCGDKMLRSYLYEAANVLLTRIAKWSALKAWGIRLAKRSGLRKAKVAVARKLAVILHRMWIEGTEFRWSSKEAANQPA

SEQ ID NO: 153276 - protein, 321 aa, unidentified
MANSAKAFQIGVDVSKHELVISVEGQTPFALENASKPIKAWLKSLPANCQIAMEATNDFHMVLTELAHVLGHRVYLLNGYRLNRYREGIGGRAKTDSADALLIVRYLQREADELRQWEPAAPGYRELQMLLHRRATVVRARTQIQQSLEGMSLLGNALKRLMKEIDKVERQIARLIQTTLQQAQWEGDWQRCQQVEGIGPITAAALTMAFKRGPFKDSDAFVAFIGMDVRVRDSGQKQGKRKLTKQGDPELRRLLYLAAMQAKRQPAWEGFYQRYIERGMAKVQALTILARKLARVAFALLRNQSEYDPLRRLQTQTLMPC

SEQ ID NO: 153277 - protein, 361 aa, unidentified
MTVLESLIVEALAGNVKLTADDDLFVGVDVLKKSYHVALFLNDAPAIDFVMPAKKEQLSQKLKTMLPALQKVVYETGPTGYSLARHMNQEKLPVSVVATSKIPRPSAGDDKTDKLNSRKLTQYASKGLLKSIAVPSPKQEADRQLYRMRHRQVRNLAKVKTQIKSFLLMHGLDEPAGLSYWSQNRIAQLQKLRLRKTLRLYLNELLNDLDYYSYRVKELNKFLAEHIDTGKLAQRMTLLKTHPGVGTVVACQFVTELFHYRDFNNTRQVYKYFGLSPKIFQSGNSCTRGSINKASNSRLRRNLIQAAWRWVAVDVKAKKIYLRLYNNCGRIKQKAIIAMARKLAGHLWMMLITSQPYDPNK

SEQ ID NO: 153278 - protein, 344 aa, unidentified
MSIVGVTGGVDTHADVHVAAAIDHNGGVLGIESFPTNEAGYENLVGWIASFGPIERVGVEGTGSYGVGLARFLTATGIDVVEVDRPNRHVRRRKGKSDPTDALAAARAALSGEASVVPKHRNGPVEQMRVLLVARRSARQQRIQTLNQLRHLVLTAPEPIRIRFKDRYKAGLVTEAANMRPRAGSDAVLFTTNVVIRDLARRIKALNTEMRNIDRMLIVLIGDTAPLLLALYGLGPDSAATLLVTAGDNPERLHSEQAWAHLCGVTPIPASSGKITRYRLNRGGDRNANAALLYRIVLTRMSSHDETRRYVTRRRAEGRSTPEIMRCLKRYVARQVFKHLPQAA

SEQ ID NO: 153279 - protein, 353 aa, unidentified
MDKYIGFDIDSKKVAVCVVESGKHDINATISSDVKAMGRFLLSQRQEGSRLHLAYEVSGYSGYLYDQLCECVDTITVSNPTKTTWIYRTAKKSDRIDARKLAVLLSIGELPSVHVPSKEVRQWRQMILHRRNVVSQVCSVKNRIRAVLKSAGHFVPGHRGGWWNKCNLAWMKSLAEGLEFWCMQLDHLLSQYEFLRKQVDATTAHLDAYLERQPGAVLLMSIPGIGPRTAEAVLAYTDGVERFGGSREYCSYFGLVPKLDQSGASRRVGHITKHGPSVVRWLLCEAAWKSVAKSPSLKAFYERVMGGDAKRKKIAIVAVSRKLLSIMRAMLTTGEMFNEKLVLEGNGRVEDAA

SEQ ID NO: 153280 - protein, 418 aa, unidentified
MLFVGDDWAEDHHDIEIVDSDGKRLGRARLPEGMAGMTRLHEMISEHLDDDAVDPETGMLAVGRVVVGIETDRGPWVNTLIAAGYQVFAINPMSAARYRERHTTSGAKSDPGDAHVLAEIVRLDRAHHRPVAGDSGEVEGLKLVARTHQSLIWDRTRHLQRLRQALREYYPGLLDALAAAKLELGDPDAWELIERAPDPDRAAQLSRSKITAILRRNRRRNTEARAEQIQTVLRAPTLRQPPAVQAAYATIAATQIHLLSALAGQIPALEEVLAQGFGRHPDAEIYTSQPGLGVVLGARVLAEFGDDPHRYRDAKARKNYAGTSPITRASGRKTVVLARYARNRRLGDAIHQWAFCALTSSPGARAYYDTLRGRGIGHHAALRQLGNRLVGILHGCLKTRTHYDESTAWAHHHTATAA

SEQ ID NO: 153281 - protein, 372 aa, unidentified
MNYNTVYVGMDVHKESFTLCSCKYEDEKASHYQRTPASYKNVLRYLAFLRTIYGEDTRFVCGYEAGCLGYSLYHQLENFNVECVILAPTTMLEQRSKRRIKTDKRDAEIIARSLAQHNYSPVHIPTETDNQTKEFIRMRDDHKAELKKIKQQILSFCLRQGYQYDGSGNWTAKHVKWLRSLKPAGLYKEILDEYLLTYTILTDKLNRLDQRIEELASKEEYKESVSKLTCFLGIKTHTALSVIVEVGDFQRFVSARKFAGYLGLVPGQHSSGDDRNGLGITKAGNTHVRRLLVESAQSYTRGKIGDKSRVLRSRQAGNSPQVINYADRANERLRRRYYKMVLKDGKKYNIAKTAIARELACFIWGMMTDNIY

SEQ ID NO: 153282 - protein, 399 aa, unidentified
MLAVGIDISKSKSVAAILNQDGSMHTSPFEFHHTQPELDAFIKYILNSNQSATILMENTGHYHYPVLKAFREAGLPVCMVNAYQIKKFGDMDLRKAKTDKKDAVRIARYALEKSYSLVPYTSMEQKYEDLRFLARQYNQRMLTLKTNKVFLLNLLDETMPGITNILPLTTRTPETSLSVLFINRFKSYDRIKKMGKSRFLDAFEKIARKSRNRQTKTYGLAIYEAALRNITTRGENEYTLAAQDQCLELVCESQKAADSIILKMQTLAETLPEYAVLRSMAGVGNRLGPLILAEIGDIRRFHSGKALNAYAGNDAPPYQSGTFESHNRHISKRGNAALRKYCFEVMQALKLTQPQDDPVYLFLLKKEQEGKPYNVAKMAGVNKFLRIYYARAMETLKQQ

SEQ ID NO: 153283 - protein, 436 aa, unidentified
MEQIYQRCCGIDIHKKILVACLIVLTADGHKHKEMRTFRTVTQELLQLLDWLQANNCTHVAMEATGVYWKPLFNLLEGHVQLLVVNAQHIKAVPGRKTDVRDAEWIADLLQHGLLKASFIPPAAQRDLRELTRYRTTLVEERARIVNRLQKTLEDTNLKLGDVVTDILGKSARAILDALLAGQTDPVTLADLARGRLKAKRAELEQALVGTLKPHHRFMLREQLAHIDSLDEAIVRVGAEIAVHMRPLEQAEQSETCADDAVPENQKQALTWAQAIVLLCSIPGISQRAAEGILAEIGIEMNRFPSAKHLASWAGMSPGNRESAGKRLSGKTNKGSPWLRKLLVEAAHAAAHTKNTYLAAQYRRIAARRGAKKAMIAVGHTILVMIFHILNTQKGYEDLGGNSFDEHDRQATEQRLVRRLQKLGYEVELKVAAPAA

SEQ ID NO: 153284 - protein, 358 aa, unidentified
MSQRNEISFKGKNIYVGIDVHLKSWTATILSESTHLKTYRLDPSPDVLYAYLSRTYPGANFHSVYEAGFSGYSAHWRLKELGVDNMVINPADVPTTGKEKLRKTDAVDSAKLARSLRNGELKPIYIPSRTAQELRSLTRLQASVTKDQTRIKNRIKGYMHFLGIDIPPRFSGAACWSHAFTSWLSSVATVTPHGKYVLDSHIGQLKTLRDERLSLLRQMRSIAKVDPLASQVALLRSIPGIGDITALRLIAEIIDINRFKDSNHLAGFVGIVPMCDKSGDDSAEDNGGITIRANRTLRGAIIEASWVAIRKDPALTYAYENYCKRMKGTDAIIKIARKLVNRIYFVMKHQAVYVPSIL

SEQ ID NO: 153285 - protein, 299 aa, unidentified
MEGAPMLDTTTFIGLDVHARSIKAVSLDVMTGEVRAATFGYDAGAVAEWVRSMDPRARCVYESGVTGFDLQKRLSGLGVDCAVGAVSKMIKPSADRRRKNDRNDAEFLARMLSVGNVVEVWVPDDECEAARDLTRALEDARDDLSRSKQRLSKFLLRHGLVFDERTPTGRRKGNWTRAHWSWIESIRFAERADNDVLAYYVDAVRRAAEEKARLEGLVEAEARKPRWRKRVDSLRCLKGVDTASAADLVFEAGEFSRFRNARSFAAWVGLTPSEHSSGESDRRGAITKAGNKALMRSQS

SEQ ID NO: 153286 - protein, 352 aa, unidentified
MDHFAGLDVSVKETSVCIVDETGKIVREVKVASEPQALLVVLKNPAYRFKQIGLEAGPLSQWLFSALTEADLPVICVETRHMRAVLKAQINKTDRNDARGMAQMMRVGLYRPVHVKTLRSQKLRMLLTHRKLLQPKAIAIENDLRGTLRNFGLKVGMAGRTKFEARIKELVEDLPDLAALVEPLLVVRRVLREQIAVLHRRLLAVVRDDAVCQRLMTVPGVGPVVALPYRATVDVPARFRKSKSVGAAFGLTCAKYQSGEIDRNGRISRCGDEMTRVMLYEAAQVMMYSKKWSWLKAWAMQIARRCGMKKAIVALARRLAVIMHRIWVDGTEFRWTREAVGGLTAVQHHQTQ

SEQ ID NO: 153287 - protein, 354 aa, unidentified
MRVIWVRNPLAYGFSNSKHGNFIILKFIAMQIYAIDVSKDYLDIFSKSDDGNSFQKRIKNSFNSICKFLEQMKSEDLICAEYTGVYTNLILHLTYLYKIKIALASGFDIKHSLGNRKGKSDQLDAERIWEYAFRFQDKLIFNLPDDEVMTEIKNLFNLRNQLAKALKTFSTSGTMLKQNPYHSIAEHEMREETLKYFQNQIKNTENQIFQIIEQSNEIIENFNLITSITGIGKVTALELIISTGNFKKIDSARKAAAYAGVCPYPNQSGNIAKKARIHFRANKKLKSLLHICAKTICVYNKEFRLYRERKMMEGKHFYLVMNNVANKLLRMVYAVINSKKAFDVALITKDPRLT

SEQ ID NO: 153288 - protein, 428 aa, unidentified
MDPRFAVDNVLALGVDPHRESLDVIAIRFPEEILLDAAFDNCPAGHGALWSQATTLAAEQDLVLVVGLEDGSNYGCTLGRYLANQGCPVKEVNPRMTNRQRDFYGQDKTNRLDALATAAIVLRAYDQLPDITPVQEALQATRELSRYREQLVKDQTITINRLQCHLANQYPAYKTFFSKVNGVTALHFWATYPTPAHLQGVTSEELAHFFFQTSHHRLGKVASRKKADQILQLLDDSPPQVPGLLTDVEATIITDLAQRLLQLGRSIETMEAKLADTLPATGQKLETFQGISTALAGVLVGETQDAARFNFDKDRYASYNGTAPATRGTGRHVRQVENRWCNRRLKSAFGQVALNARRCEPLSAEYYQACLDRGLTPAQAHKCLSRRLSDVLFAMMRDKTTYDPEIHRHKQMLHKMKGKSVAPTVAGG

SEQ ID NO: 153289 - protein, 356 aa, unidentified
MEYGAIDLHKKESQIRIVTEMGEIIDRRITTTRDRFTATFWGRPRMRILLEASTESEWVAQHLETLGHEVIVADPNYAPMYGQRNRRVKTDRRDVAALTEACQRGIYRLAHRRSARQRAVQSQLNVRQELVQARTRAISLARAITRAAGFRVRSGRTETFLTRLDALDLPEPMKATLLPLRSVIEVLDDELASADDQFAALVANDVTVKRLTTLPSIGPITASAFVAALDDVSRFTGAGQVTSYLGLVPREYSSGERQYRGRILRSAHPHVQSLLVQAAWRLSRSSSPDTAGLRTWALAITRRRGKKVAMVALARRLARILFAMWRDESEYHANRIRPTQLDPEAITGREARAAAM

SEQ ID NO: 153290 - protein, 347 aa, unidentified
MAFIGVDLHSNSFTVCRLDLDGPETFETYQLSELDIDRFCQSVDAADQIAVEATGNTAWFCGEIRPCVGRIVVVNPRKFQVIRKSVSKTDRNDARALAFFLSKDMLPEIRLKTVSEAELGSLVHTRDVLVKSRTMLINKIHAVHLRRGVKLKKESLTTRKRLRELDLSSFTPLEQVELGALRDQALSLTETLVGLDREIETAASALKGFEELSSIKGIGSRSAAILLAGIGNINDFESADKLAAYFGIVPRVSQSNDTDNRGRITKRGDKLVRTTLVQCTLIAKRYSGYLNTFYQRIKARRGSGKAIIATARKLLTIIYDTLKNGWVFEDFPNFKIKENQCPAGQPS

SEQ ID NO: 153291 - protein, 333 aa, unidentified
MKGLASYCGIDIAKQVISIHIENSDHQVICRKNLTRSKVLTFFSNLPACLIGIESCGGSQYWARELMKLGHDVRLMNARFIVPYRRKGKNDANDAEAICEAVTRPHMRFVSIKSEQQQSILMMHRLREQCVSQRRALINQMHGFLLEFGNSLPKGAKAVHRNMQAILDEEKLPSLAVEMLHNQMVALAQVEERESVLTKRITQWAESNEQAKALLALEGVGPLTASAIVATAGSAKPFKNGRQFAAWLGLVPKQRSSGGKAKLGGITKTGDSYLRKLLVQSARTVLLMANRGRGKNKEWVDQLVERRPTNVVAIAMAAKQARMAWAVMAGKVV

SEQ ID NO: 153292 - protein, 436 aa, unidentified
MGDLAILNPHAAFVDVGSEQMHVSIAGGEPKVFGTVTSQLEALRDWLLAQGATAVAMEATGVYWLPLYGILEEAGLELAMVNGRQTKNLPGRKTDMADCQWGATLHMHGLLRPGFVPTADIRRLQDYVRLRNDHVKAAAGQVQKMQQALERMNIKLHDAISSLTGVSGLAMVRAILAGERDPGRLLALCDVQIRHQKSAQVLEALRGTWSSEHLFALRQAVQIWEQYQSLIAECDREIQAILPQPPNEQPPKRAGLRKRLRGNAPKIPLLRSILMQMCGGHDLTTLPAQTEYSVLQILSEVGTDLTKWPTDKHFTSWLGLAPGSRQSGKRRANVKRSRNRAARYFCDIVRSLARSKDIALGAFYRRIKAHRGGLAANIATARKLAAWFWRAMVHGIDFVETGVLKYEATIAQNKQRTAQRLANELGFRLVPLQPQP

SEQ ID NO: 153293 - protein, 428 aa, unidentified
MKYTQNFKIEQVTEKTLVVGVDIAKKKHYARAFDWRGIELDKVISFDVNNTGFSEFLSWVNNVADENGKTKIIVGIEPTGHYWYTFAQPLIEESILLVQVNPFHVKRSKELDDNTPSKSDRKDPKVIAKLVIDGRYQIPYIPKGIYAELRNLYVLRMDQVKKITSVKNKVIRWLDMHFPEFLKVFSSWEGKTALITLKTMCTPSKIIKKDAEEILSIWRKEVKSGVGIKKAQKLLECAKQSVGIQEGIESIEFEMKIIMDEYERIAMVIADIDEKLENLVLQVPGAKNIVKIKGIGIITVAGFFAEVGDITRFTHPKQIIKLAGLNLRENSSGAYKGKTTISKRGRSRLRSLLYKAMMPMLATNQEFKALHRYNTIERENPLQKMQSLIALCGKMIRVVYKMITQNIEYDGKKMMEDIHRSEVVKDAA

SEQ ID NO: 153294 - protein, 408 aa, unidentified
MRIVGLDIHRVFAEAVMLDDGMVKRPGRIGMTRNHLAAFAKTLTHDDHVVVEATGNASAVADAIAPHVGRVVIANPRQVRMIAHAKIKTDTIDATVLAKLYASNFLPEVWVADACTLALRRQVTRRNQIVRQRARLKTIAQSILHAHLVPQCPHADLFGIKGRAWLLAQHLPEDELEALERHVREYDRIGDDLRVVERELARDALSDADVKRLMTIPGIDMVVAVGLTAAIGTISRFKTPDQLVSYMGLNPSVHQSGEGRAHHGRITKQGRTHARTMLVEAAWQAVRGPGPLRGFYQRVSARRGNHIAAVAVARKLAVIVWHMLQKGEDYACVRPTLHAKKLRDLELRSGQLARRGQRGSTYEYNLTRTRQEDKRRAEQAEVAYRRLTEGWTKRGRRVPTGAASEERR

SEQ ID NO: 153295 - protein, 361 aa, unidentified
MHPTTAAIDLAKNVFQVAFAESNHRVIETHRLTRSQFSRFFDNRHVDRIVMEACGSAHHWARTFSARGIEVMLLPPQYVRAYVRRNKTDAADAKALIEAARDCDLRPVRIKSIEQQALQALHRTRSLWMATRTARINALRGFCREFGLHIPVGARTGLEAIARAVADDQSQLPALLRPTLQLLLDEIRVLETRIAQTEKSLASAAADSNACTLLMTIPGIGLLSSTAIAAATAGSVAHFTSARHFASWFGITPKENSSGEVRRLGRISKKGDKYLRMLITHGARSVLRAATAAQHQGRTLSGIRRWAIELQARSNHNKATCALANKLARICYAVLRDQTAFGQPVRRLNKKIQQQAFSIAQ

SEQ ID NO: 153296 - protein, 417 aa, unidentified
MDVVYPRCCGLDIHKKLVVACRIVSGPTGARKEVRSFGTTTAAIEELASWLTDGEVTHVAMEATGVYWKPLFNLLEERFTLLLANAQHIKAVPGRKTDVKDCEWIADLLRHGLLRASFVPDRAQRELRELTRYRTSLVRERTAEVNRLQKLLEGANIKLGDVATDVLGRSGRAMLEALADGETDGVALAAHARGRLKAKRPALEAALRGSVGAHQRFLLRRQLDHVDYLDAAIQAVSEEIDRRLDELVAPSTPDVPDPRERLDSVPGVGRRIAEVLIAEIGLDMGQFPSAAHLASWAGLCPGNHQSAGKRRSGRTRKGSPWLRSALVEAAQAAARTRTYLAAQYRRVAARRGHKRAIVAVAYTILVIVYHLLRDGGTYRDLGPAYFDRRDRTLLQHRLVARLQRLGYSVHLEEALPA

SEQ ID NO: 153297 - protein, 340 aa, unidentified
MHTTIIGLDLAKNVFQLHAEDASGEVLWKKRLRREELEPYLRKQPPALIGMEACGSAHHWARVISALGHEVRLMHAKYVKAYVKRGKSDVRDAEAICEAVQRTNMRFVPIKSVEQQIDRSLERARELLVKQRTQLMNAARSLLAELGVVARAGLGGFKTLADKIDAGDAAIPERLLTAVKPLLEQWRGLQTSIDELEARLVKRARSDERMCRLMQIPGVGPLIAHALVTAIGDPRRFRTGRDFAAWIGLTPLTNNSAEKTRIGHISRQGDHSLRRLMVLGAANMARHAKARPNEARAWLLGVMARRPVKVAMIAQAAKTARIAWALMCSGEHYRASIAAA

SEQ ID NO: 153298 - protein, 452 aa, unidentified
MRQRIDAPVFPIFVYFIDCRRAVAQYLKNNNEIRGYFRAWEQRAACNVSPHVRRRAGWLALHCAGQRGLLAGCEPILSAGGRAMEQHREVFVGLDVAKLRHAVAVAEGGRDGEVRFFGEIDSDAEAVRRLVDKLEKRHTELHFCYEAGPTGYGLHRQITKLGHQCTVVAPSLIPRRPGDRVKTNRRDAIQLARLLRAGELTAVWVPDEAHEAMRDLVRARETAVDDLRRKRQMISSMMLRQGRLYPGKTTWGPRHIQWLQAQRFEHPAHHLILQDLLLAMKHARERQQRAEASIVEFLPKWSLAPVVEALQALRGVNLVAAVIVMVEVGDLRRFENPRQLMAYLGLVPGERSTGESIRRLGITKAGNGRVRRTLIESAWSYRHLPRTGKTKHYLVERVSPAVRDIAETAQKRLCGRYRALSTRGKKANVAITAIARELAGFIWAIGKEVQST

SEQ ID NO: 153299 - protein, 333 aa, unidentified
MQTAKKIVGIDVGKDWLDVCLPDGRKEHIRNTRSCRTKLIKKAAKLGAIVCFEATGPYEEPLADECLARSVKAVRLDAWGTRKFAESQGRLEKTDAIDCEMIRDYAASLKDEKLHFIKPRSEAQKRLKKSVRTRKNLLKARAIIANQFEDDLDPETARHLRNALKSLDKNIAKVEAECDSAIASDERLRELDRRFREVKGVGPCLSRIVLAQCPDIGDFNSKSIAKMCGNAPINHESCTIKYKAKPRRGRSDLKKALYMAAVSASRNNHILRDFYQRLVANGKPRKVALTAVSRRIAILLNTIAKHPDFKPAQDPKASAKAGGAKRGRPRKVK

SEQ ID NO: 153300 - protein, 341 aa, unidentified
MSIITVGIDLAKNVFAVHGVDDSGKPVLVKPKVSREHLLPLIAQLPACVIGMEACSGAHHWARQFRRYGHTVKLMAPKFVIPYRMSGKRGKNDAADAAAICEAVTRPNMRFVPVKEEHQQIILCLHRTRQGFIEERTALYNRLRGLIAEFGIVLPQKVTCLRREIGGHLEELPGYANQCVGDLLAHADRLDDRIADYDRAIAQAARDDERSKRLMQLPGIGPTTASALLASIGGGHDFANGRQVAAWIGLTPGQYSSGGKERLGRITKAGDSYLRSLLVMGARAVLNGLGDKQDRFSRWARSLVERRGYWRAVVAIAAKNARLAWAVLRYGEAFRLKPSVA

SEQ ID NO: 153301 - protein, 369 aa, unidentified
MKKIVKYVGLDVHKDSITIAIADQGRNGEVRIYGKIPNNLNQIDKFVRKLTSKNAQLHCVYEAGPCGYILYRHLTNKGIDCVVVAPALIPQKSGDRVKNDRRDATKLATLHRAGELTAVYVPDQEDEAIRDLVRARADFRTALRKVKQQINAFLLRHGIGYPGKTKWSKAHRTWLTTIKMAHPAQQIALTEYLDAMENKEARVTRITNQLESFCHTWRLRAVVQALQSMRGISFVSAVTIIAELGDLNRFDKPTQLMAYLGLVPSEYSTGNSIKKGGITKTGNTHARKALIESAQAYRLPARKSISILKRQQNVPEDVLAVSWDAQLRLCGRYRRLKARGKKHNVVITAIARELAGFIWSIARQVPLAV

SEQ ID NO: 153302 - protein, 430 aa, unidentified
MAAVMIGVDPHKGSHTAVAISPAEECLGELRVRASVAQAERLLAWAAAWPQRSWAIEGAGGLGHLLSQQLVAAGERVLDVQPKLGARVRLLATGDTNKNDPNDARSVAIAALGSPSRQEVTADDHAAVLKVWSKRHRDLGRTRTQVACRLHAVLCELIPGGVSKEITAGHAAQVLEAITPGRAVEATRCELAAAFLDDLRRIDAQLRDVKKKLDVAVRASGTTLIQIFGVGPVVAATVIGAVRNVSRFPGRDHFAAYNGTAPIEVSSGSRKIYRLSRRGNRRLNHVIHMAAVTQIRYRHSGGRAYYDASWPKARPRKKLCAPSSAASATLSSPGCKPTPAGLPQPRAQGAREGSRGTTLSPARPAHTPRHRLFGQATPGPATTLRPSQPPRPRRPARRPNRRFTAPLDTKRHRYERLMAGAGRGSGHPEW

SEQ ID NO: 153303 - protein, 325 aa, unidentified
MIAIATRAKPEIRDTPITIGIDVSKDHLDAALHPGSETRRFDNDAAGHTALRRWIGKRAVARIVFEATGIYHRALERRLSQAGLPVCKINPRQARRFAEATGTLAKTDRVDALMLARFGVALEPAIRPAPSEMQAELAELVAAREGLSRDRTRTLNRKAATQNGLLMRQTRHRLRQVEAQIAAIDKVVAALIDAEPVLARRRDILLSIPGVGATTAHALLANMPELGTMEEGQAGALAGLAPITRQSGTWQGKSFIRGGRAQLRRILYMPALVAIRHNPDLKRQYDALVARGKPAMLAITAVMRKLIVLANALVRHNRSWAPKTA

SEQ ID NO: 153304 - protein, 388 aa, unidentified
MNITTDQPEAPTAIRTELGAIFVSLELSRSSWLVTSLSPSGGEKMSKHAVRGGDVSRLLERFLQLREKARARTGKVFPLIVIQEAGLDGFWIDRVLQNEGIESHVVDPASIATSRRRRRAKTDKIDGETLVRSLLAYKRGEPRVCSMVKAPTPEEEDQRRLCRERKVLTAERVLHVNRIKGLLFCQGICGYEPLRRDRRDRLEELQTGDGRPLPPHLKAQVERELDRLELLLTQIKTVEGERDALLAVAITSMPAPAAMLLDIKGIGPEFAAVLWSEGLFRHFDNRRQVAAYAGLAPTPWQSGAIDREQGVSKAGNPRLRTTLIQLAWLWLRNQPQSALTIWFHERVLRNGGRLRKTTIVALARKLLVALWKYVTTGVVIEGAAMKAP

SEQ ID NO: 153305 - protein, 422 aa, unidentified
MSYCPVAGIDVSKQFSDMCILSPDNKIFAQEKIYHDETSINRANALLQKAERLFFSKPVIVMESTSHYHLILFQFFSEHGYDVIVVNPLQSNSMKDFSIRKRKTDRVDAFKLAMMYRTKTLRPSQIPQTATRALRQLCRHRAELLNDVSSYKNRLTALLDQTFPGYDKVFSDVGGVTSCAVLVRFPTPTILLVEEESELVEVIAAASKSGYSFAKKKAGLLISAAQKAQTLGIHSCADETLIVCTIQMLRTLSESVLQIETAIDNLMAQIKEMRNNVSLLQSIPGVGSHSAALLLGEIGDISLFKKPKQLAAYFGLDPTERQSGSFRGTKNKLSKRGSPYARAALHMGVVNSICKRRKDSAANPVLLSYYEKKCKNKPAKVAQAASMHKLVFIIFAVLRDQKPFELKTPEQHAVEQGFVKAA

SEQ ID NO: 153306 - protein, 403 aa, unidentified
MSICYAGLDWASRTHAACVIAADGSVRTQFEINHDAAGLAELRRRFTASGVTTVAIERPSGLIVDALVEGGFTVVPIHPNVVKATRPRYRSHGGKSDAGDAYLLADLLRTDGHRFTPLAPQSDDIRALRALVRGRDDLVATRVQLANQLRSLLQSFWPGAAEIFADIDSPIALAFLVRYPTPETATRLGPKRLAAFCAQHAYCGRRSATELLARLHEAPAVNHGELEVDAKGELTLCLARTLSRLVDQIRLLTARIEHHVANSDDGQIVMSFPRAGRICAAQILAELGNVRERFPSDQQLAAEAGVAPVTYASGKTKAVTFRWACNHRLRLALTCLADNSRHANAWAAHVYGQARARGCDHPHAVRILARAWLRVLWRAWIDRKPYDPTQHRAAQLLLNTARG

SEQ ID NO: 153307 - protein, 379 aa, unidentified
MGKGIGYVGLDVHKETIAVAVAEADGSVVDLGIIANRPETVKRLVKKLGPVEKLRVCYEAGPCGYVLYWQMTGLNVGCEVVAPSLIPGKPGDRVKTDRRDAKKLAWMYRAGLLTAVWVPDAEHEALRDLVRAREAAKKDELRARHRLGKFLLRTGHRAPEGVEAWTKRHGEWLRGLRLEHLAQEVVFSDYLHEVDHAGERLVRLERAIDEAVERVPAAGRAVIEGLEALRGVSKVVAVTVYSEVGELSRFERPTLLMGYTGLVSSEHSSGSRIWRGAITKTGNAHLRRVLVQSAWAYCRRPNLSPALKKRQAVVSEEVKEISWKAQHRLYGRYRRLVSKGKLPQQAITAVARELVGFIWGIGVHVEGQMRKENQGHAAA

SEQ ID NO: 153308 - protein, 339 aa, unidentified
MSEDTVIGLDIAQQIFQAHAVDVRTGEIVRTRLRRQQVLEFFAQQPPQRVAMEACGSAHWWARQLSALGHRVTLLPPRLVRPFVLRNKTDAADAQAIWTAARQPGLKAVAIKTPLQQSILALHRLRSQLLKMRIMQSNALRGLLYEFGVILPESYRALRQQLPARWADLERELPAFLLESLRERWARVGELDAQIAALDRRLERICEHDPHCKALSAIPGVGVLTATASVAAMGDPNSFRSGREFAAWLGLVPRQTGTGGRVRQLGISKRGDAYLRTLLMHAARAVIVRRPHSPWLSALLKRRPFNVVVAALANKLARTIWAVLAHGRSYQPPASAAVA

SEQ ID NO: 153309 - protein, 352 aa, unidentified
MPVLHYIAMDTHSYTTEICVKTRANGPARRWNVPTTIPAIREVIESIKRPRQLTFEEGPLAAWLYRNLKDAADRTLVCDPRKNAWISKGGDKDDPIDAGKLVDLLAGGFLKAVHQTEDLSREVFKQLVGRYHERVARRVSESNKIIGWLRRWGVMVTARDFAEKSLRAELLGRLPADAELEPVRIGLELMFCGFDHAVRQETRLRRELIKRAKKEEFIVRLEELPGISWIRASTFFVYVDTPWRFAGKPALWKYMGIGLTRNTSGNGPQSLHVERKINRRLKSMILGAAKTVLERNGPDDPFAQQHRRWKESGLSPRNARRNVARNLAAVAWGMWKNGGVYEPKRIGMKSSE

SEQ ID NO: 153310 - protein, 399 aa, unidentified
MTPDDIDVWVGLDVGKSAHHAHALDHDGNTLYDKPLKQDEKAIRTMLGKLSKHGRVLLVVDQPNTIGSLPLTVARNMGIAVAYLPGTAMRRTAQLLPGDAKTDRRDAHVIAWAALKLPETLRDAGPDDETLAALKLLAGHDEDLAHESTRHVNRLRSLLLQTHPAFERALKGERITRDATLALLERYGGPMGVKRAGIEDVKDWAKSNGLRAGRIIDDMFKAIGEQTVTVPGTLMAETIIPSIAHDIKTIRDRRREVGRQVEKLLEDHPLLTVLTSMPGIGVRTASSILLGIGGDIANFKSSAHLAAYAGISPVTGQSGTSIKGERPSRRGNKRLKNALWQTAFVASTKHPPSVAYYKRKREQGKHHNAAIICLARRRCDVIYSMLKNGTLYQEPALVA

SEQ ID NO: 153311 - protein, 395 aa, unidentified
MFIVGIDIAKRSHEAIIIAEDGQVVRKAFSFRNNCTGYNLLLEQVRRLTLVKSQIVFAMESTAHYWLALYARLLKDGYTVMVLNPIQSHSLRELYIRKAKTDARDSLVIADLVRFDRCKASNVPQDKILALRELCRSRAYLVDMAADLKRKLIALLDRIFPEYESLFDSVFSKASIAVLSKYSTPQKVKNANLRKLTDLLMKSSNGHFGEWKAHQLKEAACSSFGIDDSGGVYSTLLGMFLEQILSLTAQADSLEKQISVFFQEFNNPLTSIPGVGTVLAATILSEIGDITRFSSADKLLAYAGLDPSVKQSGEFKSNQNRMSKRGSLYLRRAIWLASTVAVHRDPMFQTYYEKKISEGLHYMNVIGHVSRKMTAVIFAVLRDGQPYQPILQSAG

SEQ ID NO: 153312 - protein, 315 aa, unidentified
MEAAAVVVGIDVSKRTLEVALSDGGGFRVTNDEDGISELLARLRPSGAALVVLEASGGYERAAYLALWEAGVPTALINPRDAYHFAQAHRQLAKTDQLDARGLCEFGLRMQPQPLPPPEAADEQLKALAVRRRQVIKMLAAERTRVQQAPRAVRPSVKRMVRALARELGAVDHQIEQRLRDNPRLAQRCAQLEQVPGLGPVTCAILVSRLPELGRLGPKQVAALVGVAPYDHQSGQWRGRSPIFGGRAEVRSALYMATLSAIRCNPLLRSFYHRLRAAGKPAKVAIIAAMRKLLVILNAMLKTNSPWSPPCAITT

SEQ ID NO: 153313 - protein, 346 aa, unidentified
MEHYAGIDVSLELSSVCVVDAQGKIVKEAKVASEPEAVVAFFEALGFAVKRIGLEAGPLSQWLHAGLKEAGFETVLLETRHVKAALSAMTVKTDRKDARGLAQLLRMGWFQQVHAKSMASQEVRALLVGRKQLLGRLIDVELSIRGILRGFGLKVGAVTRKGFEARIRELVTGQATLERIAEAMLSARAALKAEYEKLHKAVLAIVREDAVCRRLMTVPSVGPLVAITYKSAMDDPSRIAKSKAAGALFGLTPKKYQSGEKDVTGGITRTGDEMVRTALYEAANVLLSRITRFSKLKRWGMDVAKRRGSKRAKVALARKIGVILHRMWIDGTTYRWAEAKPIAAQA

SEQ ID NO: 153314 - protein, 351 aa, unidentified
MIIIGVDYHPSFQQIAFMDQETGECGERELNHSDGEAERFYRELKERGVSVRAGMEATGHARWFERLLAELGFELWIGDPAEIKTKRVRKQKTDREDARLMLKLLLENRFPRIWVPSPENRDLRQLLWHRHRLVQMRTRIMNQLQAVAMNEGYRWKKKLFGQQGRALLEKLPLAPWASRRRKELLELLDQLDPKIAELTAAVEREANKRPEVVRLMTHPGVGPITGVAYVLVMGTPDRFPCGKKIGSYTGLIPCEDSSAGRQRLGHISKQGNTLLRFLLVEAAQAAARCNADWRRRYMHLMMRREKRIAKVAMARKLAVRLYWMWRNNWQYSQLVEFGSNAGKLGIVHGMK

SEQ ID NO: 153315 - protein, 344 aa, unidentified
MKHYAGLDVSVKETSICIVDEAGRICREMKVVSHPEDLLAVLCDPAWRLERVGLEAGPLSQWLFSGLAEAGVPAICIETRHAKAFLKAQVNKSDRNDARGIAQMMRVGLFQPVHVKTLASQKRRALLAARKILQEKALAIENDIRGLLRNFGLKVGIVGVVGFEQRIHDLVEGVPKLADIMEPLLAARRVLREKFAKLHRKVLLLARDNEVCQRLMTIPGVGPVVSLAFISTVDVPARFRNSKAVGPSLGLTPVLNQSGESHRVGRISLCGDEAMRALLYEAAQVMLTRVQKWSWLKAWAMNIAKRRGQKKAIVALARRLAVIMHRMWSDGTEFRWTREMAPTI

SEQ ID NO: 153316 - protein, 385 aa, unidentified
MPHTLIAHSTLDYHRTLVLAIELSNKSWVLAAQVPGLPHAKAKQTIEPTAEALMAAIDGYRSRANAAGCFVERVIATYEAGWSGFWLVRWLARRDVETHVIQPSSVPVDRRARRAKSDGIDAELLLRTLLAWLRGEPRVCSMVPIPSEADEDARRSIRERSELVAERVGLVNRIGAVLATLGASNYDPLRRDRRQRLEELRTALGDPLPVNAHAKIVRMLDRLELLLEQIAELNRLRDAVLNDDVPDKAGEMIQQLAALRGIGVQSATVLVREAFVRHFANGKALASYAGLAATPYSSGSSNREQGIGKAGNRRLRTVMVELAWLWQRYQPGSAHVRWYRERAGATGARMRKVMVVALARKLLVALWRFVTQGVVPEGAAMKPVS

SEQ ID NO: 153317 - protein, 319 aa, unidentified
MNRVIIGIDISKRKFDAAYKNIDQKWQRGTFENTSEGFKIFLKFLSENKVKKCHVVMEATGRYGEDLTNFLYGSGHTISIVNPAQIKYYGRSLLKRSKTDKVDSQLIAEFAGRHELSEWKPLSPSLQTLKDQTRCLEAFKRDATQTGNRLEHAKDSIVKKMLQARLAHIRKQIDKLTLSLQNLAKEDSLIAHQMALLTSIPGVGEITALHLLGELPDLSTFKCAKQLAAFAGLNPSIKTSGTSVRGKEAISKTGRKELRTLLFFPSMTVMRGSSSIKLFVERLRGKGKKGKVIVTAVMRKILHIVFGVLKRQTPFQGAV

SEQ ID NO: 153318 - protein, 388 aa, unidentified
MDAVLPRIAEQTAIQTQLGAIFVSLELSRSTWLVTSLSPGGGEKMSKHSVRAGDVMGLQERFWSLKQKARARTGHDFPIIAIQEAGLDGFWVHRVLIAEGIESWVVDPASIATSRRRRRAKTDKIDGEALVRALLAYKRGEPRVCAMVRVPTPEEEDRRRIGRERKTLVGERTEHVNRIKGLLYSQGVSGYEPLRRDRRAQLDELRTGDGRPLPQYIAAQIGRELDRLELLLQQIKAVEADRDALVIPGKADNPISPQVAMLIGLRGIGPEFANVLHSEGLFRHFANRRQVAAYSGLAPTPWQSGSVDRQQGVSKSGNPRLRTAMVELAWLWTRHQPESALSKWFRERTKTDSRRKATIIALARKLLVALWKYVTAGVVIEGAVMKAV

SEQ ID NO: 153319 - protein, 357 aa, unidentified
MEGLDEERRDAPVFLGVDTHSEAHVAVALDGAGGRLGELVVPNDRAGYARLWDWAMSLGILVAAGVEGTGSYGAGLSRFLRARGASVQEVNRTSRQHRRRHGKHDAGDAEAAARQVLSGTAAGEPKGADGAAESLRALRVARRSAVKAKTQAANQLHALLSTAPDELREGLGGLPTKHLAAKASRFRCGAGPVDPARATKLAMRSVARRHQALSGEIAELDAHIEALVEEAAPELVALEGVGPDTAAALLIAAGDNPERLKSEASFAHLCGTAPVPASSGKLVRHRLNPGGNRDANRALHVVALNRLRRDPRTQEYLARRTAEGKSKKEALRCLKRYIARETYRAVLLDAGARRPPG

SEQ ID NO: 153320 - protein, 429 aa, unidentified
MPYRIAGIDVHKKMLAVVVSNVEVESEFQFERRMFGSNPEQLRSLAAWLLEQEVEEVVMESTAQYWKPVWETLERYWKPIREKREDARRRSGTLHLAQALSNRGRRGRKKDFLDAERLVKRLVARELTLSFVPDAEQRLWRTVTRRKYQLTRDRARLQNQVESLLEEAHIKLSSLVSDLLGASARHMLKALADGETNPAALAALADKQLRATPEQLCDALGACTELNPVYRRLLKMALEQLQFLEQQIGDLDQETASLLRQHQDAVERLAEVPGLGVDSATQIIAEVGPTAATFPSGKHLSSWVGACPGDEESAGVNYSHRSPQGNRHMRRLLNQAANAAVKVKGSIFEIVYRRSVPRLGHNQVIGAIAHRQCRLIWLILHQGVRYEEHGPAVTKQSRQARTARMIRQLRKLGYQVELPNSQPANSAGR

SEQ ID NO: 153321 - protein, 387 aa, unidentified
MTVLTVNNLPAATHGETVRCLFAIELSKMSWVIAFNTPLSEKISRRTLTGCKWKRLLELIEEVRARVSRETGRAVEVVSCYEAGYDGFWLHRQLEAHGIRNYVIDPASLQVDRRARRVKTDRIDTERLLRSLMAYLRGEPKVWSVVRVPSVAEEDARRLHRERDRLVSERVQHVNRIKGLCALQGIYDYNPLRPQAMARLEQMRTTQGGALPPRLKSEIKRELQRLELVVEMIAALETERDAIVEDEASTHVNAKKIQNLHKLKAIGPEFAAVLVGEIFHRDFNNRRQLASYVGFAPSPFQSGSVAHDQGISKAGNRKGRTTGIELAWLWLRYQPDSDLSGWFRARVGTTKGRIRRIAIVALARKLLVALWRYLETGVVPRGAVLKG

SEQ ID NO: 153322 - protein, 346 aa, unidentified
MEHYAGIDVSLELSSVCVVDGRGKIVKEAKVASEPEALVYFLKELGFAVDRIGLEAGPLSQWLHAGLTQAGFETVLLETRHVKAALSAMTVKTDRKDACGLAQLLRMGWFQQVHAKSIGSQEIRALLVARKQLLGRLLDVELSIRGILRGFGLKVGQVTRKTFEARIRELVTGHTTLERIAEAMLPARATLKAQYEKLHKAVLAIVREDVVCRRLMTVPGVGPLVAVTFKSAVDDPSRIAKSKAVGALFGLTPRKYQSGEKDVTGGITRTGDEMVRTALYEAANVLLSRITRFSKLKRWGMDVAKRRGSKRAKVALARKIGVILHRMWIDGTTYRWAEAKPIAAQG

SEQ ID NO: 153323 - protein, 402 aa, unidentified
MNAVGIDVSKGKSMIAVMRPFGEVVTSPFEVNHTTEELSKLAEMLRNLDGETKIVMECTGSYYLPIAYALNESELFVSTVNPIITHKYDNNSIRKSKNDKADAIKIANYTLTNWLKLQQFIPEEDVRHMLKVYSRQYNKYKKILTMLKNNLISLLDSTFPGANELFTSPPRKSDGHEKWVDFVAHFWHCKCISSFSEKAFVERYRKWCKCAGYYFSQAKAEDLYIDALGHLFIIPMTETTKCLITQATSQINTISETINTLAGEMKSLATSLPEYPVVIEFRGVGEILAPQLIAEIGDIYRYFQKSSLVRYAGLEPVENQSGKFRGGESISKQGSPHLRKTLFQVMDCLLKHAPADDPIFQFLDRKRSEGKHYRSYMCAGSAKFLRVYYARVREYLEKHCVD

SEQ ID NO: 153324 - protein, 408 aa, unidentified
MSIVFGIDVSSRDSSVCVLQSGVTREYKITNDTIGFKTLLIDLKEYAEHPQIILEATGIYSRRITRFLDEYDYDYVLLNPLKAKKEINQGLRRNKTDRNDAYHLALAQDRNQHQPNRKEPEAYHQLQSLSRAYEELTHDIVSSKNRLHKYLQLTFPELETIFNNSRGVNYWYLVELFPHCQDVRNLDVSTIAKQIKDFKGYGINRAQKLAIKLKHLADLAYPAVDQDDPERDEVVYYANRLLRLTADRERRSEAMIKLAKTLPNRDLEILMSIPGIAEITAVRILAELGDIRRFSNPNKINAFVGIDPGRYQSGEKDSSLRISKHGNAVARKILYRAIGQIDLAAKTSPCHIADYYERKKQFSQTKGFKKIAIASIHKLLRTVYILITTDQMYDYNVANNNQKDFCRN

SEQ ID NO: 153325 - protein, 429 aa, unidentified
MNDVTDSLALFRKMKASVRGSEKYLLVGIDVAKNKHHAFFGTPNGRTLRKNMVFDNNLKGFENLRGLAGDLKSQHGLAEIVYGLEPTASYHKPLAEYLLRQKEQVVYVSNVAVVKNRGLLDGRWDKNDKKDAANVADLLSQSRCLFYELPQEDLRELRSLIGFRIKLKKEEHALKMRLRNNVFAQFFPELDQLYIKAGQPDDLILSIAEHCLDPREIAAMEFDAFLKLITQRKIRIEQEKRLRELWEIAGKSVGCLVHDAARWEAKSLVTQLKSVRETVKGNEQLMAKTAKQFAEYECLLSIPGFGPIVSAMVLAAIGNPCRFQNQGQVVRLAGLDLSAERSGKNSNSAKPVISKQGKAALRYALVQAAMVASTANPVIRSYFSKLIKGRELERGINLKMKVKLAAKLLIVAWTLMKKREQFKASCFTG

SEQ ID NO: 153326 - protein, 357 aa, unidentified
MNTAQTTQTTSTTIGIDLGDKSNETCTLNEAGEIIDRGSVLTNQAELIRFSKANRGATIIMEAGSHSPWISRLLEGRGHKVIVANPRKLRAIYDTDNKNDQRDAELLARIGRFDRKLLYGIEHKSELHQRALKIIDARDALVCARVKLINHVRGSLKSLGIFLPSGCSTETFARKATEHLEARDYALVAPVLETIAELTERIKSEDKHIDTMIKEDYPEAQRLLEIPGVGPITALAFVLIVGSPDRFKTARDVGPFLGLVPGRDQSGDSDRPKRITKAGNRMLRRLLVSCAQYQLGPFGPESALKQAGERKAKKGTKIAKRKAVVMTARKLAVMMLALWKDPEARYLPFPQPTKRAA

SEQ ID NO: 153327 - protein, 397 aa, unidentified
METIRDRVAGLDVHRDRVLACVRIVDGGGRVKTFKRSFSTMTADLVGLGDWLNDQAVTTAVMESTGVYWKPVYYGLESMINELWLVNATHVKRVPGRKTDVSDAEWLADVAAHGMVRPSYVPPIPIRELRELTRYRKTQVDARVREIQRLEKLLQDAGIKLSSVASGTWSQSARAMIEAMIAGERDPATLAELSKSRMRAKKDRLELALVGNFGAHHGVVARQIIDHIDFLDASITALSQEIAERLAGLDPVIDQLRQIPGWGRTTAEVFIAETGGDMSVFPSPGQLVSWAGVAPGTNESAGRRKPAASLHGNRWLGRALIEAARAAARTKGTFLGARYRRLAARRGPNRASVAIAHSMIVIAWHMLTNGENYRELGEDYYSDGGQEVPVGAAGVEE

SEQ ID NO: 153328 - protein, 321 aa, unidentified
MNKSTIFIGIDISKDTFDIYDPIQGHCQFTNNVKGFRSFYKTLSSDHWCVMEATGCYHQQLALFLFDKSIRVTVMNPLVIKRFIQMKLNQIKTDKSDAKMICQYGQEQDMELWHPSPQYVEDCKQLQTITQLYFKQSTAIKNKMHTLQTRGFNRGKMMSSLKRQLKSIQKEIKLLESEMEQLIKANQQDLYTKLNTIPGIGKKTAILLIVTTNGFKDFESSRQISSYLGLAPNERSSGSSIRGKTRISKTGNPIVRNHLFLCSFTASIHNPQCKALYDRIVAKGKSKKLALIAVCNKLIKQAYGISKSGLPYDKNYVSKLA

SEQ ID NO: 153329 - protein, 462 aa, unidentified
MPGREDSETGESSRRQLQGLPVIRRNVAGIDLGSERHWVCAPTRDGSGREIASFGATTAELLRLAGWLKARQVESVAMESTGVYWIAPHEVLEAQALQVLLVDTRQLARVPGRDKKSDPSDCEWIQRLHSCGLLRGSFRPEEAVCMLRTLVRDKANLVAESGDWLRRMQKSLDQMNVRVHRAVSDIDGVTGMAMLRAIAAGERDAQKLAQLRDRRCSKTQQEIAEQLTGHWREDHLFSLQQALKMYDAVQERIAAYEQEILRQLGAMEEPGQQGQTAPPLHNANKTKAIKKRGQESKRQALYRMSGVDITQIDALGVETVEVVLSEYGPDLSRFPTEKEFVAHVTLAPRVPSSGGKPLKKKKRNSASTRVAAALRMAALSLRHSQTALGAYYRKLAQRLGGDVAVFATARKLATLIYRLLRWGQPYVDEGAAAYENRYLQQRIKSLTAKAKQLGYELTAVNA

SEQ ID NO: 153330 - protein, 407 aa, unidentified
MDIVIERACGMDVHKANITACIITPKGKEIQTFSTKTVFLLQLVDWVKQHSCTHVAMESTSVYWKPIVNLLEAEDIEFLVVNAQHMKAVPGRKTDVKDAEWIAKLLRHGLLKASYIPDRNQRELSELVRYRRSIIEERARQHNRIQKVLEGANIKLGSVVSDVLGVSSRDMLNAIVEGEEDPEKLANFARRTMKKKKDELMLALKGYINSHQRLMLKTILKHIDFLTEQIEMLDQEVAERVSTHQEDIERLDSIPGIANRMAEQILSEIGTNVKDQFPSAAHMCSWAGLVPGHNESAGKRKSAKTKKGNKYLRSALTEAAHSVRGSKNYLGALYRRTASRKGKKRAGIVVAHAMLRISYYLLTRKEMYVDLGEDYFDKQRQQSIVRHSLRRLESLGYTVSLQEPEAS

SEQ ID NO: 153331 - protein, 400 aa, unidentified
MFVGWDWASTTHDVTVIDDAGNIVDRWAPEHTELGLDATMARLTRHGPPEQLPVAIERPSGLVVDRLLAAGHPVIPIHPNAFHAARPRWGAAAAKSDPGDSFKLADYLRTDGHRLRRLRPLDAATRELQALSRLRDDHVAAKTAASNQLGALLDAHWPGAKQVFSRLGSQIALAFLDAYPTPESAARLGEARLTGFCRRHSYRGGRRPAELLGRLRSAPAAPVGLAPEVLAELVAAQVRLLRTLLGTIAELDRALGAGLLGHAKAGLLAPLPRIGEVSLAQVVAEVGPILDRASTVEHATAECGAAPVTKASGKSKAVTFRWAANTKARNALATFASNSRHSSPWAAKVYADARRRGKHHPHAVRILARAWLRVMWACWHNDTIYDPARHGAERRLAART

SEQ ID NO: 153332 - protein, 356 aa, unidentified
MNTRKVQDFVVKGKEIFVGLEDSKKTWKIAVRCEKMLIHRVSMEAKYSVLIRYLRNKFPECTIHLIYEAGFKGFSLYDRITEDGIDCVVIPPHMVTEPKVNRVKTDKRDANRLALVLENHDFKDACHVPDKERREDRQISRTLIGIQKDIIRTRNRIRKFLDFHGIVVSFSDRWSKKEFQALKELPLSQPLKTSLDVLLTVLEQLWAHQVSLRAALRQLCRKERYLKAFTIARSLPGIGWFTGIRLVLELGEDLSRFTSGKKIASFVGLTCSEYSSGETEWKGRITGMGSGFIRSTLIENSWAAIRKDPVLLSKFMRIWRTSGSKKKAIVAVARMLIVRLRACVLCGTPYATGVVR

SEQ ID NO: 153333 - protein, 344 aa, unidentified
MDISTIGLDLAKSVFQVHGVDASGAVVVRKTLRRSQVLPFFTKLPPCLIGVEACGTSHHWARELIALGHEVRLMPPAYVKPYVKRGKTDANDAEAICEAVSRPTMRFVAVKSPEQQATLALHRTRNLLVKQRTQLVNMIRGLLAEFGIDIPRGLERAVTMARQITDGEILDVPDEAATAIALLCKQVLDAHERLRAIDRAMLASQRSSDLATRLATIPGIGPVGASALAAAVADPHQFRSGREFAAWLGLTPLQKSSGGKERQGRISKMGDKYLRKLLIVGMTSLVRRAKYKPESVDPYVADLLARKPVRVATVAMANKTARVAWAIMTRGGTYRAPAPRLLAA

SEQ ID NO: 153334 - protein, 338 aa, unidentified
MYYTGIDLHKKTSFITTIDAAGKIVTRANLQNVEEDILAYFAALDKGTKIVIESMASWYWLYDLLTGEGFEVAISNPVKTKAIASAKIKNDKLDSHMLAQLLRADLIATVHVSSLETRKLKELLRHRSKLVRDATRMKNRIHMLLMKNNFRSPFSDLFGVKGLRYLEEIDLPDYHRQNVETYLLLYEKLQEQIEPLTKRVRALAKENHTAQLLMTIPGIGPITAMFIIAEVDDISRFRSYRNLASYAGLVPSLDASAGKEKRGRITKQGSRYLRTALVEAAQAAARMQNCRLRVFFRRRIVKSGYQKAIVATAHKILQYAFYVWKNQTPYRETYPVCA

SEQ ID NO: 153335 - protein, 382 aa, unidentified
MDLIHSCCAGLDVHKKTVVACIRRTGPDGRVDRQVRTFGTMTADLLALADWLAAADVRQVAMESTGVYWKPVFHLLEDRFEVVLVNAHHIKQVPGRKTDVKDAQWIAQLLQYGLLRPSFIPPPPIRELRDLTRQRAQRVRDRAAVANRVQKVLEDANIKLASVASDPLGVSGRAMIRAMIAGEQDADKLAELARRRLRGKIPELKRALQGRVTAHHRFLLRMLLGQIEALEGLIAQFDDRIGVVMAPFVEAARRLEAIPGVGPQAAEVIVAEIGTDMTKFPTAGHLASWAGLCPGNDESAGKRRSGKTTKGSQWLRAVLVQVAWSASHTRETIFSAAYRKWAKRMGKKKALVALGHKILVVIYQLLKDQTQYQERAKPAQAA

SEQ ID NO: 153336 - protein, 343 aa, unidentified
MEVAIGIDTHKGSLAAAAVDALGRVLGVREFTNDPTGHRSLLRWVTEQGQPCTVGIEGSLSYGSAAARALLAQGEDVREVAPSLTHLERRRRSKGKSDPVDAVAIARVVAADETLPSARRTALLGDLKLLVDYHDQLIRARTQVANRVHANMVVIRPGYEQVVPNLRAKRHVTKARSLISRDRSVQAELLRRRLGEILRLEAEIAEADRRLVDKLDEADTTLTQIPGVGPFIAAKILGEVGEISRIRSKASFAMLSGTAPIIASSGQTHRHRLNRRGNRQLNWALHYVALVQSRSTLEAKAYLARQREAGKSHKEAMRCLKRHLSNVVYRHLLIDARRLEQAA

SEQ ID NO: 153337 - protein, 400 aa, unidentified
MDTEVQATVDVWVGVDVGKKDHHAVALDASGKVLFDRSLPQDEQHLRQLITGLKVHGTVLFVVDQPATIGALPLAVARDEGVPIGYLPGLAMRRIADLHAGEAKTDARDAAIIAQAARSMPHALRSLPTDDDQSSELAMLAGFDEDLAEQINQVSNRIRGLLTHIHPALERAIGPNLQHPAVLDLLQRYPSPAAMRAAGRRRLEARLVKLAPRIAGRLAASIVAALGEQTVVVAGTQAAGQVLPRLAEQLATLHRQRREIGTQVEAMVDAHPLCQVLTSMPGIGFRTAAVILVEVCGKDFATAGHLAAYAGLAPVTRRSGTSIRGEQQSRRGNKRLKRILYLSAFSALKDPPSRAYYDRKRSERKSHTQALVALARRRCDVLFAMLRDGATYDAEHALVA

SEQ ID NO: 153338 - protein, 342 aa, unidentified
MNGDYDGRQYVGVDLHRRRSVIVRMTPDGEQLGWVRIDNDPVALGLELAKAGPDPEVVLEATYGWYWAVDVLQSVGAQVHLAHPLGVKGFAYRRVKNDVRDAADLADLLRMGRLPEAYIATPHERELRELVRHRAKLVALRSGLKAQVHGVLAKQGLLPEVSDVFGPTGQAWLRTAPLDLVYRQRINSLLELIDAYDGEIDLFRQMIAHRFTGHRGYRVIQQISGVGPTFAAVFVAEIGDVSRFNRPEKLCCWAGLTPRHRESDTTVHRGPITKQGSKLVRWAAIEACQRTRPGSKLAADRTRIITARGRNIGVVAAARRLLTLVYYGLRDGEIRSLARGAA

SEQ ID NO: 153339 - protein, 513 aa, unidentified
MEIANATGDRSGLVKHLPALREQWLVTSVTERNGQAQRVDRGGGEMEKAIGIDPDATGFVCAVVDGQSERPATERFSVAAEGLEEFIRWTKAQGECIVALEGIHGQSRPIERALREAGVVFHSFKPSDTDKFRKAVLGQNKNNERDAESVARFALALKGQGKLERFRRVWEPNMELQLLTRRHESVGKQLTAEGNRMWKLLRQASPDLYLSLAGKVEGVDCPPGVLRNEGILTLLATKPQIGEWDGLSEDELMQGMGGGEYKGRRSFLRQLGTVTSSFPQISRPMAFIIGSSAEQLRQLRREQTQIKRMLVQITEELASVQALKQTAGIGSITASMMMAEIIDIRRFPSEDNLAGYTGLGRVEHSTGDRERMVSPRTYNRRLKDAFMTAAQNVVRYDPNCHLAGYHRNLVKAGMKRTEATKRVARALVRVIYRTLTALIELDQEAQPDEVQQEGQRGVASGERRGDKKHLSNTPAPSPKISRPSPRRQVKRTAKQTGSVTDTKRKRPPIRKTA

SEQ ID NO: 153340 - protein, 344 aa, unidentified
MEHKFKLIFGIDISKLTLDVSYFFEKKKEYIQVSNDAKGISKLVQMIGELGVCEPDVLVCCENTGNYMDKLAFVMKGLSVTFWVIHPVIMKSYRLNLQRAKSDKVDSDKIAEFALAHQHKAVSYHHPDQKTREMKELYLLRRQLVGLRQKTLNFIASEKDKAVPGIMNTLVYEQIISLLSDLVKEVEKSIKLLIKSEKSISTFYTILKSISGIGDVAAQHILVVTDGFRKITDYKSFACYAGIAPFARSSGTSVHYRPRTSKKADQQLKAILHQGAISVIKKGQLYHSYYQKMKQRGKHHLWIMNSIMNMIAKCVFNQIKKMTEFDKEIFIKNKKSWHENLVLS

SEQ ID NO: 153341 - protein, 392 aa, unidentified
MVVSVGIDVSKDKHDCFIVSSDGEVLADVFTIPNTMDGFAYLLQRIRECTTPQDKIKVGLEATGHYSYNLLGFLLDNGLATYVLNPLRTNLYRKSLSLRKTKTDRVDARTIASMLLSDAGLKPYTDTAYHNEELKSLTRYRFDKVKERAKLKSSISRLVCILFPELEKLVPTLHIASAYALLEEFPGAKQIASAHLTRLKALLESASKGHYKRDMALEIRDAARNSIGSRMPAKSLELQHTIRLIRELDVEIAEIEEQIQSIMDELHSPITTIPGLGFRMAAMILAEVGDFTRFDSPDKLLAYAGMSPSTYQSGQLKNCYPHMEKRGSRYLRYALYNATKYVCHWDPTFAAYLAKKRNEGKHYNIALSHAAKKLVRLIFAMEKSRAAYRLTA

SEQ ID NO: 153342 - protein, 345 aa, unidentified
MKITTIGIDLAKNVFQVHGVDEHGRTVFNKPLKREQMASFFVNLPACLIGMEACGSAHHWARKLQSMGHTVRLMAPQFVKPYVKTNKNDAADAQAICEAVTRPSMRFVPIKNVEQQGVLALHRARQGFVKARTAQANQIRGLLAEFGFVIAQGRHHITERVPQLIEDACNELPGAFRRLIQRLLEHLQELDRQVQELEVQIVAWHRQSDLSRKLEQIPGIGPITACALVASLGDAKSFKDGRQVAAWLGLVPRQHSSGGKQNLLGISKRGDTYLRTLLIHGARSVIYHAQNKDQDSPQCCWVNGVVQRRNKNVAAVALANKNARIVWALLAHERSYEPGYVREQA

SEQ ID NO: 153343 - protein, 452 aa, unidentified
MPARKDRLMHFNKILQMLDSSPYLSVGLDVGADFTWMSIALPNGSFWGKPFKIIHDDPYSREMAVAKIKEAQELYSLKSRCFLESTGIYHVPLLCFLRDKGLDCSVINPIITKNSTNINIRKLHNDKFDSKKAALVGLNASLKTSIIPDEDIADLRNLVRDYYYFKDLQSAVVLKLNAELKVSFPAYLKVFSKITTQSSLKLLAAYPLAKDMLAAPKEELVGIIRSTARFGKAYALSRYEAILEAAKDAAVFGRALPSNAVRIRLYIESYQTYQKHLDSLLLALHEAVDKLQGTPVYDRICLLQSLRGVGFLSAVVLMAEMGDFDLFPSPKKLYAYFGLDPAVKQSGKLNGDKVHMSKRGSSLARRVLHMAALNNLKVDKGTKAPVNPVIYNYYTGKCASKKKNVAVGAVMHKICNIIFAMLRDNKPFEIIPPQMHCKQYALNPPASVTNAA

SEQ ID NO: 153344 - protein, 366 aa, unidentified
MKKISTVRVNGNMIFKGHKLPIGVDLGDRWSCYCVLDEAGEILLEQKVATTPEAMKQIFEKIPRSLIAMETGTHSPWVSRLLTELGHNVIVAHAQKVQLITKSNRKDDRHDARTLARLARIDPELLGPVRHRSAKAQIHLTVIRARAELVSARTALVNAARGLVKSYGQRLPKCGTQQVNRELAAGLKAELREVLEPLLQEIESLNERIQEYEVRMEKIAKESYPQVELLKQVKGVGTQIALTYILTLEDPHRFPKSREVGCFLGLRPGRRDSGESQPEMHISKEGDPYLRTMLVQGAHYILGPFGADSDLRRWGLKLAARGGKSAKKRAVVAVARKLAILLHRLWVSGEVYEPLRNSDKALRAVA

SEQ ID NO: 153345 - protein, 345 aa, unidentified
MKIVGCDLHTRYQQVAMLDAETGELVEHRLEHESGEARAFYAGLAAPVRVGIEATGHTRWFERMLGELGHELWIGDAAQIRASMVRKQKTDARDAAHLLDLLLSDRFPRIWRPSLEERDLRQLVWHRQKLVWMRNAVGNQLHALAMGEGVCRKKKLFTKKGRVELEGLKLGRWASHRRQELLTMLDQLDASMKELDQAVAEQAEQNQSAVLLMTHPGVGPVTSLAFVLTLGPVERFERSKQVVSYLGLNPREHSSGGRQRLGAISKQGNPMMRSLLVEAGHTAARLDSELRQDYQRLKLRRGSGVAKVAIARKLAVRMYWMLRSPASYAQLVRMQGSPRGTLVGR

SEQ ID NO: 153346 - protein, 422 aa, unidentified
MLAESRDEEQIIARVAALDIGKAELVCCVRVPAEPGGRKRLQEVSTHSTMTRSLTGLANHLVELGVERVVMEATSDYWKPVFYLLEAHGLDPWLVNARDVKHLPGRPKTDVLDSVWLCKVAERQMLRPSFVPPRPIRRLRDLTRYRIDLVGVRTAEKNRVEKLLEDACIKLSVVASDIFGVSGREMMAALIAGERDPKVLAQMARSRMRAKISQLEEAFNGHFDDHHRFLLSRMLSRVDGIDADIAAVDAQIEVVLAPFVAAAAVLDEIPGIGRVAAAIVVAEVGVDMSRFPTAGHLCSWAKFSPGISASAGKTKGNGSTGHGNRYLARVLGEAAVVAGKTDTFLGARYRRIAKRRGKKRAIVAIGRSLLVIVWHLLANPGTHFHDLGADHFTRHVNPDTQKRSHVRQLEALGYTVSLTPAA

SEQ ID NO: 153347 - protein, 335 aa, unidentified
MEFDFFVGTDVSKNELDFAVMRGETLLFHKEISNEPSAINGFLKELTKLSGFDLGRTVFCMEHTGIYNNHLLVCLHKRKANICLQAATHIKNSLGNIRGKNDKIDAIRIADYAYTQQRKLRLWQPKREVIQELSHLAAVRSRLIAAKKLLKVSLGEHNLFSSKKIARQNTTACTSSLKAIDNDIESVEKTMGRLISTDGELKRLFELVSSVKGIGKVTATQILISTNEFKDFNNPKKFACYSGVVPFTDDSGKVKKKARVSHMANKKVKTLLHLSAIVAIRHNPDLKLYYQRMITQEKKNKMSVINAVRNKLVLRVFACVNQNRKYENIYPNLVA

SEQ ID NO: 153348 - protein, 486 aa, unidentified
MKEATLIRSVGIDLSRTGSHQVRCLDEQAKPCDSFSFDSTLEGLEKFEKRVFSNSDTPTIIFEPTGLAWIPMAVYLRARHPECQMVKARLQKVAALRRYLRSYTKSDRVDGVTLAKMPFIDAEQLDEAYLPPAEYHSLQRLTRQRERLIKSITVRKNRIGSIVNGYLPGLRKAFSDEWSDRARLFYRQRLNPFTVVRDGKSALETFLVSVKAKGAQTESNRVYQACQKLAEFYEKSKAAGMINEDFFDDLQEEIACELRLMETEEAEVERVSVRIEELYGHLHPSDYLRSIPGIGVRTAQVFLAIIGDPHRFRSQSAFANWTGVVPGARQSAGTEGKGLRMTKAGPSMMKRALFQAGDIARRYDPQLAHLYYREMVHHGKTHLQAMGAVMSHLGARIMAVLREGRPYELRDSQGKLLTKKEAMELIRSAYKVPEETRQARRRRKPNEGRLTSRRTREAAKAPQSEPLIEPPPKIVYCAEELQSTAN

SEQ ID NO: 153349 - protein, 457 aa, unidentified
MPPIQRPTALETLTCIHPNAAGLDIGSREIWVSVPSDRDREPVRRFSTFTPDLKRLVAWLTACRIDTVAMESTGVYWIPVFELIEAAGLNAQLVEPRQLKRVPGRKSDYLDCQWLQKLHSLGLLTASFRPDAEMRTLRSYLRHRAELLQHRAPHILHMQKALQHMNLQLHHVLTDLTGVTGLKILRALVAGERDPLTLAQMRNPACKSSTEMIVQALTGTWAAEHLFALRQALELYDFYTQKVAECDAAIEKHYAAMKPRWEGEAPTDLPALKPNSHSKNQPSLQTRRELYRLTGVDLVAVHGLSASLAQTILSETGTDVTKWPTEKHYCSWLGLAPHNDISGGKVLRSRVLKTDNRAGQAFRQAAASVSRSQCAFGAYYRRKKAHLGPLAALVATAHKIARTVYYLLKHGVQYQDIGAEAYNHKQAEREVVYLKKKAAKLGFTLVEHQPAPVILPA

SEQ ID NO: 153350 - protein, 368 aa, unidentified
MNTVKFIGMDVHKKTITIAIADQDRQHQARIYGAIANELDAMDKFCRKMASTAKQLYFVYEAGPCGYGIYRHLTAKGFDCMVAAPSLIPKKSGDRVKNDRRDAASLTRLHRAGELSAVYVPEPQDEAMRDLSRARQDAVKATKKAKQRLKAFLLRHSVVFTGRSQWSKAYFRWLADIAMPFPAQQVALQEYIDAVHEGMGRVERLTDQIQQMVTGWRLAPIVSALQAARGVSLVVAVTLLAELGDLSRFDKPAQLMAHLGLVPSEHSSGESTKRGGITKTGNSHARRVLVEAAWAYRMPARISRLLLKRQQNLPKQVCRIAWKAQLRLCARFRRLVARGKPTQKVTTAIARELSAFLWAMAKQIQPAA

SEQ ID NO: 153351 - protein, 414 aa, unidentified
MDIVHSHCAGLDVHKKTVVAAIIVPDPKGGLHKETRSFGTMTIELLALSDWLMEHGVTHVAMESTGEYWKPVFNILENNFEVLLVNAQHIKAVPGHKTDVKDSEWIAELLRHGLLRASFVPPLGQRELRELTRYRSTFVKERATLVNRLQKVLESANIKLASVATDVMGVSGRAMLEALIEGNASPEEMAELAKGRLREKRELLAKALQGRVKSHHRFVLTELLCQIDGLNETVVRFDEQIQEYCRPFEEVVELLDTIPGVARETAEIIVAEIGTDMSRFPSADHLASWAGVASGNNESAGKRRTGKTTQGNHALGVALNHAANAASHTKNTYLSAQYHRLASRRGKKRSIVALEHSILIIAYHIIQRKEPYRELGGDYFDRRRPEATTQRLVKRLEHLGFQVSLQQLPASVAI

SEQ ID NO: 153352 - protein, 300 aa, unidentified
MNFIGLDVHKKQTQICVLDEQGEVCFETRVPTSRAHLKDAVLNYKGAKVLLESSTPSEWVARHFESMGMEVIVADPNFAPMYATRSKKLKTDKRDARCLAQACKLGAYKPAHRLSDEQRRVRMQLDVRQTLVATRTRLTNQIGALLHGRGYRVATGAAENYARRLEALELPSDLREQLGPLVKMLKPLNEQIGELDQQLEQRADAEPDAQRLQSIAGVGPVTALMFLAVLDGAKRFDNAHSVMSYMGLVPREFSSGEKQMRGHITKAGASRARALLNPVQTQTRRNSSWGLRESLGRSRL

SEQ ID NO: 153353 - protein, 456 aa, unidentified
MTNKRTAGDHPELGPVNVGAAAVDIGSRMHMAAVNPACTDVPVRSFGTFTQDLHELADWFKTCGVTSVAMESTGIYWIPVYEILEQRGFNVILVNARYAKNVPGRKTDVSDAAWLRELHSYGLLRGSFRPNAEIATLRAYLRQRERLVQYAAAHIQHMQKALMEMNLQLHHVVTDITGATGMRIIRSIVAGERNPDVLATYRDARCHSSTETIRAALVGNNRDEHVFALTQSLELYDVYQAKILDCDRKLEVLIAALSNKAAKPVGRLSKPRIKTKQVNTPTFDVRAALYGVLGVDLTEIHGLGPSLALKLVGECGTDLRAWPSAKHFTSWLCLAPGNKISGGKMLSSRTRRSSSRAAALLRLAATTVGRSDTALGAFYRRLSSRAGKSKAVTATARKIAVLFYNTLRHGMSYRDPGADHYEQQYRSRVLANLRRRAKSLGFVLEPIPGNGNPAVS

SEQ ID NO: 153354 - protein, 421 aa, unidentified
MSKGRYRVRDCQAVDWTQLCEHARGAPVVFAVDVAKEDFVAAVMRDSGELLTRVKWRHPVQTRLVLDALVALQACAELAVVMESSGSYGDALRWQLHERGIAVYRVSSKHVHDSAEVYDGVPSVHDAKAADLIGLLHVHGRSRRWEQLDAQRRALNAQVQRLKQLKGHQQRQRNRLEALLSRHWPELAALLDLNSVTAAALIAAVGSPVYLCAFAHKGPAIIHSASRGKLDAPRIEAILESARTTLGMPCLAEENAQLRALGSDLLAVHKELQQLTNALQAQVAEDDTLTPMAAVIGAVSSAVLHAHLGAPSAYPSAQSYLKALGLNLKEHSSGKHQGRLKITKRGAPEVRYYLYFAALRLIAQQPLVARWFRAKSQRPGACKGKLIVELMRRLAKGLWHQGQGQVFAVDKLFAPPPPCGA

SEQ ID NO: 153355 - protein, 435 aa, unidentified
MRIELTLSSEVAGTGTDWLETRSGGRELQRREKLLYVGIDLHKETHTAVMVNCWNEKLEVVVIENKPSEFKKLAEKVNRKSNHLGLEPIYGLENAYGYGRSLAVWLIENGYIVKDINPALAYDQRKSAPMLRKNDEHDAYCVATVLINQLHTLPDAKPKDNEWTLAQLVNRRDLLVKDGIRFKNGLHEQISMAYPSYSKFFSEIDGKCAMYFWKTYPSPVHLREKTAKELTMEFKEMSPIIRKDKAELILCCIQNDGNTFREYQESRDFITTSLVRDLEHQKEELAGLDKEIEKILLSFDYKLTSMPGIGISIASKLIAEIGDIRRFSSADKLARFAGVAPVKFSSAGKGKEQSSRQGNRQLHGLFYFLAVTMVSRPKNGAPNHPVFYGYYMRKIGEGKTKSQALVCIMRRLVNIVYGMMKNKTEYREPLPEKEQ

SEQ ID NO: 153356 - protein, 385 aa, unidentified
MTQAPGTGTVIDYERTLILAIELSNTSWVLAAQIPGLPGVKAKRSIDPTPEALMAAIENYRGRAEKAGRNVDRVIAVYEAGWSGFWLVRWLAKHGVEEAHVIQPSSVPVDRRARRAKSDGIDAELLLRTLLAWLRGEPRVCSMVPIPAEADEDARRRVRERAELVSERVGLVNRIGAVLATLGAGEYNPLRRDRRQRLDELQTALGDSLPTNAHAKIARMLDRLELLLIQITELEQSRDAVLEDENPDRASSMIQQLAKLRGIGVQSATVLVREGFVREFVNGKALGSYAGLTATPYSSGGIEREQGIGKAGNARLRTVMVELAWLWQRYQPGSAQVRWFRERSGTGRRVRKVMVVALARKLLIALWRFATQGVVPEGAVMKPAS

SEQ ID NO: 153357 - protein, 389 aa, unidentified
MIYVGIDVAKDKHDCCILESEADKLYPIFTIPNNKAGFDELYEKMFSVTDDKTKIKVGLEATGHYSLNLLGSLIDKGLPTCVINPLHTNLYRKGLSLRKTKTDKVDARSIAMMLMTNKTLKPYSDTSYHSEELKSLTRYRFDKVQERAKLKSSVARLVNILFPELEKLVPSLHMASVYALLSKFPGASYITECHLTHLKNLLETASKGHYGRDMAITLRNTARDSIGSVILAKSMELKHTIHLIEVMTEEIDEIEDSIKSIMDTCNSPIMTIPGISYRMGAMILAEIGDFTRFNYADQILAFAGLSPSTYQSGQLDSSYSHMEKRGSRYLRYALFNAAKFVCKWDENFGAYLSKKIGEGKHYNVAIGHATKKLVRTIYRMELTGEAYRR

SEQ ID NO: 153358 - protein, 398 aa, unidentified
MTESSDYESVQVFIGVDVGKDTHHAVAINRSGKRLFDKALPNDENKLRSLISDLKQHGQILLVVDQPATIGALPVTVARSEGVLVGYLPGLAMRRIADLHAGEAKTDARDAAIIAEAARTLPHALRTLKLADEQIAELSMLCGFDDDLAAQTTQASNRIRGLLTQIHPALERVLGPRLEHPAVLDLLQRYPSPEKLASLGEKKLAAQLCKLAPRLGKRLAADIAQALAEQTVVVPGTNAAAVVLPRLALQLITLRKQRDEVALEVEQRVLAHPLYPVLTSMPGVGVRTAARLLTEVACRAFASAAHLAAYAGLAPVTRRSGSSIRGEHPSRRGNKALKRALFLSAFAALRDPLSRAYYTRKMSQGKRHNQALIALARRRCDVLFAMMRDGTFYTPQGS

SEQ ID NO: 153359 - protein, 349 aa, unidentified
MKQILKQVLGVDVAQKELVVTLGKMYNDFTLDLYAYKVFKNNKTGFAALLKWLKPIIDKDIKLQFVMEATGVYHQKFAYYLDEKGCNLTIVLPNKISNYMRTLEVRTITDKTASQAICQFGLERKLECWIKPKKVYKELQQLTRERSQIVDQRVIVKNQLHAENTEAEPNKSSLKRIKARIKFLNQQEKEIKVEIQNIVNKDAELKKELENICTIPGVGILTAVIVIAETNGFELIRNKKQITSYAGLDVKEKQSGTSIRSKPRISKKGNRNLRKAMHLPSLSAVKYNKNHKELYVRLTAKSGIKMKGLIAVQRKLLELIYVVYKNKKGFIQNYEQQKRATPLEMETAL

SEQ ID NO: 153360 - protein, 456 aa, unidentified
MAPRKQKAAQVSPALPPQLATANLHAAGIDSGAEAHFVAVPPSDDPQPVRSCGAYTADLEALADWLATCGITTVALALTGVYWIPLLELLETRGFAVLLVDPQQVQKIRGRPKSDVYDCQWIQRLHTFGLLARAFRPADQVCGLRSYRRHRAMLLTYAGQHIQHMQKALTQMHIKLQHVVSDLTGVTGMAIIRAILAGERDPVTLARLRDYRCQHSEETLAKALYGQWREEPLFALAQAGALYEVYHQQMLEGDRQIEAHLSTCAEHSPDQAPPSPPTRKRNQPTFDVRGSLQRVTGVDLTTIEGIDDTTALIVISEVGLDMSRWPTVKHFTSWLGLCPHQQVSGGKVLSRRTKSSANRVATALRLGAACLHHRHSALGAFFHRMKARLGTPKAITATAHKLARLIYTMLKHGTTYVQRGMDDYEQQYRERAVQSLTRRAKAFGYTLVQTPVGTHS

SEQ ID NO: 153361 - protein, 385 aa, unidentified
MWHKGVDKMIIAVGIDVHKDKCAACARFAGKGEPKPKHEEFLENFNKEFRRFDSDYRGMTAFADALRDHEVHVLIENSTKSHDVYWMLRNLGIDVIVAHASDLKRITESQTKNDDNDAFELAGYMRRRLWGEDEFAESHIPEPETLLRREVCRFDLNLRTELSALKRQIRSHMLIRGWKLTRDFKDIVCASALRELKHSGIDIFLYDVAKAEYLKKLIFETERNIRFRMEGDPLFDGVWSIPGFGVLSAAYFSCMIDDISRFPDGKSFSAHLGLTPKLDESADKGKNCGMSRRGDPNMRRLIAQATFVHIFHADSFISRKYQRLKSRGKKHSEALVACANSMARLVFAILRDGSRYQADPSVLAKARALADSDEVEDEMEAVGSR

SEQ ID NO: 153362 - protein, 334 aa, unidentified
MENIALIGIDLGKNSFHIHCQDRRGKAVYRKKFTRPKLIEFLATCPATTIAMEACGGSHFMARKLEELGHSPKLISPQFVRPFVKSNKNDWVDAEAICEAASRPSMRFVQPRTESQQAMRALHRVRESLVQDKVKTTNQMHAFLLEFGISVPRGAAVISRLSTILEDNSLPLYLSQLLLKLQQHYHYLVEQIKDLESQLKRKLDEDEVGQRLLSIPCVGTLTASTISTEIGDGKQYASSRDFAAATGLVPRQYSTGGRTTLLGISKRGNKKIRTLLVQCARVFIQKLEHQSGKLADWVRDLLCRKSNFVVTCALANKLARIAWALTARQQTYVA

SEQ ID NO: 153363 - protein, 363 aa, unidentified
MRFYGDQRRFYCGIDLHASKMYVCIVDDQGKVVLHRNMRTEPEALKRALAPYRESVVVGAECMFSWYWVADWCREEGVEFVLGHALYMKAIHGGKAKNDRIDSEKIARLLRGGTFPLAHVYPKEMRGTRDLLRRRNLFVRRRAELLAHVQNTFTQYNVMTASGKGRDRLREGDVGASFDDPSVQVMLDADIEVIEQLDETIVELETHVLKHAKVHDPIRLHLLQTIPGVGKVLSLVMLYEIQDVDRFENIGQFASYARLVACAKESAGKKQGSSGRKIGNAHLKWAFSEAAALMIRSMPEAKAFMEKMTRQRGKARAVALVAAKIGRVVYWMMKRKQPFDARQFWRSSLPKGTPLMEEAAMTG

SEQ ID NO: 153364 - protein, 421 aa, unidentified
MADVDKVTVISSLDIHKRSVVGHVLNVFFDKNENKFVAESHAAKQVPRTLTGLGDLADFLREFNVHTVVMESSGPYSLVVYYFLESEGFDVWMVPARDNKSRGGKKTDIEDAKRLARNFVAGSIRAYKLPSDPKVRALRTYVRARKKLVDQLVALKNMIIKTFDEACIDIKSIFSSLGKGFLMFLEGYLKGDSLDKIIERWPRLGKKREMLEIIMKTRLSEASLASLSSYLIIAKTIMREIEKLDARIESLLVEFSDEVRLLLTVPGVGLKSAAVILAEIGDIKRFASAKKLASYAGLVPTVYQSGDEVIYGRLRSECNRRLRWGLYEVALNAVKVSPWLRSFYERLIARGKKKKQALIAVARKIAVGIWHILTKRVPWKEAVRKNVRMPKKRRVPKVTVREALRILREAGYIVIKAKSGL

SEQ ID NO: 153365 - protein, 343 aa, unidentified
MDHFAGLDVSVKDTSVCIVDDTGRITREVKVASEPAALLAVLTNPAYHFKRIGLEAGPLSQWLFSALAEADLPVICVETRHMRAVLKAQINKTDRNDARGIAQMMRVGLYRPVHVKTLRSQKLRMLLTHRKLLQSKAIAIENDLRGTLRNFGLKVGIAGRSKFEARIKELVENFPDLVALVEPLLVVRRVLREQINILHRRLLTVVRDDEVCRRLMTVPGVGPVVALTYRATVDVPARFRKSKSVGAVFGLTCAKYQSGEIDRSGRISRCGDEMMRVMLYEAAQSMLRSKKWSWLKAWAMQVARRCGMKKAIVALARRLAVIMHRIWIDGTEFRWTREAAVAA

SEQ ID NO: 153366 - protein, 348 aa, unidentified
MVLIGCDFHPSWQQVCWLKQETGETGDSKLVHEAGAAEKFYRQFPAGTRIGMEATGNCQWFLELLAKLGHEVWIGDAAKIRASDARQQKHDKRDARLLLQLLMEERFPRIWVPSREQKDLRQLLMHRHKLVRIRAQVKNGLQHLAMNQGLQKKKRLWSVAGQQALRTLPLQPWASRRREDLLKMRSELDAKIAVLDEAVAAAAEKDARARLLMTQPGVGPITSMAFVLTIGDVSRFPRGKQVASYLGLIPREYSSGGHQRLGAISKQGNTFLRMLLVEAAQGAVRGDESFGNEYRHRCHRKPKGVAKVAAARKLSIRLYWMLRSNTKYPEIVRNESSSRVPLVGASLP

SEQ ID NO: 153367 - protein, 368 aa, unidentified
MKKDSIRSKSPRTEKKVQRVTIGMDLGDKTSRFCVLDPDGQVLRESRVGTTRKAMTQVFGQLGRCRVAIEVGTHSPWVSRLLKSLGHEVIVANARQVKLISASSRKDDCLDAQTLARLARVDPQLLRPIRHRSERAQQHLMVIRVRASLVGARTALVNTVRGLAKAIGERLPSCDPDQMGVQRMESLSAEVGETLRPLLQEVESLTAKIQALDQKIEQIARSEYPETRLLRQVSGVGALIALTFVLTVEDRERFQKSRDVGCYVGLRPKRSSSGESEPQLRITKEGDLYLRKMLVQGAHGILARRAPDTDLKRWGLRLCQRGGKNAKKRALVAVARKLAILLHRLWVSGEVYQPLRQGQAGPGAQKAA

SEQ ID NO: 153368 - protein, 371 aa, unidentified
MGVYSKYVGMDVHKETIAVSVADGIGGEPRYLGEIRNRPEAVAKLVRQLKKEGVRLLFGYEAGPCGYELYRQLRSLGQDCQVVAPSLTPRKVGDRIKTDRRDSLTLARLLRAGELTAICIPDPSQEALRDLTRAREDLKRMQKQARQRLLSFLLRHGKRFSGKSHWTQAHFRWLETVKFEHPVQQIVFQEYVDLVQALTKRVALLDDQIVEHAAHSAFTPMITAYSALRGIDRLAATTLAAEIGDPRRFPSAPQMWSYLGLTPSEHSSGPSRSRGPITKTGNGHVRRLLVEAAWSYRHPARKTAILQRRAEKATEAVQKLAWAAQIRLCGRYRYLTGRGKVVNKVCTAVARELVGFIWAIGQTLPALQPST

SEQ ID NO: 153369 - protein, 314 aa, unidentified
MADEKWNVGIDVSKAGLDVALLPSGEYWQFENTSRGIAKLTRQLRPLALERIVVEATGGYEAALVEALVEAGLPVCRVNPARVRRFAQGMNWLAKTDKIDAKVLARFGEKAQPRLLELPTEAEKRLAALVKRRQQVLEMLTAEQNRLELADQQVLASLTDTIQFLQKQVAELDAQIQDQIDQDPGLKKKQELLQSVPGVGKVLSATLISHMPELGACDRKEIAALGGLAPYSRDSGRYRGRRMIQGGRPFVRRVLYMATVAAIRFNPIIQAMYGRLIEVGKRVKVALVACMRKLLTILNAILRDQTAWKPAFSA

SEQ ID NO: 153370 - protein, 338 aa, unidentified
MSVQGTSVGLDVHALSVVAHAVDEVTGEVSRARLCPDYGEIMCWLSQLRAPVRVVYEAGPTGFGLARALNDARVECLVAAPSKLQRPAGDRIKTDARDAAHLARLLRLGEITAVRVPDADIEAVRDLVRAREDARADLMRVRHRLSKLLLRQGIVYFGGTPWTDAHELWLRRQRFADIHLKAAFDHGFDAVLAATAARDRLDEQIAEVATSPRFADPVNRLGCLRGISALTGLALTVEIGDWSRFTGSSIGAYVGLVPSEYSSGNSRVQGSITKAGNTHVRRLLIEAAWHHRKSYSTSGPTLRARWAKVDPALRARGHAGNRRLNKRWRSFTDRGKTH

SEQ ID NO: 153371 - protein, 350 aa, unidentified
MLIIGCDYHPGFQQIAFVDTETGEVGERRLAHREEAEQFYGELRARSLRVRVGMEASGHARWFERWLLALQFELWIGDAAEIRTKRVRKQKTDRQDAQLLLRLMIEDRFPRIWVADAENRDLRQLLWHRHRLVQMRTRVMNQLHVVALNEGLRRKKALWRPTGRAELESLALAPWASRRRQDLLDLLDQLTPKIEELTRALEGEVEKRPVARQLMTHPGVGPLTALAFELVIGTPERFHCGKQIASYVGLVPSEESSGDRRRLGHISKQGNSLLRYLLVEAAQVTVRSQPQWRSKFFHLGMRRGRKIAKVAMARKLAVHLYWMWRQGWDYSQFEKLGSHAGAPGNPHGGE

SEQ ID NO: 153372 - protein, 343 aa, unidentified
MGEVSTIGLDIAKSVFQVHGVDGTGAVVMRKRVGRSKVLEFFAGLSPCLVGIEACPSAHYWSRELQTLGHTVKLMPPSYVKAYLKRSKNDANDAAAICEAVTRPSMRFVPIKTQEQQTGLMLHRTRQLLVRQRTMLSNAIRGHMAELGIISAKGRNGTAELLQIIGDVADDRIPPIARFCLDLLARQYLALIAEVSSIDKRIHAWHRSCEQSRRLEEIPGIGPIVATALVAEIGDWGAFRSGRSLAAWIGLVPKQHSTGGKERLGSITKQGNRYLRWLLVAGAMAVIRYARQHGTKRPWLVRIMDRRPAKVAAVALANKIARMAWAIMVRGERYREPKLLLAA

SEQ ID NO: 153373 - protein, 412 aa, unidentified
MQAIIERCCGLDVHQETVVACVLIGAPGQQPTKEVRTFRTMTRDLEALRDWLQALGVTQVGMESTGVYWRPVYAVLEGRFELIVGNARHIRNVPGRKTDVKDAEWIADLVRHGLIAKSFVPPPPLRELRELLRYRRKLVESQAAERNRLLKLLETANIKLASVASDVFGVSGRAMLKALIAGDASPEAMADLARGQLRRKRADLVLALEGRLEEHHRFLLARQLQRLEAAEQDIAALDARITVKLEPYAAPHALLMQIPGVDWVVAAVLIAEIGVDMSVFLSVYHLAAWAGVCPGNHESAGRQKSGRARKANIHLRTILVGAAISASRTKGSYLKDKFHRLKARRGGLRAALAIAHKILVAAYHMLAKNLPYRDLGEAYLDQIGQTRTVANLKRRLERLGYRVTLEPNAQPT

SEQ ID NO: 153374 - protein, 428 aa, unidentified
MNTFDPNNYMALIGLDWADQKHDVALRPAGGSRVEPSSFPHDPQAIAQWVSSLRRRFGPGKIALALEQSRGALIHALMGYENLVLYPINPKTLAKLRAALYPSGKKDDPVDANLLLELLEKFGDRLNAWKPDQGITRQLSFLVEARRGFVEHRTRLVNQLQSVLKSYFPQALELVGGELSGPLASDFLKRWPTIGAVQQAKASSVRAFYYGHNSRSEDRIQQRLARIRTALPLTQDSAVVAAQSLAAQSLAAALAALRPIIARYDQEIARLFAQHEDGAIFASLDGAGPTLAPRLLAAFGSDRSRFAHADAMPAYSGTAPVTEKSGKQKWVHRRWARPVFVHQSFVEFAGQSVRFSRWAKCCYEHLIGKGHGHWAALRVLAVKWQRILWRCWQNRTEYDEAIYLKSLQRRGIQIYAALWSQSTPAHGE

SEQ ID NO: 153375 - protein, 421 aa, unidentified
MPNIEIGVDFMVKENFIYVGIDLHKETHTAVMIDCYNQKLGEITFPNRPADFPKLVTKVKKCNTDGKEVVYGLENAYGYGRALAVWLIDKGYLVKDVNTAISHRQAKHRGAMYRKSDSDDAKAIALATLNMLDKLPDACPNDAYWSLGQLVHCRDNIMKQRTRLVNQLHEQLCIAYPSYKQFFNDISRPTALYFWEHYPSRKYLKGKSVEDLRAELVPVSHNKCSTKTCEKILDAVASDKVKNNAYQDARDMVTLSIVSDLQHYDSQLAEVDKMLEQMYKMLGCTLTTIPGVNVITAVKILAEIGDIKRFSNANKLAQFAGIAPLHLSSSGKGKDVATKQGNRRLQATIYFLAIQMVQVSSKGTPRNSVVRAYYEKRKAEGKTSQQALICISRRLISIIYGMLKHGTEYRMPVVESAGENR

SEQ ID NO: 153376 - protein, 340 aa, unidentified
MITVGVDTHRDSHFAVVLDELGQLLGELVIEASASGYRELEVWAVGLAPGARQPCFGIEGTGSYGAGLCEHLQSAGRSVVEVERPHRRDRRAGKSDRIDALAAARKVLAGEGLSAPKAGGARAALSALLVARRSCVGERTRLFNQLQGLRVTAPVALRERLGAGSGKRLERRLAKMRVPKNAALAERAVLTVMRDLAARSRELGDEAARYESEIAQIVASLAPALLEEVGVGPISAAKLLVCDPGRFKSEAAFARCNGTAPIPASSGKTVRHRLNRGGDRQANNAIHTIALSRSMHDPQTRAYLDRRIGEGKTKREAMRALKRHLSRNLFNRLVEVPLTS

SEQ ID NO: 153377 - protein, 346 aa, unidentified
MKLSRVGVDLAKNVYQLHGADRHGKTVWKRRLRRGQWLQALLDKAEPGCEIGMEACAGAHHWARELQSRGYTVRLIAPQFVKPYVKSNKNDANDAEAICEAMSRPNMRFVTMKSVEQQDIQATHRVRTELKEQRTAKANQIRGLVAEYGLVAPQTLLALRSAIPCWLEDADNGLTDYFRSLLHGLCGDLVALDDRMAELDKQIKTLADSNEVAQRLQQLRGVGPLVATALIATVGSGEQYCKGKQMAAALGLTPRQCSSGDKQRLLGISKRGDVYLRTMLIHGARAVVSQAKHRDDRLSRWVTSIAKRSHPNVAAVALANKTARMAWAMLRNNTDYNPDFAIGSVG

SEQ ID NO: 153378 - protein, 360 aa, unidentified
MTTTMTFAGLDVHARSIHAAALDVGSGQLRRSRFGGASETVLAWLSELPQPLHACYEAGPTGFALYRAAEAAGLRVDVVAPSKTPRAPGDRIKSDRKDAELLCRLLMAGQLKAIAVPSPALEAARHLCRGREHVRADLMRCRHRVSKLLLLHGHVYPRPSAWTKAHRRWLEQQRLEETASELAYLDTLAAVDGLVARKAALDERLSRLAREGEWWPTVARLRCFRGIDTLSAFVLCLEIGDFARFSRPGKLASWLGLVPALEQSGENRRQGAITKTGSGYARRLLVEAAWHYLPRPSVGLALAERRAGQPDHVLQIALRAQRRLHRLYERLRARGKPGNVVTVAVARELACFLWATAVAE

SEQ ID NO: 153379 - protein, 285 aa, unidentified
MERYIGMDVHAASCTLAVISEKGRKLKDFPVETNGQALVEAVRMIPGHKHLVFEEGLQSAWLYETLSPHVDEIVVAGISESRGQKSDKGDAYSLAEDLRVGNFGKLVFKAPRQFTCLREFSRIHMTLVGDIVRGQSRIKSLYRSRGILVTGINVYGIRQREEWQEQLPSSVQARATRLYDHLDFLLEQKKQAEADLLREAKKHRIVRILETAPGFGPIRAARLVPIVVTPHRFRTKRQFWSYCGLSVVTRSSSDWAQTADGGWIKARIPQTRGLSRQHNHFLKSI

SEQ ID NO: 153380 - protein, 362 aa, unidentified
MRIIGCDLHARQQTLAMLDTTTGEVVEMTLKHEGDNVREFYSSLPRPVRVGIEATGSMQWFLNLMEELGIECQVGHPAQIRASAPRKQKNDRRDAELILKMLVEGRFPAIWLPSKELQDLRSLLRHRHQWVRLRTRIQNALQSIALANGLRRGTALWSHDGQSRIASLPLAPHTAYRRSELQAMYEKFEAEIEKLNQRVEEQACKRPGARLLMTHPGVGPITALATEVFLGDPARFADSKALASYVGMIPREYSSGGRQRLGGLSKQGNPLLRFLWGEAGAHAARKDQELQRFYRRKLVQKGLGKASVAVARKLGIRLWIMLRDQIEYNEFCRRGQKQQKSSDACAGMPETRYGAKSHRPID

SEQ ID NO: 153381 - protein, 398 aa, unidentified
MICVGVDVSKGKSTVAVIDKDGEILMRASEYEHTETGMTKLIQRLKMLKEEPRIVVENTGYYHWPLVNSLMDAGFFVCVVNSIIVSKFAKVQMRSGKTDRLDAMMLCRFGLAYWSELVRCQPDEERRTLLRLYSREYSHAVHLVVEQKVHFTSLLDKVMPGIKTLLEDKGGRSKLSDFALEFWHFEKISKQKPDSFTKRYCKWAKEKGYHANESKAAQIHALSQNGIPTLPCTDAVKQLVQEAARVLKHLEESVNSILAQMNALASTFPEFEVVSEMKGVGKHTASRLIAEIGDVRRFHSAKALTAYAGLDAPPYQSGKFESHNRKISKRGNKYLRKVGYEVMASLVSTKPVEDHAVYSFICRKKAEGKYYLSAYMAGLNKFLHIYYARVCEAMKEPT

SEQ ID NO: 153382 - protein, 320 aa, unidentified
MSKTDQERFVGIDVAKATLDVCIDPLGEHAEQHLPYDCASVARLAEQLAILAPTLIVLEATGGLETRLASELLARGLPVAVVNPRQVRDFARCTGELAKTDRIDARVLCGFARAIRPAARGVPDAPTRELAELLARRRQLVEMRMQEMQRAHQAASKPAQKSLKAHIAWLDKRVDEIDNDLRARLRQSPAWRAKDDLLRSIPGIGDVNSFTMMARCPELGQLNRREISKLVGVAPLACDSGKYRGKRRIQGGRFDVRKTLYMAAISAMRHNATIKEFAQRLKAAGKPSKVVIVACMRKLLTIMNVVIKTNKPWNPELRVA

SEQ ID NO: 153383 - protein, 501 aa, unidentified
MTDSMIRYVGLDVHKRVVEACFVDAAGKVVLRERFALSREVLGRFAAKMLRPADQVALEATTNCWAVAEALRPHVARVVVSNPMATKAIAQAKVKTDKVDAHVLAQLLRCDFLPEVWQPDEGTRRLRELCGRRSALVRQRTRLRNRIHSVLAMRLVEEPTSLFGAQGLAWLEGVPLDEQGRRLVQSDLRQMEFLGKEIDAMDTELAVRGYQSEAVKLLMTLPGVDVVTAVALVAAWGDPTRFADGDHAASYLGLVPSTRQSAEHCYHGPITKRGNSQARWMLIEAAQHLDKHPGPLGHFFRRLARKKNRNVAVVAAARKLATIGWQMLVTGEPYRYALPRTTESKLARLRVKATGRRRRGGVPKGTKAVARQPGQPGGSRTIRSLPQVCQSEGLPAPRPLSPGERRTVQQTDSGELVRQIHRTQLAPRIPAARQAAADQPAPATPTSDAPPATLHARRRRTHEGLATPPTPAPETEDARGQTKAGRTGSSSLVRRKRHGRG

SEQ ID NO: 153384 - protein, 407 aa, unidentified
MDLLKTVFGIDVSSRKSNVCIMVNGQKVNDYAISNDMVGFNQLLGDLKQVTNPQIIFEATGVYSRRLQAFLDMHELRYVMMNPLEAKRKTKDDLHQNKTDKLDALYLAKLQSEHPQRLAYVQSEEYQELMANNRIYEQASHDLITNRNRLHKAIQLTFPEIEHLMVNPRGKNYWSIVLRFPHPDIVLETKEADIIDFLKGLTGIGKKRANDITQSLIRLAKVACPAVKKNSAHIRGLKMAINNILSAEEECQTALQEMAKLAPKRDLEILTSIPGIGENTALRIISELGDIRRFNNPSQLNAFVGVDPQVYESGNLTAHLSISKRGTAIGRKVLYLAINQIQSAKKVGNPCHIADYYEKRKRSSETASHKKAAIASIHKLLRTIFALIKNDQLYSYDVAKHNQRLLS

SEQ ID NO: 153385 - protein, 465 aa, unidentified
MRTDKTLWRNRNARKELTRRLQSENPGLEVVHPHAAGIDVGNSAHYVAVRPDRDPQPVRRFECFTADLHRLANWLQNCGVKSVALQSTGVYWIPLYDILEEHGFEVYLVNARHTKNLPGRKSDVQESQWLLKLHTYGLLNNSFQPLSKIRILRTYWRQRLLHVTGAGTCVQRMQKALTQMNIQLANVISDLSGVTGQLIVRAIVAGERDPHKLAELSHPRIQASRAEIAKSLEGNWRQELIFVLQQEMEMYDTYQRRVAECDQELQKHLRAFATTAPTPVKEALPPKKKKKQNKNNPHFHLADELQRITGVDLTRIDGVDVIVAQTLVSEVGLDMSRWKTEAHFASWLGLCPDNRISGDKVLSRGTRHVLNRAANALRLGASTLLKSQTYLGAQYRRLRSKLGAPKAITAMAHRLARLVYRMLKYGQHYVDKGAEYYEQRNRQQQIEFLRKKAARLGLQLAPAYP

SEQ ID NO: 153386 - protein, 461 aa, unidentified
MANQDRRSLPGRGEGVEGFPVLRADVAGIDVGSEEHWVCAPARTGVGREVAVFAATTPGVEQLAAWLKERGVAAVALESTGVYWIAPHEILERHGFDVVLVDTRELGRVPGRKKTDRHDCEWIQRLHSCGLLRGAFRPVEQVCMLRTLVRDKGTLVAERGDWVRRMQKNLDQMNVRIHRAVADVDGATGMAILRAIVAGERDPRQLATLRDPRCRKSEAEIAEQLSGHWREDYLFSLKQSLKMYDAITETIQESEQEILRHLEEMAGADRRGEQAPIPKNPEKVKAIKKRGEDPLRHALYRMSGVDLTAIDAVGVQTVSVVLSEYGPDLSQFPTEKHFVSHVKLAPHKPISGGKVVKNKKKPGSGSARVGAALRMAALSLRHSQTALGGYYRQVARRAGADVAVFATARKLAQLIYRLLRWGQPYVDEGAAAYEKRYQLARVKRLTATAKDLGYKLVSVEA

SEQ ID NO: 153387 - protein, 407 aa, unidentified
MAITCGIDWAEAHHDVALIDDVGVVVARRRIDTGAAGFTSLLELIAEHAGTPEDTAIAIETDKNLLVVALAGAGFTVYPINPRAVARYRERHGQAGGKSDPGDAAVLAHILRTDKQMHRQRPEISEHGLAVKALARQHQEAIWALHQTASRLRSVLLEFYPQALQAFPKLTHRAALTILAVVATPLQGQRITRSRIVALLHRSGRRNDPSLVEQIFTDLHAPALRQPARVEEALGLTVGGLIEILTAMAKCVDDLEAELSREFDEHALAPILRSAPGLGPVLAARVLAEVGDDPTRFVTANGLRAFAGTAPITRASGRSHYVKARKVRNKRLGDACHWWAFTTLTRSAGARAHYDKRRAAGDHHNAALRNLANKLLGRLWWCLANNTPWDETAAWPDPSTSPISAAA

SEQ ID NO: 153388 - protein, 337 aa, unidentified
MKLYCGIDLHSNNHYLTLIDEHDRRIIEKRLPNDLSVTLKTLEPYQGKITGIAVESTFNWYWIVDGLMDAGYSLKLVNTAKARQYEGLKHSDDRYDAFWLAHQMRLGILPTGYIYPKEQRPMRDLLRVRRRLVRQRTTNLLSAQSALWRHTAIKLPSAVILGEKKAPWPHLSNATDELGVKAHRAAIEVLNTQIERIERAVLKALKPRADYQMLLTVNGIGPVIAWTILLESGDLKRFNNVGQFASYARCVDSKRTSNDKKKGEGNVKNGNPYLAWAFFEAAHFATQFLPAAKRFYAKKATQRNPILAMKALSHKLARACYYIMRDQVPFDPARLFG

SEQ ID NO: 153389 - protein, 344 aa, unidentified
MEQIIRIGMDTSKSVFQLHGVNAAEQPILRRKLTRKEMVKFFQKAAPTSIALEACGGSHHWARLLRSFGHEVKLIAPQLAKPYVKRGKNDAADAEALCEAMSRPTMRFVPVKTAQQQAALMLVGLRERLIRNRTQLANSIRGFAMEFGIVAATGMCRIEPLLERIAQDPSLPVLARKVFAMHGDEYRGLLHEIKKVEEELLDLHRADECSLRLAQIPGVGPVGATLLMLKTPDARLFESGRAFAAWLGLTPKDHSTAGKTRLGVITRAGDEMLRSVLVVGATSLLQQVRAGRSRHASQWLTGLLQRKKPKLVAVALANKIARIAWKLMVSGQTYRRMEEQPQAA

SEQ ID NO: 153390 - protein, 351 aa, unidentified
MRNQQTATPKLFIGIDIHKRSWKVHCASDISSGKTFSMNPNPIKLKSFVEQHFNGHEVSTAYEAGCCGFYAHRTFESYGWQSLVVNPADIHRKGKERFTKTDHIDAQVIARELKDGRLQSIHVPDVKREQLRSLFRRRNNLVKNYRKIKSLIKGQLLNQGIDVPCEFDNSHWSHNFRDWLDNLEFTYLTARMTLDSHMRYFRFVDQELRDVSTELRRYCKEHYKKDYMLLRSIPGIGGIVACGIICELGDLRRFNSIKHLAGYVGLAPGIHQSGDNLRNTGITRRAHRLMRSYFIEASWQAIRTDPIMQAYYRKHLGKNVKSVIVKVARKLLSRTLAVIKTEIPYEIGVVS

SEQ ID NO: 153391 - protein, 353 aa, unidentified
MEKVSKVWQGNTIGLDVGDRNSSICVLDADGEVIEESVIRTTRIAIQSRFGGRERMRVVLETGTHANWLYDELEGLGHEVVVANARRVRAICEADQKNDRSDAEQLARLGRADKRLLSPVDPRSLETRTDLEVVRARAQLVAIRTQLVNHVRGAVKPMGARMPKCSTESFHKLELPSELAAELKPLMELLKATNAAIEEYDDRITKLAEERYPQTTVLRQVKGVGPITSLCFVLTIGNPGRFKDSRRVAAYFGLTPRQRHSGQSDPQLRITKSGDSMMRTLLVQCAQHILRRSSPDTALKRFGTRLAKRGGKTPEQRAAVATARKLSVLLLALWKNGEQYEPLRGSSMNPSKC

SEQ ID NO: 153392 - protein, 413 aa, unidentified
MDVLHPRCCGLDVHKSSISACILLREAGRVQKHQRRFGAMTQDLRELAEWLRQFGVTQVAMESSGVYWKPVWNILERQFTVVLANAQHIKNVPGRKTDQKDAEWIAQLLQYGLLRPSYVPCEIIRDLRDLTRMRASLSQEASRIGSRIQKVLEDANVKLASVATNVLGKSGRAMLEDIISGEDDPEHLASLALGHLRVKIPQLRLALEGKIRSHHRFLLRRLVDQIQFVEHEIALLDERLEEIAQQRPELSQAIARWDTIPGIDLVAAWALLAEIGDNMAQFPTAEHLASWAALCPGNHESAGKRLRGTTRQGSPWLRRMACQCAWAAARTKNTYLSSQFRRLAVRRGKKRAIIAVAHTLIVIAYHLQKNQSNYDDLGGNYFDRIHSDGLKRYLVKRLQQLGNKVTLEPIEAA

SEQ ID NO: 153393 - protein, 361 aa, unidentified
MLLCSSSRQRRVFEEAVEVAGEVALECHEGGPPPATHSVLSGRSVAKEALGVLYVGLDFSRKRLQWSAFDESGVEVARGVVVPERDGLSDLAERASRDGAPVLAAIESMTGSRFVHDRLELRGWDVRIADAQRVKGLAPLACKRDRIDARVLAELAWRDLIAEVWLPDAAVRAERERARFRLHLVKHRTHGVACPVSDLFGVGGRRLLRELELPEPWRGNVDASLALIDQLSAQIDSCEAELRRLGATHPYLRQLVTVPGIAWILAYTIGSEIADISRFRRPAKLVADTGLCPRVYQSGERDRRGTTGQARAPLPALGADRSSPARRPHSRLPRALPVDEEAARQATRQQGRRDRGRAQTR

SEQ ID NO: 153394 - protein, 335 aa, unidentified
MRFFGLDVHLDFCEVAVVQDGKVSRVGRVDSTPEAIREFAAGLNGSDQVVLESSCGAMMIARLLGESNVGRVLVCNAAETRAISHARVKSDRFDAAMLAKLLSAGMLKAVWVPDEATSALRRRVARRAGLVRARTRVKNEVHAVLARCLLGRPPASDLFGKQGRVWLAGQELPVEEAETVASCLRHIDFLGGEITMLDREIARQALAFPGFGRLLTIPGVDVGTAAAVVAAVGDVTRFPSAGQLVAYLGLDPKVRQSGSEPARYGHISKRGDPQARSMLVEAAWTSIRSPGPLRAFGERVRAPHRSRRSLSRASSSCCAGICSPRTRTTRSHAPH

SEQ ID NO: 153395 - protein, 354 aa, unidentified
MPRKTTSLEAVATIGIDIGKNTFHLIGLDKVGAIVLRQKLSRSQVDTRLANMPPCLIGMEACVGAHHLSRQLKALGHDARLMPAQYVRPYSKGQKNDFRDAEAIAEAVLRPTMKFVAIKTVEQLDLQGLHRVRERLVCQRTSVINQIRAFLLERGIAVRQGLRALRTAMPNVLAMTDKLSPRMIHMIEDLCTDWRYLDARIATVSNEIETLSEQDDGAKRLMTVPGIGPIISTATVAAIGSGDVFSKGRDFGAWLGLVPRQMSTGGRTVLGPISKRGNRYLRMLFVQAARAVLLRPQSWEKYGLKSWIEAAARRLNRFKLAIALANKIARIAWGVLHGGRNFEVRSMRTAPQAG

SEQ ID NO: 153396 - protein, 343 aa, unidentified
MVHYVGLDVSLKQTSICVVNQAGSVVREGVVGSDPELIAAFVRSKAPGALRIGLETGPTTTWLWTELKRLGLPVICIDARHAEAVLKMQINKSDRNDAAGIARIMQTGWFKEVRVKDIDSHLVKALLVSRALLVKIKRDLENQIRGLLKNLGLVIGRAKFNVFAVRAEELIEDRPELAAAIGPLLAARKAIEEQVRDLDRKVLKLARHDMQVRRFMTVPGVGPVTALCFKATIDDPTRFKRSRSVGAYVGLTTRRHASGEVDWSGRISKCGDAMLRMYLFEAAGVLLTRVPKWSGLKAWGMRLAKRNGLRKAKVAVARKLAVILHRMWIDGTEFNWSKKEAAA

SEQ ID NO: 153397 - protein, 339 aa, unidentified
MKLYAGIDLHSNNNYLGIIDSKDRRLFGKKLPNEPKRILEALKPYRKEIIGIVIESTYNWYWIVDLLMDKGCKVHLANPAAIKQYEGLKNNDDKHSAFWLAHMLRLGILPEGYIYPKEERPVRDLLRKRGHLVRLNTSLILSLQGIMDRNCGFHINVNDIKRIKEDKVTPLLSGQEDLKLSGKISKETIDFVTHKIREIERVVEKKVQVKESYPRLKTMCGIGKILSLTVTMETGAISRFPSVGDYASYCRKVPAHWTSNNKNKGKGNKKNGNKYLSWAFSEAAEFARRYDERARAYYNRKAAKSNFMIARSALAHKLCRAAYYIMRDGVPFDPDKLFA

SEQ ID NO: 153398 - protein, 533 aa, unidentified
MATKRNSRKSRTISPAVLGKPTGVIQARVQKVGPEHFGIVAVDCAKARSKWMLCDFYGKVLIPPTVVEHQRTALEVATMQLREAIQQHGLQDHLVAVEMTGTYHRPVQRAFRKAGSETRLVHPFASRHYRLPAHADTKTDDHDLEGIFRAAVNGFGLVEPEWNEIYRHLQMLARHRRDLVQKRAKLQSQIRQSLERCLPGYAALFPNDDLWTRPVAMAVAGRAVRPETIDAAGVPGVWRWVKEDKLHVQSRTVERLVAWAANAAAADPLCDYLARVWQTLYEDWQAKTRQVHRLEQDLAGILVKTPYLLLLSHPGINVVTASELAGEMGPIEHYAHAKAISGRAGLFPSRYQSDEVDRADGPLARFRNARLRAAWMRVADCLIKSNAHYRGKSELWKQRGVDPRDIHCRVANRATRTVFQMVSGRRLYQHPSRLDRQYVLDKLRVFHQQHGTAPAEILRDLHEAAAQIPKSEQAAEARPLQEACRKARRSRRAGPQAIGEILLVVLAKLGFGQVQSNVEAPSPDANVSGTGTR

SEQ ID NO: 153399 - protein, 355 aa, unidentified
MNKIKYIGLDVHQASISAAVRDETGKLVMQTVMATRAAAIAEFLDGLRGTLYVTFEEGTHSAWLYDLLVRRVSKVVVCNPRKNALLKRGNKSDRIDAAKLSELLRGDMLSPVYHGENSTRTLQELARSYQALTQDTTRVMSRLKAIYRGLAIPCGGKKLYSERHRKQWLDQLQQPGTRRRADRLYEQMDFLQSLRRKAKQELMVESRKHSVSARLRSIPYLGPIRAAVLVARIQTPHRFRTKRQFWNYCGLGLETRTSAEYQQLDGHLQRSHKKVLIRGLNVDHNHDLKNVFKGTALSASIFPGPLQEFYQERLAGGMKAEMAQLTLARKIAAIALTIWKKGERFDPTKLKAQAA

SEQ ID NO: 153400 - protein, 320 aa, unidentified
MLSFCGIDVSKDRLDVMVLPEGQRSSVPNDVAGWAELVEQLRGCSIAAIGIEASGGYERGAIRALLAADLPVRQVNPFKLRQFARASGILAKNDPLDARMIASFVAIMPTRPVPQQAPPAERLAEMLAVRRQLTAEKVAAENASRLLEDAMLQRLSRRRIARLAADIDLLDRQLVEVARTDAALAHRYRLLTSMPGVGAVLACTLIALLPELGRLSRKQAAALVGVAPYAFESGALKGRRRIWGGRANIRQVLYMAAMSASNWNPVLKAFRDRLAAAGKLPKVVIVAVMRKMITMLNAMVRDDVVWADRHSGRHIVPTAR

SEQ ID NO: 153401 - protein, 343 aa, unidentified
MKIIRVGVDLAKNVFQMHGVDRDENPVWRRKLTRAEWLKVLLDKIEPGCEIGMEACGSAHHWARLLRAKGFTVKLIAPQFVKPYVKSNKNDANDAEAICEAMSRPNMRFVSVKTVEQQDIQAVHRVRFELSNQRKAKANQIRGLVAEYGLVAPKELPHLRRAIPDWLEDAENGLTDRFRRLLNGLWHDLMALDQRMTELDREIAQIATTDPVAKRLQQLRGVGPMIATAMVATVGDVKQFSNGRQMAASLGLTPRQNSSGGKERLLGISKRGDTYLRTLLIHGARSVVSTAKGKEDRLSQWVRRIAQDRHPNVAAVALANKTARIAWAMMKNGADYQPNLAAQ

SEQ ID NO: 153402 - protein, 350 aa, unidentified
MVILGIDAHKQTHTVVVVDERGRKLGERTVKTTTTDHLDLLVWASRFGAERRWAVEDCRHLSRRLERDLLGAGQQVVRVPPKLMAHARTAARTYGKSDPIDALAVARAALREPELPVARLDGPAREIRLLVDHRDDLVAERTRVINRLRWHLHELDPSWHPPARSLSRAPATHLAATEAFLSRLDGMVAWLAGQLVARVQELNAQIDQLEADLVPRVGRYAPSLLALRGCGVLTAAKLVGETADIRRFHSKDAYARHNGTAPLSVWSGNKQRYRLSRTGNRQLNLALHRIALTQARHHPDAQRYLARRRANGNTPTEAIRALKRRLSDVVYRALLADAGVADEAGQTAAA

SEQ ID NO: 153403 - protein, 390 aa, unidentified
MTTLMKYSVGVDVSKDTLHACICEIDSQQQVKIKTSHRFLNSKKDYTALMQWFTKHRKQDVPLVICMEATGIYYEKVALELYQKGYSVSVLLPSKAKRYMQSLGLKTKNDKIDASGLAQMGAEQSLALWQPLGDYFYKLRQLTRHHEQLQQSRTVFLSQLHAIQHSMIEVKEVVKHQKKVLELIEKQLQETLKAIAGHIKANVDVNRKVKQICQIKGVGLLSAATVIAETNGFALFNSIGQLVSYAGYDVIENQSGNQHGKTRISKKGNSHIRRIMHMPAFVAIQHHQQPFKSLYNRVYDRTQIKMKGYVAVQKKLLALMYTLWKNDCAFDAEYKGKSGNDEPKPLFVLGSEGATAEQDEIKIVPIKTGTTQDELPYNESPEALFLLDQK

SEQ ID NO: 153404 - protein, 329 aa, unidentified
MGNQLVQSEVILGVDTHLDTHVAAVISHTGRLLGTLATPANAAGYLELLAWARSFGNLQQAGVEGTGTYGAGLARLLREQGLAVLEVNRPDRAKRRLQGKSDPTDAESAARAVLSGSATAIPKPQSGVAEAMRTISVARRSAVKAKTQAINQLRALLISAPQDIRERLWKVKPEHCVEACSRLRSLDDTLVLQMLTTTLRLLVKRWLMLAAELKELDVTLDRLTGSSCTRLREQFGVGPQTAATLIAVAGDNPERLRSEAALAALCGASPLQASSGKTTRHRLNRGGDRSANNALWTIAMVRMRVSHEHGHTLNVELPKACHKKKFIAV

SEQ ID NO: 153405 - protein, 300 aa, unidentified
MRTQVFVGIDVSKAQLDVAFRPEGRFSAPNDEAGCAQVLERLRAVPPTLVVLEATGGLEIPLTGVLAAAGVPVVVVNPRQVRDFAKATGRLAKTDTLDAQTLAHFAQVMRPELRPLPDEQTQALAAILARRRQLVEMLTAEKNRLGSAPKPVRKSLRTHIAHAIRESPVWREKDALLRSTPGVGPVMTTTLLANLPELGTLTGKQIAALAGVAPLNRDSGTWRGKRTVWGGRAQIRATLYMAALVAARFNPVIRAFYQRLCATGKAKKVALTACMRKLLIILNAMLKHRTPWRTELVPCA

SEQ ID NO: 153406 - protein, 420 aa, unidentified
MCLPFIFSRATRLFEVKQSRTNGRDLEGSGALQLNNNEQTNTPMKKELYLGLDVHKDCIITAVAEEGRKGEVRDTGVISNDLHALEKWVGRLRKAHGRDVILRACYEAGPCGFGIARRLKQLGVECEVVAPSLTPKRAGERVKTDRRDARKLARLLRAGELTPVYIPEATDEAIRDLCRARTDAVDDRRRSRHRLKGFLLRHGYRYQGKSSWSAAHERYLRELVLPHPAMKVILEEYLQGIAAAGERIARCEVGMRALLEQWRLAPAVRALMALKGFQTVAAMIVVSELGEVDRFAHPRQVMAYLGLVPTENTSNDKRRQGRITKCGNAHARWLLVECAQHYATPPKVSQHLSRRQQGQPAQVRAISWRAQNRLHSRYTRLLGRRLQRNKAMVAIARELCGFIWELLHTQSCYHVQATSV

SEQ ID NO: 153407 - protein, 403 aa, unidentified
MNAVGIDVSKGKSMVTILRPFGEIVSSPFEIKHTSSDIHSLIKLIHSIEGESRVVMEHTGRYYEALAHQLSAADLFVSAVNPKLVKDFNNDSLRKIKSDKADSVKIARYALDKWQSLEPYSIVDELRTQLKAMNRQFHFYVKQKTAMKNNLIGLIDQTYPNANTYFNSPTRSDGSQKWVDFVSTYWHVDCIRKMSLNAFVEHYQNWCKRKKYAFNKSKAEEIYTKTKELVPVFPKNEITKHIIRQAVDQLNSTSVTVETIRTLMNETASKLPEYSIVMQFKGIGPSLGPQLMAEIGDVTRFTHKGALTAFAGVDPGVNESGSYAQKSVPTSKRGSSNLRKTLFQVMDVLIKTMPQDDPVYQFMDRKRTQGKPYYVYMTAGANKFLRIYYGRVKEYLSVLPDPS

SEQ ID NO: 153408 - protein, 386 aa, unidentified
MDHPTTLPVLDPTDLCGDCSTLLVSLELSRSTWVATSLALGSRKMSKHTLVGGDARKLLDLLARLKSRAEQRMAAPVKIVAIQEVGLDGFWIHRLLEANGVESHVVDPASIAVPRRHRRAKTDAIDGETLLRTLMAWQRGEPRVCAMTVPPSPSEEDRRRVSRERAMLLRERIRHTNRIRGLLFGQGITNYNPLHKNRREDLEELQTGDGRPVPAHLKAEILREIDRLELVLRQISEVEAERDEMLRLAQASSPAAQLMRLKGIGAEFAGVLYLEGLFRHFENRRQLAAYAGLAPSPWKSGSVDHEQGISKAGNPRLRTTMIELAWMWVRYQPASALSCWFRQRVGSERGRIRRISIVALARKLLIALSRYINHGEIPAGAVVKPV

SEQ ID NO: 153409 - protein, 325 aa, unidentified
MKTIYLGIDVSANTLDICVKEEEFSHFVIENKAKSIKTFLKPFEKKGSLVIAMENTGIYNYELYSVLEKQQHQVYVVCPIHMSKSFGLTRGKSDKVDAQRICQFIIKNQDELAEWKPTPDKIKELKILVTERDFLMKEKRSLLTRKAYYKRLVKLDHSKKLSKLNDKRLKALDQQVIEIEALIKDLVKADQELKEQQALITSIPGVGEVLAWTMLVKTEGFTRFSDPRKFACYSGVAPFGRASGTSYHRRPRVSSYADKSVKSLLHMSAMSAIRYNKDLKKYYERKILEGKNKMATLNAVRNKLIHRMFAVIKNQKPYQNDLVLS

SEQ ID NO: 153410 - protein, 322 aa, unidentified
MAMLSFGGIDVSKDRLDITVLPDEQCSSVSNDAAGWAELIEQLRGSSITAIGVEASGGYERGVVRALLAAGMSVRQINPFKLRQFAKASGTLAKNDRLDARMIASFVAVMPTRPAQRQTPMIEQLAAMLTVRRQLSEQKVATENASRLLEGAMLQRLSRRRVAGLSADIDLLDERLVEIVTADPALAHRFRLLTSMPGVGAVLACTLIALLPELGQMSRKQVAALVGLAPYDFDSGKLKGRRCIWGGRARVRHVLYMAALSASNWNPALKAFHDRLAATGKKPKVVIVAVMRKMITMLNAMLRDGTTWVDRYNGRRSAATAR

SEQ ID NO: 153411 - protein, 344 aa, unidentified
MTIIGCDFHPSWQMISWLDVETGETGERKLIHATGEARQFYQDLSGAVRVGLESTGNSHWFVDMLGELGHEVWIGDAARIRASQVRKQKTDRRDAGHILELLLKNDFPRIWTPSPQQRDQRQLLIHRYKLVTLRARVKNELQHLALNQGMQKGCRLWSKSGQQSLLDLPLQYWAGTRRKNLLELLKQMDQQIVVLDQAVKKAAEENESARLLMTQPGVGPITSLAYVLTMGDVNRFQRGKQVASYLGLIPKEYSSAGKQRLGGISKQGNRFMRMLLVEAAQCVVRYDPGFRSEYLHRCHQKPKAVAKVAAARKLAIRLYWMLRTNTAYPEVVRIESSSRVPLGG

SEQ ID NO: 153412 - protein, 357 aa, unidentified
MRLKGGAVQTIYIGVDFHARQQTICYLTTENGEMLFQQLKHQDKAVVRAFYAQFSGKVIVGLEASGYSPWFERLLEELGCEVWLGHATEIRRRARWRHKNDRRDAELILDLMLHNEFPRLYLPALQSREVLRMLRYRQKLIKIRTIGKNSLQALALQSGLAKGPHLFTKAGLQELGSASMSPAMQWQREQWLQLLEPLNERLLETMLWLKQQSLADQRISRLRTHPGVGLLTALCLVHSLEPVSRFANTRKVTAYAGLDPLERSSAERQRFLKISKGGSRVLRFLLVEAAHTALRKDAELKRFYQRLAQRHGRPKAKVAVSRKLLIRTYIMLRDEIDYAEFQRRAVAARSARDATGH

SEQ ID NO: 153413 - protein, 344 aa, unidentified
MKIAVLGIDLGKNVCSVVGLDASGAVVLRRRVRRDTLIYLVAKLPACIVGMEACCGAHHLGRLFAAQGHNVRLMSPEYVRPYVKAQKNDDRDAEGIAEAATRPTMRFVEMKTEAQLDMQILHRSRDRLVGERTALINQLRAVLLERGIVVPQGKRKLEQYLVTMMDEHEGEGLSARMRMLVADVCAQWRDLDRRIGAFDAEFLHWAKENEDARRLVTIPGVGVTIATALIAAIGNAKTFEHGRDLAAWLGLVPRQSTTGGKPKLMGISKRGNKYLRKLLIHGARAALPHVAEKDTALGRWAKSLLSRVHQNVAVVAFANKLARICWAVLRSGQKFTSKGAPLAV

SEQ ID NO: 153414 - protein, 357 aa, unidentified
MLTINIILMSVLKQVLGVDVAQKELVVTLGRLLADLSIELYAFKVFSNSEKGFISLLTWTKKLTDTNIGVGFVMEATGVYHQKFAYFLDDHGYALSIILPNKISNYIRTLEVKTITDKSCSEAIARFGLERKLDNWKRPKKTYKSLQQLTRERDQVVLERSMVKNQLHAESQEAEPHERSLERLKERIKFLSSQEREIKEDIEQVVNRDAELKKEVEIISSIPGVGELTAAIILGETNGFELIRNKKQLTSYAGFDVKEKQSGTSVKGKPRISKKGNRSLRKAMYLPSMSAVKWDDNFKNIYVRIVSKQGIKMKALIAVQRKLLELAYTLFKTKASYDKSYESKKVEQKNSMSAQKA

SEQ ID NO: 153415 - protein, 400 aa, unidentified
MISVGIDVSKEKSTVCILKPYGEIVSKPFNITHTQKDLSELSSMLFRLNDEVKIVMEATGIYHLPVLTYLQEKGFFVSVINPYLMKSYRNESLRKAKTDKIDSRIIANYGIDHWFKMKEFQTSGEIYEELKLLGQQYRHYMKLHLLSLAELTHLLDLTMPGIKNLLASWNETNRKDKRSDFVERFWHYDVITSMSEQEFTEEYILWAKEKKYVPSQEKAKVIYTLAQESIPTLPSETSSVKMLVTEAVRVLKEVDATLGLILSRMQEIAKTLPEYSVVREMGGVGNTLAPKLIAEIGDVRRFRNGKALVAFAGIDPPPYESGQFVGCNRKISKRGSASLRKVGYETMRSLKMRSRPEDPVYRYVVKKESEGKSKKSAKIAGLNKFLRIYYARVTELYKNI

SEQ ID NO: 153416 - protein, 369 aa, unidentified
MDDITFVGLDVHKATVCIAVAEGGRGGEVRQLGVFENRPEILSKVASRLSKGGRRLSFCYEAGPCGYGLHRLLTGYGHECVVVAPSLIPMKAGDRVKTDRRDALMLAKLHRAGELTAIWIPDAAHEAMRDLVRARATSVRVLAKARQHLQGFLLRHERIYCGARAWTLAYRRWLTTVRFEHPAQQIVLQDYIHAVQEAETRRDRLTQQIEELLPNWSMAPVVAALQSMRGVALVVAVTVVAEVGDFRRFANPRQLMAYLGLVPSEHSSGSSVRRGGITKAGNALARRVLIEGAWTYRMSARVSRKLHDRLEGLPAAVRDIAWKAQLRLCARYRRLAATGRPKVVVTTAIAREMVGFIWAIARLAQPAPV

SEQ ID NO: 153417 - protein, 352 aa, unidentified
MDNINSAAIVIGVDTHKSTHVAVAINTQGARLASLSIPANAKGYQELESWSRALGKIEAFGIEGTGSYGAGLSRSLLLLGHKVIEVTRPNRQLRYRHGKTDSLDAEGAARSVLNGQAMAKPKTQTGPVEMIRHLKIARDTAVKCRTQAMVTLKTLIVNAPAELRGVLDSIKGKIALIRYVAAFRPGKITSTTASAKTAMRALARRWLILHEEIQTHDKELERLVIAKMPSLMASHGIGTMTVAEMLILVGDDPSRIKSEAALAKLCGVCPIPASSGKTNRFRLNRGGNRQANAALYRVAIVRMRNHEPTIAYVRKRTQDGKTKSEIIRCLKRYIVREIYRHICMPKTAPATA

SEQ ID NO: 153418 - protein, 351 aa, unidentified
MAEVADGDWVIGVDTHRDTHTAVICDATGRAGAQLQIPATPAGYAQLLAWARQAAGGGRLAWAVEGTRHYGLGLARHLAAAGEQASEIDGSHHLGKRRSGKSDEIDAVRAARELLARPHPAQMRADGDREALRLLMLDRDHAVQSAKTARNALAAVLVTAPAPLREQLRHLPAARRPAACATLPCPEQADRLTRITCQTLARLGQRITALAAEAADLQTQIAALTEAMAPGLTATEPGVGALTLAQILLSFSHPGRIRSEAAFAMLSGTAPLPASSGRTDRHRLNRLGDRQLNRALHTITVTRMRCHPQTRGYVTRRRAEGKTDREIRRCLKRYLARHLYRALNSHCHQTT

SEQ ID NO: 153419 - protein, 393 aa, unidentified
MVYVGIDVAKDKHDCFIVNSDGEVLYDVFTIQNDMDGFEDLLFKIKTASKDLSKVKVGLEATGHYSCNILGFFHNKGLYTIVINPLYTSLSRKSVSLRKTKTDKVDARTIASIIMSDVSLKPYSDTVYHNEDLKSLSRYRFDKVSDRSKLKQSVSRLVNILFPELEKLVSTLHAKAVYALLSEFPGAHQVASANLKHLTALLSTASKGHFGREKANEIREAARRSISSYLPAKSLELRHTIKLIHELNAEIAEIETEIKKIMDSIDSPTLSVPGISYALGSVIVSEVGDFSRFDNPDKLLAFAGCSPSTYQSGQIYSTHAKMEKRGSKYLRWALLNAAKYVCKWEPTFAVYLRKKLAEGKHYNVAVSHAAKKLVRLLYHLETTGEKYIPQTLS

SEQ ID NO: 153420 - protein, 318 aa, unidentified
MTQYQFVGVDVAKDKFDVALKIDKKFKLECFSNDKKGYKAFLKWLDKYAPEAWVCMEATGHYSELIADFLVSAGIRVSVVNPLQIKSFARAKLSRNKTDQIDSKLIASYCEMMQPRTFSPRSEAHKELKELSNLLDMLKAQHTQLSNQLGSAQSDAAKKAIRKLIQNLEKEIKKAEGLIAEIIKRDEVMNENLKLMTSIKGIGKLTAYKVLSHVPHMNNFNNAKQFAAFIGISPRQHQSGNFQGKTTISRLGNSALRKSFYMAAMVAIRHNKVIAPFIMRLKEKGKAPKSIICAVMRKLAHLVFGVIKSKKPFSENFA

SEQ ID NO: 153421 - protein, 385 aa, unidentified
MQKLNDLSRSLTPLNPDGTLIAVIEMSQSSWLIAGIVPGIERHPLKKLEPNEGELLRLLMRWRAEATKMGCTITRIAVAYEAGRDGFWLARWLRARDIETYVIHPTSVAVSREHRRAKTDRLDTGLLKRVFIGWLRGEPDHCHMAAIPTLAEEDAKRPNREREGIVRERTRIVNRMKSCLARFGVRNFKPTLRKAPERLATLVTPEGVPLPPNTLLELRRDMARLRFVMDQIKEVEEARAQRLEQAPQEKTHAMVRLLARVIGVGIETADMLVHEILSRSLRDRRAVARYAGLTGAPDESGSKRQEKGLAKAGNARVRRGMIQLAWRFLLFQKDSALAQWYRTRTERGGKKRKTMIVALARKLLIALWRLVTTGEVPAGVVLRAA

SEQ ID NO: 153422 - protein, 388 aa, unidentified
MQFAADRLEAPTAIRTDLGAIFISLELSRSSWVITSLSPGGGEKMSKHTVRGGDVAGLLKRIAQLREKALGRTGKVFPLIVIQEAGLDGFWIDRVLQNEGIESHVVDPASVATSRRRRRAKTDGIDGEALVRALLAYKRGEPRVCSMVRLPTPEDEDRRRLCRERKVLTMERVQHVNRIKGLLFSQGVSGYEPLRRDRRERLDALQTGDGRPLPPHLKAQVRRELDRLELLLAQIKAVEAERDALLAAEQTKAPVAPAMLLDVKGIGPEFAAVLWSEGLSRPFENRRQVAAYAGLAPTPWQSGSVDREQGISQSGNPRLRTTMIQLAWLWLRHQPDSALALWFHDRVKRNGGRLRKITIVALARKLLVALWKYVTAGVVIEGAVTKTA

SEQ ID NO: 153423 - protein, 366 aa, unidentified
MKKHTTINPSLSADVSTCVTVAVDLAKRVFQVAGEDSLGQVIYEDRIKSREGFYAFLRKLPASVTMLMETGPGAQAWARLLQTQGNPVRILPAQRVADHRSGPKNDRNDVLAILRAGRDSSISAVPVKSTSALAMQALHRARQGYVRRRTAMGNQMRGLLLEHGVAMAQGEAAINQVVPRVIEDATQPLPDLLRELIDELLGEWIQLGERINVLTARLETAANDDATAKRLMTVRGVGPIIATALLAKQTEPERFANARQFAAYFGLVPSQNSSGEKVRLGKMSKRGDAYLRSLTIQGAHSVLRQIRPDSEHPDDRRLQRWISRLGRKEAAVRLANRNLRILWVLLQNDQVYSRQPGNNQEVAMSQ

SEQ ID NO: 153424 - protein, 385 aa, unidentified
MLSEGGQPTQNGQGRGRSYNLEASEPEGELDRRVTAKSAENPNSRRGRKREPELRKAGSGPNRKWVKVMSQYAELYVGIDVAKRSLEVALSSGESWTVSNEAAAIRKLVAELVRRKPALVVMEASGGYEREVWLALLAAAIPTARVNPRDTHHFAQANRQLAKTDRLDARGLTLFAAQVRPRPDVAPSAAAERLQELVGRRQQLVGMLTAERNREQQAITAANRRGIRGVIRFLERQCEAIERAIAEHLSKHAEYREVDQILQSAKGVGLVVSATVIARMPEVGTVSGGQFAALVGLAPYDRKSGDWDGRSHIFGGRADVRCALYMATLSAVRCDPALRAFYRRLLDRGKEKKVALTACMRKLAVMLNAMVKNRTPWRPLCPTAV

SEQ ID NO: 153425 - protein, 391 aa, unidentified
MVCVGIDVAKDKHDCCILDSDGMVRADCFTIPNNMDGFKQLLQTIRNCTKKSDKIKVGLEATGHYSYNILGFLLDNGLPTYVINPLHTNLYRKSLSLRKTKTDRVDARTIATMLLSDVDLKSYTDIAYHNEDLKSLTRYRFDKVQECAKLKQSVSRLATILFPELEGLVSSIHGTSIYALLGEYPGAKQISEVHLTKLTNLLTTASKGRYGKEKAIQIREAARASIGSVMPAKSLELKHTIKLIQELASEINEIEDSIQKIIDELNPPILSIPGMGVNSAAVILAEIGDFSNFSSPDKILAYAGCSPSTYQSGKLTNCYAHMEKRGSRYLRHALYNATKYVCYWNPVFAEYLAKKRAEGKHYNVALSHAMKKLVRLIYALQKSGKAYLAAA

SEQ ID NO: 153426 - protein, 372 aa, unidentified
MKKLATLFVGLDVHKDSLSVAYVPDDRGAEVTFVGRIGTRPSDVDRLIRRLQSKADRLIVAYEAGPCGYLLHRLLTRRGIPCLVVAPSLIPKRPGDRVKTDRRDAVQLARLLRSGDLNSVYVPSVQDEALRDLCRAREAAMVTLKAAKFRLKSFLLRLGLHYTGRADWNDAHLRYLSKVVCPTPAQQIVFQESLRAVGEQVDRLKRLEAELADLVPASRFAPLIQALQALRGVQNTVATTLIAELGDLTRFDNPRQLAAFLGLVPSEDSTGDSRRQGPITKAGNGHARRALVEGAWEYRYPAKISPHIRKRLEGLPAPVQDIAWKAQARLCKRFRRLTARGKHPNLVVTAIARELAAFMWAIAKEVPIPASS

SEQ ID NO: 153427 - protein, 361 aa, unidentified
MKDCEGRNVGIDLGKRTHETKIIWKDGKVTGTNGKTSPEGRKKLYALLRASDRVAIEVCSLGMVMAKEIKEQVGCDVVLLNPSQVALIYRSVKKNDKEDALKLARLVQKYTDDELPTVELPTEHEESIRQILTELRQLKNDRTKEINRLHAVFLECGITEIKRKDLATNENRDRSIKILKGFALKQAERSLRRIGQIEEQIDEVETELDKEIEGDKNVEALMGIPGVGKQLAASYIAFIGDGSRYRNVSTVGAAVGLVPKLDMSSTKLRLGHITKCGNSNLRSLLILAAWSHVRSKKGGAIKDKFLYMTGTQSKSKKIAIVATARKLAELMYTLLKTGTSYEKRASAAVDKLADEALCLAS

SEQ ID NO: 153428 - protein, 351 aa, unidentified
MKRIYIGVDFHARQQTICYLTTESGELVFHELKHQSKAEVRAFYAQFAGQVIVGLEASGYSPWFERLLEELGCEVWLGNATEIRRRARWRHKNDRRDAELILELMLHDEFPRLYLPPFQSREVLRMLRYRQKLVKIRTMGKNSLQALALQSGLAKGSHLFSKVGLQELCTVPMSPAMRWQRDQWLQLLEPLDQRLLETMQWLKLQSIEDSRIALLRTHPGIGLLTALCLVHSLAPVTRFRNTRKVAAYAGFDPLERSSAERQRFLGISKAGSRVLRYLLVEAAHTTIRHDEDLQRFYKRLVARRGSPKAKTAVARKLLIRAFIMLRDEIDYAEFQRRAVAARHARQISSTP

SEQ ID NO: 153429 - protein, 374 aa, unidentified
MEFGNHHVGFRLFNRWIQDLLMSHKLSKVIVGMEPTGHYWLSLARWLANIGIEAVLVNPHLVKKNKENRDNTPSKSDRKDALVIADMVKNGFYSPVRFNPEAYKELRILMANRDTVTKRLNDAVNQIHRWVDIVFPELRQVFKILTCTSAIATLRLFPTPKDISSLTTEQIIAGWKQYVKRHSGLRRAEQLILLAKRSVGATQALHAYKLHLGQLLEEYDLATRQLELIEHELKLVLERIPYAQKMLAILVVNTTSLAGVLGETGDLSGYTHGNALLRHAGLNLAEASAGKWRGKMVLSKRGRPRLRRFLFLMTMCMVMTNPDLRALHHHNVQVKKLKKMKSIMKLCGKVARMLVGLAKCNEVYNSTKLFPQAA

SEQ ID NO: 153430 - protein, 351 aa, unidentified
MYYVGADLHKEQTWFYIMDRNGSKIESKSIANSPDSLKSYFATIPTPFTLAVEATYNWYFFIDIAEKFAQHVYLANSYELKAFAKRHKKTDKIDARLIADILRKGFLPVVFIPNQSIRNLKELLHYRINLVRDRCRNIFRLKNTMDKLGADSSGDFTTEKRLRMIPTDSLPNRYRYIISGYIDRVVALSQRIHSMKTYLKNELLEDKEIQNLITIDGLDYFSAALIKSEIADINRFASFNRLCAYAGLAPRVSQSGDKTAHHGALMVNRRKNLQWILIETVFHFIKATPERQARYKELKSRKGANTAKVIMARQMLKIIYHVLKEQRPYYCEEVKRPKDFCQIQSVAVAAL

SEQ ID NO: 153431 - protein, 424 aa, unidentified
MNFKMQDKQNQLIERISDTHLIVGVDIAQQLHVARAVNFRGIVIGDPLTFENNEEGFVKLLSWMQNLQKLKKLDSTIVGMEPTGHYWINLSKWLYNQNIEVVTVNPHLVKRNKENRDNTQSKSDKKDALVIADMVKNGYYSFVRPTSESFEKLRVLISNRDVIVKRLEMSINQVNRWVDVVFPELRQVFKDVTCKGAIATLRLFPTPDEISSMESLDVMRGWKSLMKRQPGPKKAQLLINLAKSSIGTRQALDAYKFHLEQLLEEYDLAAKQLERVEQQVKDVLNKIPFAKKLLMIKGISEISLAGILGESGDLSGFSHGNSLLRHAGLHLAEASSGKWKGQIVISKRGRSRLRRFLYLATMSLVMNNPEFKAVHSHNVKVKKLKKMKSIMKLIGKLARIFVGIARSNESYCPSKVQVLIPLAA

SEQ ID NO: 153432 - protein, 408 aa, unidentified
MKRYYIGVDWGDRLHQVYVGDEEGKKVREMKVQESPAGLAEIGRWLDENRAEGIELWAAIEKPAGRIVDFLLDHGVEVYPVNPKAVDRVRDRYRMSDSKSDAFDAYVLAEFLRTDQAHLRVLRPSSEKAQELKMLSRDQRRVGRHKTRLLNQLTTTLKEYYARPLEAFKDLETEIALDFLQQYPTPAHLSALKRKEFNRFATTQHHLSKQRCEELWKGLNQPQLAVPEHVVRAKAQLVEVLIEQLRASIKAVKIYNHKVESFFASSPAAPFAKTLPGAKSGTLVAAIWAELGDAQGRWESSRHLQAEAGAVPVTKASGKSRVVHFRFACNKHLRHTMYWFSFVSVNHSEWAKLYYRGQRDKGHSHHQALRALGAKWLKIIFVMWRDHKPYDENYHLANIARQKMRQAA

SEQ ID NO: 153433 - protein, 336 aa, unidentified
MKNYVLFTGIDVSKDKLDICYVDKNGNVLGSKVIDYKPKNIKSIVKDLERLGYSLTQTLICFENTGVYSIKLGEVLSELNAYYSEVSALEINKSKGITRGKDDKTDAKMIALYALRNIDKIVLSKVTDEAIQELKLLFAEREKIQKSITSLKMTQENEGRVNSKAYESVQKINQQTRAALKNSLKAIENEIERVFKEHPELKKNRDLLKSIKGIGTIISAYLVMITHNFTKFKNSRKFACYSGIAPFEHSSGKSVRGKTQVNHFANKKVKALLSMAVQSAKKYNSQIKAYFEKKKEQGKHILLISNNIKFKLVNIAFAVIKRGTPYVDIYKYATVA

SEQ ID NO: 153434 - protein, 400 aa, unidentified
MISVGIDVSKEKSTICILKPYGEIMSRPFEVCHTEKELSELTSMLLRLNDDVRVVMEATGIYHLPVLCYLKEKGLFAAVVNPFEMKEYRCQGLRRVKTDKQDAVTIANYGIDHWYRLREYEAEESSYAELKLLGRQYRHYMRMRVESMLELTHLLDYTMPGIKTLLKGWNETNGKEKLGDFVEEYWHYDNITKKSEEQFIGGYLKWAKEKEYHQSQEKAVKIYALAKEGIPTVSSDTPSTKMLVQEAVRVLREVDNTLMTILTQMQTLAKSLPEYPVVRAMGGVGNVLAPKLIAEIGDVRRFHSGKALIAHAGIDTPPYQSGQFIGTERKISKRGSSSLRKIGFEVMRCLKTHKEPEDAAVYRFILKKEKEGKSKRVAKIAGLNKFLRIYYARVMEVYQK

SEQ ID NO: 153435 - protein, 336 aa, unidentified
MQALYARCAAIDAGKDVIAVAVRLPGDGPDGRAMIKRTFKTFYGVLAEAARWLASLGVTHVAMEATGIYSTPVYHALIEHGGFEKVLVCNAGHVKNVPGRKTDLRCGVAGAPAGVRAAGRQLHPPAKVKAARDVIRYRAKVVQSRTSELQRLGNVLQDAGIKIDSVASSIATKSGRAMIEALIDGERRGPVLADLARGAMRAKIADLPMALEGRFGDHHALMCRLHLDHIDHLEAMITALDGQVEAMMIPFRAARDLLATAPGIARLSAAAVISEIGVTVKEFFPDAAHLASWTGLCPGNNEPAGKRRSGKRRKGNPHLQSILVECAWAAIHRQTL

SEQ ID NO: 153436 - protein, 406 aa, unidentified
MADIIALDVSMGKSNVAWYHQKNCRGEFVFRHTQSGFNQLLSTVQAADHPIIFFEATGIYSSPVEHFCISHQLKYCRLNPLELHLKSENLRRVKTDRQDARKIALTVQGNLFRLTVPKSPRFARLYELSRFYNQLNNDWDHRLVQLHIALEQTFPELKQLFKNKTSKLALNIVELFPHPDFVKLLSRTKLKNRLIKSTDKKLSNMKGFKYADQLLKLAQDAYPAASQDSVQVDEVRYYCRLLIELTKQKEKIVKQMITTAQEDETFQYYVSFLGIGPQTAAQLMAELGDISRFDNANQLNAYVGIDIQRYQSGQGGHQDHINKRGNPIARKLLYFAIGNMIRQQHAAPNHIVDYYYHLKQKRPYPKLNKVAMVACMNKTLKCLLSMIKHHTKYRYRYTDSRSLVKN

SEQ ID NO: 153437 - protein, 343 aa, unidentified
MDHYAGIDVSLEQSSVCVVDATGRIVREAKVASEPEALITFLRGLTLRLVRIGLEAGPLSQWLQAALVKAGFEAVLLETRHVKAALSAMIVKTDRKDARGIAQLLRMGWFRPVHCKSMPAQEVRALLVARKQLQAKMRDVELSLRGLLRGFGLKVGEISKGQFAARVRTLVAGHTMLERIAEAMLQAREALRVEFGKLHKAMLAIVRADAVCRRLMTVPGVGALVAVTFTSGVDAPERFARSKGVGAHFGLTPRKHQSGETDITGAVSRVGDAMVRTALYEAAHILLTRAVRFSALKRWALEVAKRRGMRRAKVALARKLAVLLHRIWVDGTTFRWGREAAAA

SEQ ID NO: 153438 - protein, 338 aa, unidentified
MTTKISMLAIDLAKGSFQVCAVGPDGAVLYNRVLSRTRMASLLAEQPACVVAMEACATSHHWGRVAQGHGHEVRLVPAAYVKPFVKRQKNDRADAEAIAEAASRPTMRFVAVKSVETQGRAVAFRTHQCLVRQRTQLINALRGHLAEFGLVAPKGPASLKVLENALADETSELPGPVREMGAIYLEQIARLTEVVERLAAQLEAASKTDAVLRRLRTIPGIGPVTAGAVAAFVPDLDTFDSGRNFAAWLGLVPRQRSTGGKVKLGSVSKMGQTDIRRLLIVGAMSVIRWVVRKGGSPNRWLAALVARKPKMVAAVALANKMARMIWAVTTKQEDYRMA

SEQ ID NO: 153439 - protein, 341 aa, unidentified
MKKFIRIAVDLGKTYFQVHCLESEGGRSISRKLKRSKMLEFFSQVERCRIGMEACGSAHYWARELVAMGHEVVLIPPAYIKPYVKRGKNDAVDAAAICEAMCRPDMRFVPIKSADQQAVLMLHKTREMFVKQRTMSVNALRGHLAEFGIVVAKGIGRVDELLALAQSDATLPQVAKSAVAGLAQHLEGLDQSIEAVEDEIARAHGQNPTSRQLDEIPGIGTLIASVIAASVPDPGVFKSGRDFAASLGLTPRQNSSGGKEKLGAITKQGNRYIRKMLVTGSTSVLRVAGKRKGALADWINALRARKPERVVAVALANKLARICWAIMTTGESFRVDTYVKA

SEQ ID NO: 153440 - protein, 387 aa, unidentified
MPQSNDLSRSLVALDQDSTLIAVIEMGQASWLVAGILPGVQRHPLKKIAADQDLLLLVLRRWKDEAEKAGRPINRMAVAFEAGRDGFWLVRWLRAHEIEAYVIHPSSVPVNREHRRAKTDRLDTELLKRAFLGWLRGEPDHCSMAAIPTLEEEDAKRPGRERESLVGERTRIINRIKSALARLGIRNFKPTLRKAPQRLEALRTPEGAALPPNMLAELQRDMARLSFVKQQIEEIESARLERLQRAPGDRRNAMVLHLTRVVGIGVETADMLVQEIFCRELRDRKAVARYAGLTGAPSESGKKRRERGLAKSGNARVRRGMLQLAWGFLVHQKGGPLAEWYRARTADARGGTRKVMIVALARKLLIVLWRLVTTGEAPEGLLLRRAT

SEQ ID NO: 153441 - protein, 461 aa, unidentified
MGKARDTEAPRSRGRQLEGLPVIRRSVAGIDLGSERHWVCAPTTDRAGREIADFGGTTSELIRMAKWLKERKVDSIAMESTGVYWIAPHEVLEAESFQILLVDTRQLARVPGRDRKTDPTDCEWIQRLHSCGLLKGSFRPREDVCMLRTLVRDKANLVAESGDWVRRMQKSLDQMNVRVHRAVSDIDGVTGIAILQAIANGERDARKLAKLRDPRCRKSEQEIAEQLNGHWREDHLFSLQQALKMHQAIQERIGDYDREILRKLSTMQAEEFRELPVPKVKNPQKAKAIKKRGEEPMREALYRMSGVDLTTIDSIGVETVQVVLSEYGPDLSRFPTEKEFVSHLTLAPRIRTSGGKPVKKKQRNTASTRVASALRMAALSLRHSQTALGAYYRRIARRIAGDVAVFATARKLATLIYRLLRWGQQYVDEGVVAFEKRYQESRIRSLQAKAQELGYQLIQSA

SEQ ID NO: 153442 - protein, 342 aa, unidentified
MNFIGLDIHKKTISYCVKDNSGKVLSEGKMPATRQGLQEWIGTLAKPWTVAMEATMFTGWIYDYLRPHAAAVKVAHPLMLRAIAVAKKKNDRIDAGRIADCLRCDFLPECYMAPMEIRQRRRTLRYRKLLVRQNVQLKNKIAQLLMESGVSYNKEKLHQQGYFHQVLPANPEIDPSLWPLLKLTREMIERTQKTERALLRSLEADPLLAARVERLMTIPAIGHVTALTWVLEVGEVERFHSVKQAISYCGLCSGEKTSADSSRRMPISKQRNRHLQTVLLEAAHLAPRLNPELAVLYEREAAQSNHNQATIAVARKLAAYLLAIDRGERAFVTHQVHSRDAA

SEQ ID NO: 153443 - protein, 438 aa, unidentified
MGARVHYVAVPEGRAEPSIRSFGAYTAQLEALVQWLQARGIKTVAMESTGVYWIALYQKLEAAGFEVLLVDARRAKHVPGRKSDVQDCRWLQQLHSYGLLAPAFWPEDAICRLRSLQRHRKSLVECAAMWLQQLQKALTEMNLHLHHVLSDLTGQSGLAILDAILAGERNPRTLAGLVDRRVKQGQEQIEAARTGDYRAESLFVVDQALQTYRQLQHQIAQCDVAIEKHLATMGDSVGPKPASEPTRPVLQEAAAAKPSKRRKAPTALEVSLAGQLKRTLGVDLTAIPGLHVLAVLTLLSEIGTNMAKWRHEKAFASWLGLSPNHKVSGQRVLSSRTRKVNNRAATTLRLAAMLLGKTDTPLGAFYRRKRAQLGAPKAITATARKLACLIYRLIKTGQGYQEVDVRTYELKYKDQIVRSLRKCAAGFGFEPVEVPKAA

SEQ ID NO: 153444 - protein, 365 aa, unidentified
MQKISTMQASGKNIFEGQLTIGLDLGDRSSAYCVLNEAGEIVLEHKLATTPEAIKQVFGSLPRCRIAMETGTHSPWVSRLLTALGHEVIVGHAQKVRLITKSRRKDDRLDARTLARLARIDPELLSPVKHRSAQAQLHLTEIRARAVLVSARTALVNAARGLVKSYGERLRKCGTQQFCRETTSGLSTGLREALEPLLREVESLNERIQEYDRRIEKMAKQTYPETALLKQVKGVGDLIATAYVLTIEDPHRFRKSRDAGCFVGLQPARRNSGESEPQMRISKEGDEYLRTLLVQGAHYILGPFGKDSDLRRWGQKLSARGGKNAKKRAVVAVARKLAVLLHRLWVSGEVYEPLRNSQKAMGAAA

SEQ ID NO: 153445 - protein, 339 aa, unidentified
MKITTVGLDLAKNVFHVICLNEHNKEVKKRMLRRNQVSSFFAQLPSCQVAMEACATSHYWGRKFSLMGHDVKLIPPQHVKPLVQGNKNDYNDARAIAEAVNRPRVAFVAIKTEEEHDIQAIHRIRSQCLRDRTALSNSTRGLLAEYGISFPKGLTSLRRRIPELLEDAENGLSFRFRNILARRYEQLVELDEHIAFYTKELELLCHQDDACQRLQTIPGFGPIVASAFRSTIGDGRSYTCGRHAAASLGLVPRQWSSGGKNVLLGISKRGDQYLRKLLVQGARAVALQAPNRDDPLSRWINRLQERRGWNKTVVAIANKLARIGWAILRHKARYESSLA

SEQ ID NO: 153446 - protein, 400 aa, unidentified
MLSIGIDVSKGKSTVCGMKPGGEIVYAPFEVQHTREGMSELVSLLRSSGEEVRAVLESTGSYHCPVVAALLENGIFVSVVNSLRMKRFCSQSIRKVKTDRIDAMQIALYGLAYWQELQPARLPEDTYRELQLLARQYYQMTSMLIKAKVDFNALCDQVLPGMQELMSDHAGRHKLSDFVLRYRHTTHILEMGETRFRKDYCKWAEKKGYRNCERMAVLIFATAQNGIPVLPNAPSTQIVITEAIRVLHTVEASRDAILTQMQALAKTLPEYSLVREMPCIGDTLAPRLIAEIGDVRRFHGKRALIAYAGIDAPPYQSGKFCANNRHISKRGNRYLRKTGYEVMQSYVMHKPANDPIFTFIEKKRGEGKSGKLAMVAGLNKFLRVYYGKVTELYRSLPAIE

SEQ ID NO: 153447 - protein, 359 aa, unidentified
MIKYIGFDISCKETVACIIQKNRKDAYDTMPTELKSMQHWLKKQKEDGSEIHLTFEVGGHAGWIYDGLVDIVDKLKVSNPYELTWIYRTRKKSDRIDARKQAVLLTIDEVPEVYMPKKAVRDWRVQILHRKKLVYQAVAMKNQIRALVKSKELKPVESGNWWAQKYRWWFHQLCQSEELWTDGLFDLLEQLELYEVQTKRITERLDKILENHPDSELIMSMPGVGPRTTEAVLAYSDDINRFARGKEFASYFGMTPKLDQSGKVCRNGHISKQGPAVVRWLIVESAWRAVNKCPALQSFYKRVCRDNPKRKKTAIVATARKMLTIMRAMLISRRKYDENYVLNQAQVKNEERQNFYRSA

SEQ ID NO: 153448 - protein, 402 aa, unidentified
MNAVGIDVSKGKSMVAIMRPFGEIVSTPFEIKHTASDIHSLVELINSVEGESRIVMEHTGRYYEILAHQLSKANLFVSAINPKLIKDFDNDSLRKVKSDKADSVKIARYALDKWQNLKQYNVMDELRNQLKTMNRQFGFYMKHKTAMKNNLIGILDQTYPGVNTYFDSPARSDGSQKWVDFASTYWHVDCVRKMSLNAFIDHYQNWCKRKKYNFSQSKAEEIYGKAKELVPVLPKDDITKLIIKQAVNQLNSASTTVESLRTLMNETASKLPEYPIVMAMKGVGASLGPQLMAEIGDVSRFTHKGAITAFAGVDPGVNESGSYEQKSVPTSKRGSSDLRKTLFQVMDVLIKTHPQDDPVYQFIDKKRAQGKPYYVYMTAGANKFLRIYYGRVKEYLSSLPES

SEQ ID NO: 153449 - protein, 309 aa, unidentified
MHTNTIAVDLAKSVFQVSFANRADRVVDRKRLTRSQFERLIKTHEPTTIVMEACASAHHWCRLAQQHGHKTRQLHPYYVKPYVRRNKTDSEDADALIRANKDPHLLAVPTKHPEQQALQSIHRTRQQFIQTRTQRINLARSLAVEYGLSLPRGSAGISTKLRSKSDELPVMLVPTFNSVITDIDTLAGQIRQLDTELDQIAKQSEIATRLLSIPGIGVITATALVASVPDIHLFKRGRQFAAWLGITPREHSSGNTRRLGRISKQGNEYLRTLLIHGGRSVSQQASRRKPEDRDPIHLWIIRLEESKHR

SEQ ID NO: 153450 - protein, 410 aa, unidentified
METIVERPAGLDVHKAQVTACARTPKKGGGREQHVAEFPTTVQGLLTLRDWLAAHGVTQVTMEATGVYWKPVWAILEDEFECVLVNARHVKQVPGRKTDVSDAAWICQLAEAGLLRASFVPPKPIRALRNLTRYRKTQIQERAREANRLHKALEDTGIKLDCVATDILGVSGRRMLAALIEGTTDPEVLSDLAKGRLRAKIPALREALEGRFDHLHSVWIGAILNHVDFLDEQVAALSEAIEEQIAPFESAVELLRSIPGVQRRSAEVIVAEIGTDMSRFPSAKHLASWAGQCPGNDRSAGKRRSGRTRNGSKWLDWALEEAALAAVRSKDVYLAAQYQRLRPRRGHKKALGAVKHSILVAVWHMLSTGELYRELGGDFFRKRDPERIAKRLVAQLEELGHSVTLEAVAA

SEQ ID NO: 153451 - protein, 439 aa, unidentified
MAAKKNKTSSRVVIGVDPHKRIDAVVVLDELGAVLAREIVPHTSAGFKTLMAQARQFPQRVWAVEGCNGVGKNLAHRLVAVGETVLDVSTRKSSLVRALATNSGRKTDDTDAYSIALVGLRSTDLPVVVRDQQTELLRLLSHRRRELVGLRTQAVCRLHRELAILIPGGASSRLLATRIRALLNGIRPHDEVDRLRKQLARDQLADLVAIDQRLAAINIEIRDAVRATGTSLTKIFGIGPVNAAMILGEVAQVARFDTRHHFAAYNGTAPAQWGSGGDTHDRVNLGGNRRLNHAVHIAAITQARYPGPGRDYYQRKLADAKTAKEALRALKRRISDSIYRQLLADAKAREAEGTGPGGQVGAALSSSAANRSPVVSTSDRPQPGPVATDHTPTIPSPGKRSSGASRRPKTRRPADLVKRSLLDEGEDRRTLTKPGRPTP

SEQ ID NO: 153452 - protein, 449 aa, unidentified
MHLASAVREAGPVGSSRAKRQYRADAASRTGWAKEAVLSDQYRYFVGIDWATESHEVCVLNAGQQIIDRKAVEHSGSGIAQFVTYLEKLAEGDPESVAIGIEIPRGAVVETLVERRFAVYSLNPKQMDRFRDRHSVAGAKDDRRDAFVIADSLRTDMGLFHRVRLDNPLIIRVRELSRTEEDVQQEQVRIAHQLRDLLRRYFPQMVNLCPGVDELWFWELLEMAPLPAKTAKLTRARIEKILRSHRIRRVSADDVVAQLKAPPLGLAPGAAEAASEHVLLLIPRLRLLHQQRKDIAARIEAVLDELSEGEQGEHRDVTLLLSLPGAGRVVAATMLAEASQPLGDRDYHALRSYSGVAPITRRSGKRHIVVMRQSCNQRLRNAIYHWSRVSTQCDERSREHYAELRRKGHSHGRALRGVADRLIAVLIAMLKSGTVYDPQFRTNSAPTSA

SEQ ID NO: 153453 - protein, 353 aa, unidentified
MAQSTEGREVILGVDTHLDAHVGVVIDGVGKVLGTLIAPAGLHGYQQLLQWSRSFGACTRAGVEGTGTYGAGLARVLRGAGIEVLEVNRADRSKRRLRGKSDPTDAENAARAVLSGEATAIPKLQSGVVEAMRAITVARRSAVKAKTQAINQLRALLVTAPDPVRAKLMKSKPEHCVQACIRMRALGRTPLLEALTRTLRILAKRWTVLAAELRELDAMLEALARRAAHRMLAKFGVGPYTAATLMVVAGDNPERLRNDAALAALCGASPLPASSGKTQRHRLNRGGSREANNALWTIAMVRMRSDARTRAYVARRTAEGLSSKEIQRCLKRYIVRELYPLILADLRDAVATS

SEQ ID NO: 153454 - protein, 312 aa, unidentified
MEQYNLGIDIAKTCFDVADTDGNLLGRFPNNADGIRKYIRSTASLKPALIAMEATGGYERKLALILHEHGFRVVIVNPRRIRDFARASGQMAKTDKIDAVMIARYAALLSPEQQTPISRKSFQLKDLVSRKRQLVSMRSMEKNRLEHATAHDIKTSINQTIKYLNKQITKTELAIDNMLAADEALSACAFRLATVPGIGHATAAFLVVELPELGSCNKRQIAALAGVAPVNRDSGMFRGKRMTGGGRSQIRTLLYMPTLVAIQHNPAIRTFYQRLVDQGKPKMTAVVAAMRKLLIILNTMLKNNQAWNPDLA

SEQ ID NO: 153455 - protein, 356 aa, unidentified
MTKILAIDLGKFKSVTCLLETATNETEFWTMSTDQPYLLVVLKKYAPDLIVIESCSISGWVHDVCTAEGYEVLVCNPNQEAWKWKNVKRKTDRDDALKLAKLAALDQLVPVYIPCEQQREYRRLVKYRKVMLGRLNRVQNNVRSLFNRHGLSMVSGQKAWALERWDQISQHRKPLSDCSNRELWRGELDLELLEFERLREHLKQVNDKLRKLATEDERVQLLKTIPGVGRKTAEVVVACLDDPHRFQNARQVSSYAGLVPKRYQSGTMDRQGKIHKRGPRLLRGALVEAAWLMLRYNPWAKSVYQRICGNQKTRKKKAIVAVARKLLVRCWVMLLRKEPWNKEAMTILPQAAIVAS

SEQ ID NO: 153456 - protein, 318 aa, unidentified
MSTGNDFYGVDVAKAELVIARKGEPGICTIANEAGAIGLWLKTLPPGSTVAMESTGRYHRLLVELATASGCTGYVLNAKDVSFYAKALGGRSKTDKVDAHVIARFIAEHHEGLHPWEHAQPHAAEIWELLLRRADIVVHRASLRQTMRDAQAVAVAAKQFDDSFDGLLEAIDERIESLQRQDAQMAAASRRLQTVKGVGPQGGAMLAALLSRIPFANADALVAYSGLDPRAQDSGQKKGRRRLSKRGPPPLRRQAYLMAKAAARSKVFKPIYEALKARGFAATQALVIMARKLLRVAFAVWKSGKPFDESVIAPAAGA

SEQ ID NO: 153457 - protein, 343 aa, unidentified
MKLIRVGVDLAKNVFQVHGVDRNEKAAWRRKLARESWIKVLLETLEPSCEIGMEACGGAHHWARLLQAHGFKVRLVAPQFVKPYVKSNKNDANDAEAICEAMSRPHMRFVSVKTVEQQDIQAVHRIRAELTKQRTAKANQIRGLVAEYGLVAPKELMHLRRALPCWLEDAENGLSARFRRLLNGLWGDLRTLDERIAEVDREIAMIAQNDPAAKRLQQLRGVGPIIATALVAAVGNGEQFANGRQMSAAFGLTPRQHSSGGKERLLGISKRGDAYLRVLLIHGARSVIHHSKDKDDRLSQWVTRLAARRHTNVAAVAMANKTTRMAWAMLRNGTDCQPAMVTG

SEQ ID NO: 153458 - protein, 418 aa, unidentified
MELLHERCAGLDVHKDTVVAWVRLVHDGEIERQVRTFKTTTRQLLALAEWLDGHGAKHVVMEATGVYWKPVWHILSDGEFELVLANAAHVKNVPGRKSDVSDAAWLADLEAHGLIRGSFVPDGPTQELRGLLRTRKQLVRERTSHTLRIQKTLEDANIKLDSVISNIVGLSGRRMIEALVAGESDPAVLAGLADRRLKATPQQLAEALRGRVTRHHRFLLALHLGHIDAIEGAIDKIDQEVEAGLEPFRTAVELLTTIPGVSELAAQGIVAETGLDMSRFPTCGHLISWAGLCPRSDESAGKRRSTRLRKGAPWLKTLLVQCAWAASKTKATYLHAQFLRLKARRGAKKAIGAIAASILTAAYHMLSNGTAYRDLGPHHFDRQDNGTRAKRLLRRLRDLGYIADITPIANTSTATVSC

SEQ ID NO: 153459 - protein, 343 aa, unidentified
MKITTIGLDLAKCVFQVHGVDATGQVVVRKSLRRSQMLPFFANLPRCLVGIEACGTSHYWARELIKLGHEVRLMPPAYVKPYVKRGKTDAADAEAVCEAVTRPTMRFVPVKSPEQQAALSMHRTRDLLVKQRTQLINMIRGLLAEFGVDIPKGLERALLMARQIVDGKAPEMPFEAAKVVGTLAQQALDSHVRLREIDRDLAVWLRRDDVARRLMTIPGIGLVGATALAASVTDPHQFRSGRQFAAWLGLTPLQKSSGGKERLGRITKMGDKYLRKLLIVGMTSRVRRAKQNPAVDPRLADLLARKPTRVATVAMANKTARIIWAIMARGETYLADHRPALAA

SEQ ID NO: 153460 - protein, 464 aa, unidentified
MTIRKKRGVPKGKRSVSGPTSLPAIRPMVAGLDVGSSQHWVCGPAKADGTPNVRVFGTTTSQLNELADWLTEQGVESVAMESTYVYWIPIYELLESRGIEVLLVNARQLHNVPGRKTDFSDCQWLQLLHSCGLLRGSFRPGEAITRLRALQRQVANLVAERTRCVQWMQKALDQMNVQVHRAVTDITGLTGMAIVRAIVAGERDPVRLATHRHGRCHKSAKEIAQYLTGNWRDEHLFNLASALRLFDALEKEIATYEARLLEEVEGLQLPERREEPVPPHPNPVKERAIKARGEQQARTTLWRFAGVDLTRIDGISAGVAQVVLTEAGPDLTAFPTEDNFVSWLRLCPRTPISGGKPLKKRRNGLGANRIAGALRMAATSLQRSRSALGASFRRIARHKGGAVAVFATARQLARLIYRMLRYGHDYVDIGEKVYERQFQTRQLAAITETAKSLGYRVVPEAGAA

SEQ ID NO: 153461 - protein, 320 aa, unidentified
MSLLPLGIDVSKAKLDCALMLGSKFRTKVFANSPQGFAQLAAWLQRQTCEAVHVGMEATGIYWETVALFLSDAGHRVSVINPALAKAHGQSLGLRRKTDAADAKLLADFCREKQPPAWRPPSDNERRLRALVRRHQGLVEMQTQEKNRRESLREDVRDSVEAHLAWLAAEITRIEQAIAKLLDEDDSLRGQRDLLDSIPGLGERTIAVLLAYGVHGEHFQSARQFAAFAGLSPRLHESGSSVHRKPRMSKAGHAFLRRALYMPAMTALYKTAWGKRFRNRLAARGKPPKLIIGAMMRKLAQVAFGVVKSGAPFNPALHGA

SEQ ID NO: 153462 - protein, 403 aa, unidentified
MTNPTPHAGLVGGIDSHTDTIHVALIDGLGRDVADHEFATTGTGYRAAVAWLTGHGPVAVVGVEGTSSYGRGVTTALAGAGILVVEVNRTRPAERRRAGKSDRLDAYRAARSVLSGEATTPPKDGSIESLRALMVARRSALKAQQAAWRQIGALLINAPARIRDTHRDLPPARLLATLAGCRPAQVADTDHADVLYSLRTLARRHRHLTTEIADLTARIGARAAAANPALLAIKGVGPVIGAQLLLTAGNNPERLRSGPSFAALCGTAPVPVSSGRTDRHRLSRGGDRATNSALHLIVNNRMSNDARTRAYRDTHLARNWTKKDVYRSLKRAVAREIYQALIGRSTVPDYSDLRPARHAKNLTLAAAAATDLHVWPTAISQIERGKRRDDQLAQAYREWLNAA

SEQ ID NO: 153463 - protein, 318 aa, unidentified
MSDSVFIGIDVSSQTLEIASSDQGKTWQLANDVAGIEQLVNQASALAPALVVLEATGGYEFEAACALQAAGLAVAVVNPRTARDFARSMGALAKTDALDARMLAAFARVLHQHPERERFVKPLADAELQQLQALVLRRRQLVQMLTSERQRLRLAHAAARPSIERVIEFLKQELGDSEAEVAAHVQRHHARLAQALASVPGIGAASVAVLLAELPELGKLDRRRIAALVGVAPLNRDSGQMRGQRCIWGGRADVRRTLYMATLTAVRHNPALKACYERLLAAGKRKKVALVACMRKLLTMLNAIAKHGTTWDPTMHIA

SEQ ID NO: 153464 - protein, 442 aa, unidentified
MSELAVLDPRAAFVDVGSEKMHVSIGGGPPRVFGTVTSELHALRDYLLENKVRSVAMEATGVYWLPLYGVLEAVDLDVQMVDGRQTRHLPGRKSDMQDCQWGSTLHAHGLLRAGFVPPAHIRRLQDYLRLRGEHVAAAGGHVQHMQKALERMNIKLHDVIASLTGVSGLAVVRAILAGERDPAALLELCDVRIRRAKAERVVEALRGNWAEEHLFALGQAVGSWDHYQAQIVDCDRRIAEVLAGMPGGEGPSAGAEQPAKRRTQPGVNAPQIDNLRELLERMCDGKDATTLPAHSEYTVLQLIGEVGTDLTKWPTEKHFASWTGLAPGSAQSGKRRAAVRRRRNRVGKIFCVMARALARSKYIALGAYYRRMAARRGGLVANKALAHKLAILFWRVMVKGMDYVEKGLAHYEAQVLETRQRLLRKLAKQFGQQLVPIQASPP

SEQ ID NO: 153465 - protein, 420 aa, unidentified
MSYWIAGIDVHKKMLAVVVADVEVEGEYQFERRLFGSNPDHLRLLANWLIEQPVEEVVMESTAQYWKPVWGALEQYWKPTGQGTGPMSGTLHLAQAQSNRGPRGRKKDFPDAERLVKRLVANEWILSFVPDAEQRLWRTGMRRKYQLTRNRVQLQNRLEALLEEAHIKLSSLVSDLLGASARRMLKALAEGATDPAALASLADKNLPATPAQLCDALGACTELNPVYRRLLKMFLEELQLIDQQTAQLDKEMATLLSQDQAAVERLAEVPGLGVDSAQQIIAEVGAKAATFASAKNLSSWVGACPGEDESAGVSKSHRSPKGNRHMRRILNQCANAAAKSKGTIFQIIYGRLVSRRGHNQTIGAIAHRLCRLIWIILHQGVRYEERGPAVNANSRRRRTTRMIRELRSLGYRVEAMGSPA

SEQ ID NO: 153466 - protein, 341 aa, unidentified
MDAIGIDTHKDSLAACAIDALGTVRAEAAFANDPAGHAALGAWAARVAPGARLGFEGSSTFGAAAARRLERAGFDVREVPPHLSRRERLRTRRAGKSDPGDALAIARVAAREADLPPIRRADPTTELGLLVAARDDVLAEATRIRNRLHADLVVLVPGYGGRVARLVAERELATAGRALHRLDGVHAELARARLAELRRQLARARALAARIERLVGGHPLVALPGAGPLTVATLIAETGELGRFRSADAFAMLAGVAPIPASSGQVHRMRLNRGGNRQLNRALHVIALAQARWFAPARAFVTRKIAEGHSWKEAIRALKRHLARIVFRLLQEGAARFTAAA

SEQ ID NO: 153467 - protein, 462 aa, unidentified
MTGKHEGERWESNRRELQGLPVIRRNVAGIDLGSERHWVCAPTPDGSGREIANFGATTAELIRLGEWLKARQVESVAMESTGVYWIAPHEVWEAQGFEVLLVDTRQLARVPGRDKKTDPTDCEWIQRLHSCGLLRGSFRPEEAVCMLRTLVRDKANLVAERGDWLRRMQKSLDQMNVRVHRAVSDIDGATGMAILRAIAGGERDALKLAKLRDPRCSKTEQEIAEQLSGHWREDHLFSLQQALKMYDAVEEQIAAYEQEILRKLGEMERAEQRGQTAPPLKNSNKANMIKKRGQEPTRQALYRMSGVDATHIDAIGVETLEVVLSEYGPDLSRFPTEKQFVAHVTLAPHVPTSGGKPLRKRKRNSASTRVAAALRMAALSLRHSQTALGAYYRKMAQRLGGDIAVFATARKLATLIYRLLRWGQPYVDEGAKAYEARYHQQRIGRLAATAKQLGYQLAPINA

SEQ ID NO: 153468 - protein, 359 aa, unidentified
MVGRGSTKEREMQYFAGLDVSVKETAICIVDETGKVVRERKVATEPAALLAAFTESAVHCTRIGLEAGPLSQWLYSALAEAELPAVCVETRYMKAVLKAHSQINKTDRNDARGIAQMMRAGLFRPVHVKTLRGQRLRMLLTHRKLLQAKAIDIENDLRGTLRNFGLKVGPVSTPKFEARIRELVEGLSDIAGFVEPMLIARRVLREQFAALDRQVMAIARENVVCRRLMTVPGVGPVVAMSYVATIDVPARFGKSRSVGAVLGLTPVQNQSGETNRIGRISLCGDAMMRTLLFEAAMSLLTRVKKWSWLKAWAMNIAKRRGVNKAAVALARRLAVVLHRMWSDGTEFCWTREELQKAAA

SEQ ID NO: 153469 - protein, 319 aa, unidentified
MDSTKYIGMDVHKETISIAVLNSSGKLVMETIIETKASTVLEFVQELRGSLQVTFEEGTWAAWLYDLLKPHVRKIVVCDPRRNALLKEGNKSDRIDARKLAELLYLNKLKPVYHGEHGVRALKELVRSYLTITKDLGRVMTRVKAIYRSWGIPCTGKQVYAPRHRGEWLGKISEPGVRRRAEFYYKQLDALRALRQQVRRDLLAESKKHQAWKRLCQIPSIGPIRAAVLIGILQTPHRFRTKRPLWKYSGFAIETHSSADHRLVDGQLQRSQKQISVRGLNQDCNHDLKNLFKGAAIVASSKPGPFQEFYAALLEHFHK

SEQ ID NO: 153470 - protein, 411 aa, unidentified
MDKIYDNCCGIDVHKKLIVACFRCGKKQEVREFGATTRELLELADWLKDGGCEMVAMESTASYWKPLYNILESSNLNAIVVNARHMKAVPGRKTDVKDAEWIADLLQHGLLQPSYIPDKDQRELRELVRYRKSLVGERTRELNRLQKMLEGANIKLSGTVSDINGKSARSILEYLLTGKSIDGSKYDEMYEQKIIAHNLKATKEQIVDDLNGVMSPLQRRMMKELLVHLDELNIHIKNLDDEIDNFMKPEEKQASQAIQDVTGIGNTSAQAIISVIGSDMGRFPTDRHISSWAGLCPSDNESAKKRKSGKTRKGNALLRTTLITCAHAAVKNKKSYFYAQYVRISAHRGPKRAYVAVAHSMLISIYHILKDGVVFKDLGADYYNQFNKERKINAYLKKLKALGWEAPIVAA

SEQ ID NO: 153471 - protein, 377 aa, unidentified
MAEITRALIARVGVDLAKNVIQVHAVDGAGRRVLSRALKRDQFLAWCAELPKGCLVAMEACGGAHHWGRQLRAMGLDARLIAANFVTPYRMEGKSGKNDMTDAAAICEAASRPTMRFVPVKTPAQQGLMSLHRVREGFKEERTACINRIRAALQEAGLVFGKSPKALRAVLADVIEDAGNELSGEARLVLQTAFAHWRELDEHMRWCDRRIGEHVRGSEQAKRAAKIIGIGELGASAFTAGVGEFKQFKSGHQFGAWLGIVPRQNSSGGKAVLGRITKRGDDYLRTLLIQGAKSAVMSAGKRDDPTSRWLQQLVARVGWQKACVAMANKNARILWAVMTREQGFDRKHVSVKPPAKQPKSASASTPAPAPQTPACAA

SEQ ID NO: 153472 - protein, 366 aa, unidentified
MGMLAEHADHVIGVDTHRDAHSAAAIATRTGTVTAQTTIATDAFGYKRLLRFARRHARTRRVWAIESSGSFGAGLAMFLLAQGEWVVEVDRPKRPSRRNGAKSDELDAIRAAREALERDHLAQPRARGDREAVRVLLITRRGAIRARTRAINHLKALVVTAREELRHQLRNTPTDELVYRCSRLRTLPSHSAEHRATVIALRHTARRILALEAEANDLESEIERLVKHTVPELLAEIGVGPISAAQLYCSWSHRGRLRSDAAFAMLGGSAPIPASSGQTIRYRLNRAGDRQLNCALHTIVLTRLQHDPATRAYAARRLAEGKTPREIKRCLKRYLARHLFRILEATGPHPTTPPRPPRSRTIGHCS

SEQ ID NO: 153473 - protein, 400 aa, unidentified
MRVVFGIDVSKASSEVAILVNGEKVHGYTISNDAIGFARLLGDLRTVHKPEIIFEATGVYSRRLQAFLDEHGYAYTRLNPLEAKKQLDSLRVRKTDQIDAEKLAQSQCVLNRKTTYVQKEVYQNLRDLSRFYQNLTEDIVRAKNRLHKVLQVTFPELENILSTPSGEQYWNLVIAFPCKDFVLDLSKDELSESIRQSTSKRISDKRAAYLAEKLIALANQSYCAVKKTSPMLEEVRYYTKELLRLSEQRQAVLNEMVELAQPLPEYDILLSIPGIAETTATSIIGELGDIRRFQSANQINAFIGIDLRHYESGNFLAKEHITKRGNPYARKILFKCIHNIASASNTNPCHIADFYKKRKRQSQTTSTKPHTIASIHRLIRTMYYLIMHNKLYDYASTQNR

SEQ ID NO: 153474 - protein, 355 aa, unidentified
MRIIGVDVHTRQQTVAMLDRETGELIEKTLQHDGDEVRKFYSALPGQVLVGIEATGSMYWFLQLLEELGIDHQVGHPPEIRKAETRKQKHDRRDAALLLKLQIENRFPSIWMPSTELRDLRTLLMHRHQWVRMRTRVQNTLQAIAISRGLRRGKALWSQTGHRIVALAPHAAYRRTELQDLDHKLHAQIDELDQRVGDQALQRPGAKLLMSPPGVGPVTALATDVFWGDPTRFADGKAVVSYVGMIPSEYSSGGQQRLGGLSKQGNPFLRFLWCEAAVHAVRRDPELQRFYRRKLAQKGLGKARVAAARKLGIRLWIMLRDPIDYQEFCRRGQMRQKNGGACAGMPEVGHSPAMQ

SEQ ID NO: 153475 - protein, 457 aa, unidentified
MAKSKTGPRSKSKSTLVPIHRNAAGLDVGATFHVVAVPPDRDPAPVRSFKSFTGDLHALADWLKSVGITTVAMESTGVYWVPVFEILEARGFEVLLVNARDAKNVPGRKTDVNDAQWLQQLHEYGLLRGSFRPRDGIARLRALLRHRERVVEYAASHIQHMQKALMLMNVQLHHVVSDITGLTGIKIIRAILDGVRDPKQLAKHRDDRCKESVETIRKALDGNYRSEHVFALRQALELYDFHHAKVDECDVEIEAALIDLNNDRAAPSAPLLEARRRARNRNEPKFELRAALYTLLGADLSQIHGFGGYTVLRLVGECGDDMRKWPTVKHFTSWLSLAPGNKISGGRVLSSKTRRSANRAAVVLRIAAVNVGKTHTAIGAFYRRLAARTGKAKAVTATARKLAVLFYNALRFGMSYVDPGEDHYEENYKRRVVRQLHRRAKQMGFTLVSENTTVGVS

SEQ ID NO: 153476 - protein, 345 aa, unidentified
MDSLKTVFGIDVSSRKSNVCIMVNGQKVNDYAISNDMVGFNQLLDDLKQVTNPQIIFEATGVYSRRLQAFLDMHELRYVMMNPLEAKRKTKDDLHQNKTDKLDAMYLAKMQSEHPQRLAYVQSEEYQELMANNRIYEQASHDLITNKNRLHKAIQLTFPEIEHLMANPRGKNYWSIVLKFPHPNIVLETKEADIIDFLKSLSGIGEKRANDLAQRLIRLAKLACPAVKKSSAHIRGLEMAINNILSAEETCQTALKEMAKLAPKRDLEILKSIPGIAENTALRIISELGDIRRFNNPNQLNAFVGVDPQVYESGNLTAHLSMLISHKLLLKVLYYLIYQPFRGFR

SEQ ID NO: 153477 - protein, 309 aa, unidentified
MNKAVVYIGVDVAKASLDAAWAECSRRFANNKSGLSALTKWIKQSPFAVHLICEASGGYERGLLDAAEQNGIKVTLVQANRVRQYARAAGILAKTDKVDARVLCAFGSAMQPKPTPPLSAQQKRLRELETQRQHLSRMMVAEQNRLAQLNDKELQRLTRSLLATLKKQLAAIDMRMVGLIAEDQTLKQKAQKLTAVAGVGTRTAVLLLARMPELGTLNRTQAAALAGLAPFNRDSGTLRGKRTIFGGRRALRCGLYMAALVAARHNLILRDFYQRLRNNGKPHKVALTAVMRKLLLALNHTLKPTPCFA

SEQ ID NO: 153478 - protein, 359 aa, unidentified
MLANHREEWSATMKIATIGLDLAKHAFQVHGIDAEGNVVVRRALRRKEVLLFFGKIDPCLVGIEACATAHHWAREIERFGHVVRLMPPAYVKPYVKRNKNDMTDAEAICEAVTRPTMRFVSVKSAEQQSVLMLHRTRALLVRQRTMLSNAVRAHLAEFGIVTTQGVQNVIGIIQKLMAQPADEELIRERELLPELVRIVLAPVLSALLDLAVRIKVLENEIVKWHRANATSRRLETIPGFGAMTASAVAATVSDPSVFASGREFAAWIGLTPRQNSSGGKERLGGITKMGDAYIRTLLVVGAIAVIRYARNDSSTKSAWVRRLLEKKPVRVVAVALANKMARVAWALMMRKENYRAAQA

SEQ ID NO: 153479 - protein, 377 aa, unidentified
MGENTAFVGLDVHKETIAVAVAEDRRGGEVRYLGEIANSREAIRKLVAKLSKAHGTLHFCYEAGPSGYGIHRLLTEMGHDCELVAPSKTPARPGDRVKTDRRDAVLLARLHRAGELTPVWVPDEGHEAMRDLVRARTAAMENLRRARQQLSGFLLRHDRVFRTGCNWTKKHRVWLSGLRFQHPAHQIVLQEYIHAVDDAAARLARIEDQIRTLIPIWSLAPVVEAIQAMRGVSFISAVTVMAETGDLGRFDNPRQLMSWLGLVPSEYSSGPRTARGGITKAGSKDARRMLIEGAWTYRCHAAVGKEHMARLEGLPQEIRDIAWKAQIRLCARYRRLSARGKPATLVVTAIARELAAFIWAITRIVTPSTRPAAAAAC

SEQ ID NO: 153480 - protein, 418 aa, unidentified
MAQRNNSEIVSVVHRICCGLDVHKEMIEACLLRSDGVGGQSMELRHFATFTDDLLRLREWLLEHECPIVAMESTGVYWRPVHNILEGHIEVILVNARHIKNVPGRKTDVEDSKWLAGLLRHGLLRGSFIPPHEVRQWRDLTRLRRSYVESLSDYKRRTHKLFETANIKIDSVVSDLFGTTGRNLMALLITGTDFTPADIAKCACGKLKSKQEALYRAIQGFFTDHHRYLLSLLLETIAVFETQIESLNARLRTLMSSREPLLERLMEVAGISEVSARAILAEIGPTLDTFRSSAALCSWAGLCPGNHESAGKRHSGKSPVRKHHLKTIMIEVAWAAIKVKASYYRDKYYRLKTRRGPKKSILAIAHRLMKAIYHIIKNGARFHDLGEAFLTQKYAPVKLARLKKQAHQLGFDLVAQVA

SEQ ID NO: 153481 - protein, 309 aa, unidentified
MSEKNFIGIDVSKDSLDVAIAHSEEFKNFANTEEGQRDLKDFISSRRPALIVLEATGGFERGVLRELASARLPVVPVNPRQVRDFAKAMGILAKTDKIDARVIARFAEAVKPEARPLRTEEEDRLDSLNARRFQIVEMLTAERNRLSHATKWTKKGIQGHIRMLERLLEEINGEMDDLIKNSPIWRQKDKILQSIPGTGKVMARTVLADVPEIGTMNRKQISALVGVAPLNRDSGKYKGRRSIWGGRSKVRAVLYMCAVTAIRCNSKIKVFYKRLREAGKCFKVAITACMRKLLVIINSMIKTETCWNS

SEQ ID NO: 153482 - protein, 501 aa, unidentified
MAHITLERCCPNRRLAPARQIIIGEARALPQARILLIVYRVVRHRKDKDMQETPVPVFEEIRRNVAGMDLAWRADHYVCGPRRDDGGYDIEAFGTTTPELHRMLKWLKKRNVESVALESTSVYWIPTADLLEANGIEVVLVDARVVRMVPGRKSDLEDCQWLQKLHSCGLLRGAFRPPEAVAAVRSILREKETLTAMRTQSIQQMQKSLDQMNIRVHHAVSDIDGKTGTEIVKAIVQGERNPVELAKLRDKRCKKSEQEIADHLTGTWREEHVFNLGQAFKTLQFLDERIAEYDSKASEMFATLAAASDNPPPPPSPAEKLSSKERINLEGKTNIHQFMGFDPTTIPGIGYNTARIIAAELGTNFDCFPDERHFASYIGLAPSLSKSAGKKVRQKKRCRNTSRVGIALRMAASTLYRSQSELGAYFRNVARHTDKKTAIKATARRMAHMIYRGVRYGKEYIDRGAEAYELRLRERAVRTIKKLAKSYNISRSELQLVPAAA

SEQ ID NO: 153483 - protein, 465 aa, unidentified
MTTHKKWTNRKERKELTRRLQSENPGLEVMHPQAAGIDVGNSAHYVAVRPDQDPEPVRRFECFTSDLHRLADWLKSCRVETVALQSTGVYWIPLYEILEEHGFEVYLVNARHTKNLPGRKSDVQESQWLLKLHTYGLLNNSFQPPAEIRVLRTYWRQRAEHVSGAATCIQRMQKALTQMNLQLANVISDLSGMTGQAIVRAIVTGERNPQKLAELSHPRIEASREEIAKSLEGNWRPELVFVLGQEVEMYDTYQRRIVECDQQLQKHLASFADTVLPQSPEAEPREKKAKPTKNAPRFDLGSELQRITGVDLTRIDGIDVMVTQTLLSEVGMDMSRWNTEAHFSSWLGLCPDNRISGDKLLGKGTRHVVNRAATALRLAARNLIRSRSYLGAQYRRLRTKLGAPKAITAMAHRLARLVYRMLKYGQRYVDKGTEYYENRYRQQQIHFLQKKAAKLGLQITVAVQS

SEQ ID NO: 153484 - protein, 433 aa, unidentified
MLKLNYMSTLFVGIDVSSKTNAVYAMDFEENKYISSSFGNNQPGADQLVTMIAQCMHKHKNLDTVLIVLESTSVYSVHISNFLSTSEVLMPYKPYVFCVNPKATSNYRKSYIGMEKTDPTDAYLIADFGRVGRTKKLEPWRGGQFIALKRLTRHRMHLSECITREKTYMVSNLYLKFSELQLLEGDDKPFGSLYGATSSAVLTEFLSPQEIIDMPEEELLTFLAGKSRNRISDLSKTSELLRKAARDSYRLDKCMYEPLNISLASSFNCIHAYQKEIKLIEQAIEKCINGMNPNALLILQSIPGIGPIWASGILSEIGDITVFHSSDALAKYAGLYWPKGDSGDFTSEDNKMSKAGNPYLRCYLGEAANSVRKHIPEYADFYARKYAEVTKHQHKRALALTSRKFVRLVFGLLVKNQLYTGEKLDTEYNIESN

SEQ ID NO: 153485 - protein, 393 aa, unidentified
MTATQPEYTTQQRALYMAMELSEASWVLAFATAPAEAPRRKTVTARNLAALDLEIAKAKVRFRLAADAPVHSCYEAGRDGFWIARALTVRGVQNLVVDPASIEVPRRQRRAKTDRLDAEKLLRQLFRYHGGEKDVFHICRVPDDADEDRRHLHREMEAAKATRTEYGNRIKGLLATRGLTLVSIGRSFLGDLDGLRDWAGQPVPAELRARLERDFEHWQLADRHARQLESERRQRLRTAPEGKGVWEPVRRLLRLRGVGTNGAWLLVMEVFGWRKIRNRRELAALAGLVPVPYDSGLTTRDQGISRAGSRRLRALLVELAWCWLRYQPGSALTEWFRARFGAGGRRGRKVGIIALARKLLIALWRYVDQGEVPAGATEVDWRTKLNGNVEVCV

SEQ ID NO: 153486 - protein, 386 aa, unidentified
MIYIGIDVHKKKCVACLKNEKGRVITELEFENKTSGFSKLLEKVEGKEAKAVMESTGNLWIRLYTALETAGVEVMLSNPSKTRVIAESKMQTDKVSARTLAELLRTGFIAACYVPPAEVRALRHLIRYRTKLVRDLTRIKNRIHSILDKYELPTCECTDQFGKSGLQWLRMILPLLDVEDQFIMGSELDRILYHQSRIEDVSLRIAAKTVKTEDSLKADESPSEPAIAEDVVTLLSVIGVDYFTAMLFLYEIGDVTRFSSASKLTSWLGLVPSVHQSGNTCYHGKITKKGSRLVRWALIQSAQVAVQKDPHWREKFNRISYRRGKQKAYVAIARELAVTMYHMLINNEPYRFGREETTNRKLKKLNRLIKKAQTNQGEAPVQCFSS

SEQ ID NO: 153487 - protein, 341 aa, unidentified
MDEISTIGLDLAKNVFQVHGVDASGAVVVRRQLRRGAVEKFFATLAPCLVGMEACGSAHHWARVIGSYGHEVRLMPPAYVKPYVRRNKNDGRDAEAICEAVGRPTMRFVAVKSVEQQGRLAVHGIRSLLVRQRTMAANALRAALSELGIVAAQGYDGLRKLIAQLDEPSEQIPEAMRDALLMLARHWQALDADERLLEREIGKEARCNPGARRLMEVPGVGPIIATTVLAKVADAKLFRSGRDFAAWIGLTGKDHGSGGKHRPGRISKQGDRMLRALLISGASAHLRQQKARGVSDPWLRGLLARRPYKVVMVAFAAKTARIIWAMLVKGEPYRASAPAAA

SEQ ID NO: 153488 - protein, 353 aa, unidentified
MSKPIVSFAKPFFATPPSTFPPQASVFCGIDVSAETLAVAVLAPNQPSVERQFANSARGHKALIGWLGKSRALVRVSLEATGIYSMDLALALDAAAGIEVAVLNPKLVHGFAQTLRRSKTDSADAQVLAEFSQRMPFTAWQRPPQKAFALRAISRHIETLVVEQTRGRNRLHAAEGSMSTPRCVVEDLKRSLTGVQRRILKLRRTAKMLVDNDAQMGEQFRLLIGMPGIAETSALQILGELVLLAPGMTVRQWVACSGLDPVHQDSGTSVHKPARISRAGSRHLRRALYMPALSAIRWDPHLKGFYESLLARHKSKLQALMAVARKLLHAIYGIFRSQTPYDGKKLFPQLKTV

SEQ ID NO: 153489 - protein, 356 aa, unidentified
MSHDVKYIGMDVHKEAIVIAVLNSSGKQIMETIVETKASSILEFIHGLRGELHVTWEEGTWAAWLYDLLQPQVQEVVVCNPRRNALLKEGSKSDKVDARKLADLLRTGMLRPVYHGENGLRTLRELARSYQTISKDLTRVMNRLKALYRGWGIPCAGTQVYAPRYREEWLNKIPQAGVRRRAELLYQQLDGLQALRREVRGEFLAESRKHKAAKLLRQIPCIGPIRAARLIALMQTPHRFRSKRQLWTYSGLGIETHDSAQYRYVGGQVQRSKKPQQIRGLNQNHNHEMKEIFKSTATRASCATGPFRDFYAALLTNGMKPEMARLTLARKIAAITLTFWKRGGRFDAEQLKAQAA

SEQ ID NO: 153490 - protein, 398 aa, unidentified
MILVGVDVASEKHDVSIMRDTGEVIRDNFTVPNKESGYKKLLDEIEKAEKLYPDDKVRIGLESTGVYSMSLTEFLATHYEDSVILINPSLTSMFELSCHVHYAKTDKTDARGICKFLSKNEDIRPYAIVSYHTRQLRALYRERTKLNKRLNQDINRLKGQLHIAFPELLDKKHATIGPFELEFLSKYPTADSIRNMKPEKLVASFSKVKYMRIDIARAGRLIEAAKTSIGCSALAEGFVIKETVERIKLYRKQINELSEAMVPLVKEEHGNLLTIPGLGAVTVGGIVGEIGDASNYHGSDCLVAMAGLNPKVYESGNYAASHTRISKRGSSYLRNALYMAAQSMYMHGAEPIYSFVNKKRKEGKRKVCALDHAARKLCNIIFSMMKTGSEFIPSSANS

SEQ ID NO: 153491 - protein, 321 aa, unidentified
MSKIVLGIDVSKLKFDVALLLANDKFKHKKFDNKPTGFSQLIEWLEKYVSSTQELHICMEATGHYNEALATFLFDAGFKVSVVNPAQIKGFAYSKLARTKTDQADAKLIAGFCLAMNPKAWQPYPPHIRELQALIRRLEALQNMDAQEHNRMESASEAVLPSIMAIRDKLAEEIVSIKKRIRDHIDRNPDMRDKKMLLETIPGIGESTIAQILAFMNVEAFENARQLAAFVGLNPKQRQSGSSVLGRSRLSKIGNANLRKAFYFPAIVATRFNPIIKSFSEKLRSNGKSKMVIIGAAMRKLVHIIYGVLKSHKPFNPALAA

SEQ ID NO: 153492 - protein, 430 aa, unidentified
MHNKNYISVGIDVGSAFSFMTILAPDETVIFKPFKITHNNNDSLARAVPEIKKAEELYSLESRTFLESTGIYHFPLFCYLVDCGFNASIINPIITHSTKNGNIRKVKNDKIDSKGIAKLGLSKDIPVSQFPAKLVLELRSLTRKYYDLTDERSAHINKLKGDLHTVFPQYLDVFCDVTGKTSTMILRQYGTPDKILRGHKKTMIEKISKASRKGLAKASERYEKLCAAANAAKTFGCQIDSIYFNIFLTLDLVEKLDSALDSILNRIRQLITFNKNEKFIQQIKLLNTIPGVGFLTAVTIMCEIGDFSAFRNPKQLFAYFGLDPEVNESGKFVGTQLHMSKRGSRIARRAIFAVALASIRTKRNGEGINPYLRKYYELKSGQKPKMVAIGAVMHKVCNIVFAVLRDEKAFELRSPEEHCKQYQRPALAAA

SEQ ID NO: 153493 - protein, 350 aa, unidentified
MKITTVGIDLAKNVIQVHAIDENGKTAVKKAMKRDQVTKYFANLPPCLIGMEACGSAHYWHRQLSQFGHTVKLMAPQYVKAYVKTHKNDAADAEAICEAVGRPNMRFVAPKNVEQQTVLSLHAVRQGFVKARTAQGNQIRGLLAEFGLVINRGFAPLYERLPEIVEDGENGLPGSFRQLLTRLLAHLKELDRQVGEIEQQIQLWHRGNEASQRLACRRGIGPLTASAIVATLGNGQQYKNGRQFAAVLGMVPRQHSSGGKPTLLGISKHGDKYLRTLLIHGARSVLRAVQMQATPSANREDQWLRDLLARRHHNVVAVALAAKTARIAWALLAKGESLRPGASMAQAAAA

SEQ ID NO: 153494 - protein, 341 aa, unidentified
MQITTIGLDIAKNVFQVHGIGAAQKVIVRKQLRRGQVMAFFEALAPCLIGMEACATSHHWARELTKLGHMVRLMPAKDVRAYVKRNKNDAADAEAICEAVRRPNMRFVRIKSAEQQGQLMLHRARDLLMRQRTQVINALRAHLAEFGITAAQGREGIKELLAVVVQDEGSRLPVDAHASLTVLAAQLQSVQTMIGTLEKRIIAQHRSNEASKRLETIPGIGVIGATTIAAVVPDPRVFRSGRDFAAWIGIVPRQDSTGGKQKLGPISKQGDQYLRRILIVGAHAFLRRARQQPDKYPWLTQLLARRPFKVVAVALANKMARIAWALLAKGGTYRAPQLAAV

SEQ ID NO: 153495 - protein, 381 aa, unidentified
MRTVCGLDVHKDSVFVCILNENGIVFSAKYGVLTPQLEQLLSVLRQYDVGEVCMESTSIYWMPIWRVLEPYVDLKLVNPYFIKQLPGKKSDVKDAEWIATCLLKDLVKGSYVPDDLIQQLRQYDRRISDLNREIVRKLGKLDAALQRCNIRISNYVSTTDGKSYREVVRLIAGGVKDPAELVKVIHGRTVNRVGKDVVLASLSGVVSDTDVDVISQLRDEIDLAQRHKDECQSRMDAICRQYFPAQLKNLQTIPGIKGRSATAIIAEVGTDMSSFEYAAHLVSWCGLKPRNEESAGKIKARSTTHGNRYLRKTLIECAWAASKTQGCFYNKFSYHQVVVRKKCKMKVQVAIARKILVSIWHVMHDNVAYRDYTPDIVPADA

SEQ ID NO: 153496 - protein, 342 aa, unidentified
MSEIITVGLDLAKNVFQAHGADAAGRAVLRKKLRRDQVLAFFAQLPACVVAMEACGGAHFWGREIGKLGHEVQLIPPAYVKPFVKRQKSDAADAEAICEAAQRPTMRFVAVKSEETQGAAMVFRVRELLIRQRTQAINALRGHLTEFGLVVPQGAANAARLIALVEDPGSGLPADAIVTLRVLVGALIQLEKEIGKLDVEIVRRAKENEVARRLMTVPGIGPLIATAIAVLAPPPETVRCARDFAAWLGLTPRQHSTGGKQRLGATTKMGERSLRRLLLLGANSVIIKRHVHAAAKPGTWLGGMLTRKPPLLVRVALANKMARIVWALMVRGGVYQSPAVAA

SEQ ID NO: 153497 - protein, 405 aa, unidentified
MDVVYERCAGLDIHRDTVVASVITPEGREVRTFGTVTDELLALGDWLLALGVTHAAMESTGVYWKPIYNLLEGSGLTLLVVNARHIKAVPGRKTDVRDAEWIADLLRHGLLRGSFIPDRGQRELRELVRYRRRLIEERAREAERLHKTLEGANIKLGAVASDILGASGRAMLAALVEGRDDPEALAALAKGRLRDKHDRLVAALRGLVGPHQRHLLATQLRHVDFLDTEVAGLSAEIEERMRPFASAVELIDTIPGVGLRTAQAILAETGVDMTRFPSDAHLASWARMCPGTDESAGKRKSGATGAGNPWLRAALVEAAHAAARTKSTYLGAQYRRIAARRGAKRAAVAVGHSILVALYHMLSDGVTYEDLGPTWFDERDRRAIVRRSVRRLEALGYRVTVELAA

SEQ ID NO: 153498 - protein, 312 aa, unidentified
MTEVTIGIDVSKDRLDVHRLPTGEEEAFANTKAGLTALIRWLGTDPVLRIVFEPTGRYHLDLERRLAAAGYALVKVNPRQAKRFCEALGVRAKTDRADAAMLARMGAALALDPQPVRPDILNELNELVTARRALIKDRTAAKNRAKGLRLALLRRQNASRLTRIEADLAAIGKAIAILIASDPALAGKQTILLSIPGISDVTAAALLAQAPELGDLDQRQIAALAGLAPITRQSGNWRGQSFIRGGRAQLREALYMPALTAIRLNPDFKRIYARLTDSGKPAKVAITAVMRKLVILANALLRDKRNWSPEAP

SEQ ID NO: 153499 - protein, 348 aa, unidentified
MVLIGSDFHPSWQQVSWLDRETGETGDQKLVHEAGSVEKFYKQFPAGSRIGMEATGNCQWFLELMAKLGHEVLVGDAAKIRASDSRQQKHDKRDARLLVQLLAEDRFPRIWVPSREEKDLRQLLIHRYKLVRIRAQVKNGLQHLALNQGLQRKKRLWSEAGQKALCELPLAPWASRRREDLLKMRSELDAKIDLLDQAVMEAAEKNEKAKLLMTQPGVGPITSMAFVLTMGDVKRFPRGKQVASYLGLIPREYSSGGKQRLGSISKQGNSFLRMLLVEAAQGAARYDAGMRNEYLHRCHTKAKGVAKVAAARKLAIRLYWMLRSNTKYPEVVHVESSSRVPLVVRHGG

SEQ ID NO: 153500 - protein, 415 aa, unidentified
MDVLHDRCAGLDIGKKDLKACVRTPSPTRRNSRRQEIRTFATTTNALLELRDWLIEQQVTLVVLEATGDYWRGAFYLLEDTLNVILVNAAHAKGLPGRKTDVSDSAWLAQLGECGLLKASFVPPEPIRHLRDLTRYRSTLTVERTREAQRLEKELEDAGIKISSVATDILGVSGRAMLAALIDGQDNAGVMAEMARGRLRTKIPALVEALTGSFGAHHAFLCRLHLTRIDELSATIEELSARIEQEMRPFARQIELLVTIPGVKATTAQVIIAETGGDMTRFHTPANLASWAGVCPGHHESAGIRRSGKRRHGNRWLGGALGTAAMAAGRTRERTYLGARYARLVPRLGKQKTIVAVEHSILTAVWHMLTDNADYQDLGGDYFTKQDPERAMRRIIRQANALGLTVRFDPIPDVA

SEQ ID NO: 153501 - protein, 468 aa, unidentified
MGRPKQTTGKKTMKLPKHLQRLNLNAAGIDIGSRSHFVAVPEGADERPVREFSCFTADLHRMADWLISCGVTTIAMESTGTYWIPVFEILESRSLEVKLVNARHVKNVPGRKTDVLDCQWIQQLHTYGLLEGAFRPPEQICALRAYIRHRMNQVRYSGSHTQHMQKALTQMNLLLHNVVSDITGVTGMRIIKAILAGERDTQVLANMRDKRCRNSVETIAKSLQGNYRQEHLFSLKQAVETFEFYQAQIADCDREIEALLATFDSTTEDQLPPSPGGSKSSKAKRNASAFNLQNELYRVAGVDLTRIDGIDTTTALKVISEIGLDMSRWRTDKHFASWLGLSPGSKITGGKRLSGKTKPVVNRAALAFRMAASSLYNSSCALGAYYRRMKARLGAPKAITATAHKLARLVYSMLKNGTEYTDVGQEYYEQRYKSRVIQNLKKRAQQFGFELIETPLNLSEKSTINSMA

SEQ ID NO: 153502 - protein, 419 aa, unidentified
MRNIETKKVRVINQETLIVTVDISKVTNFGYCRCPNGKDVKPFGFMNNALGFNAFWDIIMKTKKTHDLKDVVFGFEPTGPYGEPLTHFMRKKKVKLVQINPMHTKRVKELEGNSPNKTDQKDPKVIADIIELGHVLTVVLPEGSAAELRRFTHARERAMQRRTAIFNQLQDLVYVIFPEFSQVFKDVKTKSARFILESCPTPEDIVKYKLKNLTTTLRKVSRGRLGEERAKELYAAAKTSVGTREDLQSILFEIKEMLAIIETTEHFVAEIEKEMSRHLEKIPYSRFMLSIKGIGDITVAGLIGEVGDFREYNTISEMLKFSGLDLFEISSGRHKGQRRISKRGRPFMRKLLFFAAINTVRKGGIMHEYYQGCLARGMLKMKALTAVSRKLLGVIFALVRDHSVYIENYAVEHGLNKAA

SEQ ID NO: 153503 - protein, 399 aa, unidentified
MLAVGIDISKSKSVAAILNQDGSMHTSPFEFHHTQPELDAFIKYILNSNQSATILMENTGHYHYPVLKAFQEAGLPVCIVNAYQIKKFGDMDLRKAKTDKKDAVRIARYALEKSYSLVPYTSMEQKYEDLRFLARQYNQRMLTLKTNKVFLLNLLDETMPGITNILPLTTRTPETSLSVLFINRFKSYDRIKKMGKNRFLDAFEKIARKSRNRQTKTYGLAIYEAALRNITTRGENEYILAAQDQCLELVCESQKAADSIIPKMQTLAETLPEYAVLRSMAGVGDRLGPLILAEIGDIRRFHSGKALNAYAGNDAPPYQSGTFESHNRHISKRGNAALRKYCFEVMQALKLTRPQNDPVYLFLLKKEQEGKPYNVAKMAGVNKFLRIYYARAMETLKQQ

SEQ ID NO: 153504 - protein, 331 aa, unidentified
MKKLALVGIDVSAKELVVALERASGPLEESSFSNDAAGHRKLIRFLMNNGFRAQVCVEATGVYHLDLCLALHGTKDIEVMVVNPRAAKDFHRAQLQRSKTDRVDARSLLEFLRRMDFAAWEPPRREILHLRGLSRRIQALLVNRAQEKNRRHADGAVEDTSPAIQKSIDRHIAAIEEEMEILSQAALELIHADAQLAKRFAYLTSLKGIANASAITILAELAVLPADMTVRQWVAHAGLDPRCNESGSSVRGQVRISKVGNRHLRRALFLPAMVASQHEPQVKAYYQQLLERGKKPLQALVAVMRKLLHAIYGMFKNERDFDGAKFYAMNA

SEQ ID NO: 153505 - protein, 407 aa, unidentified
MNENGKRYIGLDVHKHYLIALGVDANLEVVMPARRVELSHLENWMKKNLTRQDEVVLEMTTNTWQLYDELVEYAGLVMVVHPPHVALITRSQVMNDKIAASILARLLAKGLLVGIWVPPQEVRELRGLVAQRRKMTRLATQAKNRLHAVIQRHHLKPPAGNPFAKTNNGWWQALPLGKLEKMNLQSDLETLQFAEQQAARIQKEMTGIAAEDEEIGRLLHISGFGVITAVTVYAAIGDIGRFVEPKKLVGYAGLGARVHDSGMTTRTGKITKAGRRDLRVALVEAAHVVAHSHPHWKAELARLQPRLGYNKAIVAIARKLLVTVWHVLARKVADRFAEPKKVSQKMLRFAYAVGKENRAGKSAAQFARARLDILNLGEELTSIPWGAKKPIPLPPSKLKERSAVPNK

SEQ ID NO: 153506 - protein, 374 aa, unidentified
MPAAKKFIGLDVHQDTIAIAIADETTGKEVRFFGTIPNTSEALHSALKKIGQDGSQLRVCYESGPCGFVIYRYLAKIGIDCMVISPSSMPRRPNDRVKTDRRDAQTLARLLRAGELVAVWVPDEAHEAVRDVVRAHRQAKQDLAGAKATLKSFLLRHDRRFPGKAIWGGRHWRWLSEQVFPFPHQQYVFEEYKRRIHELEDRCERLEQVLAEAIEEWPLAPIVMALQALRGIKLIAAVTLVAEIGDLHRFDSPKQLMAWIGLVPAEYSSGKRIKRGEITRAGNAAARSMLIESAWHYRFPAREGRALRERNGNIPDNIRSIAWKAQVRLCGKYRRLANAGKQTVKVVTAVARELVGFIWDIARNTPIVAMEPQR

SEQ ID NO: 153507 - protein, 355 aa, unidentified
MSVYVGIDVHRKRSQVAVIDQDGEVLANRNVPNGVETILGVIGGLPPGTPAAFEAAFGWGWLVELLEDYGFDPHLVHPLQCKAIASARLKNDKVDAAILAQLLRADLLPEAWIAPPAVRQLRALLRHRAQLVRLRTLLRNRIHAVLADHGHDRPAGCWSGPGRGWLASLPLPAVSREVIEDDLALIDALQVPIDRLDIEVRQRARSDPRVKVLTQLPGVGHFTALVILAEVGDITRFGSARKLASWAGLTPTVRGSDRTVRHGHISKQGSAWLRWILCEAAQTAKRHPDYAASYAAIARRRGKKIATTAIARKLLARAWHLLTDAERTAGLHATTTSAPPPRDAVNDREGSPSPG

SEQ ID NO: 153508 - protein, 337 aa, unidentified
MEYFAGLDVSMEETHICILDREGVLIREGKASSTPKMIAAFLADGPICAKVVFETGRMAPMLFHGLTGLGVPVVCIESRQAYQALKSLAGHKTDRNDARGLAHLARTGFYKPTHVKSLSAHAIRSLIAARKKLVGQRVTIDNQIRGLVVVFGVRLPRALSPAFKDAALKVSDGVPGLHAALRGLFAAREAILTAVAAIDSDIKAMTRKSKICTRLMTVPGVGPITALAFAAAIDDPTRFKRSRDVGSYLGLVPKRHQSGEVDYIGSISKRGDVRVRTLLYEAANVMLTRYAAPLKLKSWALAIGQRSTMRKARVALARRLAIILHAMMRDQTDFQAG

SEQ ID NO: 153509 - protein, 424 aa, unidentified
MKVTYQTCCGVDVHKSFLVATIVKTTGGVEPSYQKKRFSTFNNSILEFKHWLLDNDCLDVCMESTGKYWVPVFNLLEDEINVVIANPKWVKAVKGNKDDTKDSKWIGDLFRLGLVKGSYIPCKAVRILREYTRYRYKLVSCRSSEKNRYQNALTVCNVALDSVVSDIFGKSSTSIIDYLLDQSGTSINHEEIASKLLRNLKSKEDAVIESVEGYQMTDTQKYRMRLVRAHMDYITAEINDVDKMIENMISSNPDFENAIQFLCTIPGVKRDSAITIISEIGTDMSQFSGSKRLCCWAGLTPGSNESAGKKKSVRITRAGVYLKPALVQCAHAAVKSDKSPYYKKKYESLVKRRGKKRAIIAIARMILTAIYQMLSTGEEWNPSNLYKIDMPVALVEKQKAKAIKQAKKLLQREGLLPPDEPLFL

SEQ ID NO: 153510 - protein, 338 aa, unidentified
MKITTVGVDLAKSVFTVYGVDEHGKPALRKTVRRGKLLELFAQLPACVVGMEACSGAQHWARELRELGHTPRIMAAEFVEPYRRGGKNDTNDAAAICEAVARPQMRFVPIKSVEQQAVLAVHRLRQGLVEERTALANRIRGLLTEYGLVIGVGLDRLRKALPSILEDAENGVPGIAREVFADATRQLIELDARIGEYDRRIAALARASEPAQRLMKMEGVGPVTATAIVASVGDAKMFRNGRQFAAWLGLTPRQHSTGGKQRLGAMTKHGDVYLRTLLIHGARAVLRVTPTHSDAKSRWAESLRHRRPDNVAAVALAAKHARIIWALLARGQHYRPAV

SEQ ID NO: 153511 - protein, 355 aa, unidentified
MGKSINNPSSVTRIGVDLAKNIFHVHGVDAQGAVVIARSVKRSGLLKFFASLPRCLVVMEACASAHHWGRALIALGFEVKLIPAAYVKPYVRRNKNDAIDTEAIVEASRRPGLRFVPVRSVENQAQLMRHRVRELLTGSHTRMLNALRGHLAEIGIVAPQGAENAYDLMRQLADGFDENGEIIPDCVRASLAPLVRQIEAIDAEIATVDKELMALAKADDTARRLMTIPGIGPVTATAVVATVQDIGAFASPRAFSGFLGITSREDSTGGKVRLGRITKMGDRYLRKLLVVGACAVLRHLKGHKDALRLWAGQLLERKTVKHKFKLTAVALANKVARIVYVLMTRGGEYNDAPAA

SEQ ID NO: 153512 - protein, 393 aa, unidentified
MKASNNIINRIIGLDMHPDVFAAAALENKDAGSAKVIWVHDRQATAHLEKWASKHLQIGDILVLEASGNSFEIASRLHALGYIAIVLESAQAAKVRENFCNDDRHSAIKLARVYLSGLAKVVWQPDEATRQLREVFFLHRSMVKECTRQRNRIRSFLNEYCVRLPKGTRLTTQEGLRGALRAKEWTSLQKELLSERFDCLQQSEKRRKHLEKIMIKELLDRPQWCKLWRMMGVRHIVAFGLMAIIGDVNRFPNAKKLVGYIGLSPSKVQSGNNVKGREKGTGNTGRGDVRALLVQSAQNALNYRESALHKWGWKLALKKHRNLAVAAVARKLVTAIWHLLKGHFTPLLEMTKQLQLKLSVIAGILGKETLKDMGFEKRNDFILKQFENMKINT

SEQ ID NO: 153513 - protein, 335 aa, unidentified
MQIYGIDLAKEKFDVSFFDLTSKKVSNQPSHKVVKNNLKSIGRFLETLPSDAVLVAEHTGVYGDTLLKCCMDSNVKIAFVGGYVIHRYRATPDRAKTDVLDCALLRDFGERYPDKLKYKTFPEEALYELRQLARHREMLVEQRKQLITADKSEDCRPVRSLAVKRSMDRIKEMLDTEIAETEKEMLKVIDGHDSIHHNYEIVKSVNGVGLITAVELLVKTDNFTKITTARQYSAYAGTAPYEKSSGKMDKGAHISKIGNRRSKTLLYICAESARLHNKEIKLYYERRTLIDKKPRHYVLNAIANKLLRIIFTLVAKGECYDANFIRQDPRVVKHN

SEQ ID NO: 153514 - protein, 359 aa, unidentified
MYFSGLDAHLRYVTVAVLDRLGGVALETTVPTREPDRLLAVLAPFRPLEVVVETCPFWPWLYDLLVPAGIGFHLAHAKALRAIATAPQKSDAVDARLLARMLLSGLIPEAYPRSADQRELLRLLRHRTALVRFRTRLAGRIHSQLHQQRLSLPRENLLRRATRAWLEATAWPRLTVEQRAIVTTHSELIDHLTPLIRALERRIAAAAAGDATAPLLATIPGIGPYRSLLLAAELVPISRFPRAEHLVSYAGLAPVTRSSGGHTHHGSIPPAANRWVRGALVSAIPSHVRYAPTSPGTVAYEQLKARLGWRVARVAAARKLARVVYVMLTRRTPWHGVPAAGDVRDEVQNSHVAPTTSFC

SEQ ID NO: 153515 - protein, 346 aa, unidentified
MLHVGLDLSRKRIDVCLISDQGELIDRFTATPDRDGLYGLAARVAVYGEPVRGVVESMNGARFVHDELVSHGWEVLVADAQKVKGLAPLACKTDKIDSRVLAELSFRDLVPAIWLPTVELRREREISRWRLHLVKHRSTLKNRVHSTLITFGHQRHMSDLFGVAGRKLLKELEMPEPWRSHVDASLVLIDDLEARITAIVKELRRSGADHRYIPILMSAPGFGWITSFTVACEIADISRFSSPVKLTGYTGLCPRVKQSGQMDQRGPLSKHGPRYLRWGLMEAAIAASSHPLYRERYQRTRRRLGRQRGPKVAQIDLARQLTEAIWYMLTRNQPFAPAGATFRLAA

SEQ ID NO: 153516 - protein, 384 aa, unidentified
MKKNNTAKKSPKPKALSNSKKNQIREVAAKQRLTIGLDLGDRTSRYCILGEAGEVVSESQLPTTKAGLSSLFEKMPSSRIALEVGTHSPWVSRHLAGMGHEVIVANAHKVKLITQSVHKNDRIDAEQLARLARVDPKLLSPIRHRGTEAQADLAVIRARAELMEARTRLINCARGLVKPMGERLKKCDADQVKENLSEGLSEAAQTVIGPLLKSVEAISKQIAEYDQKIEEIAQRYPEQKLLTQVYGVGTLIALAYILTLEDAERFEHSRDVGPFLGLKPKERDSGDSHPQLGITKTGDGLLRSLLVQGAHCMLRKGAPDSDLRAWGLAKMKSGGKNAKKRAIVAVARKLAVLLHALWSRGEVYDPLYNRKAAQAAKSKGQIAA

SEQ ID NO: 153517 - protein, 460 aa, unidentified
MAKLIMGIDVACRASHQASLADAEGNFLWSGRKFRTLQSDLETLWASLPTDCDLTVVMEPTRNAWVPLASWFRRRGVAVVMVPPEQSADLRDYYSKHTKSDRLDSRILARVPLLHPEGLHSLEGLGPADPLRRITKLRSSLVKRRSVIAARLDAYLELLGPTWHAAFGADVIKYTALQFLAAGYANPLTVRRLGRARLTKFLWRHSRGAHGEALATLLLAAASESIELWGGDIDFDELADDVAVEARVALALTKEIHELDERLAVSLQTLDPKGIMISVPGVALVNGAQILARLGDPNRFRSLAGARSFSGLVPSLNSSGVNGHHGGPTKSGDAPLREALFMASQWARRTDPTLAQRYHRLMVQEGKHHNSALCHVSAILLTRIIACWRSGTPYVIRDLDGTVLTPQQGRAIVRERYHVHDDVRALRRTLKKGTSYRNEESLGAPSTHSSPSKNKALIST

SEQ ID NO: 153518 - protein, 346 aa, unidentified
MYQDNKEELKMINNIFYGLDIAKMVFHVFTINKDEIVKKQLSRSQLLKYFAQQSRGVVGIEACGSAHHWARELEKLGYQVKLLDAKHVKAYLKGNKNDFNDAEAIYDAVTQVNCREVGKKTIEQQDIQLIHSFRQELMKHKKALVNQIRAHLRERGIIISVGMSKFHQQLPELLENETNYLSQISIRSIRAHYEQVKQLELLIRENDLEIEQLCRANELSQRLVEIQGIGVMTATILVSDIGKSRTYNKSRDYAASLGLVPRQYSTGGKPRLLGISKRGNAYIRTLLVHGARAVLKNIKDKKDKLSCWCRALIERRGFNVAAVALANKNARIVWAMATYGTNYEKP

SEQ ID NO: 153519 - protein, 351 aa, unidentified
MNILAMDLGKNKTVVCYYNSQNGKHKYGKLKTTPQQIHDLIVEKLPDRVVFEISSTAGWVYDMVRALGIDAQVANPNHQGWRWKNVKRKNDRTDALKLAQLSAMNQLPMVHIPNRKVRQKRSLIQYRQRLVKRRTQIKNNIRAILEKEGYSMAKGKCGWSKQSLEQLRRTALPLEECDFDNLWRGQLWVELEMLEAVTSSLAQVEDKLDSQAKSDSQIQRLQTAAGVGPRLAEAVAAFLDEPSRFASGKQVGSYAGLTPKQYQSGSMDRQGRISGQGNKLLRALLVEVSWLGLRHNSWMRETYQRILRGSPSRKKIAITAVARKLLIRCWAMLRDEQPWRDLRVEMEKRAA

SEQ ID NO: 153520 - protein, 381 aa, unidentified
MTTAVTHHEQRNPTEATLFVAFELSEKTWKLGCTTGHGQKPRERTVTARHHEHVLNEIAQAKRRLGLPATAPVVSGYEAGREGFWLHRFLQAQGMTNHVVDSSSIEVNRRRRRAKSDGLDVRTLLSMLMRYAQGERQVWQVVKVPAVEAEDQRHLHRDLETLKQERASTTTRIQGLLRSQGIRLTSLSKLPEQLEALRLWDGSPIPPGLRRRVLRVYAHHTFLSEQIAEVEAERRAQLQASTEAHIDKVRQLMQLKGIGINGAWLLVMEFFGWRAFKNRREVGGLAGFTPTPYQSGERAREQGITKAGNRHVRWMTTELAWSWLRFQPDSAVSCWFRERFGSGGKRLRRIGIVAVARKLLIALWRFLETGVLPAGAVLKAG

SEQ ID NO: 153521 - protein, 479 aa, unidentified
MTRHNCSRGPATRAQPARPPRPPRDTAPALTVLRPNAAGIDVHSDMHMVCVPAASVPPATGDAGLPANVRRFGANSCDLYAIADWLKQCGVTTVALESTGVYWVPLFELLEARGFEVWLVEPGQLSRCGARPKTDALDAQWIQRLHSYGLLQPSFRPADSVLALRGYHRQRQMLIRYAAGHTLHMQKALEQMNVKLAEVVSDITGLTGQRIIAAILAGERDPRALAALRDPKCKNDAAAIAKALEGTWRPEHLFALKQAHELYQFLHRQIAGCDAAIQAELTKLPNRAGDKPFSAKPRRSGRKPNDLAFDAAGPLFRALGVDLTEVEGIDVGTALVILAEIGVDVSRFPTEKHFASWLGVCPRQHQSNRTTKKRGPRKGKNRVAIALRMAAQAVGRTQSPLGLFYRRIKSRIGGQGAVTATAHKLAVLVYRMLKFGTEYVKRSMAEYEVKLRAQVERQLRAKATRMGFDLVPRCVTASI

SEQ ID NO: 153522 - protein, 344 aa, unidentified
MGTVYLGIDVGKTFCMIVGIDEQGRTLVPARRVPALDLARWRVLLPELQKLGELRACFEVGPHYEWLYDVLTEFCAGVEVINAADFALINQSHKKTDKVDAQRLAEGLRRGDLPSIFVPPKAIREHRRLVSTIHFNSQSLVAIKARLRGLLLTMGLECRCSDILSGKARAWLDEKKVAFGVCDRLTLEQLIEQGELLQKQRARLDQLAKDALAQYSDAKLLRSIPGFGILTTLAVLSAVVKIERFDAADKLASYVGACGSVMQSGQTLRLGAMTKRGNVHVRWLLSQALLHLHRKDPRARKRYLKLRRKKPSGVARGAQVRWLATVLWHVWSKKSEYRIGGKTA

SEQ ID NO: 153523 - protein, 415 aa, unidentified
MDAIYERCCGLDIHKRTVVACVIVPGSARQARKEIRTFGTMTDDLLALADWLAAEGVTHVAMESTGVFWKPIFNLLEDHFQLLLVNARDIKQVPGRKTDVKDCEWIADLLRHGLLKASFVPDRPQRELRELVRYRTTLVRERSAEVNRLQKTLEGANIKLASVASDPLGVSARQMLDALIVGSTDIAAMADLARGKMRAKRDLLERALAGRMAPHQRFLLTEQLCHIDALDDGIARVSAEIAERMRPFGEALERLDTIPGIGQRMAEILVAEIGIDMSRFPSAAHLASWAGMCPGNQESAGKRKTGKTRKGNVWLRAALIESAHALGRGRGTYLAAQYRRLTARRGKKKAAVALGHSILVIVYHLLSRGEVYHDLGVQYFDEGRRERLERGLVRRLEDLGYKVNLRPFQPTTSAA

SEQ ID NO: 153524 - protein, 347 aa, unidentified
MTLVTDGLVVGVDTHKDVHVAVVLDRLGRRLAVREFPATDAGNTRMAKWLAGLGQVIDAGVEGTGSYGYRLARLLADRGMQVWEVNCPDRSRRRRKGKSDPVDAENAARAVLSGEATAVPKDRRGFVGDLRLLVLTRRSAVKARTQASNQIKAFLVEADDELRAQLHGLRKARFGRACAALEPADGLRRALAALGRRWLALDTEARELEAQITALISVHAPVLLARHGVGAVTAAQLLVTAGANADRLRGDAALAALCGASPVEASSGKTSRHRLNRGGDRAANNALWVIAHVRTISDPRTRAFVAKRTATGNSRREIMRMLQRYIARELYPLIIDALRAAAVDGLT

SEQ ID NO: 153525 - protein, 353 aa, unidentified
MDKYIGFDIDSKKVAVCVVESGKFDINATIKPDVNSMRQFLQSQRQEGSRVHLAYEVSGYSGYLHDHLGECVDSITVANPTKTTWIYRTAKKSDRIDAKKLAVLLSIGELPSVHVPCKEVRQWRQMILHRRNIVSQVCSVKNRIRAVLKSAGYFTAGHRGGWWNKSNLGWMKSLSEGLELWCMQLGQLMAQYEFLARQVDSVTDHLEEYLRSKPAAKLLMSIPGIGPRTAEAILAYTDGVERFGGSREYCSYFGLVPKLDQSGDSRRVGHITKHGPSVVRWLLCEAAWKSVMKSPSLKAFYERVRGGDARRKKIAIVAVSRKLLSIMRAMLTTGEMFNEKMVLEDSNKVESAA

SEQ ID NO: 153526 - protein, 340 aa, unidentified
MNDSGTICWDGQLDSTPEAFRSLKEALPAGEPIQCVLEAGRNWGILYDALEELEMNPKLANPLKMRLIAETFTKTDKIDATTHAIILKAGLTPLVHVPSKEIRDQKNLLRQRAWLVKLQTMLKNRVHNVIDRNHLTPPDVSDMFGARGRAWMNALTLRDPDGQLLRADLEFLDTIKSHIRQTEKWIDATLKENPNIPILMTLPGVGKLLAALIALEVDTIERFPSPAKFCSYSGMACSTYSSGGKTYHGGLIKTSNRHLSYAFIEAAWKAARVSPYFKAFYTRLRHRKGAQDAIGAVGRKLCEITWHCLKNRRSYKEKAYQFRQARKNKNDFGLVALKSP

SEQ ID NO: 153527 - protein, 346 aa, unidentified
MNQIIRIGMDTSKHIFQLHGVDAAERPVLRKRLRRKQVLAFFAKLPPTVIGIEACGASHYWARELGRLGHEVKLIAPQHVKPYVTRNKNDGRDAEGTCEAMSRPTMRFVPVKTAEQQAALMLAGIREQLIARRTQLSNTIRGYGAEFGVTAAKGLDKIEPLLAQIAQDENLPALARELFATEGREYARLQAELKAIDARLMAWHRANACSRRLAQIPGVGPIGATALVMKTPDPRAFSSGRHFAAWLGLTPKDHSTAGKTRLGKITRAGDEVLRRLLVAGATAVIQQVRNGRGRPSPWLLALLKRKPPKLAAVALANKIARIAWKLMTTGERYDGARMPGASAVAA

SEQ ID NO: 153528 - protein, 340 aa, unidentified
MNSTAYGVDTAKNVFQAYSVNQGTGEVLNKQIKRAKFLEYFVNKPPCLIGMEACGGSQHWARALQAMGHEVKLMSGKAVKAFVSGNKNDAADARAIWLALQQPGVRAVAVKSEAQQAVLALHRMRQQLVKFRTMQSNGLRGLLGEYGEVMPVGRAALNRGMKDALTRLAERLPALLIDTLREQWDMLARLDQQILQIEQRLLAWMRQDRASKVIAEIPGVGLLTATAAVATMGDANAFKSGREFAAWLGLVPAQTGTGGRVKLLGISKRGDTYLRTLLTHGARSVLMHTKEPGKWLQDIGKRRPPNVVVVALANKMARTIWALLAHDREYDREHVSLRPA

SEQ ID NO: 153529 - protein, 348 aa, unidentified
MKNKSFVGIDISKKVIDVSIFREDTNIKMFPHEVFNNTRKGFGDMCSWLKKSRVVLSQALFGMEFTGCYSLDLEKFLTSKNYSFCMLSTRIVKHHPMGTIDKSDKNDSAKIADFLYRYDGTECAKPYKLPSKAMQQLKQLVNERKFLVEQRTNFMNRMQMFETKENSAMYESYIKKLNHDIEKIDQEECELMSKEEDVLDTFQNLLTIPGIGFVNATNIIAITRNFTAFDTARQYARYVGVAPCSHTSGTSVKWRARPSAHCNGQVKADLSMAALRAVEYDVEMQIFYNRKLGGRKDSDTKRKALNAVKFKLIRRMFAIGKQKRTWEVLNTSDDRKNLHIEKSKASEL

SEQ ID NO: 153530 - protein, 338 aa, unidentified
MSYFAGCDLHSNNTVIGILDEEGKRIYKKRVPNDLDQILNHLKPFKNEMKGVVVESTFNWYWLVDGLKDADYKLHLANPAAIKQYEGLKHTDDYHDAYYLAELLRLGILKEGYIYPKKERAIRDLLRKRLMLVRNRTAHILSFGSLYYRQKGSKLSSSDIKKLKEENVECLFEDPHVILAGQANVAVMNFLGPKIKEIERIVLNTMHLQPEFKKLTTVNGIGKILALTIALETGEITRFPKVGNYASYCRCVSSQRLSNEKKKGHNNRKNGNKYLSWAFLEAANFAKRYYPSARNFYQRKLAKTNKILATKALAHKLARASFYLIRDKVDFKPEMLFG

SEQ ID NO: 153531 - protein, 314 aa, unidentified
MNQTITVGVDTGKAQLDVHIRPLKLFFSVENSEQGIQQALKIIKLHRPDRIVIEATGRLEMPFILACVKAKQPIVRANPVHIKRFAGAIGRRVKNDKLDAELIAHYGEAIQPALTSIKPNSLRLMSDLVARRDQLLSMRTMEKNRIQILPKPLHSTIKPVITAINRQITKLEERLVSLIDQSQEYHEKSLILKSVPGIGDIAAASLISNLPELGYVTNKQAASLVGVAPITKESGDRKRRRITLGGREQVRTVLYMAMMSAMQCNPVFKQFYTRLVDAGKPKKVAIIACVRKMVVILNSMLKYDTMWQDDRVST

SEQ ID NO: 153532 - protein, 345 aa, unidentified
MTVTVLGIDLGKTIFHLIGMDTRGKIVLRKRYSRSQLLKFMANTPACLVGMEASCGCHHVGRTLASFGHEVRLIPAQFVKPYVKSQKNDYRDAEAIAEAVQRPTMRFVPIKTQEQLDIQAVHRVRERLLAQRTSLVNQLRAFFLERGLIVRAGRAYLWRALPEVLARAEEAMSPRMFRLMLAIVQQWRDLETQIATLEQEIARVAQSDPACQRLQTVPGVGPLAATAIVAAIGNGAAFKKGREFSAWLGLVPHQCSTGGQTKLLGISKRGNEYLRRLFIHGARSVCLHVNRTRHAWGEWVTTLRSRKPSNVATVALANKLARITWSVLNRNEIYRGHVDPLAMTT

SEQ ID NO: 153533 - protein, 481 aa, unidentified
MKIKSIYPAGNSSQLREVLDKYSPGELLYAPIDIAKYNHKACAVNFFGDILTPAFEFSNNTHGVKFFISKITEAARNAKAKKIFIGLEATGHYHQNLTLHLRSLGYEVAVINPFDSWKERLNKSSKTDRIDLGSIAKSLISRKFSSSTVPQGVYYNLRRAARTRRKFVNRKTSSKNIITGLLDHLFPGLWDKEDTIFSDRWGKVSLLVLEHYPTPQMVLRLGEKRLTRFLRKNNTKLGEKTARKITSAAKVALTRSPYEQTMDILALRSHLQAYRLYEEIISHLEKEIAHLLVQTPGTYLLSVPGISVTYAAEVTAEIGDISRFAYAHQIISLAGTCSKKDQTGEHDPQNLPISKKGNKFLRTVLNQAGLSLNTWCPDFNAYYSRKVEEKKGRCGIARTATGNKFARLAFALMKHESLYHPRSFNTLVQDPGNYYLSVHGEILKKLRAFSSEKILPQNNYLEKIKQKLEKEYAINLSEVKG

SEQ ID NO: 153534 - protein, 400 aa, unidentified
MISVGIDISKDKSTVCMLRPYGEVVEAPHDIEHNEQSLNALIKRIKSFDEDVKVVLEATGGYHQVVVTKLLEADIFTVVVNPYIMKKYCAAALRKAKTDKIDSIRIANYGIDHWFSMTAYCPPDEIYAELKLLGRQYDQYVRLKINCKIQLANLLDGVMPGIKTILQGTVPAYSTKDKLCDFVEKYWHYDNIKKMSEKQFISDYEKWTKKKGYRYNGSQAIAIYQLSKNNIPTLKSSTPSTKMLVLQAVKSVKDAEATLSLIISQMQEIASTLPEYSVVRDMKGVGDVLSVRLIAEIGDVRRFHNGSALVAFAGIDAPPYESGKFVGTKRNISKRGSATLRKIGYEIMHSLKVVKPTEDSAVYDFIIKKESEGKPKRVAKIAGLNKFLRIYYARVMEVYC

SEQ ID NO: 153535 - protein, 405 aa, unidentified
MPYILALDVSMGHSYSVLYKDDTCLFEDEIEHTQRGFHALLEEIQHLPERPLIVFEATGIYSRPVEKFFQDHHFSYCLLNPLEAKKQMEENTLRSWKTDKSDAHRLAQTHLKNQRQPKEVQSNFYLEMRDLARFYQEIEKKITRLRMDLHNCLQLTFPELEQFFSNRLTPYALTLIRLFPHPDFVLASTRTKIKNKLINETRKKISANRAEQKADQIIHYAQCAYPAVEKDSIHCQKTIYYAELLQDLLEQKEALATQMIKKAEGSPCFLLYQTFPGIGALTAALLLGELGDITRFKTHKQLNAFVGIDIRRYQSGKYTGQDRINKRGNPKARKIIFFTIRNMIRQQRAAPNHIVDYYYKLKKQPIPKKEKVATVACMNKLLKCMHAMVRAHTEYDYAYAVSVDH

SEQ ID NO: 153536 - protein, 345 aa, unidentified
MPIVGGLDIHRKQITFDYLDTETGQVQRGQVSPADREHLRAWLARFADRDDVAFAVEGCTGWRYVTEELAAAGVAAHLAEPADTAFARGRKRHAKTDKTDSRHLRQMLAEGRLPECWIPPGRILECRALLETYHDLRREHTAWVQRIHAVLFHQGAPALGGGTLRGEQGLAALREVSAACLSPAGQLQVATALEVLEALEARMHELRHQLLDAARHLTGAKVLAERLYGVGPFAALAMTCWLAGKDRFSSSRQAVRFAGLDVTVWSSDRKGPPGRLSRQGPPVLRWALYEAGKTHARAPAPDHAYYAQVKDRCNGKRAALSEARKILRQAHHILAELGDDALAAA

SEQ ID NO: 153537 - protein, 343 aa, unidentified
MEQFVGLDVSLAETSLCVVDSHGATLWQGKCGSSPEAIAATVRARAPKVARIGFESGPLSSWHWHELKKLGLPVICLDARHAKAALSLQLNKSDRNDALGLAQIVRTGWYREVAVKSLDSQLIRSLITTRAQLVRMRVDLGNQIRGVLKPFGLVAGKGSGQPFVDRVRTLVAGGPLEDVAEALLSAWQAVGRQITVLSRRLILMARRDTAVRRLMTAPGVGTITALTFVSIIDDPGRFAKSRNVAAYLGLTPRRYQSGEVDRSGRISKCGDALMRAYLFEAAGIVLNRVSRWSALKAWGTRLIKKIGSKKATVAVARKLAVILHRMWRDTSTFRWASKEGRAA

SEQ ID NO: 153538 - protein, 415 aa, unidentified
MNSNPLIAGVDVHRKTNTYCLMTQDGREVVPRFTLDNNRPGTQRLIEKVGQIMETNGFSELRLAAEATGWYWFHLFESLRNNPELQTWPHELFLLNPRLTANFKKSYVDLDKSDPIDAYVIADRLRWGRDITTPFDYDENLLALRFLTRYRYHVVHQLASEKAYCTAILYLKASEYSNDDKQAFSNLFGAASRAVIQEFVSMEEVATLPFDELVTWLDEQGKHRFPDPAENAKRLQQIARDSYPLSEALQPSVNLVLSLSLKNISNLEALSKRLDTAITEQMETIPNTLTTIPGLGSVLTAGIIAEIGGVERFDCDQAKVAKFAGFKWRKSASAEFQAEESHLTRTGNPYLRYYFCEAAFSVQRCDREYGAYFQRKFKEARNHRHKRATVLTARKLVRLVVRLLATNQPYQPRRL

SEQ ID NO: 153539 - protein, 393 aa, unidentified
MFFIGIDVAKRKHSLAAITKTGEKVIEGYEFANSTAGFEHMLLRLTTAGITHENSRVALEATGHYSRSITAHLIDKGFEIALGNPLQTHNFAKAQSIRKVKNDAVDALALAQWLLVGSPVSARLSSSETSELKSIARFRTFQSQIIGDCKRKAIAVLDQLFPEYASFFSDIFGTTSLAVLMRYPSAKALSRAHIDSLTGLIEKSSRGKLGGELAHALRASAKSSFATNAAIAAQTLELKQLLSQIEFARKQLAEIDREMKVLLDKAQTLITTIPGIGVVCGATILGEIGDIARFKKPSSLVAFAGLDPSVYESGEFKGTNNHLSKRGSTYLRWALWIAADRARVFDPAFKGYYLKKRGEGKCHKVAVSALARKLCNTIFAVLTNNVEYVCRAS

SEQ ID NO: 153540 - protein, 402 aa, unidentified
MVYDYVIGMDVGKYFHHACVLDSHGAQVLSKRINQNEQALRALFSNFYSGNNKVLVVVDQPNNIGRLTVAVAQDLGIDVRYLPGLAMRQLSRIHAGNAKTDIRDAYIIAHAGKNLPASLRSVDRVEKAFCQLKVLNGIDEDLARSYTRLINQIRSALVGCYPQFEQAIRGQIIHRKWVLHLLARYGGPTKIKRLGKTKTIAFARRHKARNPEPVIDAIFAAIAEQTVSIAGAHYAEMGVAMSAKDALAKLDHRKDIDKEVIDLIDDIPHTQILLSMPGIGPKTAAQILMTVGDMSDFPTPGHLASYAGLSPRTNQSGTSIMSNSLNRAGNKKLKNALWQSSFASIRFHERSRQFYERKRNEGKRHNAAVVALARRRINVLYAMMRNHEYYRDPAPAKEAAAA

SEQ ID NO: 153541 - protein, 356 aa, unidentified
MSSNVKYIGLDVHKEAISIAVLNGAGKLVMESILETKAVTLVQFLQDLRGELHVTLEEGTWAAWLYDVLKPRVHEVIVCNPRRNALLKEGSKSDRVDARKLAELLRAGMLRAVYHGEHGLRTLRELARTYQTISKDLKRVMNRLKALYRSWGIPCMGTQVYAPRYREPWLNKIAQAGVRRRAELFYQHLDALQVLRRRVRAELLVESRKHKAVKLLRQIPCIGPIRAARLLALMQTPHRFRSKRQLWTYSGLGVETHDSAQHRYVDGRLQRCKRPQQVRGLNQNHNHEMKEIFKSTATSASRCAGPFGDVYAGLLAKGMKPEMARLTLARKIAAITLTLWKKGASFDAEYVKPQAA

SEQ ID NO: 153542 - protein, 429 aa, unidentified
MQNESTPGARGPVFCGVDTHADSHWLCVLDWRGRRVLSRRFPADAAGYEALAGAIAAAGEPACVAMEGTSSYGAGLTRHLASLGMPVREALSPAGTQRRRPGQGKCDESDAERAARAAMSGSKLGTPKSQDGWVDGVRCMLAARSGAVKARTSAINTARSLLTTAPEGLRSRFRGMGGPRLMEELPSVRAEGALGAALGALADLWAAARDAALDMERAIEASLEENCPALLAMYGCGPVSAAKLAVAAGDNPGRLRSEASFAAICGACPIPASSGKTVRHRLNRGGDRQANSAPHEIARQRVMRDPETAEYAERARARGKSDREVMRCLKRYVAREAYRALMRPHEIRRPEDASELVAARRAAKVSQVRAASILGTSEKYISMLERGQRELKPIRRAYEAWVEAGLPLDWDRQAFEAERKMDSKKHLAK

SEQ ID NO: 153543 - protein, 400 aa, unidentified
MARKQYHIPKGDVKMIYVGIDIAKETHVAAAMDTNGVILLEPFAFQNDHEGFKLLKAKLDSLKGDILVGLESTAHYAENVIFFLHSQHYKLAVINPVQTAAMRKTGIRKTKTDKVDSLLICKTLACNSFRLYSDTDVKTLQLKSLCRFRQNLKKSKARLKIQLTSYVDTLFPELQFFFKSGLHIKTCYELLKTYPSPDEIAALHLSKLSNFLSKASRGRFGKQDAKSLKSLAKSSVGVKNTFISIQITQTIAQIELIESQIDELENIIEKAMDELDSVIMTVPGIGKINGAMILGEIGDIKRFSHPSKLLAYAGLDPVVNQSGKFNAKHTKMSKRGSKTLRYALINAAWNVSLNNDTFKRYYDSKIAQGNSHYSALGHTAHKLVRILFKLLTDNIPFALA

SEQ ID NO: 153544 - protein, 318 aa, unidentified
MPEPILVGIDIAKSTFDAAIGLGGNSETFANDEAGHAAFTVKLAVHSIDLIVMEATGGLERNLACTLQADGFTVAVVNPRQVRDFAKAMGYLAKTDRIDAKALAELAQVLARHLERDRFIKVLPTPEQYALQALVARRRQLVALRVAEQQRLSVSHAVARKSIEALIEAIRTQIAEVEAELAKHIGTHHADLEDLLASTRGIGPTTVATLIAEVPELGRLSRREISALIGVAPFNRDSGQMRGKRTIFGGRAQVRRALYMAVLVAIRFNPVIKEFYNRLVAAGKPKKVAIVASMRKFITILNAMVRTGTSWDDSLHSA

SEQ ID NO: 153545 - protein, 404 aa, unidentified
MYNAVGIDVSKGKSTVTVLQPGGTVIRKPFDVSHTSQNLNELAKYLNTLDGDTRIVMECTGRYHEPILKALSEAGLFVSVVNPHLIKNFGNNSLRKVKSDPADARKIARYTLDNWADLRQYSGMDNTRTQLKTLNSQFSFFMKQKVAAKANLIALLDNTYPGVNKLFDSPAREDGSEKWVDYAYSFWHVDCVREIGLKAFTERYQAFCKRHHYIFQPDKPEKLFHAAKDLVAVFPKEKTYKLLIQQSIQQLNLASAHVERLRREMNELASTLPEYNTVMGIYGVGKTYGPQLIAEIGDVSRFTHREALTAFAGVDPGVDESGQHKSKSNRASKVGSARLRKTLFQIMTTLLQNAPEDDPVYRFLDKKRSQGKPYYVYMTAGANKFLRIYYGKVKERLRNLEQES

SEQ ID NO: 153546 - protein, 345 aa, unidentified
MQIKSIGIDLGKTTFHLIALGSRSQVVIRKRFSRSQLLVYTANLPSSLIGMEAGVGSHFLGRALREQGHEVRLIPAQFVRPFVKSNKNDYRDAEAIAEAVERENMRFVPIKTEDQLDLQALHRVRDRLVARRTSVINQIRAFLLERGISFRKGPASLRRQLPEILENADQKLSSRMRRLLDFLWQEWKGLQAQVESLNADLEQIASSDAAWVRLQQIPGVGPLVSTAVVSAIGNGAAFKKGREFAAWLGLVPRQWSTGGKPKLRGISKRGNPYLRKMFIHGARAAVLRVKREGSSLGKWMSGLETRAARNLVIVATANKLARISGAVLASGNDYHPTHKTLVFSN

SEQ ID NO: 153547 - protein, 334 aa, unidentified
MKYYGIDIHKKYSVYTAVDHKGVILKQGRIANEPELFKELMQDNQDETRAVIEATANWGYIHDILEDLVDDVVIAHPLRTKAIASARIKTDKIDATTLAQLLRVDMIPESYIPPRDVRELRELLRYRAGLVRIHTLLKNKTHAVLIKTGFQNPCSDLFGKKGREWLGTIELKAIYRQEVDGFLRIIDFLKNEIIPISHEIDDIAKADPRAKILESIPGIGHYSAMLILSEIGDIKRFPSAQHLVSYAGLNPSVHSSGGVTRYGRITKQGSAWLRWVLVQCASTASRKSGRFSRFHRRIAFRHGAKTANVALAREILRICYFLLKKGERYIECSG

SEQ ID NO: 153548 - protein, 361 aa, unidentified
MLIRYVGLDVHKDSIKIAVAESGREPAKYLCSVPGENGKLIRQISKLGPREGIRCCYEAGPGGYTVYRALSDAGLNCKVVAPSLIPRQSGKRVKTDRLDAENLAHYLRSGDLTEVWVPDETTESIKNLVRLREDARIARLKSRQQLNQFLLRKGRTYPQKTKWGTRHIRWVHSQKFLEEADNVTLADYLRHTELLDERVSNIERDLRLYSSHWEQSSLVDSLQGLRGIAFLSAVAIAAEVGDLRRFSKAGRFMSYVGLVPSEHSSGSREKRSSITRWGNVLVRRLLVEAAWHYRHKPCKTRVIAQRNRDLPERVQRITWKAQERLHRKYMRLIMAGKPKNKVCIAVARELAGFIWAIGQSI

SEQ ID NO: 153549 - protein, 416 aa, unidentified
MNAVGIDVSSRKSTVAVLRPLGEVVCLPFDVTHDIAGLASLVEKLKALDGETRVVMEHTGRYYEAVAKALHEAGFFVCAVNPLLIKEYGANSLRRVKTDKADAVKIARYALDNWADLRDFTPMDAIRYDLKTLNRQFQLASKQRTASANNLIALLEQSFPGIRKCFDSPVRSDGTQKWVDFAHSFWHVDCVRKQPFAAFCERYRKWCKRHAYLFKLSNAEEVYALAKRAVVLTPKSKVVKVLVQEAATQLISISRSVEVYRAEMDRLAAMLPEYPVVMAMYGVGKSYGPQLMAEIGDVRRFERKQALVAFAGIDPMPNQSGDKNVRSNKSSKRGSPYLRKTLFNVIRTYLQCAPQDEPVFQFLNRKRAEGKPFYVYMLAAANKFLRRYYAKLRDFFASLDTLQPVAPIPTILKAAL

SEQ ID NO: 153550 - protein, 282 aa, unidentified
MKIYALGIDLGKTVFHLVGLDSSGQVVVRKRCSRTQLLAFTGNLQVQLIGMEACSGAHFLGKALRAQGHDVRLMPAQYVKPYVKTNKSDYIDAEAIAEAVQRPRMRFVPIKTEEQLDLQALHRVRERWVMRRTAVVNQIRSLLLERGLTLPKGRSHLGQMLPRILEDAELKLSGAFRVLLAQLKLELEQLAARIEQMDMVIQQEARENESCQRLTTIPGVGPVTATALIAAVGNGSAFGKGRDLSAWMGIVPGEYSTGGKQKLLGISKRGNKYLRRLFVQGA

SEQ ID NO: 153551 - protein, 356 aa, unidentified
MNKISKLDFEGQQIYVGMDVHKKSWSISVLTDEFEHKTFTQPPEVSTLVNYLKRNFPGASYKSVYEAGYCGFWIHDCLQERGVQCLVVNPADVPTKDKERRKKTDRVDCRKLAKSLRSGEIEGIYVPCRPKVEDRTLIRTRHSMVKKQTRCKNQIKSILQFYGIQIPEELVDSHWSKRFITWIEAIRMERASGNFALKAYLEELNNMRKIIAELTRGIRSLANAEEYRQNVCLLKSVPGISILTAMTILTELYEISRFRNLDKLCSYVGLIPDTNSSGETDRDMGITKRRNAQLRGILIESAWVAVRKDPALLMTFNTLCKKMPKNNAIVRIARKLLSRIRYVLKNQQKYVSAIVQ

SEQ ID NO: 153552 - protein, 422 aa, unidentified
MLGIGIDWAEDFHDIALGTQEQGVIHQFRIDHGPAGVSTLIERALRLEPDPAEIRVVLETRHGLLVEALVDAGFTVVPVNPDVVARRRGPARKKDDAEDARICCLLALDRHAALKTLIPHGQIGGELRAIGRDDERAARDQRRLLNRLRADLQTTYPAALQLAGKDLGAPTVLRLLERWPTQPELAQASRAELVEFARLGRHGWPQRFADRVVAALAAPSLPTRDYLVRAKAAGIRLAAVQLLALHEARRGWQARMAELLLGGPRTGRDHTAKDPDPGKAFPGGEIYLSMPGLGDLLAARVAGEIGEHINQFDCPSGLQCYAGSAPVTRRSGKSDFVVARRLAHNHYLGAAVHQWAFCSLLHSVWAREFYDSKIAAGKSHHAALRALSNRWLEILWHCLTKGVLYDEATHVTNRNRALGHAA

SEQ ID NO: 153553 - protein, 360 aa, unidentified
MAKARTLVGLDVHATKIVAAVLDAETGELEFFTISGDVDEAAGLCAGLPRPVRVAYEAGPTGYGLARELARRGVQCVVAAPSKIPRASGDRVKTDRRDAELLVRLLLAGKLHAVRVPGPEEEALRDLVRAREAVRVDLMRARHRLSKLLLRHGVRYDEGSAWTPRHRAWLIGVTLPYAAAQATLLDASGAIDALAHRRDGLQREIVAMVPGSPWAVQVGRLRCLRGIDTLSAVGLCAEIGDFERFAHAEQLMSYLGLVPCESTTGKQRRLGSITKTGSGHARRLLVEAAWHYRKRPAVGKALAERQDGQRAEAVAIAWSAQRRLHRTWARLEARAKRRTIVAVAAARELSGFCWAITRIE

SEQ ID NO: 153554 - protein, 366 aa, unidentified
MEKIYIGVDFHARQQTICYLKTETGELVIAELKHQDKEQVRAFYQQFQGPVIVGLEASGYSPWFEALLEQLGGEVWLGHATEIRRRARWRQKNDRRDAELIWDLMVHDEFPRLHRPAVQSREVLRMLRYRQKLIKLRTMTKNSLQAIALQAGLAKGKQLFTRAGQEEFQVVAMSPVLHWQREHWLALLQPFNQQLLETMVWFKAQSKDDVGIQRLRTHPGIGLLTSLCLLHTLQPVSRFRNARKVAAYAGFDPVERSSAERQRFLGISKAGSRLLRYLLVEAVHTAVRYDEDLKRFYQRLAARRGRPKAKVAAARKLLIRAYIMMRDEIDYAEFRRRAVAVRLARQGHGPTNVPAVLIGQPASPGA

SEQ ID NO: 153555 - protein, 355 aa, unidentified
MSKVEVIAKDTTLSMGLDVDYTSSVVFVLDVHNGELLFEGRIPHDKERWCHFLKRFINCRIWACYETGGIGFHLCRMLLSLGVDCQVVAASKVPHSVEDRQQKNDRRDAKTLSEMYFHRPKSFVRIPTEQEEADRQLARTHDQLTRNRVRTMQRIKALLIFHHLVPPTGTGKSWSNGYREWLHNCACRNPIRVSLDVLLNELEHLEEQIRTLNKEIAALSCTDHYREKCQRLCSQLSGVGPLTAMTFLVELFRPEEFPNAESLASHLGLTPCEYSSGKRQRRGHITRWGPPHLRKLLTEAAWTWVRLDSKAKERFETLRAGKLRKIAIVAMARRLAIAMWAMTVKEQDYNYRWAA

SEQ ID NO: 153556 - protein, 390 aa, unidentified
MALFVGIDVAKDKFDACGIGEEGEKVFSLTASMDREGFEKLAFHLNGSRSLLLGLESTACYHIALFSYLTAKGYRVVIINPLLIANFAKLSLRKTKTDKKAALTIAQFLMVRKEALENHILSVDLMELRDLARRRERLTDQVTKLKGNMKRILSVTFPELERLTGVFAKSILELLIRFPSADALRKTDIETVAALVVPRSWGRKSRAWVETLMTTAASSVGVSSPAKELVLKQEAALLLYVQEQIKETTKVLMGLCTDRMRKDVEILASTKGIGKTTALNFLIEMGGDITLYKNDKKLIAASGLDPSTYQSGKYEGASRLSKRGNRHLRRAIWLMAKGVVFSNDLFRTYFYKRKSEGLCYKMAMLATAHKLIRVMFAMLVHQTCFEQGGR

SEQ ID NO: 153557 - protein, 321 aa, unidentified
MQVWYLGIDVAKAKVDCALRQPDGKHRHKVFDNNRSGFEALHRWLLECGADALHVCMEATGVYWENVAEYLANQGHVVSVVNPFQIKAFGASRLVRTKTDKVDAKLIAEFCKENQPEAWKAPSVEEQALRAMVLRLDALQEMRLQESNRLDVAREVVREEINTHIQWLDNEIKNLAKKIRNSIDDDPDLRQRKALLESIPGVGERTISLLLAFSLIPGRFKNARQVTAYAGLDPRQHESGSSVRGRPHISRLGHSVIRKMMYMPAMYTLYRTTWGRHFLERLTRNGKKPMTMIVAMMRKLLHVAFGVLKTGEKFNPTLHAA

SEQ ID NO: 153558 - protein, 369 aa, unidentified
MRQSMIYVGLDVHKDTIAVAVAEDGKRAEVREHGEIANTPAALTKLLGKLGGPDVELYICYEAGPCGYGIQRQVTAFGHNCAVVAPSLIPRRPGDRIKTDRRDAVKLARLHRAGELTPVWVPDSAHEAMRDLVRARLAAVRSLRHARQQLSGFLLRHGHHYHRPAWTQMHRRWLSGLRFAEDAHHIVLEDCIATIDAAMDRRDRLTQQIENRLSDWTLAPVVEAMQALRGVALVAAATIVAELGDISRFSKAEQLMSYLGLVPSENSSGKRRRQGGITKAGNGAARRVLIEAAWSYRFPARVSREQLLRQEQLAAPIRAIAWKAQERLCLQYRKLSRAGKPITTVTTAIARQLAGFVWAIAHEVSTPTA

SEQ ID NO: 153559 - protein, 387 aa, unidentified
MKRIIKIGMDVHSTNYTLCAMEPTIGAEDRVYGELQVAPACKEVICFIETLKMKLGLFDDYSIECGYEAGCLGYTLYHQLTNAGIKCVILAPTTMLTQQGKRVKTDKRDARLIAQCLCYGGYHPVYIPTSEDDAVKEYLRMRDDHKLALKELKQRINAFALRHGCQYPGTKWTIKHFTWLKKLELGPMYRETLDEYLASYEEQEAKIERFDQRVAEIAQEARYKEKVEKLGCFLGIRTHTALSLIVETGDFERFAKGNNYAAFLGLTPGERSSSTSINRLGISKAGNTHLRTLLIEASRGLCKGAIGHKSKKLRSRQSGQTAEVIAYADKANTRLRSKYYRMIRHEKKRNVAVAAVARELACFVWGMMTDNISLSGGKTSVPAVSQG

SEQ ID NO: 153560 - protein, 347 aa, unidentified
MNFYDNIHPYYCGIDLHARLLYVCILDQEGNTIVHKEISAKPELLQNILEPYIGNIVVGVECMHCWYWVADFCEELNVDFILGHALYMKAIHGGKAKNDRIDSYKIAKLMKGGNFPLAYVYPKEMRATRDLLRRRIKIVRHGAHLKAHVANTTSQYNLPPNKVNLKNLCAREQIRTTFPDKVVQKNVDLDMAILDCYAAELSKIEWFIEQQAKQHQPVGYQILRSIPGIGRILGLTIIYEIGNISRFPSVQKFASYSRLVKCKAESAGKSYGTQGNKIGNAHLKWAFSEAAVLYLRGNKKAQNYLLKLQKRMSKAKALSALAHKIGRCVYYMLVNERIFDESRFLKS

SEQ ID NO: 153561 - protein, 463 aa, unidentified
MSIVHRCCAALDVHKESVTVCVRTGISRREQTLETAKFGTFTEDLEQLAEWLQQRKVRHVAMESTGVYWKPVWNVLELTRRHFRLLLVNPAQVKALPGKKTDRRDAQRICGYLQQGLLRGSLVPGRQQREWRELTRRRAHLQGDRNRVINRIRRLLETVNVKLGSVISNVVGKTGLAILRDLAAGHTDPERLASNMFGRLKCTRAQMIASLRGRFTDHFRWELKHLLEQLDFLDRQVAEYEARISQSMAGQEDLLARLCTIPTVDLITAWTLLAEIGTDMSRFPTAAHLCSWAGLCPGNNESAGKRFSGKTRKGDRYLRRTLVQNAWAASHMKKGRLKQLFFGVARRRGMPKAAMAVAHRILQIAYFVIRDGTMYREVGVEMDEGKRQRTAKRLARRLEEIGYEVTVKPRAQPPAPHPRTPAGPGPLPGQSCSLCNRWGIACIHVRDAKRRHPRGLSNSEHSG

SEQ ID NO: 153562 - protein, 347 aa, unidentified
MGKSITDLSSVTTVGLDLAKHVFQVHGVDASGRVIVAKALRRKDVLAFFAQLPECLVGMEACSSAHHWARELIKLGHDARMMPPAYVKPFVRRQKNDAADAAGICEAVTRPSMRFIGVRTLENQAALMHHKAREMLVAQRTQLINALRGHLAEMGVIAAQGLKNARELARLILAEGDETIPACVRMALVPLVRQLHVLDQEIACSHRTIAAMARDDEMARRLMTIPGLGPVTASAMASSVQDISAFSGPREFAAFLGLTPRQHSSGGKERLGRVSKMGNRYLRRLLVVGAHAVLYHRKPHEDALRSWAKKLMQTKPFKLVAVALANKMARIAFAIMRGKTSYSVDPA

SEQ ID NO: 153563 - protein, 339 aa, unidentified
MNKVNTIGVDLAKNVFHQCTQDHRGHILSKTKLGRSQFKQFLGSIPASRIVFESCATAHYWSRVATRHGHDVKLIHPAYVKAYLKTNKNDFNDAEAICEADSRPTMRYVSSKTIAQQDIQLLHRVRQRQVQKRTALVNQIRGQLLEYGIPIPQGIGQVRSRLAGILEDGENGLTPTSRALFNELRQEFCELDGRIKQADKKVKQLASEHPICLRLMAMPGIGPMIATAMISAMGDANSFKNGRELSAWLGLVPKQCSTGGKQRLLGISKRGDGYVRTLLVQGAMSAITRCKNRSDSQLVWARQLREKKGLQKAAVALANKMARIIWSMMAKDHDYVAIV

SEQ ID NO: 153564 - protein, 468 aa, unidentified
MSKLSPSKRDNVEIRPFAGMRRIHPLAAGVDIGAHEIMACVPGSDHTQIVRPFGTYTADLHALTDWLLQHHIQTVAMESTGVYWIPLFETLEAAGLECCLISATSIKRFPGRKSDVLDCQWIQTLHSYGLLASSFRPTADLVALRTLLRHRAQLIEHRSPHVLHMQKALLQMNLQLSQALSDVTGETGQRIIRAIVAGERDPHKLAALRNYRCKKDEAEIAQALTGTWRSEHLFVLQQSLALFDFYTTQIHLCDEEIERIYSLIRPAWSADAHESTSKTLPAHKPHSHSKNAPKAVQVRAHLKRITGVDLVAVHGLSASLAQIIVAEVGTDMSKFPNEKNFCSWLGLAPHNDISGGKVLKSRTLKTRNRAGQACRLAAASVARADYAPGAFYRRLKARLGPAQAIVATAHMIARIVYRMLKFKMEYQAMCAEQYEQQFREREIKYLQRKATRLGLILAPATPSAQAVS

SEQ ID NO: 153565 - protein, 355 aa, unidentified
MVSPILAQWTTLSEDFVLLGAIMDTVSLIGIDLGKHCFHLHAQDGSGRMVLRKKLTRNQMFTLLSNFPSCTVVVEACASAHFWARKLQTLGHTVRLMAPQFVKPYVKTNKNDVADAEAICEAVARPNMRFVPIKNVDQQAVLALHRARQGFVRARTAQANQIRGLLGEFGLVMPRGITSIAQHVPQLIEDASNELPGSFRLLIQRLTDHLKELDRQVAEIETQIKAWHHASDASRRLAEIPGIGPITASALVASIGDGKCFSNARQLAAWLGLVPRQHSSGGKPTLLGISKHGDTYLRTLMVHGARAVVRYCANKDDVFSGWLHRLLTRRHKNVAGASMYVGGDRSDYLTAPIPI

SEQ ID NO: 153566 - protein, 345 aa, unidentified
MKYSNIIAIDLAKNVFQVCKINHDNHVIYNRACSRAKLKEILVKEKEALVAMESCGGTHYWARFSKQQGHDVKAIAARNVKPFRQGQKTDANDALAIAIAARQPHINSSRLLSVEDQCQQSIVRVRELLINQKVKTSNQIRALLLEFGVPIAKGDKALRKAIPEVLEDAENSLTVGFRIVLDVMYQNFQALLEKIELVSKQLGQEVKKDKLCRRLQSLEGVGPICAIQLKIALSQTGHYAKGREASACIGLTPVQHSSGGKQKLGSISKKSNHNTLRSSLYQGALAVVVNVDKREARTHKDIWLKALIARRGKKVASIALANKTVRTAFAMIKNNQEYKPQLLAA

SEQ ID NO: 153567 - protein, 422 aa, unidentified
MLEEAKDTEEIIQWVAALDIGKAQLTCCVRVPSPTQPGRRLQEVRTYQTMTRSLLVLADRLAELGVTRVVMEATSDYWKSPFYLLEAHGFEVWLVNAKDVKHLPGRPKTDRLDAVWLCKVAERQMLRPSFVPPPVIRRLRDLTRYRTDLVVGRSAEKQRVEKLLEDAQIKLSVVASDIFGASGRAMLDALVAGERDPKVLAQLARTRLRTKRALLAEAFVGRFGEHHAFLLARMLSRIDQASADIAAVEARIEAEVAPFAQAVNRLDEVTGVGRAAAQVIIAEIGVDMSRFPTPGHLVSWARFAPGVKESAGRRKGNATTGHGNPYLARVLGEAAVAASKTHTFLGERYRRIARRRGAKRAIVAVGRSILIIIWHLLSDPDAHFQDLGPGFYDTRIDAERRKRNHVRQLEALGYKVTLQPAA

SEQ ID NO: 153568 - protein, 407 aa, unidentified
MSVPQESTSPSGTPKLPCGNRGSAAEPTAPRLKTFGATTAQIRELIGYLNAEKVSVIVMEATSDYWKSFYFLMEEEQLPVILVNAKRARNIPGRKTDVNDATWLAELAAHNLLAASFIPPEPIRHLRDLTRARSAVVHDRTKVYQRLEKFLESSGIKLSSVASSLTGVSSRHMLDALVAGERDPQVLADLSIRSMRRKIPELVEALEGRFTEHHAAMVKLHLHHIDTLDEQLRVLDQMITEAMAPFEQACQALETVPGIGKQTAQVIIAEVGVGMTVFADAAHLASWAGVCPGQNESAGRQRSSHTRGGNVYLRAALGTAALAAIKHKESFLAARYRRLYLRRGGSRALVAIEHTIIVAIWHLLANGEVFKELGPDYYDQHNKDRAKSRAVKELERLGYAVRLDSAA

SEQ ID NO: 153569 - protein, 366 aa, unidentified
MKKISTVQVFGNEILTGQKLTIGLDLGDRWSFYCVLDEAGKILLEQKVATTPEAMKQTFAKIPRSLIALETGTHSPWVSRLLTELRHEVLVAHAQRVELITKSNRKDDRHDARTLARLARIDPQLLGPVRHRSAKAQIHLTVIRARAELVSARTALVNAARGLVKSYGQRLPKCGTQQVNRELGTGLPAELREVLEPLLKEVESLNQRIQEYDEQMEKIAKESYPHVELLKQVKGVGTQIALTYVLTLDDPQRFPKSRAVGCFLGLRPGRRNSGESEPQKGISKEGDRYLRTMMVQGAHYILGPFGEDSDLRRWGLKLAERGGKNAKKRAVVAVARKLAVLLHRLWVSAEVYEPLRNSQKAMRAVA

SEQ ID NO: 153570 - protein, 418 aa, unidentified
MAMKIVRFNCCGMDVHKNLVVATIGITDRKTNVTEYFQRSFSTLNSDLYRLKDWLRSHHCSDVCMESTGKYWIPIFNVLEDEINVHLTHPKYVKAIKGKKTDKKDSKWICDLFKHDLIKFSFIPPKEIRELREIARYRYKLVCMRSSERNRYQNCMTVSNIGLASVISDPFGKTASNIMKEVMKANVIDDDKILKLVHRNCKNKDKILDSLHGYHIESDQRFKMEKSLDHMEYLDQLIDSCEVELIKRAYPLRRSFQHITQIKGISVLSAILIISEIGIDMSQFGSDKQLVSWAGLSPANNESAGKKKSVRISKAGQYLKPLLVQCALSAIKDKTSYFGRKYSNIKKRRGHKKAIIAIARMMLVSIYHMILTGEEFQPCDYESFMDPKPNANPSLTVEKALNFLKQSGIDISSIPINL

SEQ ID NO: 153571 - protein, 343 aa, unidentified
MQDVATVGLDIAKQVFQAHGADASGETLFNTQIKRENVLEFFSNLKPCLIGMESCATSYYWARQLLEFGHDVRLIHTSYVKPFVKRGKTDANDAEAINVALTQKTMRFVPVKTLNQQAAITIFRTRSLFVSQRTQLVNALRGHLAETGLIAARGVRNSSKLVKLMESASDAVVPAAMKRALKDICEQLQRLDGLVTKLDKEIERRVQHDGNACRLLTIPGVGPKTAMCVIATIPDIHRFPSGRHFSSWLGLTPRTHSSGGRSVLRRITKMGNSELRTMLYLGASAITMRDSKTPVGRWAARLRARRPYKVAVIAVANRIARIIWALLTNGGVYDPTYGREASA

SEQ ID NO: 153572 - protein, 446 aa, unidentified
MKLYLGGDVSKGYADWVILSEKKQAVLGNFQLDDTYAGHCKLYSMIEAYVEKHPGSELYAAVESTGGYENNWLNTLKSYQKVFNLKVARINPAGVTFNRKAGMKRNVTDAISALSIAEFMIDHPENITYDQDDKWKSLCRHWNFVEMQKQQRVQTINQLETILYSANPTLMRFKKDNLPNWLLELIIQCPTAETLAKARPEKLAKIPYLSLARAKTLVAEAKQSIASATDKNAEILVSQIARQIKSFDLNIKSQMQLIERDLTCPEIEILKTFKGIDTISAIGLLLEIETIERFPTVKGFSCYFGLHPKFKQSGDKVIGVRMSKQGSKNMRKILFNIAKGAITYNPLIMAVYEKKLSHGMKKMAAIGVCMHKILRIIYGMLKHKQEYNPLIDKLNCEKSKDKQQEKQQQENANIEKSRRYQEFDVKAPISRKQTKKGGNTICPNVK

SEQ ID NO: 153573 - protein, 411 aa, unidentified
MTLYAGLDWASAEHAVCVIDRSGTVVDRLTIPHTAEGLGKLVRALDRHGQRDGAPVATAIERPSGLVVDTLVEAGQPVVPIHPNVVKATRPRYGASCAKSDPGDAYLLADLLRTDGHRFRALEPLSDPLRALRSKVRTRDDLVAARVRMANQLRSLLEVFWPGAVAIFADVDSPIGLDFIQRYPAPRDAARLGPKRLARFLAAHRYSGRRTPEELLERLRAVPTGLAGDIEEESRRMQALAFVSAIRPLVAQIRKLTSSIEHDIQQLAIGRTMMSFPRAGKLNAAQIVAELGDNGTRFVDADHLAAEAGVAPVTRASGKRSATVYRFACNKRLRNAICTWANNSRRASDWAAHVYQRARARGCDHPHATRILARAWCRVLWRVWQDGGTYDVERHAAARALIPPPAHPDDA

SEQ ID NO: 153574 - protein, 366 aa, unidentified
MPIYCGVDFHARQQLVKWCNTDDGEIHERQLGHQSIAEVREFYGQFEGEVIVGFETSGYSSWFEAMLEELGHQVWIGHATEIRRRARARQKTDRRDAELILDLLLKNEFPRIHRVSAASREVLRQLRYRHRLVQQRTRSYNSLQAIALGAGVSLKAKLRTRQGKERLLGLSVTEAHGRQRQEWLDLIAQLNGYIGRVETELELIAAADERVQLVRTHPGIGLLTGLALVHTLSPVSRFANSRKVAAYVGLEPREYSSGERQQFGGISKAGSRLLRLLLVEAGHKAINKDVQLKQLYYRVMHRREKAKAKVAVARHLLVRAYIMLRDGIDYAEFVRRGVAVQSARVSYRPQVPGKLIERLASEQQPG

SEQ ID NO: 153575 - protein, 327 aa, unidentified
MTQSIVGIDVSKHTLDIVLLYEQRSKHLKVANTPSGFQTLQTWLSKYDCQSVHACMEATGQYGFAAAEFLYSHGYQVSVINPARIKAYGVSRLKRNKTDKADAKLIAEFCQKEKPAPWCPPRPVFSALKALVHQLNALMAMKQQERNRQEFKSSAPLVDAILHEHIDFLDTKIKELRKAIYQLIRQDPQLKHQMALLVSIPGIGDITAIRLLAEIRDFRDFDNARQLTAYAGLNPSQFQSGTSVHRKSKLSKTGSSTLRYTLYFPAIVAMTHNPVVHDLRQRLLDRGLCKMAVVGAAMHKLLVLAYGVIKSDMPFDPNFAQNSASCS

SEQ ID NO: 153576 - protein, 460 aa, unidentified
MKDVTMKLKNSSKNKAKRIKKHLEQINLYAAGIDIGSREHFVSVPESLDDDPVRKFGCFTIDLENMADWLVRIGITTVAMESTGIYWIPVFEILEARGLQVILVNAHHVKNVSGRKSDVKDCQWLQQLHTYGLLAGAFRPEDEFCVLRAYMRQRGTLVSSLSTHIQHMQKALRQMNILLDNVVSDITSKTGMSILRAILLGERNAEKLASYRDRRCKNSAEVIAKSLMGNYRKEHVFSLKQSIELYDFYHEKLKDCDQEIEQQLIQFEKQTGLAERQSPTKKRYKKHEKNTIQFDVASYLYDLCGTDLTDIDGLDEGSVLKVLSETGTDMSKWKTASHFVSWMGLSPNNKISGGKVLSSKTIKTRNRAKQAFKLAAWGLSNSKSGLAAHYRRLRARIGAPKAINATARKIAVIFYNMLKNKTSYISQSQEEYDNAHKQRILKQLQQKAGQFGFELTPTVA

SEQ ID NO: 153577 - protein, 413 aa, unidentified
MEVLNPRCAGLDVHEATVVAAVRLATTGRVAREVRTFATTTAGLLELAAWLAENGCTHVAMEATGIYWRPVWHILAEHGFALVLANAAQVKNVPGRKTDVGDATWLAELLAHGLVRASFVPDAPTAELRSLLRTRKQLVRERAGHVLRLQKTLEDANVKLDGVVADLLGKSGRAMLEALVAGETDPGRLAALAHPRLSATPERLREALRGRVTAHHRFLLRLHLDQVDALDAAVGRVDREVEAHLAPFRAAADLLTSIPGVGALAARVIVAEIGLDMGRFPTAGHLVSWAGLCPRSDESAGKRRSTRLRKGAPWLKTTLVQCAWAASRKKASYLQAQYHRLRARRGPKKAVCAVAASILTAAYHMLKDGTVYADLGPDHFDRRAKEVQARRLVRRLADLGYAVELAPLEPAPA

SEQ ID NO: 153578 - protein, 337 aa, unidentified
MIVIGVDVHKHSLTAVAVDEVGRPVAERTGAVGEGVVGWAQSLADDRLWALEDCRHVTRALEQALLVAGERLVRVPPRLTGRQRRHGRSRGKSDAIDATAVARAALQEPELESPRMGEETLRELKLLVDHRDDLVAERRRAQQRLRWHLHELDPTLQVPLGALDRNVWIERVGRKLGRREQTTQVRIARDLLARCRTLTRTIGELDRELQASTQTLAPQLLELPGCGPLSAAKLLCEIGPIGRFRSDAKLARHAGVAPLDASSGRHQRHRLDRGGNRQLNCALHRIAVTQGRVHPPARAYLERKQAEGKTRREAIRCLKRQLARTVYNTLRNEPLLT

SEQ ID NO: 153579 - protein, 343 aa, unidentified
MGTYYYIGLDIHKRTISYCIKAIDGSLIGQGKIEADRKSLDAWAKGLPGPWVGAMEATIFTGWVYDFLKPYAVDLKVAHPEMLKAITAAKKKNDRADAEKIADLLRVNLLPECHMLSEEIRELRRVLRYRNHIVRTAVKMQNKISGLLMEVGVSYSKRRIHGRKYFHEILERVEEIPSSVKELLKLSRSGYEMFRTFQKRLVETLRTNTLIHDRVQRLMTIPGVGEITALTWVLEIGDPGRFASIRQAVSYCGLCSAQRESAGKEQRGPISKKRNKHLQTMLIEAAKLAPHWNEQLAIVHERELKKGDRNRATLAVARRLVAYMLAVDKKQADFKLPAEIQAA

SEQ ID NO: 153580 - protein, 326 aa, unidentified
MEHELHYIGIDTAKEKLDVDVLRPDGRHRTKKFANTTKGHDELVSWLKGHKIDHAHICIEATGTYMEPVAECLYDAGYIVSVINPALGKAFAQSEGLRNKTDTVDARMLAEFCRQKRPAAWEAPHPFERALRALVVRHQALTDMHTQELNRTETAREVQRPSIDAHLLWLEAELKRLEKQIKDLTDDDPDMKHRRKLLESIPGIGEKTSAVLLAYIGLKDRFAHARQFAAFAGLTPRRYESGSSVRGASRMSKAGHVSLRRALYMPAMVATSKTEWGRAFRDRLAANGKKGKVILGAMMRKLAQVAYGVLKSGVPFDASRHNPVAA

SEQ ID NO: 153581 - protein, 354 aa, unidentified
MSVEGFKFLLSSPHINKDSTFVMESTASYHLPLYNFLLNQNRKAYIINPSLISKYKSTNTLRKTKADPLDAVLIASYANRPEVQLEGRSSALETESKILSRSRLANSEDLAKAKTRLKGNLSVSFPEMLKLNVYTDSMLNFLSVYGCAKDVLNATDKQIERAIKGNRKQVTPRDKELAKTLKKISKESIGVALHASMTIHSAKTVKHLAEEDKFFTDALVNIEKEIHSKEIEIITSIPGISDISAAHFMAEVEDITRFATYQKLIAFIGTDPTIYQSGKVTKNGKISKKGNKILRKYCYIMATSCVHWNPVLGEYYQKKRGEGFPHRKAMVATVNKLIRTIYALLIRGEKLKMY

SEQ ID NO: 153582 - protein, 345 aa, unidentified
MQPMYYIGLDVHKKKISYCVKDGVGKVHAEGWIPATRFDLDRWMKTLPQPWSAAMEATMFSGWIYDHLKPHAAELKVAHPLMLRAIAAAKKKNDRIDANKICDCLRCDFLPECYMAPTAIRERRRTLRYRNLLVRQMVQMKIKISSLLMEAGVSYNKQKLHKAGYFRELLASNPDINEGLVPLLRLCRETVVRLGKTESALVRSLERDSVLVDRVERLMTIPAVGPITALTWALEIGEVQRFSSIKKAISYCGLCGAEKSSGSTVQRTPLSKQRNKHLQTTLIEAAKMAPRNNSELAMLYDKEKQKGNANRATLAVARKLVPYLVAVDRRQTEFLAVERENRTAA

SEQ ID NO: 153583 - protein, 465 aa, unidentified
MLCDINPVPPVAAPLPPPPSRPSGQRVRVGIDAAITANHHVAVRSIDRDGTAVASRFVLAPTLSGLNTLTRRLSAYPEVLAVAEPTSMTWLPLAVALHDGGGQLALVGSRHAARLRGAISGKNKSDVIDADVLARAGEVFDLRPLVLPSPGQLALRRVVTRRGDAVIDANRYLRRLISLARWAFPDVWNGFGGSLPTAKAVLGRWPHLEQLAAARRSSLTAVVAEHTRSVPDVPARVEQIRAAARDWATFWEGHLDLDALAFDVSEHLDDLSAAAGRVQRATTQTTHYWERLYGDDPLLTSIPGMGPITAPTVRAFLGDGHGFATAKAAASYVGITPSNWSSGTVSQPSRAITKEGPAVLRLAFYQAANAARRSDPQLACFYHRLMTGRGHCHTQATVAVARKLVERTWAVLDRGSGYQLHDLDGQPITERAAKALVAERFTVESDVRARARAHTAATHRAKLTH

SEQ ID NO: 153584 - protein, 357 aa, unidentified
MRAGAPQPICRREPEQLAGRRDPECVARRGQGDSHTLLWGGYMAEVIYAGVDVSKETLDVALHPSGEYWQEKNDEAGRTRLIARLENVSPELVVLEATGGFERSAAIALTVAALPVVVINPRQVREFARATGELSKTDRIDARILALFGERIRPEVRAMPDEAALELEAFIVRRRQLINMQTAEKNRLSRVQSPVLKKSIETHIRWLDKELKGVDDEMDKRIKENPLWRAKEQLLISVPGVGPVTSRTLIAELPELGTLGRREIAKLVGVAPLARDSGRMHGRRSVWGGRAQVRTALYMAAISASRSNPEIRRFYLRLREAGKPAKVALVACMRKLLTILNAMLRSGQRWNPQPMVS

SEQ ID NO: 153585 - protein, 319 aa, unidentified
MNTTTAAHIDRNERNVGIDIGKSTLDVYIYELDVYLQYPNTTEGIRELIKKLSRYNLTRILVEATGGYERSLVEASAEKELPIIIMQPAQARQFAKAQCINAKTDKIDSRVIAQFAAVLKPEVRPLSSKKVRYIRDLLSRKRQLNEMRTQELNRQHKAPAILAATHKRLLKVLDKEIESINKLLAKAVGEVTEWQRTYEILSSVPGVGDGVTFTLLGELPELGQLSSRKITALCGLAPFNRDSGIMKGRRRIKGGRAPIRTVLYMAMLSAIQCNPVMKKFYKKLVEQGKHKKVALTACMRKMMTILNAMVRDNCEWQAN

SEQ ID NO: 153586 - protein, 481 aa, unidentified
MPQQTKKPHPKARSAGSGTIQPRRKTRRAKDPTQGLQVTNPNAAAIDIGCAEHWVAVPPGRTEKPVRKFGCCTAELEALADWLVQCRIDTVVLEATGNYWVVLYDLLEARQLRPVVVNPRYAKNMSGKKGDIPDCQWMQKLHSYGLFANSFRPSEPLRALRTYLRQRESLVVAVGQSIQHMQKALTEMNVQLANVISDISGETGLRMIDALLAGERDPRRLAALKDWRIRASTAELARALAGHWKDEHLFVLEQARLSYAHYQEQILQCEQRIQQQMGAVESRLPQAPPQAEPEAAEPSGGQARLKTLEPKPAHQSFNLQTELRRIVGVDLTAIDGIGSVTALVILSEVGTDMSPWSTEKRFASWLGLCPDHRISGGKVLSRSTRPVVNRARNALRMAAYTLEHSHSALGAKYRRLKRKLGAPKAIVAMAHHLARLIYRMIKHGQDYIDKGMQAYEAKYRQQRVRWLEKQAKELNLKVVAA

SEQ ID NO: 153587 - protein, 351 aa, unidentified
MPATARTAIAVIGIDIGKNSFHIVGLDDRGAIVLRQKWSRGQVEARLANVPPCLIGMEACVGAHHLSRKLKALGHDARLMPAKYVRPYSKGQKNDFRDAETIAEAVQRPTMKFVATKSADQLDLQAMHRVRERLVSQRTGIINQIRAFLLERGIAVRQGQRFLREELPRLLAAPPEVLSPRMVLIIEGLASDWRGLDTRIEDLSAEIEDLASRDAGCERLMSIPGIGPIISTAMVAAIGTGDGFSKGRDFAAWLGLVPRQISTGDRTILGKISKRGNRYLRVLFVQAAWVVLVKVKPDRWEGHGLKPWIEAAKKRLHRNVLAIALANKLARIAWSVLARGRAFEASKLQVA

SEQ ID NO: 153588 - protein, 408 aa, unidentified
MNKLFVGIDVGSRDNAVYIMLPDGDKHSSFSMHNNLGGAQMLSKRVVSALEEKNLTSVVIGIEATGVYGENLMSFLREDGALARFERKLFVLNAKQVSKFKGSYSDLPKNDPVDAFVVADSLRFGRIGFPIQMDDYRYIALQKLTRARFYAVQNLTREKQRFMNYLFMKCSGLAQESAFSNNYGVAALAVYEEFETPDDIVNMDLGALTTFIAEKGSNRSPRPEEIAKAVQAAAKGSYRLPKTVNDSVNQVLSISISSMRAMQAQIKALDKEIARQFENIPNTLISIPGFGPVTSAGIIAEVGDVNRFAKGQSALAKYAGLVWKENKSGMFEGQITRLIRSGNRFLKYYLCEAAFALVRCDTEYKRFYDLKYKEVNKYQHQRALALTARKLVRLVFRLLKDNRLYIPA

SEQ ID NO: 153589 - protein, 415 aa, unidentified
MALKIVYPICCGIDVHKTFVVACIASTDSKGVTTYRSHRYSTFTQGLNELSQWLCEHDCKDVCMESTGKYWIPVFNILEQSCNITLAHPKYVKAIRGKKTDKKDARWIADLFKHDLVAGSFMPPLPIRQLRDLMRYRFKLTNFTSSEKNRLQNSLTVSNIQLASVVSDTFGKSSMAIIEKLLNDPTDTSFDLEPLIHGSMKGKLPDLELAIEGLITPEQAGKIKVIKQHYEDLESRKAELESIILSLAEPYLEEINLILTVPSFKNIFSAIAVVSEIGVNMDVFPSAGHACSWAGLTPSNDHSAGKSKSVRISRAGVYIKPLLVQCATAVVKSEKHPEIRNRYLQLKRRRGHKRAIIAIARMLLTAIYHILKNKEPYNPDLYKKADVLPVDREITVEQAIKWAQAQGYRIKATAN

SEQ ID NO: 153590 - protein, 385 aa, unidentified
MSSKSAGVAAARSIIYLGLDVHKDSITIAVLPAAATTPTRIERLPNDLPRLKRFLDRLARDGELRACYEASGAGYVLQRAMREWGYACEVIAPSLIPKRPGVKRKHDKRDATELARLYRAGELTPVRIPSEAEERVRDVVRCRETFQREILKSRHYILKFLARRGLVFREGTNWCTPHLRWLKHLTTKQSPLSPADRLVFREYHALLEYKLQRRDDLDREIARLAELPTLAPAVQRLQCFRGIALQGAMVLATEIVDWRRFERPTRLAAYLGLVSREDSSGDREWRGSITKAGNSHCRHVLIQAAWSYHYRPAVSMDLKRRQAGQPPSVIAHAWKAQQRLHQRYNHLSYRKQRQIAVVAVARELVGFLWAVMQDCSSPSTSESAA

SEQ ID NO: 153591 - protein, 399 aa, unidentified
MSGEALAGVDWASEIHAVCVIDGDGEATDQFDVTHDAGSIRALVARLRRVGVSRVAIERGDGPLVEELLDADLEVFVVPSRQIKGLRTRYGSAGNKDDRLDAYVLADTLRTDGHRWKPLRADHDDTRALRALCRSRKDLVETRVQIVNQLRANLELAFPGAIGLFCKPDSSITLTFLRRFPSAEKAQWLSPKRLASWLSSVGYTGGIPSGVLYGRIDNAAPGLLGAEGAARGRITLGLVAMLETLNAEVQALEHDMEELFRSHPDQRIFASLPRSEMVRAANLLAEIGDCRERFPSDDALAALAGASPSTRQSGKREQTVFRWACNKKLRAAVMDFANGSRSADPWAADIYKRAIDRGCRHPHAIRVLARAWLRVIWRCWQDSVPFDPALHGARQQLAA

SEQ ID NO: 153592 - protein, 330 aa, unidentified
MSFKILKFNCCGLDIHKTWIYACIGITDSNNRTEYKQARFSSFTKGLNELCNWLAKYNCMDVCMESTGKYWIPVFNILEQHNLWVTLSHPKYTKPMKGNKTDRKDAKWICDLYMCGMVKPSFIPPADIRELRDLVRYRYKLTCMITGEKNRAQNCLTVSNLKLDDVFSDVFGKSSRSITEQILQHPGKNFDVAPFVDGRCKTPVEEIQAAVDGAISKEQAVKLRQCLDHIDELNQHISEVEQEILRLSDKYEAALNLIRTVPGFDKNPLTSIQVLSEIGGDMSVFPTAKHLVSWAGCCPRNDKSDRKIKSTRISHAGFYFNQFWCRLQML

SEQ ID NO: 153593 - protein, 431 aa, unidentified
MKGGDTVKNKFISTLFVGIDVSSKQNVLCALDFNGNKLLNLKALNNQPGAESILKSIIGCLNSNALKYVVIALESTSFYNTHIANFLSSNEELLYFNPLVYCLNPKTVANYRKSFIDMDKTDPLDAYVIADFARCGRITSKPWRGAQFLALQRLTRHRLHLVESITREKAYMVSNIYLKFSELAVLDKEDKPFSNTYGVTSAAILTEFLSLDEITYSPVEELVAFVREKGKNRFSDPEKTAKLLQKAARDSYRLDKVLYEPLNVAIASSFNVIRALESEVKAVDKAIEKNIRGLNTSEYQSLKSIPGIGPVLASGILAEIGTIASFDSHNALAKYAGLTWRVKQSGDYTSDETRMTKTGNKYLRYYLIEAANSVKYQVTEYNTFYSKKYGEVTKHQHKRALALTSRKLVRLIFSLLTKNQIYSSNKVGEIK

SEQ ID NO: 153594 - protein, 351 aa, unidentified
MHEITCRLFVGVDWGTETHQVCVLDPDGQIVEERKVAHSATAVTEFLDWLSTIAPEPASAGIGIEIPHGALVEELLARNFGVFSINPKQLDRFRDRHFPTGAKDDRKDAFVLADSLRTDQHCFRSVRVGDPVVVRLRELSRLDEELNLCFQRHCCQLRQLLHRYFHHFLQLSPTADEPWVWTLLELAPTPAKAAKLTMSRIEKVLRQCHIRRIDAQQILTALRGPTFSLAPGTIESASEHTLMLLPHLRLLHQQRLALAHRIDRILEELGTSTEQTAKQPRDVELLLSLPGVGRLVTATLLAEAASFLAERDYHGLRAYAGVAPVTRQSGKKAAVLMRYGCNLRLRNALYH

SEQ ID NO: 153595 - protein, 291 aa, unidentified
MDEHSTLTVGLDVGDRWSHVTTFDAEGNLLEEGRLPTTPTAFQRKFSSLPACRVAMEVGAHSRWVSYLLREPGHEVLVANARKLRLIYENPRKGDRADAETLARLARLDPALLSPVHHRTPQAQADLGVLRSRDALVRARSSLINHARGTVKTTGARLPSCTSYAFASKARPAIPESLQPALSPILDAIATLTQGIRAYDRQIDALSQGRYPDARQLQQVNGVGPLTALAFILTLEDAGRFRKSREVGPALGLVPKRDQSGDRDPQLHTLAPALQVQVSPRRATPTCDGCW

SEQ ID NO: 153596 - protein, 308 aa, unidentified
MKKVSTAVAQQSRNCSQQNLTIGLDLGDRNSWYCVLDEAGQIRQEQRVRTNAKALGEAFGAMPRNRIALEIGTHSPWISRLLSDLGHEVIVANARKVRLIGESRKKDDRLDAQTLARLARIDPELLYPVKHRSVQAQADLSVIRARAGLVRARTGLVNTARGLAKSYGERLRGCNARNMNPEKADGLSPELQRALEPLLSAIEELSERICEYNEGIEALAQQSYPKVALLKQIKGVGTLIALTYVLTLEDPHRFGKSRDVGCYLGLQPGRRNSGQREPQMHISKEGDPYLRTLLVQGATHLGTIRHRL

SEQ ID NO: 153597 - protein, 400 aa, unidentified
MNPVIGLDVSKGESHAQAFLDRGVPYGKIFRFKHDLEGLASFLNYMRGVESAAGMRPSIVMEATGHYHSPVVQFLDEHQYLNIVINPLISHNAKKTNLRRLKTDAADAHLLGALFYKEEFEPYKKRGQHLMNLRYLTRQHESLTGMYVQVKLQFQAILDQVFPEYHGVFGDLYSKVSLRVLALHPTSREVLELDEKEISATIQRLTGRGKSALWCLERAQILVAAAKRNPFKETAFPSHLISMQLLIKLLLQYQDHLADLNKSIEALAEALLEYDLIQSIPGIGTKIAATILAEIGEIDRFNHAKKLVAFAGIDPSVFSSGKFTATINKITKHGSRRLRTALYQAVRCGIRSNRNKKLRAYYDKKRAEGKLFKVAIIACVNKLIHWIFAILTTKEAFRLE

SEQ ID NO: 153598 - protein, 452 aa, unidentified
MAKRKQLRRRKRRNRPGPAINLDAAGIDVGATEVYVAVPTDRDPDPVRTFDTFTRDFHELAEWLAACGVKTVAMESTSVYWIPLYTVLEERGIDVCLVNARHLKRVPGRKSDVLDCEWLQYLHSVGLLQGSFHPPEAVAAVRTVLRHRTSLVQMASSHVQRMQKALTQMNVQLHHVISDITGLTGLAILDAILAGERRPEVLAQLRHRNIKAKEKTIIKSLEGTWRREHLFTLRQSLAAYRNYQTQIEQCDSELQDMLGSFESWRDPDAPPVTGGPKDRLDPHGFHLRAEFYRIFGVDLTQIPGVGVRTVYTLFAECGRDLSAFPTAGCFASWLGLCPDNRITGGKVLSTRTRKVNNPASTALRIAAQSLHRSESCLGDFYRRKRYQLGPPKAITATAHKLARIIYHLVSTQQPYDDSILAQDELQTRIRKTRRLKSLAQALGYQLVPVPSS

SEQ ID NO: 153599 - protein, 430 aa, unidentified
MKSNTQNAKIEAITEKTLVLGIDIGSETHYARAFDHRGIEYSKKPFKFSNTEVGFVTFKEWILDLKEKHEKDKVVPGMEPTGHYWFNLGKFLQDNEMKPVLVNPHHVKKSKEFDDNNPTKNDRKDPKVIAGLVREGRYMIPYLPDGVYADLRTASNLRFQLQAELTRIQNRISRWFNIYFPEYKTVYGKPDAKSGMLILKEAPLPEDILTLGIDGVNQIWRDAKMRAVGKARAKTLIEAAGHSVGSKEGAVSARMEIRMLLEDYESRNIRLQEVMTLIEELVNQIPMAEKLLEIKGVGIKTVSGFLAEVGDISRFNTPKELQKLAGLALVEKSSGKHKGKTTISRRGRKRLRYLLFEVAMSLVAKNPEFRELHNYYTTRRLNPLKKMQSLMAVAAKLIRVFYAILTKGVDYDPKKMVGDIRRPVVYLPAA

SEQ ID NO: 153600 - protein, 386 aa, unidentified
MKNTIVHNEGAASLEDAVKRIKLSGSMIKIGLDVHARLYVAVAQYDHLLPKPARRLAPMEFLPWVKQLVRAGHTVHVVYEACGFGFGLYRELKALGAHCYVIAPRKLDEQCTRVKTDPRDAATLCQRLSRYLDGNTRELAVIRVPTEEEEQDRHISRQRQQLVRLRQKLEAQGRSLLICHTLPAPAHWWKNQTWSRLAKLLPAWMCVRLEVHRPALLALQQQISLLSAEMEAAAPGDVPAGVGKLTTVIITREICSWERFSNRRAISCYTGLCPGERTSGSKRVAGSVTKRGNPRLRAALVEYAWRMVRFQPNYPPVKKRLAILAKGARTTGAQRKKAIVAVARHLAVDLWRIHTGRCSAAQLGLNNAETFIVRGEQKRRCEPHQP

SEQ ID NO: 153601 - protein, 415 aa, unidentified
MKVFCGIDWAEDHHDVALVDADGALVAKRRIGDSAAGFAELTTLLADAGDNANDPIPVAIETPRGLLVAALRQTSRLVYAINPMAVARYRERHTAARKKSDHVDAMTLANILRTDAHAHRPLPADSDLARAVAALSRATQDATWRRTRATQELRAVLREYYPGFLAAFAKGTVTNLASPQARAILALAPTPAAAAKVTKTQLAAALRRAGRQRGIEDLALRLHQALRAEQLRQPPAVEDAFGSQALALLGSLNAECAAVDQLSQTTAEVFQQHPDYAVITSFPGLADLSGARVLGEIGDDRNRFADARALKAYAGSAPVTRASGRSISITRRTVKNDRLNAVGFLWAFAAMAKAGAPQDHYRRRRERGDRHAAALRHLFNRFLGQLHHCLHTGEHYDPIKAFGSPDDTPVQVAAA

SEQ ID NO: 153602 - protein, 355 aa, unidentified
MMNDKQVKVYGGIDTHADTHHLAVIDQAGRRLADAQIPTTATGYQAALRFLGSWPGLVSVGIECTGYYGAAVTRAVREAGITVFEVNRPNRFDRRLHGKSDPFDAYSAAEAVLGGRASAAPKGGDGLVESLRVLRTSRSSALQARTATINQIKGMLITAPEDLRTRYKGLSTPKLIAALAASRPTPTPVTAAEATAYSLRLLARRWQALTGQIEDLAGHLQRLLDDHAPDLMRVFGCGQDTIAQLLITAGDNPDRLRSEAAFAALAGVCPIPASSGKTKRHRLNRAGDRQANSALYHIVMVRLRYNQETRDYVARRTAEGKTKMEIIRCLKRYLVRQLYPLIVETLHPRKEVAAA

SEQ ID NO: 153603 - protein, 362 aa, unidentified
MAKVRSWVGLDVHARSVLAAMIDGESGELRSRRLSGTTSEVVDFCSSLPGPTRVAYEAGPTGYGLARALHAVDVGCVVAAPGKIERPAGDKVKTDQRDAERVLRLLMIDGLHPVRVPSGQEEALRDVVRAREAVRGDLMRARQRLSKLLLRHDVRYEDTASAWTVAHRGWLAKIDLGERGAQVTLLEYLGQVDAIVIRRDALEKTIAELIPGSPWEQTVARLRCLRGIDTLSAVGLCAEVGEFTRFEKAGQLMSYLGLTPSEDTSGEKRRQGAITKTGSRHARRLLVEAAWHYRRAPAKGQALRRRQDGQPAHVIEIAWQAQRRLHRVWQRLDTQRGKRRTIVAVAVARELSGFCWALANAE

SEQ ID NO: 153604 - protein, 468 aa, unidentified
MSEVRLGIDVACRADHRASLADERGEFIWSSWKFRTTTTDLERLWAKIPDGASVTVILEPTRNAWVPLSAWLQTHGATVILVPPEQSADLRDYYNKHTKTDRLDSKVLARLPLLHPEGLRGIDNLGPAESLRRAVRHRFSLVKRRSAASLRLDALVELLGPGWADSLGSATGSKTALVILEKYADPRALKRLGRARLAALLIRSSSGLWREDKADELLAMASETLALWSGGGIDFTELALDIASEVRVLRQLDDEIAAADKRIAVLYDEADSKGIVRSAPGLGPVLSAAILGNAGDFNRFANLAGVRSFTGFVPKIDQSGLVAAHKGVTKAGDAGLRQALYLAADHARHIDPTLAQRYYRLVMVEGKHHNSALCSISAVLITRIAACWRKGELYQLRDEDGEAITEAEGKDACTDRFKIDPKVRAARRRNTPAKVFKNRVAGRGRKESAQKVAPATDPPGKETIENVA

SEQ ID NO: 153605 - protein, 344 aa, unidentified
MGEVSTIGLDIAKSVFQVHGVDVDGAVVVRKRVSRAKVLEFFSTLPPCVVGIEACPSAHHWSRWLQALGHTVRLMPPSYVKAYLKRGKNDANDAAAICEAVTRPSMRFVPTKSEQQQSGLMLHRSRQLLVRQRTMLSNAIRGHMAELGIISAKGRNGTAELFKVIADENDGRIPAAARFSLDVLARQYAAIASEIGAIEKRIHAWHRSCEESRRLEQIPGVGPIVATALIAEVGDWKEFSSGRSLAAWIGLVPKQHSTGGKERLGRISKQGNRYLRWLLVTGAMAVIRYARQHGTRRLWLAHIMERRPIKVAAVALANKIARMAWAMMVRGEQFKELRLLPAGA

SEQ ID NO: 153606 - protein, 399 aa, unidentified
MISVGIDVSKEKSTVCILKEYGEVISEPHEINHTETDLKALVESISELNEETRVVMEATGAYHLPLLTYLKNHGIFVAVINPLIMKKYSAIGLRKGKTDKLDSIKIANYGIDNWFKLTDYEATDEVYSELKLLGRQYSHYIAMRIESKLVLSNLLDRTMPGIKNLLKNRSDKPEKDKLNDFVKEYWHYDNITQKNEKQFINSYLKWAKNKGYHQSETKAKQIYALAQEGIPTLSSSTPSTKMLVLEAVRVLSEIDRTLSMILSQMQELASSLKEYNVVRNMPGVGDTLAPRLIAEIGDLKRFYNKKALIAYTGIDSPPFESGQFVANKRRISKRGSALLRKTGYEIMKCIKSAKPKDDPIFLYMLKKEAEGKPKKVAKIAALNKFLRIYYARVKEVYNT

SEQ ID NO: 153607 - protein, 462 aa, unidentified
MTLLEKLGSAELPRRYYLSVDVGYKEHVAGVISLQTFVRGDERWKRTRCVHFPSTQAGLRKLQGYLDRFSTDHSEFFGLCEPTGGNYGATVFQYLLDQEYNMNLVENAAVSDMRKKIFPGLPKTDEMDTRVMNRIGYLHEAVGEEFTLRPLELPDPDSSHLLALCRDSWKLSAVITRARNQFTQLMAVIFPELKIFFTGSVSTIAPVKLVAAYPTPALLAEATTDEVKDVLWQVGAYQHARRASDLLLLARDSSGLLPDPGRAWRLEWLTSFLLDNFRYQTALDKRVERLVEEREDYPLIADVPYSGPNTLGVIMAASGDVGSRFSSYRKYVSYTGYFAGLRKSQTIDRTKMSNRGNRDLKRAYFQIAAPLVWFDKGDNPYKELFQRKVAEGREWYKAMPFVCAALARHIYHCLKFNDPYDVEKAFRGTALQPASDEEWLDLESGLDEKFEVLETHLCQIEE

SEQ ID NO: 153608 - protein, 349 aa, unidentified
MSIGVDTHKAAHVLVALDEQGRTRGTRDITNSPDGWGEALRWAQGWPGERMWGLENSGSWGKGLAQSLLAQGEAVVYEVSPQRTAQYRRRGRTQDKTDHADAVAIARLLVAEGEQLPRVQADDASTELRLLSDHRDNLLGARTRLINQLHDQMVQLDPAYKVNSGPLTQRRGILYCRDWTLAHPSSVAGTRLLIVHQLATQILRLDDELAAITAELSARVQATQTPLLALRGVGEVTAARLIGELGSPPRIRSATALAALAGIAPVAVSSGGRTGYRLNRGGNRRLNRAIHIIALSQRRCEPRAQAYYAKKRAEGKTAREAMRCLKRRLVDVLYRTLCQDRGVLVATAA

SEQ ID NO: 153609 - protein, 380 aa, unidentified
MAARRQRGPGPSHLLLSPDHAGNVVGIDPHKRTLSAAVVDARGGLLAGEHFRVSGEGHRALVAWACSFGPVARWGVENASGWGRHTAICLTGRGQDVRDVCPNRTARADRARQRGKSDTLDAERVARELLAHPLLPKAFKRAADQPAGPDPQRELLVLWQRRRRSLLTSRQHLVNEAESLLAELPLELREQLPPSTAVRPRLRALAGRRLRPRDPALALRLRLLADYRQQIAHLDADERAVCQELATLVKHSGSTLDTLCGLSTRSVAELLVEVGDPRRFTTPGFARFNASAPLPASTAEGPGEPVRHRFNPGGNRRVNAVLHRMAVTQLRCEPRAQALYNRARARGHTKKEARRILKRHLSDVIHRHMLRDLATTTPLT

SEQ ID NO: 153610 - protein, 434 aa, unidentified
MSLNTINPHCAGIDIGSDSIFIGLEEKEVAFFGTFTDDYLKAIAYLKGHNITSVAMEATGVYWITLFDMLEGAGITVTLVNGKQVKYLPGRKSDVADCQWLQQLHSFGLLRPCFIPDEITRQLRSYTRLRADHLSMASSHIQHMHKALTLMNIKVQNVISQVHGVSGMRIITAIVMGERNPERLADLCESSILKTKREKVIASLKGNFKAEHIFALKQALSAYDFYQKQITECDQQIESLLKQHTDDLPTPSKTTPPKNARHNAPKIDELHTKLMKMTGGNDPSQITGLTDKTLLELLAETGTNLEAHWKTEKHFSSWAALSPTMHQSGKTNKRRKIKKNSRAGQIFRQAALSIANSKHSAFSAFYKRLKARKGFRHALKATARKLAVIYYRIMTKGFAFVEQGIVRYQQHFKEQQLRLLQKKAKSLGFQLLQT

SEQ ID NO: 153611 - protein, 343 aa, unidentified
MKVTTIGFDLAKNVFQVHGVDERGHVVVRKQLRRDQVAIFFANLPACLIGMEACGSAHHWARKLQGFGHRVRLISPQFVKPYVKSNKNDAADAEAICEAVARPNMRFVPIKTMEQQAVLSVHRVRQGFVKARTAQANQIRGLLTEFGLVLPQGISNVMRGVPQLIDVATDLPASMRQLIARLLENMKVLDRQVKELEAQIKAWHQGSELSRKLEKIPGIGPLAASALVASIADARSFKNGRQLAAWLGLVPKQDSSGGKAKLLGMSKRGDTYLRTLLIHGARSAIVAAQRKGKPNVWLSGLLARRHPNVAAVALANKNARTIWALLAHECEFRPDYLPRPATA

SEQ ID NO: 153612 - protein, 338 aa, unidentified
MNITRIGVDLAKNVFQVHGVNRQGEIVVKKQLRRTQMLDWFGKLAPCLIGMEACGSAHYWARELGKCGHDVRLMAPQFVKPYVKRGKNDANDAEAICEAVSRPSMRFVAVKTVAQQTLQAEHRIRARLVRSRTALSNEIRGLLAEFGVIVPTSLGALRRALPEILEDSDNGLIGDFRVLLSELAEELRSLDDRVKFYDARLQARARTDERIGRLLAVEGIGPVVASALVAAVDDGKQFGKGRDLAAWLGLTPREHSSGGKQHLGGISKQGDTYVRTLLIHGARAALNAAANKTDPRSRWVTALAERRNKNIATVALANKNARIAWAILAKGEAYRAAA

SEQ ID NO: 153613 - protein, 334 aa, unidentified
MQNVALIGIDLGKHSFHIHCQDKSGNALLRKKFTRTKLMQFLVTCPSSVVVMEACAGAHFVAWRISDIGHDVKLISPQFVRPFVKSNKNDFIDAEAICEAASRPSMRFVQPRTETQQAMRALHRVRESLIRDKVKTTNQIHAFLLEFGISLPTGDAVIKRLSLVLAEHEIPEYLSRLLMKLHAHYLYLIEQITELESELNQSIKADATAQRIMTIPGVGPITASLLSSQLGDGKQFSCSRDFAASTGLVPRQYSTGGKSTLLGISKRGDKNLRRLLVQCARSFMMRLEHQQGRLAEWVRKQLDNKHSNIVACALANKLARIAWAITVLQKEYQA

SEQ ID NO: 153614 - protein, 331 aa, unidentified
MKNYLNSVGTDISKKYFDAVLFFSGEHAKFANEKKGFASFIKWLKKHDYGPENVLICFENTGYYSLQLSFYLNEKGFDYVQEHALQIKRSIGFRRGKSDKADALDIARYAWVNRESIKLSKPPSKSILKLQQIKTTRELLVRQMVAIKNQIQALAAIGDKNVSRVACRSLTFVLGTIEKQIQKLESEIEFLIGQDEQLSAKFELCRSVKGVGLVLALELIIHTQNFTCFSDWRKFAAYCGTVPYPYQSGTSIKGKARIHKSCDQRMKSLLTMASISALRVDPELKIYYKRRVEEGKPKMSVINMIRNKMLARVFATVNRGTPFITLSKFAA

SEQ ID NO: 153615 - protein, 391 aa, unidentified
MSLYFVGIDISKYKHDCCIISAADQQIVSKFTVKNDKDGFEHLLTTLNSLSNPEDIKIGFESTAHYALNLELFLENAHHSFMEVNPVLIKEYKKSTTLRRTKTDSVDCESIARWLMTVEYKPHSKGFYHSYSLKSLTRLRDRLIRQRSFYLVKITNVLDHTFPEFKPFFNERLSKTAIYLLENYGSAEKMAHMNSASYDKLRCASRGKFSIQQFLRLKELAANTVGVNNSIFDIELNSLLTLYNSLCKEIKTLEAEITKLIEEVHPHYMSIPGIGPISAAVIYAEYGDISNFSNPGQMLAFAGIEPGINDSGTESHGGRMVKHGSSQLRYVLLNACLPLIRFDITFATYYAKKRAEGKKHRVTITHVAKKLIRVIYALERQDVDFNVQKLR

SEQ ID NO: 153616 - protein, 531 aa, unidentified
MGAGKLGRPRSGAFEPAPEFGLRGLEISVLVSARCPNSEGIPISRVDAFHSAPAQRPLEILEESPMRQIEISTRRERRAATRAAARGEVFPLVRPNAAGIDVGSRVHYVAVPPELGEPVRAFDCMTADLREMAIWLKACGVRTVALEATGVYWIPVVEMLEDHGFEVYLVDARQTRNVSGRKSDVQDCQWIQRLHSYGLLAPAFRPEKSITVLRSYWRQRQGLVVSCSEQIQLMHKALEQMNVQLHKVLSDVTGQSGLRIIRAIVAGERDGEKLSALCHRGIKCSRGQVARALEGHYRPEHVFALSQALEAHDFFQRQLQACDQVLEAEIATVPSRHTEPNRQHPDRPPRAKRRKNQPYFDLRAELHRLAGVDLTRVEGIDAMTAFSVLSETGMNMTRFPSEKAFASWMHLCPNNRVTGGRVRSRRVMPGTNRAGQALKLAAQSLHHSKSALGAFFRRMKARLGPQKAITATAHKLARLIYRLLKYGDAYVTQTEAQYQELTRRRTLRELTSRARRLGFALVDTASGEVVS

SEQ ID NO: 153617 - protein, 338 aa, unidentified
MTVVTVGIDLAKNVFAVHGVNAAGKAVLVKPLVRRAKLLELIATLPACLIGIEACTGAHYWAREFQKMGHTVRIMAPQLVSPYRMGGRHGKNDAADAAAICEAVTRPNMRFVPIKSVEQQGQLFVHRAHQGYVSERTALINRIRGLLSELGIVLPQAFKAFLSGVAQILEDLPGYCNQVIGDLLNELYHIEEKIKNSEKLIQQLARDNSAAQLLMQFRGIGPMTATAIVASIGNGHDFKNGRQFSAWLGLTPRQQSSGGKARLGRITKAGDSYLRTLLVLGARSVLLGAAKNDDPVSRWALQLKERRGYGRALVAIAAKNARMCWAMLHLRDEFRFPA

SEQ ID NO: 153618 - protein, 445 aa, unidentified
MICAAVERCAGIDVGKTFLAVCVMTGPLDGEARTQKRHVGTIMAELEALRDWLKQEGVTHVVMESTGSYWKPVFNVLEESFHVYLANPQEVKNRKGHKTDDKDGWWLAHLLRHAMIHPSFIPPRPLRELRDLTRRRKRLLSNASAEKNRIQKVLEDANVKLGSVLSDVFGVSGQLMLEALLGGKAQPADIAQCAKRRAQRKIPEIRQALEGHQMSDHHRQMIRYSLKHLEFLEEQIGDLDLAIASQIKAAGLLQQWELLQTLPGIQERSAATILAETGGNMEQFPTAQDLSSWAGVCPGNNRSAGKNKSSHTTGGNPWLRDALTECAWAAAAKKNCFLKEKFWRITSKSGGQKAPALIAVAHTLLVLVYQVLQTKKPFEDRTAPPLDERQKQRLIRHHIRRLGKLGIAVRASVPSTPGTGKPRRLGQSRPPKTHRPSCAASDCQP

SEQ ID NO: 153619 - protein, 364 aa, unidentified
MSEGICFAGLDVHARRTAAAAVRLGSGEVFKAQVVGSPLEAIGWLQTLPGPVHAVYEAGPTGFGLARAARQAGLEVMVCSPGAIPRQPGDHTKTDTRDALKLARLHAAGQLRAVQVPSLELEALRDLVRAREDLRGDLMSARHRIGKLLLRRDLVFGGPGAPWASKRHLAWLGAICLGDPLAQRVLGEYLACHEVLLARRDRLDGLIADQAAHGPWAATVGRLRCLRGVDTLTAVGLLAEIGDFAAFAHPRLLASYLGLVPGEQSSGDKRRQGAITKAGSTHARRLLIEAAWHYRRQPAVSLTLRRRQEGQSPAAIDAAWRAQMRLSGRWAHLDARRGKRRTTVAVAVARELSCFVWEIARQPD

SEQ ID NO: 153620 - protein, 385 aa, unidentified
MANQNDLSRSLVALEQNNTIIAVIEMSLNYWLIAGIVPGVDRHPLKKLNVDEKALLQLLRQWRDEAAKAGHAITRMAVAFEAGRDGFWLARWLRARGVDAHVIHPTSVAVPREHRRAKTDRLDTELLKRAFLGWLRGEPEHCRMAAIPSLQEEDAKRPTRERENLVGERTRIINRTKACLVRFGIRNFKPTLRKAPERLNQLWTPEGDPLPPNTLAELRRDMARLRFIIDQINEIEAARLLRLEQARVEGPTAMVRLLARVIGVGIETADMLVHEILSRDLRDRRAVARYAGLTGAPDESGSKRREKGLAKAGNARVRRGMIQLAWRFLLHQKDSALTQWYRARTASAGRKRKTMIVALARKLLIALWRLATTGEVPTRVVLRAA

SEQ ID NO: 153621 - protein, 409 aa, unidentified
MKLFVGIDVSSEKLDVCFLDSSDTTLKEVTLPNNLNGASSIKESVLTFHHSFNYEKIVIGMESTSIYSFHPATFLSEDTDLKSLGCVEVVVQNPKSIHRYKGLFEEDKTDRIDAFRIADFLRIERFNKTVLKEERYIALQRLTRSRYQLVHQLTECKQHFLENLYYKCNTLSKELDTSVFGATMLDLLSDSLSLDEIAQMELEDLALLLQKKGRGRFSDPQKIAKMIKKAIRDSYRLAQVVQESVDMVLATYARLIQTLKKQIKDLEKSIVALFEVVSEVQCLKSIPGIGIVYAAGIVAEIGQIERFENEAQLAKYCGLYWKKNQSGNFESERTPMTRTGNQYLRYYMVEAANSIRRHEESYRLYYQKKYDEVPKFKHKRALVLTARKFVRLVDTLLRNRQLYTPERSV

SEQ ID NO: 153622 - protein, 418 aa, unidentified
MRRVIGMDIHRTFAEVVFWEDGRLRWHGRVDMTRAGLEGFGRGLMKDDEVVLEATGNAMAVVRVLSPYVARVIMANPLQVKAIAHAHVKTDKIDAGVLASLHAAGFLPEVWLPDAETERRRRLVARRNQIVRHRTRVKNETHAILAAHLVPPCPHAELFNGPGRAWLARQALPDDERAAITRHLRELDRLGEDLAVLDHEIAEVTVDDPAVRRLLTIAGVNLTVAAGLVAAIGEIRRFPSPQQLVSYFGLNPRVRQSGLGLAQHGRISKIGRSHARALLVEAAWAAAKAPGPLHAFFLRIRARRGHQIAAVATARKLAVLVWHLLAKETDYLWARPALVAHKLRALELQAGRPMKKGNRRGPAYAYNVKTLRNQEMAIAEQAERAYQHFVAQWQPRPSAKRRASGTLASSRGASHQPG

SEQ ID NO: 153623 - protein, 390 aa, unidentified
MNHATLCIGADVHLDEIVLSVVDKADGHEVVERFRVTNNLPGTQAAATTLAELATHLGYQRAEIGWEATGMLWIPFHRYLSRCPQLHSLELEWVCSNPQLVTKFEGLVLRRPKNDPLDAAAIAARLRFGEWSLSYVPDDFWQGLRRLTRYRFHLSRALSREKMRFQAYAFLKCSDWSRVKAFADLFGATSISLLTEFTIAELHQMTHHQLVGLISHRGRGRFADPTATARQVREALRSSYPIDPQMDEMVTAAMTSAWEHIRFLKHLTRQLDQHISRYIDPVPNPLVTAKGLGAVITAGLLAEIVDITRFAEHKHLAQYAGITWGEALHGQLGISEHATHQGRQPVLALLLCLGSQHPPSVQPGVQGLLLAQVRRSSQVSAQACPRPHRS

SEQ ID NO: 153624 - protein, 338 aa, unidentified
MYYTGIDLHKFTSYLTTVDSSGAIVKQENLENVAHNFIQYFNSIPGEHKTTVESTMTWYWLNDLLTSINIPLVLAHAKYVKAIAYAKVKTDKVDSHTLAQLLRMDYIPVAHKISNENRLLRDALRARLKIVQRHTSITNSMQLLLAKYNYDSPTQLSGISKFQYEQLSEVEALLDEQMLDLEKQLYPFLIPDDDIQRLLWIPGIGKMNAFTLLLEIDEINRFPDVKNFFSYCRLVPSARNSGGSSKQRSSKDGNKYLKVAFSNAATHAVQYYPVIRKYNNSLTRKKNKQIAKTIIAKEIAKIVFHVLKNKTDFNNKFKAQLLEHTKSLQWPRVVSPDV

SEQ ID NO: 153625 - protein, 412 aa, unidentified
MDVVHERCAGIDISKADVKVCVRVPGPGKRRRKEIRTFSTMTRDLLAMRDWLLAEQITVVGMEATGSYWKPVFYLLEDALECWLLNARHMKNVPGRKTDVADSEWLCKMVEHGLVRPSFVPPRPIRQLRDLTRYRTEVIRERTREAQRLEKLLEDAGIKLSAVVSDLLGKSARAMLEALIAGERDPKALAELAKASMRAKRQTLAQALTGQFTDHHAFLARTMLDRIDAVTATEARLSEEITCQLAPFRRPIELLTTIPGVSTRAAEMILAEIGADMTRFPSAAHLASWAGMCPGNHESAGKHTSGKSRPSDPWLKNALGLAATAAARSKDSYLASRYKRIAIRRGKKRALVALGHTILTSIWHMLTNDAEYRDLGADYFLQRTGRARQTRRLVSQLNMLGYQVSLQSAEAI

SEQ ID NO: 153626 - protein, 391 aa, unidentified
MSMLIEEKEYREGERTAIGIDPCKEFLQLAILSPDGKRKFKKLPLSPSITEEISKSTVPERTQIGIESYASYGKLFVFELLKKGYDVREVNPSISSKLTKLITEDHSDCLDAESIAKALVLIPDLPKVSFTEPQLLLSKLSRLRKRLSKDLNGYLNRLHAALTESYGAVYKRLFRSIFSQKALAFFDRYPTINDAFGHKKKVTAALGEEAWELLSQAGKWDQSFYLEYLKVEIRCLIAIIRSLLEAKKELEKKIQEVGTEDEDVRLLRTFPGIDYVTAATLLSEIGSVERFGKESSLSSYCGVSPVMWQSGTSGVKTKRRKRYNRHLKGILFFISLSQIRINPESRDYYWRKRQEGKSHWQAMNALSRQLIKIIYYMLTNRECYRRERIVH

SEQ ID NO: 153627 - protein, 339 aa, unidentified
MKITTFGLDLAKRVFQLHWVDRETGEVCRQQMKRAQLTEFFTNREPSLVAMEACGSAHYWARKLKAAGHEVRLIATQFVRPFVKSNKTDAADAQAIWEAAQRPGMKFVAVKSEAQQSVLMLHRMREQLVKMRTMQVNQLRGLLYEFGAELPQGRQRGMACIGDELERLAGVLPGLVIATIREQLTRIEALNQDIAGIEKKLALWKKEDPVARRLMAIPGVGLLTATAAVATIGDAKTFQSARELAAFLGLVPRQSGTGGRVKLLGISKRGDVYLRTLLIHGARSVITHAKERPPWLEKLLARRPLNVAVVALANKMARTIWALLAHDRTYQKDYVARAA

SEQ ID NO: 153628 - protein, 374 aa, unidentified
MSGTIIYLGLDVHKDSVTIAVLPEGAPAPSRVERLPNDLAKLRRFCERLVAQGELRACYEASGAGYVLQRALGEWGYQCDVIAPSLIPTKPGQQRKHDKYDAVQLARLYRAGELTCVRIPSEAEERVRDLVRCRETLQREVLKSRHYILKFLARRGFVYREGTNWSTSHYHWLRRLAAASSPLAAEDQIVYGEYLGLLEYKLSRRDELDRRIGELALTPALAPAVNRLQCFRGVQLHVAMVLTTEIGDWRRFTSPRQLMAYLGLVPKECSSGDRERRGSLTKAGNSHCRHVLVQAAWAYRFQPKVGIALQARQRGQSPVVIAHAWKAQHRLHTLYRRLAFRTMPQIAVVAVARELVGFLWAVMQDEDLSTSVAA

SEQ ID NO: 153629 - protein, 389 aa, unidentified
MILIGIDVAKDKHDCFIQTTEGKVLCKTFSFANNYDGFEELYAKILACNDADIRVELEATGHYSYNLLGFLLSKELPTFVFNPLQTNQFRKSLSLRKIKTDKVDAKTIALMLVTESGDHAYSLQTYQNEELKSLTRYRFDKVGQCAKLKQSLSRLVTILFPELESAVSTIHLNSIYAMFLKYPSAKDFAKAQFHSLVNLLVSTSHGRIGIDKAKEIRSLARKSVGVYVCAKVLELQHTIKLIQILNEEIAEIEERIQVHMQEINSPLESILGISFCLAAVIEAEICDFQRFSSPDKILAFAGLSPSTYQSGKSISQNSTMEKRSSRYLRFALLTAARLAIRYSNTFANYLKKKRAEGKHYFVALSHVAKKLVHVIFHLHQTGESFLDFA

SEQ ID NO: 153630 - protein, 333 aa, unidentified
MVEGTEGSHHKEGSTKMRQHNMICAGIDTGKRKLDVALTDGRQQFEADNESDGHAALSAWLRRHRVKRVGIEASGGYEQAVVAKLRRDGFLVIVFQPAQVRAYAKFHLQRAKNDKIDAALIAVCTAATQKIHIPPDPRLAPFAEHLTLVEQITEDIAHLKTRRESCRDHRIRCHWDGEIARLKTLLKTELEALIAAVRQHRDLSVRLDLIASVGGIGLRTAVAILLRMPEIGRVSREQAAALAGLAPYDDDSADRVGVRHIDGGRERLRKSLYAAALAAAFHWNPQLNVIYRRLIAAGKPHKVALVACARKLLIYANTVVERGTPWTERPAAI

SEQ ID NO: 153631 - protein, 410 aa, unidentified
MDVVYERCCGLDVHKQTVVACIVVPGATGKQPRKEIRTFHTMTADVLELGEWLTTEGVTHVALESTGVYWKTIWNLLEGSFTLLLVNARHIKQVPGRKTDVRDCEWIADLLRHGLLRASFVPDRPQRELRELTRYRTSLIRERAAERNRIQKTLEGAGIKLGDVASDVLGLSGRRMLEGLVGGTSDAASLADLAVGSLRTKLPQLERALTGQVGAHQRFLLAQQLAHLDALDELIERVSEEVAQRLGPFQDQVERLDAVTGIGQRTAEILLAEIGASVDRFPSAGHLASWAGICPGNNESAGKRKSGKTGKGNVWLRAGLIEAAHAAAHSKNTYLASQYQHLAARRGHKKAITAVAHSILRIVWHLLAHDCQYVDLGSRFLEERNRQQIERRLIRRLEAFGYTVKLEPAA

SEQ ID NO: 153632 - protein, 344 aa, unidentified
MEHFAGLDVSVKETSVCIVDDAGRIVREAKVASEPEALLAVLNNPSYRFGRIGLEAGPLSQWLYSALGEANLPVICVETRHMRAVLKAQINKTDRNDARGIAQMIRAGLYRPVHVKTLRSQKLRMLLTHRKLLQSKAIAIENDLRGTLRNFGLKVGVVGAAKFEARISELVENLPDLALLVEPLLVVRRVLREQIAVLHRRLLHIVRDDEVCRRLMTIPGVGPVVALTFRATIDVPARFRNSRAVGAVLGLTPCRHQSGESDRTGAISKCGDEMMRVMLYEAAQILLVRSTRWSWLKVWAMQIAKRRGLKKAIVALARRLAVIMHRIWVDGTEFRWARQAAAAA

SEQ ID NO: 153633 - protein, 344 aa, unidentified
MNQYAGLDVSLEETAIALVDQTGRIVREGKVASEIEAIDGWLNRHRDGMARIGLEAGPLSSWLYAGLKERGWPVICIETRRLRAVTRAMPVKSDRKDAEAIAQVMRTGWYRPVHVKSLASQQLRMLLRHRKVLQAKRLDIENELRGTLKAFGLKPGAVTPSTWAARVRELVGDEPWLERLARPMLAARQALIASFAELHALMLKIVKDDPICRRFMTVPGIGAVNALAFKTGVDDPGRFRHSADLGPHFGLTPRRYQSGESERIGPISKCGDAMVRSLLFEAALILLYRVKKTSALQRWARALAKRIGARKAAVALARRLAVVLHRMWVDGTDFNPDPVRVAAR

SEQ ID NO: 153634 - protein, 353 aa, unidentified
MMIIGCDFHPSFQQIAYVDQETGEYGERRLSHREEAVRFYRSLAGRQVRVGVEATGNDRWFRKLLGELGDELLIGDASAIHASAPREQRTDKRDARHILRLLVENRFPAVWQPSAGNEEQRQLLMHRCRLVRMRTRVKNQLDSIAKSEGLTGSRSWSKQRRAQIEALPLAGWYAQRRADLLQLLDELEQRINPLDKAVEAAARQDAQARLLMTHPGVGPVVSLAYVLVVGDWQRFPRGKQVGSYLGLIPSEASSGKRQQQMGHITKQGNTLLRWLLVESATTAQRFDPSWHRQYVRLSMSKHHGVAKVAIAHKLAVRLYWMLRSGQDYEQIKERGSRARQSECPVGRSNRPIE

SEQ ID NO: 153635 - protein, 416 aa, unidentified
MELQRNKVCGIDVHKRFLIATILCRDGKKDTQRFSVTLEDLLKFRDWVIENGCEQVAIESTGIYWHPVHSVLEGKIDLIVANSYKIKHTPGRKTDVSDSEWIAELCLNGMIEPSRIFPKDDRELRRLTRAREGYVKQMTQEKNKIHQSLDSACIKLASVISDIFGKSGMYLLNCVLEGREIDDIIDGIPSGRLKKKADQIKESIKSRLEISQVILIRGSLSLMKSIQERIDELDGEISARIQYRKNDLAIAMSIPGTGFVSATAILAEIGNYTDFEKPEQLAAWCGLVPSLYQSAEKTILGGITKQGSKHIRRMLIQVAYAISRTKDSKLKKFFLRIQAKKGSKVAAVALARKVLCILHHLLINQEMYIEDRDKKNMRQKPLIPPSPIEMSIQEMIDCIVRAGYVVTKSDSIGGFG

SEQ ID NO: 153636 - protein, 342 aa, unidentified
MYYIGLDVHKKTISYCVKDAGGQVHREGTIGATRNELDWWLKTLPQPRMMAMEATIFTGWIYDHLLPHTEQVKVAHPLMLRAIAAAKKKNDRIDAGKIADCLRCDFLPECHMASTEIRDRRRTLRYRHLLVRQMVQMKNRISGLLMETGVSHNKQRLHKVGYVRELLSSNEEVHENIRPLLRLSRETIVRCQKTEYALVSSLQRDPLLAERIKRLKTVPGVGPITALTWALEIGDVARFRSVKQAISYCGLCGEEKSSADKVLRTPLSKQRNKHIQHVLVEAAKLAPRQSHELALIHERETQKGNRNRATLAVARKMVAYLLAVDRREREFVPAEVRSTVAG

SEQ ID NO: 153637 - protein, 493 aa, unidentified
MAKRRMSTFERLESGRLNRKQRRELGRQVATADPGLTIVHVNAGGIDVGNESHYVAVPPDRDPNPVREFGCWTAALNQMAEWLKSCQIDTVAMQATGVYWIALYDVLEQHSIRVVLVNAQHTKNVPGRKTDVQECQWLMKLHTYGLLRDSFRLAQGMEGVRTIWRLRDRHVKEAGRAVQHMQKALTKMNIQLANVLSDINGLSGQQIIAAILNGQRDPWKLADLKDYRVRASREEVARSLEGHWREDVLFELQQAVDSYHFAQQQMQECDGKLENYLASLPARMLDIPPARMLDIPTQPESALAATPTKKTKKAKKPSGNQPHLDLKTELKRICGVDLTVIDGIDVMTALTIVSEIGTDMSGFPDENHFASWLGLTPAKDISGGKIIGRGKRKVKNRVAVALRTAATTLLKSDSYLGARYRSLRRQLPSFAAAVKAMGRYLAVLIYRVLTRGEAWVDRGATRFERRRTEQELASLNFKARAKGFTLVPITEPS

SEQ ID NO: 153638 - protein, 371 aa, unidentified
MLDYTKTVVGLDVHKESIVAAVLPPDSDQVALTTKFENNSAALKAFVERLRARGPLTFVYEAGPCGYQVHRDLTAQGQECVVIAPGLIPKRPGDKVKTDRRDAEKLAQLQRAGQLTSVNVPTREDEADRDMVRAREDVLSERLNAQHRLSQFLLRHGLVWRTTKPWGVKHRVWLKALRFELASETRTFESYLRGLEEVEARLDGLEREVLGLAENGAWKTVVANLRCLKGVDTLNAVTLAVEIRDFRRFPSAREFMGYTGLVSREYSSGENVNRGRITKVGNAHVRRTLVEAAWAYAQPDRAGLPLLKRREGGSPEAVATARRAQERLCRKFRKMVGRGKPRQKAVTAAARELAGFVWHIGRLSREVNAGN

SEQ ID NO: 153639 - protein, 379 aa, unidentified
MKPFDIPHKSADFQTLVNKLKGLDGETRIVMECTGHYYEPVARELAQADFFVSAVNPQIINNFQGQDNPLRKVKTDKADSVKIARYTLDSWANLKQYTLMDELRSQLKTMNRQFDFYTKHKTAMKNNLIALIDQTYPGANTYFDSPARDDGSQKWVDFLDTYWHVDCVRKMSLNAFTDHYQKWCCRRKYNFSKAKAEEIYGAAKELIPVLPKDNFTKCIIKQAVAQVNAASQTVERLRALMNETASKLPEYPVVMAMKGVGPSLGPQLMAEIGDVTRFTHKGAVTAFAGVDPGVNDSGDYSQKSVHASKHGSPVLRKTLFQVMDILIKTKPDDAVYLFMNKKRTEGKPYYVYMTAGANKFLRVYYGKVKEYLSTLPQSN

SEQ ID NO: 153640 - protein, 359 aa, unidentified
MQTQSNKIDFNGQNIYAGLDVHLKDWKVTIMTEKLTHKTFSQPPKPEALYHYLKKTFPGGTYHSAYEAGFSGYWIHNKLRNLGINSIVVNPADVPTTGKEIVMKDDIRDSIKIARSLRNGELNPIYVPSIPTLEDRTLVRTRTTLVKDLTRYKNRIKSFLYFHGIEYPETFSRHQTHWSNRFNKWLEDVEMTELSGKTSLNILLAQSRYLRASVLQTTKQIRELTKTSRYERQHELLRSIPGIGLLTAMIILTEIETIDRFDTFDQFCGFIGLVPSTHSSGDHQVIGDITPRGHSVLRVSIIEASWMAARLDPALNRCYHDYCKRMEPNKAIIRIARKLVSRIRFVLKNNQPYVCSVVK

SEQ ID NO: 153641 - protein, 310 aa, unidentified
METKVFVGVDVCKDNLDVAIGAGKDIVTFTNDQKGVDSLVKKLSRINAALTVFESTGGYELLATSCLAEAGLPVVIVNPRQVRDFAKSAGILAKTDAIDARVIARFAQAVKPDVRQLKDRATSELAALVTRRRQIIEMIVAENNRLRLANKRSKKDIKDHIRWLEKRLDKIESDIGKMIQRSPIWRCKDDILQSVPGIGPITSASLICDLPELGVLSPKKIAMLAGLAPLNCDSGKFKGRRRIWGGRAAVRSGLYMATLAAIRCNPAIKGFYQRLIAAGKCHKVAATACMRKLLIIANAMLRDQTLWQQN

SEQ ID NO: 153642 - protein, 428 aa, unidentified
MTQSEIKSIEFAAYIGIDWADQKHDICLQEVGSKQIESLRLDHKPDSISNWVSELRQRFQGKPIAIALEQKRGALLYSLMHYEFIVLYPVNPQALASYREAFTTSGAKDDPVDAGLLQEMVRLHHNRLRPWIPDDPLTRELCLLVEHRRRLVADRTRLTNRLQALLKQYFPQALDWAGELDTVRALDFLAQWPQLEALQQATPEQLRDFYQQHYRLREKLSPRLDEISRAQPLTLDKAVITASITMVQTLLEPLRGLIAGIETFDQQIKDCYQQHPDKEIFNSFPGAGAVLAPRLLAAFGADRERYQSAEQIQCFSGIAPVTERSGKTKFVRRRLACPKFVRQSFHEFANSSIKWSRWARAYYDQQRRRGNKHHEAIRSLAYKWARIIYRCWQDHQAYDESVYIDKLELRGSPLAKLIPTAVEEAANC

SEQ ID NO: 153643 - protein, 334 aa, unidentified
MKQVNQIGVDVDSEALVCMMQRVGQRLPLASFANTAAGHKKFIRWATQGGHAARVCLEATGIYSLEFALALHHARNVEVMVVNPRAIKDFVRACMQRAKTDAVDAGGILDYLERMPFVAWQPPAPEVLELQAINRRIVQLNTELTREKNRRHASEFAGASADAIAHDIEVNIHHLERRIERMHDSGLKLVRGVPALATKLAHLVSTKGIGENSAMRLLAELLVLPDDLAAPQWVAHAGLDPRPYESGISIHRPRRISKVGNRHLRAALYMPALVAIQHEPNVKAFYDKLVAAGKKPMQAVVAVMRKLLHAIWGMLKHDQDFDGEKFFKIAKENA

SEQ ID NO: 153644 - protein, 368 aa, unidentified
MNKAITFFVGLDVHKQSIAIGVAAAGDEPPRFVGTVGPALAELLTALGRIGPAASLRVVYEAGPTGFHLARELAGRSYDCQVIAPAKIPRRPGERIKTDRRDCQKLARLARAGELVAVVVPDARDEAIRDLSRAREDAVAARLKARQQLKAMLLRHGHRYAGKTSWTAAHERYLAAVSFPHPAQDLAFAEYRLAVGAADAQVTRLTDALRAQVETWRMRPVVAALSTLRGIDFVAATTLLAELGDLTRFAHPRELMGFLGLVPAQYSTGETRRHGAITRTGNGHARRVLVEAALNHRFPARMSRLLQQRQTGQPEAVRAIAWKAQIRLCHRYRRLVDRGVPKNKVGVAIARELAGFVWDIARHVAPTR

SEQ ID NO: 153645 - protein, 449 aa, unidentified
MHGVHIGGQRAGAFLELVRGVDPKRVLLVGIDVAKATWFVVASNLLGEVVVDGVRLVADRAGLAELERMLGAASARVNAAMVVVGIEAAGHHHQTLTAHLLDRDELVVRVLNPAQVAAVRKQQGNRRRKTDWLDAAAVCELLARGEGALVHLDGSAASALRPLWSGRKDLVDTRSRLRQQAGALVDCLWPGCSAKDTAAGVTPVLCDLFATKAGRVLLELLAQGWTPARVAATSVAALRGLFAVRGCRLTRPLATRLIGRARAALPAHPAATAGKAATLAALLGTIDTLDHQIACLEAAMAPLLAGTQGAKLTQLRGVGVVAAAGFVAFVGSTDRWADWSKVWRAAGLDPARSQSGPTDARLGISREGSAWGRRAILDLAAAVCQQPGPWRDRLRIRTTQQHKPAKVALAATANAVGRTLFALMASGADFDPHFEAKRAAARKAGGQAA

SEQ ID NO: 153646 - protein, 366 aa, unidentified
MLIIGCDYHPSVQQIAWADTETGECGEKRLMHSDGEAERFYRELKQRGVQVRVGMEATGHARWFERLLAELGFELWVGDPAEIRATRVRKKKNDREDARLMRKLLLENRFPRIWVPSPENRDVRQLLLHRHRLVGMRTRVMNQLQAIAMNEGLRRKSGLWSKKGRARLESLSLAPWASRRRQELLDLLDRLSPMIDELSKAIEQEAERRPEVQLLMTHPGVGPITALAFVLIIGTPERFHCGRQIASYLGVIPCEDSSADHWRLGHISKQGNALMRFLLVEAAQTVARCESEWRQHYFHLLLRRGRAIAKVALARKLAVRLFWMWRKGQDYQQVKKFGSDAGQLETPNGVKSITVKLMERPAPSMA

SEQ ID NO: 153647 - protein, 383 aa, unidentified
MRHGGILIEANDSEGEAMKKHTTIDQSLSADVSACSTVAIDLAKRVFQVAGEDALGQVIFEDRIKSREAFQVFLRGLPASVTVLVETGPGAQAWARLLQMQGNSVRILPAQLVASHRSGPKNDRNDVLAILRAGRDCKISAVPIKSAAALAMQALHRARQGYVRRRTAVGNQIRALLLEHGVAMAQGEIAIRQLVPRVLEDATQPLPDLLRELIAELLGEWGQLGERVNVLTGRLETAANEDETAKRLMTVRGVGPIIATALLAKQTEPERFANARLFAAYFGLVPSQHSSGEKNRLGGMSKNGDAYLRSLTIQGAHAVLRQIRPDSEQPDDRRLWRWISRLGRKQAAVRLANRNLRILWVLLQNDQTYRRRPGDGQEAAMSH

SEQ ID NO: 153648 - protein, 312 aa, unidentified
MDTKKVEFEQVIERGCGIDVHKSLLVATVRGTGLKEETREYGAFTEDIESMSGWLKECKITHIAMESTGVYWKPVFNILEEDFEIILVNARHIKNVPGHKTDKKDSRWIAKLLLSGLLKSSFIPKQPIRELRDMTRYKRKIVEQISSEKNRIQKILEDGNIKLSSVVSNMSGAVATRIIDDLIAGEEDITKLVAHKHGKMQVSETDLAKSLVGNLTAHHRQMLQLIKQSIKDKELLIANLDKLIDEHLKANELELDRDLLSTIPGVGKEGAEYIIAEIGNDMSVFEDEQHLSSWAGMSPGNNESAGKKKVHE

SEQ ID NO: 153649 - protein, 400 aa, unidentified
MNAVGIDVSKGKSTVAIMRPFGEVIAEPFEVSHTDTELRKLACFLEKLPGETRIVMEYTGSYWQPIAKVLHDAGFFVSAVNALLIYKYGNNSIRKGKTDKLDAVKIANYCLDRWTDLERYSPTDQIRQTLKTCRRQYDQYIRLKVNLKNNLIALLDGTFPGVNTLLKSAPRDTDGHEKWVDFAGKFWHRQCVCGNSEKAFANQYRKWCAKAGYRFNAEKAVAIYSHAGSQVDTLPMSSAIQSLITHAVSQLNMIIETISAIQHEMLTLASQLPEYPIVMRMFGVGPVLGPQLMAEIGDVRRFHCKQSLVAFAGVDAPPCQSGTFESKNRHISKRGSPRLRKTLFQVMSTIIQHAPADDPVYQFLDRKRREGKHYYVYMTAAANKFLRIYYGTVMAYFEKP

SEQ ID NO: 153650 - protein, 356 aa, unidentified
MKKSNTKTARPDRAVVTIGIDLGDRFSHYAVLSEDGELIEEGRVKMTPEAVERKFGDWNYARVAIEVGTHSPWMRRTLSELGLEVIVANARDLRAITGSNNKNDREDARKLARLAQSSLDLLAPVRHRSETAQRDLLPIRSRALLVEERTRLVNGVRGLVKGFGYRLPLCATKNLPGKAEGRLPDWLEEPLRPLLAMIDVLSELIRQANVKIEAMVGERYAEAQVLLTVPRVGALTALTYVLTLDDPRRFPKSRDVGCYLGLRPRRSQSGGSDPQLGITKAGDAYLRKLLVQSAHQILSRWGPESALRSWGLRLCERGGKNARKKAVVAVARKLAVLLHKLWVTQQPWEAFPAAAD

SEQ ID NO: 153651 - protein, 319 aa, unidentified
MNTTTAAHIDRRERNVGIDIGKSMLDTCIFELDLYLQYPNTPEGIRELLKKLARYNLTRILVEATGGYERALVEACAEKELPVIIVQPTQVRQFGKAQGILAKTDKMDSHLIAQFGAVMKPEVRPLNSKKVRHIKDLLSRKRQLNEMRTQELNRQHKAPTVLAATHKRLLKVLDKEIEAINKLLAKAVNEVTEWQRTYDILNSVPGVGDGVTFTLLGELPELGQLSPRKIAALCGLAPFNRDSGSMKGRRRIKGGRAPIRTVLYMAMLSAIQCNPVMKTFYKKLVDQGKHKKVALTACMRKMVTILNAMVRDDCEWQAN

SEQ ID NO: 153652 - protein, 407 aa, unidentified
MLFAGIDWSDQALDFHLRTADGKVLAEGEVRPNLDGLAKLYGRLDVHAPPDQIGIAVETAHGAWIQPLLDHGYRIYPVNPKSVDSFRKALTANGSKSDAIDRKVLSMFLVTFHRELHPLKPDDPEIIALRIACEDRVRLVEERTAKLSELEAVLKIYYPAFLGLFGGFDSHIALEFLQRFPTQSQVQGLTPGKLRGWLRRHGYPCTQRMKNMTATIRRPALPVPQHLQQAKAPLIGYLATSLIALKAEIARRESDISDRFGQMPEADWIRSLPETGPILGPALLACLGRDRQRFATTQDACAFMGTAPVTKASGNFKVVRFRRGCWKFARRTLQLFADQSRHQCTWAQELYDRHRSKGRAHHQALRALAHRWLKIILAMWRTGTPYNEAVFRASQARNLLKTATTGA

SEQ ID NO: 153653 - protein, 330 aa, unidentified
MKSYKQFFGVDISKKTIDVTLLQNSANVHHQFSNDETGMQQLLSWFQELQIKPSDTLFCMEATGLYCFMLTQFLVANEIDTWVEHAAQIKKATALIRGKNDKVDSLRIATYASKNLERLRLWKPISSALDKVKHLATLRERIVETQKKLIVPIKEFEDVGNTTMAKMLTKTIKKSIAALEADLKDIEKQIVKIIEEDTILTKKYNNAISVVGIGFVTAINLMVHTNGFTQMNDVRKLACYCGVAPFEYSSGSSIRGKTKVHFMANKKLKSNLHMASLTAIKLDEDIKRYYERKCAEGKNKMSVLNAVRNKLLARVLACVNNDRIYVNKAV

SEQ ID NO: 153654 - protein, 462 aa, unidentified
MTISKNKGNRTNETPVPTSLPAIRPRVAGLDVGSSAHWVCGPARDDGKPNVRVFGTTTDQLNELAGWLSAQGVESAAMESTYVYWIPIYELLEARGIEVVLVNARQLHNVPGRKTDFSDCQWLQLLHSCGLLRGSFRPGEAITRLRALQRQLANLVAERTRYVQWMQKSLDQMNVQVHRAVTDLTGLTGMAIVRAIVGGERDPARLAMHRDRRCRKSADEIARYLTGNWRDEHLFNLASALRLFDTLDTEIAAYEAQLLTEIASLQPPDRQAEPVPPHPNPAKEKAIKARGEQPARTTLWRFAGVDLTRLDGISAGAAQVVLTEVGPNLAAFPSEDQFVSWLRLCPRTPISGGKPLKKRRNGLGANRIAGVLRMAAISLERSKTALGASFRRIARRKGGAVAVFATARQLARLIYRMLRYGHDYVDIGEKAYDRQFQIRRLTALTETARSLGYTLVPNVAAG

SEQ ID NO: 153655 - protein, 375 aa, unidentified
MIATTRPESSVNQPTLYVAFELGQKDWKLGMTSGFGVPPWVRTVASRDWRAVEEALRQGRRRLGLPREARVVSCYEAGRDGFWIHRALTQLGIANRVVDSASIEVNRRARRAKTDRIDARKLVSLLVRVWGGERDAWREVRVPSVADEAARQVSRERTALTQEQTRLINQLRGWLATWGCALPRRRTGAWWSTVRDWSGAPLPDQVQGRIARAAARQASLTLQIAALDAQQQLAVQTGPAPSALRQLVRLKGVATTGASVLLDEGLVWRAFQNRREIGGLLGFAPTPFNSGESMREQGISRAGNNRLQSVSIQLAWSWVRWQPQSALSLWYRERFGTGKRSRRIGIVAVARKLVIALWRYVTTGAVPLGAILKAA

SEQ ID NO: 153656 - protein, 343 aa, unidentified
MEVSTIGLDIAKSVFQVHGVDESGATVIRRQVRRRQLLGFFEKQAPCLVGMEACATSHYWARQIAALGHEVRLMPPHYVKPYVKRNKNDMADAEAICEAVTRPTMRFVAPKSEEQQSVLVLHRSRELLVKQRTMLANAIRAHMAEFGIVAPRGIPRVRELLVVIADPDDARLPPIARTCLEGLARQFGSLHEEIRASEKRIHALHRSNETSQRLATIPGIGPIIATALTASISDPSVFKNGRELAAWVGLVPRQSSTGGKERLGRISKQGDQYLRWLLVAGAMSVIKSAKRRETTKRPWLDELIAKKPIKVAAVALANKMARTAWALLSHGGTYREPVVAAAS

SEQ ID NO: 153657 - protein, 360 aa, unidentified
MFIESVDRIIPQEFDVFVGLDVDARNYSVTTLNWAGNVHQFTMSAQAKGLVSWRQQNLPQARVAWVYEAGPTGYGVYDALSQAGDVCLVTPPALLPRVPGRRVKTNRLDSLELAIRLRGGELTGLRVPAPQIRSLRHLTHQWLSLAKRVRGVKCQIKALLLMEGLPFPEEGRGWSRAMGTALAALACDAEVQFVLQQRWRQLTALHEEQLRLGRRIRAYCRADPDLAESITYLMSLPGIGWVTGAHILARVGEWRRLKRPQELAKFAGLNPWEHSTGLRIVRGGISRSGDRHLRNLLIEAAWRAIQVDPELRAFYERLRRRNPREQGARKAIVAVARKLTERIGRVLMDRRCYRPVSAAC

SEQ ID NO: 153658 - protein, 430 aa, unidentified
MKSNTQNTKIEAVTEKTLVVGIDVGSEFHYARAFDWRGIEFSKKPFKFSNTEPGFIEFKAWILHIQTEHDKDSVVPGMEPTGHYWFNLGKFLQDNGMKPVLVNPHHVKKSKELDDNNPTKNDRKDPKVIAGLIKDGRYSYPYLPDGVYADLRTASNLRFQMQSELTRIQNRISRWFSIYFPEYKDVYGNPDAKSGMMILKQAPLPEDIVTLGVEGINRIWREAKLKAVGLKRAKTLYEAAEHSIGSREGATAARLEIRMLLEDYESRAVRLQEIMTLIESLVKQIPMAEKLMEIKGVGIKTVSGFLAEVGDISRFDNPKQLQKLAGLAIKENSSGKHKGETTITKRGRKRLRYLLFEVAMSLVAKNPEFAQLHLYYTTRRINPLKKMQSLMAVACKLIRIFYAMLTKQMDYDPQKMISDIRRPEIYLQAA

SEQ ID NO: 153659 - protein, 351 aa, unidentified
MPRTATVHAVTAIGIDMGKNTLHMVGLDTRGTIVLREKVSRGRITSRLANLPPCLIGIEAGMATHYVARELAVLGHDVKQVPPAYSKPFRQGQKNDFRDAFAVAEAVQRPTTRFVPAKTNEQLDLQALHRVRSRLVSGRTAVINQIRGFLLERGIIVRQGLRFLRQALPDILAKRTDVLSPRMVRIIADLAGDWRQLDERIEPVTDEIETLAKSDSSCRRVMTVPGIGPIISSAMVAAIGSGAAFARGRDFSAWIGLVPKQMSTGDRTILGRISKRGNGYLRTLFMQAARVILLRPASWPKHGFGVWLARAAQRLHPNVLAAALANKLARIAWTVLAQERSYEARVTKAAA

SEQ ID NO: 153660 - protein, 314 aa, unidentified
MRNCIGIDVAKQYFDLHSLKTGQDQRMENSNDGIRRCVALCNKIRPELIVMEATGGYELTLAATLQAEGFAVAVVNPRRIRDFARAAGQMAKTDRLDARIIAQFAATMEPMPTERINENTQKLKALVARRHQLVGLHTAESNRREHADGKEIRRSIAAVLKVIEAQLKTIDQQITEHVENTPRLRQRSEILDSVPGIGPTTANMLVTELPELGQLNRRQIAALIGVAPMARDSGTFRGKRMTGGGRKKIRSRLFMPTLVAVRHNPILRAYYNKLLSRGKCKMVALVAVMRKLICIMNTMAKNNQEWNPNLIKIA

SEQ ID NO: 153661 - protein, 254 aa, unidentified
MIHYIGIDISKAKFDVAFINPSTNKVKTKVFNNNKAGFDLLLAWLKTNVSNHLDELHIILEATGVYHEHLSEFLDDNNIKQSIVNPSYVRKFADSLGVIHKNDKKDSIILSRYGYSHKPEVWVAPSIEAKQLKALLARLEALKEDLQREQNRQELLLSPNLPDLVKASMQTVISVLQEEIAKLTKDIDDFVDKHPSLKQDKTLLETIDGIGSVIAKEVVCLIHTKQFKKASQMASFLGLIPKQRQSGVFVCLYA

SEQ ID NO: 153662 - protein, 331 aa, unidentified
MRINQTIGIDISKLKFDVRIHSNQMFSVFTNNQKGFKELIKWVRAKNPFSTEETIIVFEHTGLYSFPLALFLSEQQLAFALVPGLEIKRSLGISRGKDDKVDATKIALYGYRLRDEINPYILPSNEIITMKQLLSLRDRFVKQRAGFKASLKEQKIFLLKKNHQILFDTQQKMIGYLTKQIDKVDKKLNAIINDNEVLKNLFTLITSVKGVGAQTALHLIAYTEAFTKFKTWRKFASYCGVAPFPNISGTSIRGKTKVSNLANKKIKSLLDLCAKTAIQYNPEMSIFYKRRVEIGKNKMSTINIIRNKLLSRIFAVVDRKIPYVDIMKYVA

SEQ ID NO: 153663 - protein, 365 aa, unidentified
MNKNTNAKRMAREETKQPLAFYIGIDLGDKNSDVCVLDQAGEVNQEFRLRMKEADVRAYFSKIGRSRVAIEAGGQSRWVAEVIEKCGHEVYVSNTRKVPYIHDSDDKHDPGDAYKLAELVHFKPQLLHPIRHRSQEIQADLSWIRAREVLVESRTQLINAVRGISKAFGERLAKCSTEAFTGKRAEQIPAEIRGAVAPLLETIDHINEQIRYYDQMEEQIARQRYPKYWLLEQVDGVGVHTALSYMLTIGDPGRFEKSRMVGCFLGMRPKKKDSGSSQPQLGITKAGDEYLRKTLVNCAHYILGVHGKDSDLRRFGQRICARGGKNAKKRAVIAVARKLSVLLHRLWVSGEVYEPLRNSQERAAA

SEQ ID NO: 153664 - protein, 433 aa, unidentified
MINPISVSSPPSNLAAWVGLDWADQQHLVCLYDVGTGQTELSTLEQKPEALQSWLGQLRQRFGGQPVAVVLEQARGAVIYALLSVDFLVLYPVNPQSLASYRKAYATSGAKSDSADAVLLMEMVRNSPQRFRSWTPDDADTRSLQLLTQNRRQLVNQRTAFTNQLTGLLKSYYPQALELAGELDSLQACDFLEKWPTLEALQQARPAQIRKLYLDYGKPRPESLEQRLEQIRQARPLTTDPAAVLSGRMMVRALIELIRPLLATLERFDQQIAALFRKHPDRLLFESFPGAGAVLAPRLVAAFGTDRDRFESAQQIQQLSGIAPVTEQSGKQRWVHWRWACSKFLRQSFHEFADHSRKWCDWAKALYQRLKRTGKGHHAALRMLAFKWIRILFHCWKTRTCYDEQVYLKSLEKRNPTLWAETQALPPRKKKAA

SEQ ID NO: 153665 - protein, 321 aa, unidentified
MEHELHYIGIDTAKEKLDVDVLRPDGRHRTKKFANTTKGHDELVSWLKGHKIDHAHICIEATGTYMEPVAECLYDAGYIVSVINPALGKAFAQSEGLRNKTDTVDARMLAEFCRQKRPAAWEAPHPLERALRALVVRHQALTDMHTQELNRTETAREVQRPSIDAHLLWLEAELKRLEKQIKDLTDDDPDMKHRRKLLESIPGIGEKTSAVLLAYIGLKDRFAHARQFAAFAGLTPRRYESGSSVRGASRMSKAGHVSLRRALYMPAMVATSKTEWGRAFRDRLAANGKKGKVILGAMMRKLAQVAYGVLKVRRAVRCVTA

SEQ ID NO: 153666 - protein, 319 aa, unidentified
MAQNDLIVAGIDVAKDKVDVCIRSLSLRRTFANTAEGRRELASWLRRQKVGKAVMEASGGYEREWAKALREARIEVRIVDPKRVRSFAQSAGRLAKNDAIDAEMIAWFAETFDQARGQACDAAREELVQIVNARQALLEQQTQMQNRCEHTVPVPVRKMHERLLKAIALEVDRLEAAIAAMIKATPHFAEIAAIIESVPGLGKITSAGLIAAMPELGQVSNEAVSALLGVAPYDDDSGKRRGERQIKGGRRKVRNLFYMACLGAATRHNPVLKTFYRRLIAKGKKAKVALVACMRKLIVILNVMIARGEKWDANRYAVD

SEQ ID NO: 153667 - protein, 415 aa, unidentified
MMEQRNKVCGVDIHKKFLIATILSRDGTKIQKRYGTDIDDLFNFRDWILENNCDCVAIESTGVYWYPVNAILENKVELILANARQIKHTPGRKTGSIDSEWIAEVALNNLIYPSRIFPKEERDLRRLTRTRESLVKMRSQIKNQVHQGLESCSIKLSSVLSDNFGKSGRHILDGLIKGKSIDHIIEEIPSKRVKKNEDQIRAAIRTGLDETQIFLIQSHLNTIDGLTKKLDEIDSEIKHRISRRKDDLQIAMSVPGIGFKAATTILAEVGNYRDFSTPDKLASWCGIVPNVYQSADKLITGSITKHGSKHIRWMLVQVAQATLKKRGSKLRRFFLRIKARKGHNVAVVALARKILCILYHLLMNQEMYQEDGVTKSRQSKIDWSSARIDKMSLQTMIEIIAKAGYEVKKIEESGG

SEQ ID NO: 153668 - protein, 353 aa, unidentified
MLIIGCDFHPSFQQVAIFDNQTGEEQVRRLGHREEAEQFYRSLAGQKVRVGMEACGHYPWFERLLAELGFELWLGDAAEIRARVVRKQKTDRRDAEHVLELLRSGRFPRIWVPSLEERDVRQLLVHRHKQVQARTRVKNQLQAMALSQGVQKKRKLWTAAGRSELEKLELLPYAAERRKQLLQSLDGLEAEIEQLNRRVEQEVQQRPAAVKLQTHPGVGPVTALAMVLTLGPAERFASGKQVGSYFGLIPSEYSSGGQQKLGHISKQGSSFLRFLLVEAGQTAARYDAELGRFYRRLAVRKHRALAKVAVARKLAVRLYLMLREDWTYAQLCRAVVQASPSHPVVGGQNRAFE

SEQ ID NO: 153669 - protein, 345 aa, unidentified
MKKILKQALGIDVAQKELVVSLGGMHEDLSIEIYAYKVFPNTKNGFSTLVSWVQKRVDPNVKVRYVMEATGVYHESLAYYLAQEDCEVSIVLPNKISNYFKTLEVKTITDKTASETIARFGLERKLDLWKRPKPIFKKLRQLTRERDQIVQERTMAKNQLHAEQAEAEPHPSSVSRIQKRITLLNKQEKEIQQEIAKIAKEDLEVSSSIEYIRSITGVGLLTTATVLAETNGFELIRNKRQITSYAGFDVKEKQSGTSVRGKARISKRGNRYLRKAMHLPALTAIKHSDRFKAIFVRLVSKHGIKMKAAVAVQRKLLEMIYTIYKTKTFYNEDYLKMKCEQTVTT

SEQ ID NO: 153670 - protein, 402 aa, unidentified
MNCVGIDVSKGKSMIAVMRPFGEVVVSPFEVRHTANELSELAGLLKSLDGETRVVMESTGNYHAPVAWLLHDAGLYVSVVNAMLVHDYGNNSLRRAKTDKKDAVKLANYGLDHWLTLPRYIPEEDTRLMLKICYRQYQQYSKVQTMLKNNLISLLDTTFPDANRLFTSPPRADGSEKWVDFGATFWHCECVCGRSEKAFTTQYQKWCRKHGYNFSEDKALDIYASACRHFGVIPKTDTAKLLVEQAISQLQTTSSALAALKQEMQSLAASLPEYPVVMGMFGVGPTLGPQLLAEIGDVRRFHSKKALVAFAGIDAPPYQSGQIDVRSRSISKRGSASLRRTLFLVMSVILQCAPIDEPVYQFMDKKRSEGKPYRVYMMASANKFLRIYYASVKAYLESLEHD

SEQ ID NO: 153671 - protein, 346 aa, unidentified
MEHYVGLDVSLKQTSICVVNETGSVLREGVVASAPEAIAAFVRSKAPDVVRIGLETGPTTTWLWTELKRLGLPVICIDARHAKAVLKMQINKSDRNDAAGIARIMQTGWFKEVRVKDLDSHAVKALLASRALLVKIKRDLENQIRGLLKNLGLVIGRAKFNVFTVRAEELIEDRPELMAVVRPLLKARQAIEQQTDDLDRKVLKLARYDAQVRRFMTVPGVGPITALCFKATIDDPTRFKRSRSVGAYVGLTTRRHASGEVDWTGRISKCGDAMLRSYLFEAAGVLLTRVPKWSALKAWGIRLAKRSGLRKAKVAVARKLAVILHRMWIEGSEFKWSSKEAANQLA

SEQ ID NO: 153672 - protein, 367 aa, unidentified
MDIVFPCCAGLDVHKDTVVACVRRLRTGAKRKTESAVRTFGTMTEQILALADWLAEEGVTHVAMESTGVYWKPIWNLLESGPYEMLLVNAQHIKQVPGRKTDVKDCEWIAQLLQCGLLRGSFVPEPPQRDLRELTRQRRQLIQAKAAVANRIQKILEDANIKLGSVATDVLGKSGRAMLRAIIAGQDDPVLSQRIVAVLPVPFAETVQRLATIPGIEERAAENILAEVGVNMEQFPSVGHLASWAGMCSGNRQSGGKRYSGRTTKGNLWLRATLVQVAWAASHTKGTYFAAHYRRLAGRRGKKRALVALGHTILTVIYYVLKRKTTYEELGADYLERHDKDRVLASLVRRLERMGHKVTLEPCEPAA

SEQ ID NO: 153673 - protein, 364 aa, unidentified
MKEKKTETRYVGIDLGKRTYEMAVVDEKGKVKVIGGKTYVAARQSMYKKLKPNDKVALEAGTMAFMMAKEIEAAVGCKVYVLNPGRLAIIYKSMKKTDKEDALKLAHMLQDFQEDRLPVVPVPSEKEMNRRKLVAGCKRAQQYRNRSINQLHGLFLLQGITTIVKENLATCENRRETIRMLSGLELEEAKYLLGCLELYEERIKNLDKKIECESAGDEQIEILKSIPGVGPKTSFAFVSHVASERFENASQVSNYLGLVPRVYMSGDTTRYGRITKRGNGYLRALLVQSSWVLVRSRYGGKLKQRYEYMTKEKSISKKKAIVAIARRLAELMYTLMKYEAKYLCLPLVLEKKEICLKNQLAKCA

SEQ ID NO: 153674 - protein, 341 aa, unidentified
MHHYFVGLDVHKQTIAFCIKTADGTIVREGTIKTRREDLDGWLKTIPGPWVCGMETTLFSHWIYHHLRQRGADVQMGHAARMKAICAGKKKSDKIDARTIADLLRCNMFPTCYVIDPALGALRRQMRFRRSVVNEQTRFKNSTAGMLMEAGVEYEGRRLHGKRYFQTLMRANPWVSAELRPLLNFNRQQIETLERMDKGLLKLLKTHPQLCRRVEALMKIDGVGPVTALTWALEIGTPERFRSIKNAQSYAGLTSAFRESAGKQQRGPISKQRNAHLQSAIIEAAKLAPTHNEKLKAVYQKHRAAGADDNVASLEVARKLVAYLLAADRALLAPPETAARA

SEQ ID NO: 153675 - protein, 403 aa, unidentified
MKYQEVLRMPESIPYLSVGLDVGADLIWMSIMLPNGTLTGKPFKILHSDPQSRELAVTKIKEAQEMCSLESRCFLESTGIYHIPLLYFLRDKRFDCSVINPIITKNTTNMNVRKLHNDKFDSKKAAKVGLDASLKTSTYLGVFSKVTTQTSLKLLESYPLAADMLAAPKDEIVETIRSTICFGEKYALAKYDAICQAAKDVAVFGRALPSNAVRIKLYIDSCKEYQKHLDAILDTLHESVDKLRGTPVYDRICLLQSLHGVGFLSSVVLIAEMGFFDLFSSTKIYAYFGLDPAVKQSGKFKGDKAHMSKRGSSLARRILHMIALNNLKVGETTKEPVNPVIHSYYADKCKSKKKNVAVGAVMHKICNIIFAMLRDNKPFERITPQEHCERYASEHPDKVSKAA

SEQ ID NO: 153676 - protein, 402 aa, unidentified
MIFINCLGIDIGKSESVVAHYKDEVLVKEMVIQNNQNGYRYLKNYIKHLDSLFILFESTGIYSRGMKRFCEIHKIDYLEMNPLEAKFKTSSLRSWKTDKSDAHKLALLAFRMKDSKVQRQSEEIYFELRERARFHLEMEINQNRLKVELVETLHQTFPGLEKLFTNRYSKIALNIAQAFPHPDFVSTLTHDELVEKVLHSTDKGISVNKAHKYVQKLIEIKNNSFPNVDKSSFLLQKVQYLCDKLLIGIEEMKEFDQEMIDLAKNTTEFENIISIPGIGELTAALLIGELGNIREFKTNKQLNAFVGIDIKRYQSGTSKSRDTINKRGNKKARRLLYLIIMNIIRGRNHYQSHIVDYYYKLREQPHGKTHKTAVIASINRLLKTIHYLIVNNKLYDYQKAPH

SEQ ID NO: 153677 - protein, 429 aa, unidentified
MNCTQNKKIEQVKETTMIVGIDVGSEKHYFRAFNWRGIELTRKPIAFSNSMEGFNSFYNTIVELMQKSELEEALVGIEPTGHYWFDLGQFMGEKDIKFVMVNPHHVHKTKELDDNSPSKNDRKDPRVIAGLVRDGRYFYSYMPTGAYAELRNASNRRFVLVEEQTRAKNRLQKWIAVYFPEYKGIYTHIDAKGGMLVLKKAPTPEEIVRLGVEGIIKIWKDAKLRGNGHKKAMLILAAAMRSIGLKAGLTEARMEIQDLIEDYELQTKRLERVNDLIKGLCQQVRYADKLLEIKGIGITTVAGFIAEVGDITRFDSTKELQKLAGLELVADSSGKHNGKTKISKRGRKRLRYLLFEAAISVVGKNEEFKEIHRYYTTREKNPLKKMQSLIVVACKLIRVFHAILTKGIRYDASKMLKDIRHPGEQLKAA

SEQ ID NO: 153678 - protein, 339 aa, unidentified
MDHVAIDLGSRKSQICVRNSEGEILEEKRWETLDLKRYLEGRPKSRVIVETCAEAFGVAEAARELGHETRVVPATLVRTLGVGARRTKTDQRDARVLSEVSCRIDLPSVHIPKAQSRERKTACGMRDALVGARTKVINTVRGWLRGQGRRLGKGSRVTFTARVRTACGPELPDYVERQLRVVEALTVEIDEADKSVEAQTDGDDTCRRLMTVPGVGPLTAIRFVAALDEVGRFANAHQVESYLGLVPGESSSSERQQRLSITKAGPPELRWVLVQAAWALRTRCRQPAAVPLQLWAHRIELRRGKRTATVALARKLAGILYAIWRDGTEYDGARGAQMI

SEQ ID NO: 153679 - protein, 428 aa, unidentified
MNKAENIRLEEFRQLKKQIRGSKDYLIVGIDVAKDTHNSFFGTPTGKTLFKRLVFENNIEGFERLLIQADALKVQHALKKTVFGLEPTANYHKPLGEFLIKAPHMVVLVSGVAVKRNRELLDGRWDKHDTKDSANVADLISQGKCLFYEYPSMALRELRSLLSLKRRLKKQEHGLKVRIRNHLLAIYFPELDRYFGQSESDSLEIIKWCLNPSVIAGLEYEQFLQVVAPQKRRICQQNRLKAIWKKAVDSIGCDAGESLEFEAKVMVEGLRQVRESISEVSDKIEDICLQFPEYSYLLTIPGFGPDVSSKVIGAISNPFRFNSGKQVLKMAGMDLSANRSGKNSDSAIPVISKKGKADLRYALYQAALIASIRDRHFIAYYTNKLRGREKEKGIKTKMRVKLAAKLLIIAWTLMKKKERFSPDYLKID

SEQ ID NO: 153680 - protein, 424 aa, unidentified
MTRSEINPTEFAAYIGIDWADQKHDICLQEASSNQIESLRLDHKPDSISNWVAQLRQRFQGKPIAIALEQKRGGLLYSLMHYEFIVLYPINPKALSSYRQAFATSGAKDDPVDAGLLQEMVRLHRNKLRPWTPDDPLTRELSLLVEYRRRLVDDRTYLTNRLQALLKQYFPQALDWAGELGSLLAIDFLTQWAQLEAIKKASPDEVRDFYRAHGCRLGEKLPQRLAEISAAQPLTTDKAVVTASITMVQALLEPLRGLIAGIESFDQQIKACYEQHPDKEIFNSLPGAGPVLAPRLLTAFSADRERYQSAEEIQCFSGIAPVTERSGKTKFVRRRLACPKFVRQSFHEFANSSIKWSRWARAYYDQQRHRGNKHHEAIRALAYKWIRIIYRCWQDHEPYDEVVYIAKLELRGSPLAKLIPAQAE

SEQ ID NO: 153681 - protein, 482 aa, unidentified
MKAKPPEKIQETTNRSTRGHWNEMNRKQRREMMRKIQSEDISLEVVHPDAAGIDIGNESHYVAVAPSRDKQPVRSFGCTTGELKAMADWLKQCGIRTVAMQSTGVYWIAVYDILEQAGLEVYLVNARETKNLPGRKSDVQESQWLMKLHTYGLLRNSFRPSQEIRTMRTYWRQRNDLVQSAGRHVQRMQKALTQMNIQLANVLSDVSGVTGQAIIKAILGGQRDPHKLAEFRNPRVRASEEEIARSLEGHWEEDLLFVLQQEQDGYEFCQKQMADCDRQLNHYLEQREDRSQGAPLPEERRKGRRKKKSGNKPQFDLRTGLFRMSGTDLTRIDSIDVMTATTILSEAGWDMSKWETEDHFVSWLRLCPDNRISGNRVIGKGRLPTNNRVTIALKMAASALRLSDTYLGAQFRRFRTRLGAPVAIKAMAAKLARLVYRMLRYGMQYVDKGAATYQEQHRQLQIKQLKWKAATLGYQLIGVPAA

SEQ ID NO: 153682 - protein, 419 aa, unidentified
MSQSTLSKRLASVKPGTLYVGVDLALDRHVVVALDERARRLTRFRFDNDREGYKYFRRRLRKLKAKHQAPAVLVGMEPTNYYWKLLAADLEQHQISYRLVNPFTVKKHREANQLDRSKDDRRDAFTIAELLRTGKYTETRLLHDAYAELRQLVTLHERLRRDIRRQKTLVVSLAGQLFPELRYAFKNLTCQTALGMLRGHASAHQLSQFALSEFIAQVRATYRGRRLYVSKLREAHALASTSVGLKDGVQALQLAIRQHIDTLEHLQMQLEETREALTTLFLTMPQAQYLLSVHGLGLFTAATILSEIGDPSHYSRINQMIKLAGTQPVPNASGRKSSSKTPMSHKGRPRLRTALYFAVMRLVRLDDSFALEYRRLQTRSKNPLCKMQALGVLMNKLLRILWTLMRKQTFYVPSFQYTT

SEQ ID NO: 153683 - protein, 418 aa, unidentified
MKPQSTPSFMAFVGIDWADKKHDFCLQAAGSDLREFGTLDHSPEAIAKWACSLRERFGGPIAICLELAKGPLVYALQRCEFLVLFPVHPSTLAKYREAFVPSHAKDDPTDAEMALDIMLRHPDRLQPLKLQSVAMRTLTTLVEERRNLVNDVISTTNRLTSTLKQYYPQVLDWFEDRNTLIFCDFLSHWPTLRHVKRARRSTLVSFFHQHNVRRAYLVEERIQGIRAATALTEDEAVIRPSQMVVQALAEQLRALLQSLDHFDAEIDAVAKSLPDYDLFAALPGAGHILAPRLLVAFGEERERYANAAQVQSYSGIAPVVERSGNKCWIHWRIACPTFLRQTFVEWAGSTIPRSFWAGAYYQQQRNKGCSHRVAVRALAFKWIRIIYRCWKTRTPYDESVYLKALRRRGSPLLANISK

SEQ ID NO: 153684 - protein, 476 aa, unidentified
MRIYEEAGRPSKVLIGAIDYAKRDHVALFCNGNGDILRKPFPVRNTPEGVEFLLARMDEVCRYHRINPKHAFFGGEDCGSYTENFAECLRERGWLVAGVNAQDAKRQRENLQASTDRLDLLGIARMLINRRGNCAPSQHGAYRNMRTLVRHRRRLVSLTTEERNRIHALVDRLFPGFLDEKKSGLTPFHPPSLRLMEDRFSARQIARRKRETLAGLISRAGGLRAEEGATKLQDYAATVLHASAEYVSTMQFSLAQHVSLYRGLQGNIGALEREMAVWLAQTQGAFLTTVKGVGMVLSAGVAAEIGDPTTQRPVNNLVSYAGIIPRVSQSGGPDAEAHVGSVARRCNRILKDYLVQSASHIGLHGVADLMEDHRRRDAAGQHADYGIARRYLRLGMRLMRGSCVYLPPALRQPDVTESERVEYYQSFWPYLVDKWKKYGAHEIAFAPENPLGQWRAMIQELYGLELKLTGKTKARG

SEQ ID NO: 153685 - protein, 273 aa, unidentified
MRFIGLDVHRDFCEVAICEEERVRSGPRIATSPEPLARFAESLGPDDEVALECTANALAIARVLSLHARRVVIAHAKAVRAIAWAKVKNDRADARTLATLLATGFLPGVWTPDERTRLLRRLVGRRAQLLKHRTSAKNAIHATLQRNLVGRAPATDVFGRRGRTWLSSIELPRDEQDTVDACLRQIDFLDGEITRLDQALAQEVVDSPEVRRLMSIPGVNVTTAVTFLAAIGDIDRFPTPRHLASYLGLTPRVRQSGIAEPRLGRIRAASSEP

SEQ ID NO: 153686 - protein, 348 aa, unidentified
MKKVMAGMDLHSNNVVIGVTEMDGKRVGHRKVPCELKEVVKFLAPFRERLEKVAVESTYNWYWLVDGLRALNYPVVLANPAAMEQYSGIKHADDTNDAFFLAELLRLNILPTGHIYDPQLRPVRDLLRRRMMLVRQRTALMLSFKSLHTRTTGQEMGLSQLKELKIKEAQQLYEHPANQLIAGMQIKHIEQLTESIAKIEKGVLGAARELPYYAKLTSLPGVGKILGMTITLEVGDIKRFVDAGHFASYCRTVEAKCTSNSKKKGANNSKCGNKYLSWAFVEAANFARRSDEQCRRWYERKAAKTSRVLATKALACKLAKAAWYLMAEQSDYDPKRMFGQPSKSEMKH

SEQ ID NO: 153687 - protein, 356 aa, unidentified
MSIVAHTRPFVIGVDAHARNHALAILACPNGEIRDEQQFPTTAAGLQRAIAWVARRTGADLDTLWVIEGVGTYGAQLARAAAEAGYSVAEAARMNARANRGVGKSDPLDARRIAQAVLPLQDAQLRRPRGDDGVRAALRVLIASRDHITTERTSAINALIALLRVVDLGVDARGTLTASQIAKVAAWRNRTEELATGIARAEAVRLAKRIRAADDELSAVTRQMTALLKDSPAAGLLDQPGIGPVTAAIAFAAWSHPGRVRSEAAFASLAGVNPIPASSGNTVRHRINRGGDRRLNRALHMAIVTRMRMDPDTRAYIEKRTAEGRTLREIRRSLKRYLARQIYRHLNAATAVAPAT

SEQ ID NO: 153688 - protein, 345 aa, unidentified
MPIVGGLDIHRKQLTFDYLDTVTGEVRRGQVAPADRAHLRAWLARFAGRGDVAFAVEGCTGWRYVAEELAAAGVAAHVGEPADTAAARGRKRHAKTDKTDSRHLRQLLAEGRLPECWVPPAQILEYRALLETYHDLRREHTAWVQRIHAVFFHQGAPRLGEGALRTGQGLAALRAAAAAGLSPAGQLQVATALDMLAAVEARMEVLRSQLRDAARHLTGAKVLAARLYGVGPVTALALTCWLAGEGRFSSSRKAVRFTGLDITVWSSDRKGPPGRLSRQGPPMLRWAVYEAGKTHARSSAPDHAYYAAVKDRKNSKRAALSEARKIVRQACHILTELGDDALTVA

SEQ ID NO: 153689 - protein, 314 aa, unidentified
MTTAGIDVSKAHLDLALLGPSYQRNLRFPNTPEGREALLAALRLHHPQAIAMEPTGPYHLPLLKLLQAAHLPVGLVHPAQAKALRVGMGHRNKGDRTDALALARIALSWPEALRAPEAPPPWLVELKALMGYRENLLKQKPMVEGQLETLGEGKGAVEAWLKEDLERLKGKLKEVEARVEALLSLVEEARVLLQEPGAGLWVVAAVLAYLPPGVWGKAKAAAYAGLHPANRESGTLVRGSRLSRRGPGVLRRYLYMGAMVGRRWNGELGAYYEALIGRGKRPKQALVAVAHKLLRRMMGRLKAFYREKGVGGRS

SEQ ID NO: 153690 - protein, 346 aa, unidentified
MIIIGCDFHPSWQQICWLDQRTGETAEQKLVHATGEAEKFYQGLSSPALIGMEATGNCQWFVDMVTKAGHEVWIGDAAKIRAQEVRRQKHDRRDAALLLKLLEEKKFPKIWTPSSQQRDLRQLLIHRNKLVRLRAQVKNGLQHLAMNRGLQKQRRLWSAAGQQALRDLVLQPWASRRRGDLLGLLEVLDGQVGSLDMAVKEAAEKDSQAQLLMSQPGVGPVTSLAFVLTIGDVTRFARGKNVASYLGLIPGEYRSGGKQRLGPITKQGNRFMRMLLVEAAQVAVRCDPQFRSEYLHRCHHKPKGVAKVAAARKLAIRLYWMLRTQKRYPEIVSIESGPRVPLVGES

SEQ ID NO: 153691 - protein, 338 aa, unidentified
MHITTLGIDVAKSVFQLHGVDARGRAVLSRRVKRDQLLHTVANLPPCVIGMEACGSAQHWGRAFEPLGHTVKLMHPKYVKPYVKTNKNDGRDAEAICEAAGRPTMRFVSIKTVEQVDLQAVHRTRSLFVKHRTALINQIRGLLAEYGLVIGQSPEKVRPALVRFLDDAASGLTACARETFSELYAQLQELDSRIERVTHRVERVSRAHPVCQKLAAVPGIGPLTATALVATVGRPQAFHNGRHLAAWLGLVPRQYSSGGKERLGGISKRGSRYVRTLLIHGARAVVQRAERRTDTQGRWLCALKHRKGTNVAAVALANKNARVIWALLAHDEAYRPPA

SEQ ID NO: 153692 - protein, 402 aa, unidentified
MNAVGIDVSKGKSMVAIMRPFGEVVATPFEIKHTTSDINSLVKFINSVEGESRIVMEHTGRYYEVLAHQLSQANIFVSAINPKLIKDFDNDSLRKVKSDRVDAIKIARYALDKWQNLKQYSVMNELRNQLKTMNRQFGFYMKHKTAMKNNLIGILDQTYPGVNTYFDSPARSNGSQKWVDFASTYWHVDCVRKMSRNAFINHYQNWCKRKKYNFSQSKAEEIYGKAKELVPVLPKDEITKLIIKQAVDQLNSASTTVESLRTLMNETAFKLPEYPIVMAMKGVGPSLVPQLMAKIGDVSRFTHKGALTAFAGVDPGVNESGTYEQKSVPTSKRGSSDLRKTLFQVMDALIKTKPQDDPVYQFLDKKRAQGKPYYVYMTAGANKFLRIYYGRVKEYLSSLSES

SEQ ID NO: 153693 - protein, 354 aa, unidentified
MKILALDLGKFKTVFVVYQTTGGKPQYGKIPTAPGAVHDLLVEHQPDRLVLEVGPAAGWVCDLAAVLELPTQVANTNDERWQWKRAKKKTDRMDALKLAQMSAMDCLPTVHVPTSRVRQWRCLIQYRHTLVVRRTAVKNSIRALFDRQGMAMSSGKAQWTEAGIGELYKTSRRLDRCGPEELWRGQLMMELKLLLAIQKQIDVAERKLTKLAECDGRVKLLQTAPCVGPRLSEAVVALLDDPSRFSSSRQVGAYVGLTPRQWQSGQSVRNGHISHWGNPLLRALLVEISWMGVRHKTWMLQVYEQVLRGSPKRKKIAIVAVARRLLVRLWAMMRKGQEWKETVTAELTTATSPA

SEQ ID NO: 153694 - protein, 389 aa, unidentified
MPLKNDLSRSLAAFEQDRTLVVVLEISLSTWLVAGLVPGVVRQPAKKLGADEHELLKLIHRWRAEASRAGREIDRICVAFEAGRDGFWLARWLAAKGMEAYVIHSASVAVSREHRRAKTDRLDTELLKRAFLGWLRGEPGHCGMAAIPTVEEEDARRPSREREKLVGDRTRIINRMKATLVRFGIRGFKPALRKAAERLDGVRTAEGIPLPENTRAELRRDMARLRVVVDQIKEIEDDRLRELEATSEIEPGPPAMVRLIARIVGIGVETADMLVREVLSRDLRDRQAIARYAGLTGSPDESGSRRREKGLARAGNARVRRGMIQLAWRFLQFQPESRLAKWYRERTADRRGSTRKTMIVALARKLLIDLWRLVTIGQVPEGVLLRQGA

SEQ ID NO: 153695 - protein, 418 aa, unidentified
MQTDLSGFTAIIGIDWADKKHDICIQAAESGQRQSYQVAHKADKLDEWARSLYRRYGGPIAVALELSKGPLVSALQKYDFFVIFPIDPTTLANHRKTFTLSGAKDDPTDAEYALNLLLTHTEHFKALKPQSVEMRTLMTLVEQRRRLMNDRVRLTNRLRNALKQYYPQALEWFDRIDTPLFCDFIRRWPSLAQARRARKATLERFFREHNMNRKALLERRMTAIKSAMPLTMDEAVIVPYRLQALTLVAQLEVALASIRIYDDEIATLAPQHPDYGLFSTLPGAGPSLAPRLLVAFGEQRERFANAAELQKYAGIAPVTERSGQKSWIHWRWQCPTFLRQTFVEWSAQTINKSYWAGLYYYQQRGKGCSHQAAVRALAFKWIRILYRCWITRTPYDEARYLKALQERGSPLLKIAEAA

SEQ ID NO: 153696 - protein, 341 aa, unidentified
MSIITIGIDLAKNVFAVHGVDDNGKPVLVRPKVARVELLSLIAQIPPCLIGMEACSGAHHWARLFRQHGHTVKLIAPKFVSPYRMSGRRGKNDAADAAAICEAVTRPAMRFVPVKEAHQQIILTLHRTRQGFVEERTALYNRLRGLISEFGIVLPQKVACLRREIGAHLEDLPGYANCCVGDLLAHADRLDALISDYDRTIAQAAREDAASRRLMQLPGIGPTTASALVASLGGGHEFANGRQVAAWIGLVPGQYSSGGKSRLGRITKAGDHYLRSLLVMGARAILAGLGTKQDRFSRWARSLVERRGYWRAVVAIAAKNARLAWAVLKYGEDFRLHAAAV

SEQ ID NO: 153697 - protein, 369 aa, unidentified
MSSVSHRGFTHLGMDVSKDSISVAVLEPDRDQASVDKIFHDEVSVRRLVGRFDDRSKLWVCYEAGPTGYDLYRLLCSLGVRCDVVAPSLVPKRRGDRVKTDRRDARRLAGLHRAGELTPIGVPSPPQEAVRDLCRTRGDMVEDLTRARNRLTKFLLRHARVWRDGSNWTFKHQRWLAAQHFDDRALAATFAHYRATLALRETSLEAVEADLVGYQDRPPFGDQVPRLGAYRGVTRMGALCLAAEVFDWRRFPQARGFMSFTGLVPSENSTGLSEHRGKITRAGNRHLRAQLVEAAWSYQHRPHVGAGIKARQQGLAPEVTARAWNAQLRLSSRFRQLGTRKNIRSVVAAAVARELAGFLWAEMTTDLAA

SEQ ID NO: 153698 - protein, 330 aa, unidentified
MNYCGIDVGSKELIVRLIRNGHLGKDKTFSNTFEGINSLVKYISGKKIVRVCLEATGIYHQDLTIVLDKAENIEVMLVNPNVSRKFSEALSTRNKTDKVDAGALAEYACRMEFVPWEAPSDNSLKLRMFSRRIVQLTKMKAQSKNQLHALSATVMTPEELISDCKTQIEFYKKNIEKLTKLTVDLIFNCEELRQKFELMISIKGIAETSAIQILGELVMLPNDLTKKQWVAYAGLDPRAYESGTSIKKKSRISKAGNRFLRQALYLPALSAKQHDPHIKAFFEHLVDDLGKKKIQAVCAVMRKLLHAIHGMFKNGTSFNGALFYKMEEAK

SEQ ID NO: 153699 - protein, 328 aa, unidentified
MRYIGIDISKATFTVAYSSDKSAKVSEFRNTPADIRKFMKTLPAKEECHLVMEATGPYSMTALYILTKEGYTVCMENPLKVKNFAKAMLTVTKTDRADARLIALYGERMQPAPYKVPAESLMLLKQMRTVIRQLRKQLTANRNLLQSLEVLPIVDKRARRAVEAIVVQLEKQLKHLESDLSDVAEKEFSTQLKLLTSIKGIGIALATSLIIATSGFSNFDNSKQLCRYLGLSPTYEQSGTSLNRHGHINKNGDPHLRGMLFIAAMPASRYNTACKETYTRLRKKGKSGKVALIAVANKLVRQAFAVVRSGSVYEDGFVSIKPKEHCEN

SEQ ID NO: 153700 - protein, 327 aa, unidentified
MFFIGIDVSKAKLDCTLLTAQPDKRKTKVVANSAAGVKALLAWCAKHGAQPQQLHAILEPTGLYHEQAATALHDAQVQVSLVNPAQARDFAKALALRGKNDALDSYVLARYGQTLSPALWHPAPLHARQLRALLTRREALGKDLLRELNRKEKSQFSPSAPLVDGSIDKAIAFLREQLKQIERAIEQHIDNHPDLKQDRELLNSIPAVGPQAGNAILAVMHNRRIDSAQSLAAYLGIVPVQRQSGSSLNGRARLSKAGPAQVRATLYMAALVGTRHNPHIRALYQRLLKAGKSKKAALGAAMRKLVHLCFGVLKNRTPYQPNYAMNA

SEQ ID NO: 153701 - protein, 361 aa, unidentified
MSESMALVGLDVHQAQTVAAVLDPLTGELRVERLRGEPAMVVPVFLEELDRPVRAVYEAGPTGFALARVAEERGLDVRVVAPGSIPRAPGDRVKTDRRDAKRLVRLFAAGELSYAFVPSETDEHFRDLVRCIEDARKDLMRSRHRLSKFLLRRGHRFPCKAWTQPHEQWLGKLSFEDAISQATFVDYLCAVQGLVQRRRVLIDALEVAVPESSHAQTVARLRCFRGIDTLTAAGLSAEIGDFTRFAKPALLSGFLGVVPSEHTSDEKRTQGQITKAGPPHARRLLVEAAHHYRHQPAVRLGLQARQASQDPRVVQIAWRCQRRLHERWTHLAGTRGKRTGTVAIACARELAAFCWEAATLN

SEQ ID NO: 153702 - protein, 377 aa, unidentified
MEVMHERVAGLDVHKAMIVACVRIMAGGKISRECRTFETSTAGLEALLGWLTQSGCTDVAMEATGVYWKPVWNILSDGEFELIVANAAHIKNVAGRKTDVNDAMWIADLVACGLIKASFVPEQEIQELRSLLRARKQLTREQTSHIQRIQKTLEEANINPGFNPGDILGVSGRRMIEAMIAGVRSPLRLAELADRRLKVSPKALYDALHGRLTDHHRFMLELYLGQHDALSGAIARIDQAVEALIARMDEEVAAGQATFLSLITLLCTIPGVSILSATVILWEIGRDMSRFPTAGHLLAWAGLCPGQNESAGKRKSSRLRKSLPLRKRGAPLGSRQCSSNALGRRAAGKTATTRRSSTDCAASAARRKPSALSPPRC

SEQ ID NO: 153703 - protein, 350 aa, unidentified
MNIYFGCDAHKRYSMFASMNERGQTGRPVRVEHTRMMFRRYLESLPPGSPIAIESVGNWYWMIEEMERAGHEPRLANAGKAKLMMGQINKTDKLDATGLATLLRNGTLPSVWIPPRDLRDERELPRMRMSLVSVRTMLKNRIHATLAKYAIEIDEVSDVFGVKGRELLKNRLEELPPYTRQSVETQLELLDEVEAHIDQTEKEIREVVKTTPAMKLLMTIPGVGPILAVVIALEIGDIARFPSPEHLASYAGTVPRVRSSGGKTSFGKVRPDVNRYLKWALIEAANMIVLHQRHWPDAHLTQLYLRLRERKGHAKAVVAVARHLAGAVFWVLKKNEAYKEPQRSISSSQE

SEQ ID NO: 153704 - protein, 343 aa, unidentified
MKSIRVGVDLAKSVFQIHGVDRSETPVWRRKLNRAEWLKVLLEKIEPGCEIGMEACGGAHHWARQLQAKGFTVRLIAPQFVKPYVKSNKNDANDAEAICEAMSRRHMRFVAVKNVEQQDIQAVHRIRAELTKQRTAKANQIRGLIAEYGLVAPKELLHLRRALPCWLEDAENGLTERFRRLLNGLWGDLRVLDERMTELDREIAVIAQKDPVAKRLQQLRGVGPITATALVAAVGNGEQFANGRQMSAAFGLTPRQHSSGGKERLLGISKRGDAYLRVLLIHGARSVLRNSKDQDDRLSQWATRLAARSHPNVAVVAMANKTARMAWAMLKNGTDYQPAIVTS

SEQ ID NO: 153705 - protein, 310 aa, unidentified
MKNRTTVGIDVAKKSLEVFIDTTGQLIHLENSPSGVLSLLEILAGFSVSGVVMEATSRYHCLSESMLNAAGISVAIINPRQIKNFARAMGRVAKSDPIDARIICEYGRRMSPQFRPAKSEQQKGLAMLLTRRRQLVQSRVMEINRFKERCGSYIEQGIKRHIEWLNMEIDILDAEIKQRLRQDETLTAKRRLLEKVKGIGPVTQAAILVQLPELGKLTRRQISALVGVCPYDRDSGKLRGKRAIWGGRSGLRATLFMAMLSAIRYNPQIKAFYSVLISRGKPKKVALTACIRKFVTILNAMFRDEKDWVY

SEQ ID NO: 153706 - protein, 397 aa, unidentified
MIAVGIDISKSKSKVAILNGDGTVRAKPFDVHHTKSELDALINYIEDTGEQPKILMEPTSHYHYPVLKALQEAGFPVCLINPYQMKKYGDIELRKAKTDKKDALRIAKYALEKSYLLTTYNSAEQKYEDLRFLSRQYNQRINNVKFSKTQLINLLDETMPGITNILPLKSRNPDNCVLLLFIKRFKSFDYIRKIGKTRFLNSYETLVKKTTDRYAGSKGLAIYELVLNSITTRGENPLTALAQEQCVDLVSLSQKSADAIILQMQNIAETIPEYKVLRAMHGVGDRLGPVILAEVGDIRRFHSGKALNAYAGNDAPPYQSGQFESRNRHISKRGNPALRKACFEVMQALKLIRPQDDPVYLFLLKKEQEGKPYNVAKMAAVNKFLRIYYARAMELYK

SEQ ID NO: 153707 - protein, 460 aa, unidentified
MQKFTLGIDVACRAAHQGTLADQAGNLLWSGRKFRTTPEDLEALWESLPEDVELTVVMEPTRNAWVPLTSWFQRRGAAVVLVPPEQSADLRDYYAKHTKSDRLDSRILARLPLLHPEGLHPVEGLGPADPMRRATKLRASLVKRRTMVVSRLDAYLELMSPAWHGVFGAHTSSNTPLRFLAAGYADPHTLRRLGRARLVKFLWRHSRGAWGDKEATSLLEAAAQTLTLWGDDLDYSELADDIATEARLALQLTQEIHELEQRIAVFLHDLDPAGIMTSVPGVGAVNAAQILARLGDPNRFRSLAGVRSFSGLVPSLNASGVNGRHGPPTKSGDAPLREALFSSANAARRVDPTLAARYHRLMVHEGKHHNSALCHISTVLLTRIVACWRRGTPYLIRDVDGTPLMPNEARRIVMERYHVSADLRAKRKTTGKGTSRRSKESLSAPSTGSSSSQARTKEVA

SEQ ID NO: 153708 - protein, 405 aa, unidentified
MVQGRFAGVDWASAEHAVCVVDAGGRIVEGRRYRHDERGIKALCARLVELAVVLVAVERPDGLLIERLLDAGLRVIAIHPNQVAAMRPRFSAAGGKSDGFDAFVLAELARTDSHRFRVLVPDSDQTKALRALSRAREEFVCHRVALANELRAQLECFWPGAAHTFAEVDSPIALAFLKRYPSPADARGLGEQRMQRFLARHHYCGRKPASELLGRLRGAAEGRAAALETEARRQVVLALVSALEPIVARISELTSEIRAGLADHADGPTFRSLFVDPKSAVCAAAMLAEIGDCRERYPTKATLAADGGQAPVAVESGKSKRARFRWACDHRLRAAICTLADTSRHHNPWAADIYTRARARGASHQHAIRILGRAWCGVIWRLWTDHDVYDPERHTARQRLTAATA

SEQ ID NO: 153709 - protein, 369 aa, unidentified
MAFFIGVDLHKTQFTVHVRTEEKVESLDQIKQYPTTTAGYAEFLSRIETYKATGAAVKIGVESTGNTRFFKNQVEKAGAEVTVINTLKFKVINESTKKTDKHDASTISEFLSKDMLPESYLCGKETENIRRLLKSRERLVRSTVGQKNEIHALLVSLGLSDELRSLQSKKGRQKILDTLESNNDYVLEAQSVKLMFEIIERIEESVKIIEKQISELTKDDEMVNRLMTIRGCGKITAWTVRAYTEDISRFATAKKYAAFCGLVPWVQDSNETIHHGKITKRGPQELRTCFVQLVLGIRRCKDTSEWRMMQRYEYMKKNKGSGKSIVAAARKMAEIVWAMLNDKQDFNAAKMIGKYKPMILSDKALTAMN

SEQ ID NO: 153710 - protein, 421 aa, unidentified
MIDHETFAWFAAIDWGTEKHQACVVDVRGGIVGERAFSHDGAGLALLCDWILSIAGNATIVAVAVEVPHGPVVDALLDRGLAVYAINPKQLDRLRDRFSVSGAKDDRRDAYVAADGLRTDRHLFRRLQIADPRLIQLREWSRLAEELQQERVRLSNRLYSQLWRYYPQMLGLSDDLAAGWLLDLWTMAPTPVKAMHLRKTSVVQLLKRNRIRRIDAETVLRALRGPAINVADGVVEAATLHIGSLVTRLRIVGRELHDAMRKLDELCACLDEPSPTAAEHGGSGRHDVKILKSMPGIGKIILGILLAEASGPLSRRDYQALRTLSGVAPVTKQSGKSRMVVRRYAAHVRLRDAVYHWARVAIQHDPRSHSRYVALRQRGHSHGRAIRGVADRLLALACTLLQRQTVFDRDFSKGEKLTAVP

SEQ ID NO: 153711 - protein, 313 aa, unidentified
MAQMVATVGIDVSKDRLDVAVHPTDEEFSVTNDAMGWRLLVRRLKPLMARAIGIEASGGYERGAISALLEAGLAVRSVNPWKLRLFAKAAGVLAKNDRLDAGVIARFVATMPSREVRRDVAVEHLAELVTARRQLVDAVQQTSNQTEHLRDCGLRRLQARRVRQLERDVAQLDQLIAEAIAASPLLSARRDLLCSMPGVGPVLAATLLALLPELGSLPNRSIAALVGVVPYDFDSGRMRGRRHIFGGRAAVRRVLFMATQVAGRFNPTLKAFKQRLLATGKKPKVAIIAAMRKLIVTLNAMLRDNLPWRSVAA

SEQ ID NO: 153712 - protein, 331 aa, unidentified
MDEVKRFVGIDVAKAALDVFIGSAGAAFSVANDEVGIRELLRQLKPADFVILEATGGLEMPVASALAAAGIAVVIVNPRQVRDFARATGRLAKTDRLDAEVLARFGEAVRPEARPLADEQAQALEALVTRRRQLVEMLTAEKNRRASAPKVSHRSIDEHIRWLEKRLSGLDDELAELIRDTPLWCERDELLRSVPGVGKVLSSTLLAHLPELGALNRKQIAALAGLAPFNRDSGSLHGSRCIWGGRAQVRRVLYMAVVAAVRSNPVIKNFYAQLRARGKYPKSALTACMRKLLVILNAMLHNKTHWQTPALTSSTSPLSPFSGAVPEHGCC

SEQ ID NO: 153713 - protein, 367 aa, unidentified
MQNTIVHYEGAASLEAAATKVKPGGAQIKIGLDVHARQYVAVAQYDHLLPKAARRLSPGEFVPWVKVLLGQGHSVHVVYEACGFGFSLYRQLIAAGAHCYVIAPRKLDEACSRVKTDPRDATTLCQRLSRYLEGNTRELAVIRVPSQEEERARHVSRQRTQLVCHRQKLEAQGRSLLISHALPAPAHWWKEQTWTRLGQHLPVWITIRLQMARPALLSLQEQINALTSELEASASSTLPRGVGKLTSVMLTREICDWHRFNNRRAISSYTGLCPGERSSGSKRVPGSVTKRGNPRVRAALVECAWRMVRFQPQYPPVQKRSGILAKGSHALGAVRKKAIVAVARRLAVDLWRLHTGRCTAEQLGLKL

SEQ ID NO: 153714 - protein, 338 aa, unidentified
MRLYCGIDLHSNNAYVAVLDERDRVLYRRRLPNELAVILAELSSYQAQLVGIAVESTFNWYWLVDGLLEAGYRVHLANPAAMQRYNGLKHSDDNSDACWLAHMLRIGVLPEGYIYPREQRGLRDLLRKRGRLVQQRTASLLSLQGIVQRNTGQRPTGRAVRSLDLDELREQLRDSNVSLAVESTWRVLECLDGEVKQLEREASRQIKLHPLFKLLKSIAGVGDILAPTIQLETGAIDRFSGAGNYVSYCRAVGSQCLSNGKVKGRGNRKNGNRYLAWAWLEAANFAIRYHAPVRRFYERKKARTHRVVAIKAVAHKLARAGYYVMRDRVPFQIDLAFG

SEQ ID NO: 153715 - protein, 397 aa, unidentified
MIAVGIDVSKSKSTVAILNGDGSIRAKPFDVHHVADELQALVDYIKRTSEPPTILMEPTSHYHYPLLKAFTEAELPVCLINPYQMKKYGDTELRKAKTDKRDSLRIAQYALEKSYSLIPYTPQDQKYEDLRFLSRQYSQRISTLTVAKVQLLSLLDETMPGITTILPLKSRDPDNCVLLRFIKRFKSFDVIRKMGKTRFLDSYQVLVKKTKDRFAGSKGLAIYELVLNSVTTRGENPLSAMTQDQCVDLVSTSQKATDEINLQMRIIAETMPEYKVLRSMAGVGDRLGPIILGEIGDIRRFHSGKALNAYAGNDAPPYQSGQFESRNRHISKRGNPALRKACFEVMQALKLTKPQDDPVYLFLLKKEQEGKPYNVAKMAAVNKFLRIYYARAMELYK

SEQ ID NO: 153716 - protein, 337 aa, unidentified
MHYSGIDLHSNNSVVTVTDEEDRVVAEKRLPNDLAKIVGFLLPWRDELKAVVVESTYNWYWLVDGLQQAGFVVKLANTGAIKQYDGLKRSGDEADARQLAHLLRLGILPTGTILPPAHRAVRDPARKRMQRVRSRTRHILAIENIVARQRGMKINSNQVKRLTADVVDLMLLPADVALVVKSNLAVITTLSEQIELLEKRLQQSMGERSDYDLLTSAPGIGRILATIILLETGPIDRFASVGNFASSARCVDSRHMSNGKKKGEGNTKNGNKYLAWAFVEAANFALRFCAEAKRFYERKKAQTNPVVAIKALAHKLARACYHMLKENKPFDVTRCFA

SEQ ID NO: 153717 - protein, 370 aa, unidentified
MKEYSEAFIGFDTAKKKHAVAIADVGREGEIRYLGEIDSSPLTIERMIRKLAGRYEKLHFCYEAGPTGYGLYRQVRGLGHHCTIVAPSLIPKKSGERVKTNRRDAVSLARLFRAGELTSVWVPDTVHEAVRDLVRARETASQDLRRKRQQLLSFLLRHGRIFSGRQHWSRAHLRWLAQQKFDHPAQQIVFQDAVDAIDDAAARLRRLDEQVAAIVPSWSMAPVVEAYQAMRGVSFVVAVTFVAEIGDLRRFDNPRQLMAFLGLVPSERSTGERVRRAGLTLAGNKRARRVLIEGAWSYRYPARVSQTLQARLEGLPKAVREIAWKAQIRLCARYRRLNAAGKKLPVVIAAIAREMAAFLWAIARHVAPAA

SEQ ID NO: 153718 - protein, 380 aa, unidentified
MTRATRGGEYTGPTEQSLHLSFELGLKDWKLGFTTDLSAKARLRVMPARDLGRLEREIAEAKRSFGLAATARVRSCYEAGRDGFWLQRYLVSQGIDNGVVDSSSIEVNRRMRRAKSDGLDARKLLTMLVRYHAGEGKVWSVVRVPTVEEEDRRQLHRELRTLKKERTRTTNRIKGLLANQGIRLEKNGDLRQRLGRLRLWDGSPLPAGLVARLQREWEHAEFLHGKILELERERRQAILEGQSPALEKVRQLMLLKAIGPSGSWVYVHEFFGWRRFRNRKEVGAAAGLTPTPYQSGDGSREQGISKAGSRHIRAVAIEMAWCWLRYQPRSKLSLWYQERFGRGGKRARKVGIVAVARKLLIDLWRFLEHGVIPEGAALKA

SEQ ID NO: 153719 - protein, 338 aa, unidentified
MQAYAGIDLHSSNNYIGIINEQDQRLYGKRMPNDLNHVLMALKPFRDQLEGVVVESTYNWYWLVDGLQEHGYNVHLANPSAIKQYEGLKHTDDKWDAFWLAHMRRLNILPEGYIYPKEDRAIRDLLRRRLLFVRHRTSHILSLQSMITRNLGIKVSGNEIKKLKEENVDGMFNSSNLRFMAKNNIAVIQFLKKIITDIEKNVKSQVKLRKEFAMLLTISGIGDILGLTIMMEVDDINRFPKVGDYSSYSRCVKSERFSNGKKKNENNKKNGNKYLAWAYVEAANFAIRYNVRAQRFYQKKKAERNGIVAIKALGNKICRASYYIMRDHVPFDEDMLFR

SEQ ID NO: 153720 - protein, 346 aa, unidentified
MTIIVETRSITGGVDTHLDVHVAAALDANGGVLGVESFPTTTAGFAELHAWLCSFGTLCRVGVEGTGAYGVGLARFLRGAGVAVLEVSRPNRQARRRHGKSDTIDAIEAARAALSGRAHGVAKTADGNVEAIRALLVAFRSGRDARIKCLNQLRHLGYTAPDDLRERFRDVTTDALARTAAGLRPNPDGDPVVDATKLAMQTLGRRVLDIDADCARLHGELAALVRKTAPTLVELHGVGPHTAAMLLVAAGDNAQRITSEAAFAHLCGAAPIHASSGKTVRHRLNRGGNRQANHALWRIVLTRMSSDPRTRTYVERRSAQGRSRREIMRVLKRYVAREVYRHLPGV

SEQ ID NO: 153721 - protein, 324 aa, unidentified
MSDNTNPGRISHVGIDVSKERLDVCLMPGSETLVVSNDQPGIESLLGRLRQSPPKLVVLEASGRYERPVAAALAASGIVLAVVNPRQARDFAKATGRLAKTDRIDAEILARFAVAVGPRPSVLPDEEAQALQAILTRRRQLVEMLTAENNRLGMASNSSATVAKRIRAHIKWLQKELERTDGELDAAVEASTLWKENEALLRSVPGVGPVLARTLLAELPELGTISPKRLSALVGVAPFNRDSGTFQGKRQVWGGRSPVRAVLYMAALVATRHNPVIREFYERLLASGKPKKVALVACMRKLLSILNAVLRVRAPWHPTHLLTS

SEQ ID NO: 153722 - protein, 345 aa, unidentified
MYFCGLDVSLRMTAVCVVDGDGRILKEAKVASDPEVISEFLRGLGLALERVGLEAGATAAWLQAGLREHGWPTVCIDARHAAAALQAGLRNKSDRNDARGIAQLMRLNAFRPVWVKSLRSQRINAMLTARNTIQEQLVRIENVIRGLLRGDGVVLPLGRARFEAEIREQLGGEADLLAIVEPLLAARAEMLRSRTIYDGRIMAIARKDPVCRLLMTAPAVGPHVALAFRAGVDDPARFRRSRTVGAHFGLSPRRYSSGEIDHSGRISRMGDRHVRHMLYVAAQITLRRDQGLWSSLKAWALRVGKARGMAKARVALARKLACVLHKMWVTGEPFRWQAGGAAKAA

SEQ ID NO: 153723 - protein, 425 aa, unidentified
MEVIHPRCAGLDVHKETVVGCVRLALDGKVTREVRTFETTTSGLLLLLAWLTELGCTHVAMEATGVYWKPVWNILSDGDFELVLANAAHIKNVPGRKTDVSDAAWIADLLAHGLIRSSFVPEQEIQELRELLRTRKQLTRQQSSHIQRLQKTLESANVKLDSVITDIVGKSGRAMIQALIAGETDPVKLAALADRRIKASPQELREALRGRVTNHHCFLLHLHLQHIEFADAAIQDIDRNVTALINRMDQEVEAGQTRATFQSLILLLMTIPGIDVLSARTILSEIGRDMSRFPTAGHLLSWAGLCPRNDESAGKRRSTRLRKGDLWLKTLLVQCAWAARRKKGSYFNAQFLRLRGRRGPKKAACAVAASLLTTIYHMLKDGTQFQDLGADHFDRRSKDVRAKRLVTQLANLGFDAKITPFAQAA

SEQ ID NO: 153724 - protein, 315 aa, unidentified
MHSEATFVGIDVSKDQLDIAIRPGEARFRESNDDSGIQALIVRLLSLEPQLILLEATGGYEILAAASLRQAGLPAHIINPRQVRDFARSSGRLAKTDKIDAAILAHFAEALKPDLRPWPDEQQQELAALMSRRRQLVEMLVMEKNRLAMTYSPRVRKSLQTNLQSLKEQLKELEQDLDDFIRQSPVWLKKAQLLQSVPGIGPLTCQSLLAWLPELGTLNRKKIAALVGLAPFNRDSGQMRGKRTIWGGRARLRPPLYMATLAACRVNPAIRAFYLRLVAAGKSKKLALTACMRKLLIILNAILKEQQPWCHQASV

SEQ ID NO: 153725 - protein, 453 aa, unidentified
MKKDKNKEQKVVELDAFEQINHNAAGIDVGAKEFYVAVPKGRDTQSVRVFLTFTADIHHLADWLAQCGVKTVALESTGVYWIPLYEILEQRGFEVYLVNARHLKNVTGRKTDVLDCQWLQQLHTYGLLRASFRPSEQICAIRSLVRHRDMLVSYRSAHIQHMQKALTLMNVRLTNVLSDITGVTGMKIIRAILSGERNRKTLASYRDAKCAKTEEEIEKSLEGNYKLEHLFVLKQALELYDFYDQQIKQCDQELETLYNEFEEPDQPGTSAPEKRKRKRRKNQPNFDLSESLYRMTGGIDLTKIEGLDALTVQEILSETGTDVSKWPTVKHFCSWLCLAPNNKITGGKVKSSHTPHTQNRAANAFRIGAQSLMKSKSALGAYCRRIAALHDAPTAITATAHKLATIFYFMLKRREAYRPLAADYYEKEHREKVVRSLQRRAATLGFRLEPTVS

SEQ ID NO: 153726 - protein, 361 aa, unidentified
MHSDQIFVGFDVDKAHVAACVLRGTQAAPIEEVTLPNEAGRIRKYLKEVSREGKLQVGYEAGFSGYELARAIQEWGYDGRVVAPSTVPRPSKERKKKTNRTDARRLALAMQSGDVNYVTIPGRMRETHRDRWRCWRALRKDLKRVKQRAGSFVHSRGLVYREGKTLWTKRYLAWLGHLPLCPEDLRTLQTYLNEKCYLEAQMGLVMGELKEIAQLPAYREAVRRLQCFKAVDTLTALALVLEIGDFRRFPTAGALMDYLGLVPGEHSTGETRKDGPLTGTGNARLRHLLIEVAWHYTYRPSHRKTLLLRQQGQPSEVIAHAWKAQLRLYQRYHHLLHTRGKATAVVAVARELVGFLWAVMR

SEQ ID NO: 153727 - protein, 365 aa, unidentified
MEEKKKAEARFVGIDLGKRAYEVAIVGKGGKVAMSNGKTFVAGRQKLYQKLRPSDKVALEAGNMAFIIAKEIEAAVGCTVYVLNPSHLALIYGSMKKTDKEDSLKLAHILEDYKEERLPVVPVPSDKEMGRRKILASYRRVQQSRNREINQLHGLFVAQGITTKVRSDLCEHESRMEAIRELKGTEREEAEYLLAILKLAEQRIEALEKQMKEESAGDEVIQRLQNTPGVGPKTSFAYVAHVAADRFENAHQVSNFLGLVPRVYMSGDTVRYGRITKRGNGYLRALLVQAAWAVTNSRNGGKLKERYEYMTKEKSISKKKAIVAIARRLAEELYVLMRDGTTHESRPFMGNKKGVEKLAQEAIGA

SEQ ID NO: 153728 - protein, 400 aa, unidentified
MKGPIVSIDVSNGNSHFQCFIQRGTKMGKVHRIQHTVEGFRFLKSKVEELAMKTKEEVVVVYEATGVYTTPLQRFLEKSEIKQYQISPLQSARQRKTEIHNKKTDKKDPESIAEVYYAKELRKYEREADIYHQLRTANRVYEDCLEHLRKYKVTFQSHLSIVFPGYMKLFQDGYSPISLQLLEMYPHPDRLKNKQPETVAKKLNKHTDHSFEVCLKNAKRVIEFANKTYPGCDKEDPWVAVLVEDIHQLQAMIEQAEAKLDKIIKLAKTTPYYFIILSIDGIGPNLASRIIAEFGDISKFKTRGAMAAYVGNDPNRAESGDIDGYHLSISKKGNKRLRCILYLAVTCSIRSKKENPINAFYQKKRQQSTPLKSKAAKVACITKLIRTIHGMCKNGTEFTS

SEQ ID NO: 153729 - protein, 416 aa, unidentified
MNAVGIDVSSRKSTVAVLRPLGEVVCLPFDVTHDIAVLASLAEKLKAIDGETRVVMEHTGRYYEAVAKALHEAGFFVCAVNPLLIKEYGANSLRRVKTDKADAVKIARYALDNWADLRDFTPMDAIRYDLKTLNRQFQLASKQRTASANNLIALLEQSFPGIRKCFDSPVRSDGTQKWVDFAHSFWHVDCVRKQPFPAFCERYRKWCKLHAYFFKLRNAEKVYALAKSAVVLTPKSKVVKVLVQEAANQLISISRSVEVYRAEMDRLAAMLPEYPVVMAMYGVGKSYGPQLMAEIGDVRRFERKQALVAFAGIDPMPNQSGDKNVRSNKSSKRGSPYLRKTLFNVIRTYLQCAPQDEPVFQFLNRKRAEGKPFYVYMLAAANKFLRRYYAKLRDYFASLDTLQPVAPIPTILKATL

SEQ ID NO: 153730 - protein, 342 aa, unidentified
MTAIGIDTHKATLAACAIDELGKLVAEETFANDPDGHVAFIAWARSTAPEATVGIEGSSSFGAPLARSAQHAGLSVREVPPHLSRAERRRTRRPGKSDPGDALAIARVTARETNLPPIRLPDRTSELRLLLEAREDLVGEATRVRNRLHAHLLVLVPGYGGTVTNLVAARHRTTAGRLLRGNTAVQAELARSLLARLLRLGREIDVLTRRVAACVVGHPLLGLPGAGPITVARLIAEVGDVHRFRSADALAALAGVAPIPASSGQVQRMRLNRGGNRQLNRAFYVIAVTQSRFHPPAKAYVTRRIEADGKTWREAIRALKRRLVRPVFRLLLEGSGVQLAAA

SEQ ID NO: 153731 - protein, 369 aa, unidentified
MNDITYVGLDVHKATVCVAIAESGRGGEVRQVGVFENRPDVLCKMVARLGRDRRRLSFCYEAGPCGYGLHRLLIGLGHDCIVVAPSLIPMKAGDRIKTDRRDALMLAKLHRAGELTPIWIPDAAHEAMRDLVRARATAVRVLSKARQHLQGFLLRHDRIYHGARAWTLAYRRWLTTVRFDHPAQQIVLQDYIHAVEDAETRRDRLTRQIEELMPSWSMAPVAAALQAMRGVALVVAVTVVAEVGDFRRFTNARQLMAYLGLVPSEHSSGSTVRRAGITKAGNALARRVLIEGAWTYRMSARVSRKLHDRLEPLSAAIRDIAWKAQVRLCARYRRLAAAGKPKVVVTTAIAREMVGFIWAIARVAQPELI

SEQ ID NO: 153732 - protein, 433 aa, unidentified
MEEAQDEPLFCERAAGIDIGKQSVMVTVRVPGETRRGGRAQETREFGTTRRQLLELADWLRCWGVERAGMESTGDYGKPVFFLLEQQGFDCVLYQASKVKAQPGRPKTDKLDSVWLAKITERGSVAGSFVPPEDIRRLRTHTRYRRRLTQARTAEKQRAEKLLEDAHLKLSSVISDIHGVSGGDMLRALAAGERDPRVLAEMARGVMRRKLAALREALDCSFVTEEHAFVLSMMLDNIDHYSAQITVLDEKIAALCEPYERQIAQLDQIPGFGVKTAQDLIGEIGVDMSVFPTAGHLCSWARVAPRPKESGGRRKGGSATGKGNPYIGATLGEAAVSVGRTQTFLGAKLRRLVRHMPKKKAQVAVMRTQLAAARALLSDPEAEYRDLGPGYYEQRAGTARQARGHVRSLERLGWKVTLEPLDPDTGELTAQAS

SEQ ID NO: 153733 - protein, 455 aa, unidentified
MFRLVGSAQPLPVSITRLLLLRRSETALRGEVYMNFCPVAGIDVSKSFSDMCILSPDNKIFAQEKIYHDETSINRANALLQKAEQIFSSKPVIVMESTSHYHLILFQFFSEHGYDVIVVNPLQSSSMKDFAIRKRKTDRVDAFKLAMLYRTKTLHPSQIPQAAMRALRQLCRERVECLNDVTSYKNRLTAFLDQAFPGYDKIFSDVGGITSCAVLVHFPTPAILLAAEEAELVEVIAAASKSGYGFAKKKAELLISAAQKAQTLGIHSCADETLIVCTIQMLRTLSESVFQIEKAINNLLAQVKEVRNNVSLLQSIPGIGSHSAALLLGEIGDFTLFKKPKQLAAYFGLDPSERQSGTFRGTKNKLSKRGSPYARAALHMGVVNAICKHGKKTAPNPVLLSYYEKKCKNKPAKVAQAASMHKLIFIIFAVLRDQKPFELKTPEQHAFEQGFVKAA

SEQ ID NO: 153734 - protein, 389 aa, unidentified
MLLDHPSDGPTAIRTQFGAIFVSLELSRSNWLITSLSPGKGEKMSKHGVTAGDVAGLMQLFADLRRKAAAGTGESYPIITIQEAGLDGFWLHRVLQQNGIESHVVDPASIATPRRRRRAKTDRLDGETLLRALLAYKRGEPRVCAMVVAPSPEAEDRRRLCRERRTLIAERIRHVNRIKGLLFAQGISDYAPKRRDRRARLEALRTGDGRQLPSHLKAQIGRELDRLELLLKQIKAVEAGQEALLAAARTPASEQAVPAPVTMLLALKGMGANFAAVLWSEAFYRQFANRRQVAAYAGLAATPWQSGGIRHEQGVSKAGNPRLRTTMIQFAWLWIRHQPQSALTRWFKQRSQQGRKRAIVALARKLLVALWKYVTQGVVIEGAVMKPAA

SEQ ID NO: 153735 - protein, 411 aa, unidentified
MEVLYPICCGMDVHKKTVVACLLTQQGARVRKEVRTFGTTTGELLAMRQWLLEGGCAHTAMESTGIYWKPIFNVLEGHLSVLLVNAQHIKAVPGRKSDVMDCEWIAQLLRHGLLRGSFVPDARIRELRDLTRYRTKLTQQQSSVANRIQKVLEDANIKMGSVASDVLGKSGLAMIEAIIEGVTDAQALSELAQGRLKSKKGLLKEALEGRVTDHHRFLLRELLDQFKYLEQAISRASQQIEEKSRPFEDAVRRLDTLPGVDRVTAEKFIAEIGVEMSQFPTDHQLASWAGMCPGNNESAGKHKSGKTRKGSRWLRSALTEAAWAASRTKKTYLKARYHRLAARRGKKRALVAVGHTLLVMAYHILREGTTYRELGEGFFDRLHAQRLTNRLVKKLESLGHKVTLEPCSAAG

SEQ ID NO: 153736 - protein, 384 aa, unidentified
MNKNSILFIGLDTHKDFFEVAYFSPDHHSAVEHYGRISSAKVALTKFIQSMQRKYPNATIHVVYEAGPCGYWVYRHLTKLGHLCFIVAPSLIPKKPGDRVKTDKRDAILLCTLLKNGDANPIYVPEPEDEAVRDLSRARERAMHDLNDARYQLKALLLRNNINYDGLANWSAKHLRWLTEIVLPHTSQQFVLQEMIVTIHERKDRLERLDNELNHHVHAWRYYPVVKAIQAMKGVRILVSTGLIAELGDLTRFDHPRKLMNYLGLVPSEHSSGGKRRLGAITKCGNTHARRLLIESASSYRYSANVSTELQIRLEGLPKQVVDIAWAAQVRLCRRYQRLMARGKNANVVKVAIAREMIAYIWAISREVVLPKIDVSKRIARVPA

SEQ ID NO: 153737 - protein, 461 aa, unidentified
MQGRSEKPSQQNSEIEIEEEGLPVIRAKVAGIDLGSNEHWVCAPPVGGLGREVEVFRATTPELERMAAWLKEREVESVAMESTGVYWIAPHELLERHGLEVVLVNTRELARVPGRKKTDRVDCKWIQRLHSCGLLTGSFRPAEQVCMLRTLVRDKGNLVAEAGDWVRRMQKSLDQMNVRVHRAVSDLDGVTGMAILRAIVKGERDARQLAKLRDPHCRKSEEEIAEQLSGHWREDHLFSLQQALRMHDAVQERIADYEQEILRKLAEMEREECRGQEPPKVNNPQKAKAIKKRGEEPLRGALYRVSGVDLTGIDAIGVGTVQVVLSEYGPDLSKFPNEKQFVSHITLAPRKAMSGGKPVKKKKRGSASTRVAAALRMAALSLRHSQTGLGAYYRQIARRIGGDVAVFATARKLATLIYRLLRWGQPYVDEGAAVVEKRYQEARIQRLGATAKDLGFQLTAR

SEQ ID NO: 153738 - protein, 335 aa, unidentified
MMNTRIPAVLHVGADVAKDEVVVACEEETFAPRSLVNERDALLVWLKTLPVGSYVGMEATGRYHRLLANLAFEVGLAVYVLNPRDCRHYAKGVGLRGKTDRVDARLIARITAREAGKLRHWSPPSAQQQELDQLLRRRASVSRMRAGLMQSLEDLTGFGPERQRPLLQQLTGLIACFDRRIKTLIETSAERMAAYRRLLGICGVGTVVAAALLNVLERMAFARADAFVAFTGFDPRPDDSGRRRGRRRLSKRGPSELRRLLYLAAMAAARTEAWKPRYERERAKGLSSTEALVVLARCIARTAWSIYTHKTSFDRERVGHCLSSCASSVPAARPL

SEQ ID NO: 153739 - protein, 450 aa, unidentified
MRVFIGIDIGKEINLASFLNENGVEIDKRFKFKNNHLGFLKFKDNIDKLTYDYNLKSYDVLIGFESTGHYWINIDWFITEKLNIKTVMVRNDAVKHTRALNSQGKGKNDSLDSRTIAECLKNGYYFDVQGRKEDHIVLRRLTRERSKLEKEIARYKNRFRAWLDVNNPIFLDVFVNLFSTGAFSLLKVYPSPLDIIQDSYLEVKEKLREVGYNRTNQTFKIYYEEAKTHKNNINGISYADRLEISDYIETLEMYMKKKESLDEKIEALIKILEEKVFTSLSEIKGMPEAQVCSLLAEIGNTNNFKSARHLISYAGLNIQGEGSGKSKGHSWISKTGNRKIRKELYVITFNLVRHNDYFRGVYCYYKSYKRENEKANKEMLIALMCKILRVIYGMLKYNIEFDLNEMLKNYDFRNINKEKFIDEFLGNSEKRQKIIPQEIEEIFLSNKKSN

SEQ ID NO: 153740 - protein, 411 aa, unidentified
MNVMYERCAGLDVHKKTVVACVLTPDGPETRTFGTMTADLLVLSDWRLACGCTHIAMESTGDYWKPVFNMLEGTFEVLLVNAQHVKAVPGRKTDVKDAAWLAELLPHGLLRASFIPPVAQRELRDLTRYRSTFIQERATLVNRVQKLLEDANIKLASVASDIMGVSGRAMLAALLAGHTDPQALADLAKGRWRSKREALVKALEGRVKPHHRFVLTELLCQIDSLDDTIARCDGRIQEIGAPFEAAVSLLDTIPGVARQSADMIVAEIGTDMERFPSADHLASWAGVAPGNHESAGKRTTGKTRKGNRFLRTILVQAAHAAARTQGTYLSAQYRRLATRRGKKRAILAVAHSMLVMAYDMLQRQEPYRDAGADYFDHLQPEDTVRRLVTRLERLGYHVTLQKPSLDAIGSQ

SEQ ID NO: 153741 - protein, 346 aa, unidentified
MVTIGLDAHLKTSTMTVLDSNGKKLTRKKIENDPDKLLKFIRQFPGEKQLAIETCYNWPVFHELYKNEVNQFHLLHAKKLRSVIESQAKYDGNDSDEIAYLIHSGRPLVHSHVADLDTRCFRRLLRARVSFSLDITRIKNQIHAIINAHTFYSQRPTNFKSIFCKRGLKYIKSLEIPEQERFIIDKYLDKMNELERRRDEFDEYIDHIDFHADDLKWLQTVPGLKGGKLLKYIILSEIDNVNRFRHARALAAYAGLIPKEHSSGDKNRKGHLRTECNHFLRWAVLELVLPAIRVDKGLRQNYQDIKERKNNSSAARIATARALLQAIYCVLKERRPYRMTQAVNRG

SEQ ID NO: 153742 - protein, 402 aa, unidentified
MAEKPTRFIGLDIHKEYFVAVGVNVEREVVFGPQRVSNYQLDDWVQRVLTLEDAVVLEMSTNTYLFYDTMLPHVHSVIAVHPPNVALVTNAPVKTDKKAALALAQLHAAGMLTGVWIPPQKVRDLRSLIARREKMVRLSTMAKNRLHSALHRNHLIPPESPFAPEQRTWWENLPLSETEQFLVRADLDMLEFAQKQIGQVEGCLKQQSVKDERVPLLVQLPGVAMLTAITILAAIGDISRFPNAKKLVGYAGLGSRIHDSGMTHSAGRITKAGRRDLRRAMVNAANHAVEHHEHWKKELERMEPHMGRSKAIVAIARKLLVAVWHVLNGQVADRFADPRDVANAFFRYAYKVGVHNLPEGQSALSFTRNQLDRLKLGQDLLVIPVGAKKHRLPPSKLLLEKE

SEQ ID NO: 153743 - protein, 342 aa, unidentified
MRYIGADLHKKSITFCVVKIVRGKTTIVERKRLSCRDTNRITEWIKSHRPCKVVVETTIGQEWFVQLCEPIASRTVVAHATKLRIIAESTRKTDKIDAFVLAELLAKDMLPESWIPTSRVRQHRALVRRRQKVQSRITSVKNTIRAILTRYNSDRKDIFTRHGWETAKEFQLLDEDRWVLDDLWEELQEHRSRLRKVDRRLVDFAKSAPLREREARAILATMPGVGPRTIETILAELGDWRRFKNGRAVASFAGLEPAVRESDGKRHDLKLSKEGSPLLRWIMIQLAHRVKTRSVRWSAAFEQLSRKAGRKKATCAIARRLLLVIYAMLRDGKAYDLPAAAA

SEQ ID NO: 153744 - protein, 374 aa, unidentified
MKKSSILFVGLDVHKDTIDIGVAESGREGEIRHIGTIGGDLAAVDRALRKLISAGHRLHVVYEAGPCGFVLYRHLVKQGITVDIVSPSLIPKRPGDRIKTDRHDAMMLARLARSGDLTAIVVPDAGDEAVRDLLRARADVVRAQRSARHQLKALLLRNDIRYAGKSAWTAAHQRWLATVKLAHPTQQITFQEYVHAVTEATDRIVRFDQAIVEAVATWRWRPVVEALCALRGIALLAAATLVAEIGAIERFGNPRQLMAYLGLIPSEHSSGPSRRQGAITKAGNTHARRILIECAWLYRYPARIAPILQKRMDKVPAEVRTIAWAAQVRLCARFRRLAARKLPHNKIVVAIARELIGFIWAIARIQPPLTSAPH

SEQ ID NO: 153745 - protein, 342 aa, unidentified
MYYIGLDVHKKTISYCVKDASGQVHQEGKVGATRWELDDWMKTLPQPWTVAMEATIFTGWIYDHLLPHAQQVKVAHPLMLRAIAAAKKKNDRIDAGKIADCLRCDFLPECHMASTAIRDRRRTLRYRHLLVRQIVQMKNRISGLLMETGVSHNKQRLHKVKYFRELLTTNEEVNESIRPLLRVSRDSIVRLQKTEYALVSSLQRDPLLAERVKRLRTVPGVGPITALTWALEIGEVSRFPSIRQAISYCGLCGDEKSSADKVTRTPLSKQRNKHIQRVLVEAAKLAPRQDHNLALVYEREKQKGNANRATLAVARKMVAYLLAVDRGQRDFVPFADSQSAAA

SEQ ID NO: 153746 - protein, 419 aa, unidentified
MIEAVLERCAGIDVGKKYVVCCLSLGAANSTATEETRQYDTTVAELEKMRDWLLENQCSHVAMESTGPYWKPVFNLLEDHFTVILANAQQVKSLPGKKTDRKDGRRLAHFLRHNLIEGSFIPPVAIRQLRDLTRRRRKLLGAGASERNRVQKVLEDANVKLGNVLSDVFGASGQAMLEALLSNQGTPQQLAEFARGKLRRKMPEIVTAVEEHRMREHHRFLIRQSLRHMAFLEEQVAALDEEILRQMKPFEKEFESLQTIPGIKATAAASILAEVGVDMKQFPTAHHLASWAGICPGNNESAGKHKGTQTRKGDPWLRGTLTESAWAASRKKGSSFAARFRRLAPHRGQKRALVALGHNLLIVVYQVLSTGQPYQELGSTYHEERTKEARVRHHLRCLRALGALAPGADLTEVPHAPAV

SEQ ID NO: 153747 - protein, 398 aa, unidentified
MTESSDYESVQIFIGVDVGKDTHHAVAINRSGKRLFDKALPNDENKLRSLISDLKQHGQILLVVDQPATIGALPVAVARSEGVLVGYLPGLAMRRIADLHAGEAKTDARDAAIIAEAARTLPHALRTLKLADEQIAELSMLCGFDDDLAAQTTQASNRIRGLLTQIHPALERVLGPRLDHPAVLDLLQRYPSPEKLASLGEKKLAAQLCKLAPRLGKRLAADIAQALAEQTVVVPGTNAAAVVLPRLALQLITLRKQRDEVALAVEQRVLAHPLYPVLTSMPGVGVRTAARLLTEVACRAFASVAHLAAYAGLAPVTRRSGSSIRGEHPSRRGNKALKRALFLSAFAALRDPLSRAYYTRKMSQGKRHNQALIALARRRCDVLFAMMRDGTFYTPQAS

SEQ ID NO: 153748 - protein, 470 aa, unidentified
MQDNNRKEGAAKKRQIEGLPVVRRNVAGIDLGSERHWACAPSVDGTGRERADFGATTPELIRLAEWLQAGGVESVAMESTGVYWIAPHEVLEGRGLQVLLVDTRQLAPVPGRDKKTDASDCEWIERLHSCGLLRGSFRPAEQVCMLRTLARDKANLVAESGDWVRRMQKSLDQMNVRVHRAVSDIDGVTGMAILRAIADGERDAGKLAQLRDPRCRKSEPEIAEQLSGHWREDHLFALRQALKMYDAIQQRIADYDQEILRRLAAMQREDFRDQPPPQVKNRQKAQAIKKRGEEPMREALFRMSGVDLTAIDAIGVGTVQVVLSEYGPDLSRFPTEKEFVSHVTLAPRRPMSGGKPVRKKKRNTASTRVASALRMAALSLRNSSTALGAYYRRIARRIGADVAVFATARKLATLIYRLLRWGQPYVDEGAEAFEKRYQEIRMTALKAKAKQLGYDLLPSVQAPVEGEVTG

SEQ ID NO: 153749 - protein, 414 aa, unidentified
MDVVYAQCAGLDVHKATVVACVRIPGSRPDARQAETQTFATTLRGLEALAAWLMVHGVTHAAMESTGVYWRPVYAVLESTLELVLVNARHVKMVPGRKTDVRDCEWLAQLLECGLLRGSFVPPHAVRDLRDLTRLRKTLIREQGHHVNRIAKTLELANIKLSSVVTDIMGKTGRAILDALSAGRDDPEQLAAYAQGLLRKKRGALHEAVEGRLTPHYAFLLQQHLALIDTLEVHIATLDARIEAAMTALGPFAEASALMQTMPGVKTRAAQAILAETGVDMSVFPTAAHFASWARLCPGNHESAGKRRPTMTGKGATWLRATLQEAAWAAVRTKKSYYRALYYRLKARGGPKKAIVAVQHAMLVALWHMLTRHVPHQDLGVDYFDRHHTERRRRHHVRRLEQLGYQVVLVQPAA

SEQ ID NO: 153750 - protein, 391 aa, unidentified
MSTYFVGIDISKYKHDCCIINAADQSIVAKFTIRNDKEGFNELLTSLQSLSTPDDIKIGFESTAHYALNLELFLEKAHHSFMEVNPVLISEYKKSTSLRRTKTDSVDCESIARWLMTVEYKPHSKGFYHAYSLKSLTRLRDRLIRQRSFYLVKITNILDHTFPEFKPFFQERFSKTALYLLENYGSAEKMARMNSASYDNLRRISRGKFTPQKFLELKALAANTVGVNNSIFDTELTCLLTLYKEAAKQVSVLETQITELIEEVHPHYMSIPGIGPISAAVIYAEYGDISNFSSPAQMLAFAGLEPGISESGTESHRGRMVKRGSSQLRYTLMNCALPLIRFDMTFAAYYAKKRSEGKPHRVAISHVTKKLVRVIFALERQNTDFVATALR

SEQ ID NO: 153751 - protein, 343 aa, unidentified
MEQSQGVVVGVDTHKDSHSAALVDELGAVLASTDVGANQRGYVRLLEWARCRSPRRTWVVEGTGSYGAGLAGFLARCGEVVYEGDRPQRRKHGAGGKSDQLDAIKVAREALAREHHAVPRQRGNREAIRVLLSTREGAVTASRQALNQLYALVVTAPEPIHERLIGLKGEQLVKASLRLRCRAGELETSVTTRVLRQVARRIRTLQAEAVDYEAQLEKLVAETVPVLLSEPGVGAITAAQLLVSWSHAGRIRNENAFAAMAGVAPVPASSGRVTRHRLNRQGDRHLNRALHVVAVCRSSFHRPTKSYIARRTAEGKSAREIRRCLKRYLARRFFRLLQGLDKP

SEQ ID NO: 153752 - protein, 343 aa, unidentified
MTRFVGLDVSQKMTVICVVDDAGRRLWRGQCPTVPEQITVLVRRHAGDKARIGIETGAMTPWLVHELRNLGLEVVCLDARHARAALKMQINKTDQNDAEGLAQIVRTGWYRSVHVKSFESHRARALLGARIQLIGMTTRLSNHIRGVLKTFGLLPGAMRGLPFDRKVEALLLDRSDVALIVRPMLIAWRQLREQIVAFDKAIRALVKSNSACRLLMSVPGIGVLSALAYVSTVENPARFVRSRSVGAHLGLTPRQYQSGEVDRSGRISRCGDTLARTLLYEAAVVILSRVKRASSLKDWARAIAKRSGNGKARVALARKLSVILHSVWRSGEPFRWSEHASAA

SEQ ID NO: 153753 - protein, 356 aa, unidentified
MTIVAYSHPFVVGVDTHARKHVYSILAAPSGERIDTRDFPATGAGIDRAIAWVARLTGADPATLWVIEGAASYGAVLAGAVAAAGYQVAEAARMDAKTRRGIGKSDPLDAHRIASTVLSLEEDKLRRPRLNEGVRAALRVLVSARQSMTTDRTRTVNALTALLRVNDLGADARKPLTGTQILEISRWRAREEPLALSVARSEAVRLAKRINDLDADIKTNGNRITELVEISEAAPLLQEPGFGPVTAAICLTAWSHRGRVRSEAAFASLAGANPIPASSGNTVRHRLNRGGDRTLNKALHMAARSRMAFDPETINYTAKREAEGRTKKEIRRCVKRYLARRIYRTLNANSPMPSFR

SEQ ID NO: 153754 - protein, 358 aa, unidentified
MDQYIGLDVSLKDTAISIREDGKRIWRGKRASDPKLLAQVIRKHAPHAKRVVFETGPLSTWFYHPLMAEGVPAICIEARHAQKILHETLNKTDANDADGLAQMAEAGFYKAVRVKAFDSMLTRTLVAARNQLLSISTQLSNQIRGMMKTFGLIVSNGKGRVFDGKVRELLAGNDALAAIILPLLDAWRGIRKRAADLDRQLLAVARQSQPTKLLMTIPGIGAVTAVSYVAAIEDPENFKTSRSVGAWLGLTTRRYQSGEVDYDGHISRRGDSHLRGLLYEAATVLLTRTRPGERKPSQELGAEAARAVGLQTHCGGGRPEACGYHAQHAQDRRSVQRLGWRRRLSDSQPSSLSASNLI

SEQ ID NO: 153755 - protein, 406 aa, unidentified
MGRRCIGLDVHRDFAQVAIWQDGVVWQAGRVATTPEELRLFADSLAPSDEVALEATGNTYAIATLLAARVGRVVVSNPGKTRAIAEAKVKTDKVDAAILAQLLAADFLPPVWLPDAGTHALRRQVIRRAHLVRQRTRLKNQVQAILARNLVPRCPAADLFGHKGRAWLAGQPLPADERAAVAALLRQLDFYAGELAEIDAALGREGLRRPQVRRLMTIPGVDATVALSLVAAVGDFTRFRTGDQLVAYLGLNPRVRQSGGQPATHGRITKAGRAHARGMMVEAAWAASKTPGPLRAFYQRVRSRRGMQIAVVATARKLTVLCWHLIVHDQDYVFARPSLTAKKQRALELRAGLPARRGRKGSAAAYSLKEIRRRENELTEQAEAAYQHMVSGWQPRPRPGAPARTC

SEQ ID NO: 153756 - protein, 367 aa, unidentified
MSVYVGIDVHRKRSQVAVVTEDGTVQLNKNTVNGTAPILRLIGDLPAGTPVAFEAAFGWSWLADLLEDYGFEPHLVHPLRCKAIASARLKNDKVDAAILAQLLRADLLPEAWIAPLQVRQLRALLRHRTGLVRLRTQLQNRIHAVVADFGYDRSGSYLSGPGRGWLAELQLPAVSRELVTDYLAVIDGLAPLTDRIDGELRQHAKADPRVKVLTTLPGVGQFTALVMLAEIGDITRFGSARKLASWAGLTPTVRGSDLHVRHGHISKQGSAWLRWVLNQAAQTAKRSPEFAATYQTIARRRGKKIATIAISRKLLTRAWHLLQAPGPAAPEASTASAAHPQTGRVTQPRARSHIRHEPATGRARSSD

SEQ ID NO: 153757 - protein, 418 aa, unidentified
MVKNRIPVCHVAVYLRNAACLTTNTMNKPTEKINRIIGLDMHPDVFAAAALEKTTADLSKVLWVQDRVPTKGIERWAKKYLTAGDVLVLEASGNSFEVASRFHRLGYTCLVLESCQAAKIKDNFCNDDRHSAIKLARVYLSGLAKLVWQPDEETRQMREIFFSHRASVKDCTRLRNRIRTFLNEYCVRLPKGTRLTQSSGLNCALKAREWSTLQSELLRERFEQLWQTEARRKRLEKLMVELLLERPEWAKLWRLMGVRHIVAFALMAMIGDIKRFPNAKKLVGYFGLSPSKVQSGNNAKGREKGTGNTGRGDVRALLVQAAQNAMTQKSSPLHKWGWKLTMKKNKNVAVAAVARKLTTAIWHLLQGHFTQILEIGKHLETKLLKLATVLGRERIKELGFKRRQDFVLHHFNIIQLST

SEQ ID NO: 153758 - protein, 335 aa, unidentified
MVKNLDTAFTKTAKPNYYLGFDTAKAKLDYSLIDVQGIEQTYGTVTNSAVEIVTLLLTIGGNYPSEVVRCVVEATSTYHYALLEAAQAVGLQCIVYNAILTRQQINSSIRGKKTDRSDAFLVARTGWSGGGRIHTPEVNLATKHFARGCHKLSILSSSYAQYKHHFTELLDGELSSDALELLIGIQTAIKEARAQLHKDLASSAQGETFHLLQTIPGIGPYTAASIIGEIQDITRFPKAKHLIAYAGLDTKIRQSGDALNSTGRLTKRGSSYLRGSLFIGASVARQHDAQFRALYDKKRAEGRTYKEATVVVARKLLLVVRSVWLSGNNYKLPED

SEQ ID NO: 153759 - protein, 391 aa, unidentified
MKSDGSKHSSFTVQNNLGGAKQMAERITSALNTMQLSDVVIGMEATSVYGENLMCFLREDGRIGQFNRRLHLLNPKQVKKFKDAYSDLPKTDSVDSFVIADNLRFGRITAEVYMDDYRYRALQNLTRARFYTVSNLTKEKNRFLNYLFMKCSGLAQEKVFSDDCSATAVAVAETFESVDDLAYMGLEELTDFIAKSGRGRFENPERTAKAVQAAARGSYRLPKTVNDSVNQVLSISIATMRTLEEQIKTFDKAIAQHFDLIPNTLTSIKGIGRVYSAGIIAEIGDINRFESHASVAKYAGLVWNQNQSGDFKGENTRMIKSGNRFLRYYLMEAANSVRRCDPEFMRYYDLKFKEVNKFQHKRALALTARKLVRLVFRLLKDNRLYIPPELN

SEQ ID NO: 153760 - protein, 336 aa, unidentified
MLYVGLDVHKRFWSCCVLDERLRKRAAVVLPGEVDALVRFLEHLGERYSICFEASSQYGYLYDRLRPHAERVAVAHPAHVRLIYRSKRKNDRLDAQKLAKLLAIGAIPMVHVPSGEIRALRSAVVARERLVGECTRCKNAIRALLEANGIRPPKRLWSKQGRRWLADVELAHELYAERRDLLLEALEQAMARLKRLERSLNKRSGRLPAVAVLRTIPGVGVRTAEALVAFIADPRRFTSNKTIGSYFGLVPKEDSSGGCQRLGHITKNGPSVVRRLLNQAAWQAIRRSPQLRSFFEKIRRGKKERRKIAIVATMHRLARVALAMLRSGEAWRWQEA

SEQ ID NO: 153761 - protein, 326 aa, unidentified
MTLSHLTDNTFVGIDVGGAGLDVAWHRGDSAHYANRPDAIATLVERLRTGPEVTRIVLEPTGGYEKPLVKALRQAQLPVEVIHTTRFNAYRALVGVKAKSDTSDARLLASYAAAPDEVRGRKSGHVELPEDAIREALSELASRRDQLKYMIHAETCRLGTVRLAELRQAITAHLEALRAEDKQVHRMMLELVRQRPDLRRDQRLLKTIKGIGVKSALGLLASVPELGRIDNKAAAALIGVAPFVRKSGTMIAPARIHGGRAAVRSILYMAAVTASRHNPVLRPFYERLIAKGKPPKLALIAVLRRLVVFANAVLRSGQPWRGASAT

SEQ ID NO: 153762 - protein, 315 aa, unidentified
MVEQVVVGIDVSKAKLDVALLPGGEQFTVSNDRHGIGELLRRVSPLAPSRVVLEATGKLEQLAVSELAAAGLPVVVINPAQVRHYAKARGKWAKTDPIDARLIAEFARDLEPELRPLPDAETQALAALCQRRNQLLEMEQMEKSRLQRAPRANQKSIKAMLRFVRRQVEQVEQQIEHSIRHSPLWQAKRELLESMPAIGKVNSSTLLARLPELGQFTRQKICALVGVAPYNDDSGQWHGRRHIAGGRGGVRQVLYMATLSAVRCNPALRDYYQRLLGRGVEPKAALIAVLRKMLTILNAMVRDNTPWRPPCPTPA

SEQ ID NO: 153763 - protein, 343 aa, unidentified
MQTVTTIGLDIAKSVFQVHGTDAAGQVVIRRQLKRRAVLAFFQKLPPCLVGLEACASSHHWSRELQALGHAVRLMPPAYVKPYVKRQKNDMADAEAICEAVTRANMRFVPTKTPEQQGCLMLHRTRHLFIRQQTAVINSIRAHLAEFGIVAPVGRKGVMELLQVVADPSDKRVSEVARACLAALGNQLLGLKEQILEFDRMIMAWHRSNEPSKRLRYIPGVGPMLATALVASVADPKTFRSGRNFSAWVGLVPKQHSSGGKDRLGSISKQGDRYLRSLFVAGALSVIRYAKIHGTKHRPWLTALLARKPTKVAAIALANKLARMAWAMMARGARYRNPVALAA

SEQ ID NO: 153764 - protein, 402 aa, unidentified
MNCVGIDVSKGKSMIAVMRPFGEVVVSPFEVRHTANELSELAGLLKSLDGETRVVMESTGNYHAPVAWLLHGAGFYVSVVNAMLVHDYGNNSLRRGKTDKKDAVKLANYGLDHWLTLPRYVPEEDTRLMLKTCYRQYQQYSKVQTMLKNNLISLLDTTFPDANRLFTSPPRADGSEKWVDFVATFWHCECVCGRSEKAFTTQYQKWCRKHGYNFSEDKALDIYASACRHFGVIPKTDTAKLLVEQAISQLQTTSSALAALKQEMQSLAASLPEYPVVMGMFGVGPTLGPQLLAEIGDVRRFHSKKALVAFAGIDAPPYQSGQIDVRSRSISKRGSASLRRTLFLVMGVLLQCAPMDEPVYQFMNKKRSEGKPYRVYMMASANKFLRIYYASVKAYLESLEHD

SEQ ID NO: 153765 - protein, 339 aa, unidentified
MSRYLGVDLHKNRFTVSFYDADSKKHRVKSFELKEMSSFRKELRRDDVLGVESICNTRYFVEQIIDCVAEVKVINPSQFAVVAKSVKKTDKNDAKTIAEFLSKGMVPEARLKEKAASQICSLAGTRDKFVKLRTVFKNKIHNLLNSHGINTAKEEFSSDKSLRIVQKYELDAVVKIELAALVREIKSLNRNIKDLDKALEEWGKKLDGYENITSIKGIGKNSGVILLSVIGKIDDFESEKKLAAYFGIVPRVHQSNEKEWQGHITKRGSKLGRTTLVQCTLVAIKYSPYLRAFYDKIKIKKGSGKAIIAAAKKLLGIIYYTLKNRLIYKDFPMFVIKET

SEQ ID NO: 153766 - protein, 423 aa, unidentified
MDILYERVAGLDVHKDTVVACVRIVADGKTKRECRTFATTTEQLAELRAWLEECRCTHVAMEATGVYWMPVFRILGEGKFELIVANAAHIKNVPGRKTDMNDAMWIADLLACGLIKASFVPTEEMQELRSLTRTRKQLVREQTRHVQRIEKTLAEANIKLDSVISDVMGASGRRIIEAMIAGVRQPRKLADLASKQIKATPKELYDALHGRLTDHHRFLLELHLRQWDGLDETIRTIDQEIDQRITRMNTTAETCKVPFRTLIELMHTVPGVSAVAAPAILSEIGRDMSRFPTAGHLVAWAGLCPGQNESAGRRKSSRLRKGAPWLKTMLVQCAWAAKRKKDSYYRAQFFRLQSKRGPQKAICAVAASILTAIYHILKDGTEHHDLGVGYFDRRPIQVKANRLVIRLKKLGFTVQLQPLTEAA

SEQ ID NO: 153767 - protein, 342 aa, unidentified
MDIVVLGIDLGKNSCSVAGLDASGRVVLRRRMRRETIAGFARQWSGCMVAMEACCGAHHLGRQLAAQGHAVRLMSPEYVRPYVKAQKNDDRDAEAIAEAATRPTMRFVEVKSEAQLDLQSLHRARERLVSERTALINHLRALLLERGIVVAKGRRKLERALEAILAEDGPGLSSRIRQLARDLREEWQALDERIEAFDAEFVRHARTDEMARRLATVPGIGSINATALVAAVGNARAFARGRDMAAWLGLVPRQMTTGGKPKLGGISKRGNRYLRKNLIHGARAVLPRLAARDTPLGKWVQGLLARAHKNAVVVALANKLARIAWAVLAHGRSFEAAQVTVG

SEQ ID NO: 153768 - protein, 408 aa, unidentified
MQVLYARCAGLDVHKDTIVACVRCVSPPMHQEVRSFGSTTTELLALADWLGEHDCSHVAMEATGVYWKPVWHVLEGEFELVLANAAHIRNVPGRKTDVNDAMWIADLLAHGLIRSSFVPPQAIQQLRDLTRTRKQLVREVSQHSLRIQKVLEDANLKLGSVLSDVLGKSGRAMLDAIVAGQSDPAQLAALAQGTARHKTAELREALRGRITEHHRTMLRLHLQVIDALQRTLAELDTAVGKALAPIRQRARLLTTMPGVSDLTASVVVAEIGVDMSRFPSAGHLISWAGLCPRSDESAGKRRSTRVRKSGTWIKTTLVTAAWAAVRVKTSYLRAQFLRIKARRGAKKAILAVAASMLTAAYHMLRDGTEYNDLGSEHFDHQDRSKTIRRLLKRLQDLGCDVPELAHAM

SEQ ID NO: 153769 - protein, 344 aa, unidentified
MDNHTQYSGFAGVDLARKVMQIHFVTGDGEITDKQVKRAEFLDFFRNRTKCLIGMEACGASQDWARKLEAMGHEVHLMSPKAVKPFVSGQKNDYNDAIGIYKAMFNGVRRVPVKSTEIRDLQTLRRIRSQVTKDKVKEINHVRGLLAEYGIVMGKSITAFNKGISSALESLKERGDVSPLVAEELQTTVESIKTKIERQKRLDREIEQLARGCKNYENFLKTPGVGPFTAAMLCVLLCDPAIFANGRQFAAYIGLAPRSRGSGGKNFIIGIPSKFNCDSESRAVFVECAQALARYKNKSPWVDGILRRKPKKVAVIAIANKLARQVWAMANKGESFKQMTILTA

SEQ ID NO: 153770 - protein, 440 aa, unidentified
MDRVIIGVDPHKLSATIEVVDHEEAVLGSGRFSTDRAGYAAMRRYARAGPDRLWAVEGANGVGRPLAQRLLEAGERVVDVPAKLAARVRLFDTGHNRKTDALDAHSIAVVAVRTRNLRVLKVDGELEALRLLADRREALTRRRVQTVDRLQALLAELLPGQAKKDITALQAKALLAGVRPRDVAGMTRRRIAAEELAELIAVDTKIKKATAELKAMVLARDSRLMDLHGVGPVVAARILADVGDVARFADRNRFASWTGTAPLDASSGEHNRHRLSRAGNRRVNHMIHIAAVTQLRLNTEGRAYYRRKRAAGKKPMEAMRCLKRRISDAIYRQLVADAERAARAAPPGTLSASPGGHCGASQESSAVDLPPHIDTSDQPLPGPARPTLPAATTPANPHAASAPQPPRRRAGAVNVERPTGRTTLTATSAGAPSTKPKPRS

SEQ ID NO: 153771 - protein, 403 aa, unidentified
MAHGTRWVGLDAARVAALAALDVRDEGDRNGRSPVVMGLDQHRAQITAEWIDLATGEISRARVAPADRAAVRRFLARFGGRELEVALEATTGWRFVAEELERVGAGVHLAEPAETSGLRGPKKRAKTDWADARHLRELLLIGRLPESWIPPQHILDLRARVRCRHTLSHQRTEWQQRIQSVLYHHGCPHRRDLMTADGREWLAAQRLPQTAREQVTIALAMIDAFDVQLAPLTKELRDYARRQTGCTALSDGHYGIGALCAVTILAELGDARRFHNSRDAVRYSGLDITVKQSDQHRAPGRLSRQGPPALRWALYEAAQQARHPRSPDRDYYLQVAQRIGGNRACLALARKLLKRCYRTPPRPRRGRAHARIRRGCSCAPSPPSNRCVAAGSPHSAADTSWTA

SEQ ID NO: 153772 - protein, 355 aa, unidentified
MDNKVNEQRSIDLFIGIDVHKRNWSVSIFTSQIHHKTFSQSPETEALKVYIDSHFPAAKVTCAYEAGRFGFWIARKLQSYGYQCLVVNPADIPSTSQESQNKTDPVDSRKIARTLQAGLLNSSYIPSETVEGDRQLFRYRKRLWSDLVRIKNRIKGTLMFVGVTLPAQYDNAYWSKAFLRWLSEVSLPSVSCRKTVDLLLVQYDHIYKHFLNTSTAVRKLLRTARYQDNAKLLQTIPGIGPLTAIQLLTELDEIKRFPSFKQLNSFVGFKPTTYSSGNHDWKGHLSIRKHKALRSALVECAWQTVQKDPAMLIKYDQLTKRMTKKRAIVVIARKLLSRIYHVLKYQEPYQIGLVR

SEQ ID NO: 153773 - protein, 340 aa, unidentified
MTITTVGIDLAKNVFAVHGVDQNGRTVLVKPKVSRAALPELIASLPPCVIGMEACSGAHYWARLFRQYGHEPRLMAAKFVSPYRMAGKSGKNDAADAQAICEAVRRPHMRFVPVKDESQQAMQCLHRTRQGFIEEKTATYNRLRGLISEFGVIAPQSADALRHMVSVQKSSLPLQVQQCVDDLMEHVDRIEANITEYDRILSHIAKTDHRSQRLMELKGVGPTTACALVASIGNAHDFKNGRQLAAWLGLTPSQYSSGGKSKLGRITKAGDSYLRTLLVQGARSVLIGAGKRTDSFSRWVCSLVDRRGYWRAVVAIAAKNARLCWASLHYGDDFRLYSAS

SEQ ID NO: 153774 - protein, 321 aa, unidentified
MTYVGIDVSKVTFVVAYSSVKTNKTRTFKNTVNGVHEFVQTISASEHNCVLEATGNYSALLVYLLSEAGITISLENPLKIKNFARVMLTVTKTDEIDARLIALYGEKMQPAPYKLRSDAILVLKQKRTVLRQLKKQLVATRNLKGSMEVLPFFDPKCKKTIEKTITFLEKQIKEMEEELASLAQGEYKKQMDLLTSIKGIGVTLAAALIVATGRFSYFDNAKQLTRYLGLSPTYQQSGTSVNVKGHINRNGDSSLRSQLYVAAFSSLRCNTECKACFDRLRSNGKPGKVVVIAVANKLVRQVFAVVTQGKPYVDGFKSEKP

SEQ ID NO: 153775 - protein, 345 aa, unidentified
MYYIGIDVSTKESALCILDAKGKIVRETRLPTDPEIIARFIAATGLAIERVGLESGCTAAWLFAGLQRYGWPVICIDARHAAAALQAGFRNKNDRNDARGIADLMRVNKYRPVWVKSPEAQRQGRLLTARATLQSQLVALENTIRGLLRQEGIGLTDRRTAFEAAVREAIGDDRLLEAAVHPLLETRNAVLQNRATLDRQILHIVRADPVCRLLMTAPGVGALVSLAFKVAVDDPRRFSRSRDVGAHFGLTPREYSSGEVSYHGRISKMGDREVRRLLYVAASRMLRRDAALWCPLKVWAVRLAQRVGIRRARVALARKLAVVLHAMWSDGQVFQWRRAEASASA

SEQ ID NO: 153776 - protein, 400 aa, unidentified
MISVGIDVSKGKSTVCILKPYGEIVSKPFNITHTHKDLSELSSMLFRLNDEVKIVMEATGIYHLPVLTYLQEKGFFVSVINPYLMKSYRNESLRKAKTDKIDSRIIANYGIDHWFKMKEFQISGVIYEELKLLGQQYRHYMKLHLLSLAELTHLLDLTMPGIKNLLASWNETNRKDKRSDFVERFWHYDVITSMSEQEFTEEYILWAKEKKYVPSQEKAKVIYTLAQESIPTLPSETSSVKMLVTEAVRVLKEVDATLGLILSRMQEIAKTLPEYSVVREMGGVGNTLAPKLIAEIGDVRRFRNGKALVAFAGIDPPPYESGQFVGCNRKISKRGSASLRKVGYETMRSLKMRSRPEDPVYRYVVKKESEGKSKKSAKIAGLNKFLRIYYARVTELYKNI

SEQ ID NO: 153777 - protein, 322 aa, unidentified
MYEKKTFDASLMSADEKELSHKSFDNTPTGIQSLLDWIAGYHLSLSKLLFCAENMGSYVTELSVSSVSMGFSLALVCPLTIKKSIGLQRGKNDRIDAKRIANYAVLHYRKLELYKLPDKDLVRLRGWIIIRDNLVKQKVSSIKLLETFSWMAKLADVTESISFLEEQLKSIKERILEVEEDMEQLIAASTSLYTNYLLLRSIKGIGIINAIVLLCVTDNFQRFDNPRKFACYCGVAPFEHTSGISIWGKTQTSSLANKEVKVYLTRAAITAISWDPQMKAYYKRKIAEGKHKASVINAVRAKIIARSFAVIRRQTPFVTLAV

SEQ ID NO: 153778 - protein, 400 aa, unidentified
MEVAKLAHTVPAIWIGVDAGKEFHWAHVLDAQGTRLLSRRVENDEADLLELINEALSLAEEVVWAVDQPGGGAALLLALLWERGQRVLYIPGLTVDRSRDAYRGESKTDARDARVIADQARMRSDLGELTPSESDLAELELLLARRRDLVADKNRGVTRLRETLLSLFPALERALDLNRSGPLTLLTHYQTAAPIRCAGRKRIATYLRNRGVKGANGLAQKALTAANSQSVSLPAEDVASSIVAELAEEILTFKERIEALDEELGERFFARPEAQIITSLPGMGLILGAEFLVCVGDLSTFESADKLAAYAGLVPAAHDSGKRTGNDRRMRGGNKVLKRAFYQSAFASLRSSSASRAFYDRKRREGKRHTQALIALARRRVDVLWAMLRDGTTFKTPSSA

SEQ ID NO: 153779 - protein, 392 aa, unidentified
MRFVGIDIASERHVVAIVGDDGTVLVKPTGIGEDVGGYEKLFGLLGEPAGTLVAMEATGHYWKNLFAALAARGFPIALLNPLRTHRFAAEDLERTKTDAIDAVGIARFAAQKRPVATRLPDSATEELRELVRHRDRLVQDFGDRTRQLHRLVDLGFPEFTRYVRTLDSKLATAILHEYPTAEAFFGVPWKKLAKYRYDGVHIVGDDLAKTLIETAKVSVGRHHALAYRIQVQHTCEDMDLLRRRIKQLDSNIETKLGEHEVGTLLTSIDGLGPQTAAKLVAELGDPAWFRGPEALAAYVGVVPALRQSGKRSPNRAGLTSIGNARLRAALWMPTLVAVRRNPWLKAHYERLRARGKLPKVALVACMRKLLHAVYSVAKHRRPFVPELASDHA

SEQ ID NO: 153780 - protein, 411 aa, unidentified
MQYFIRKEGMPMLSIGIDVSKGKSTVCGMKPGGEIVYTPFEIQHTREGMSELLSLLRGSGEEVRVVLESTGSYHCPVVAALLENGIFVSVVNSLRMKRFCSQSIRRVKTDQIDAMQIALYGLAYWQELQPTRLPENTYRELQLLARQYYQMTSLLIKAKVDFNALCDQVLPGMQELMNDHAGRHKLSDFVLRYRHTTHILEMGETRFRKDYCKWAEKKGYRNRERMAALIFATAQNGIPVLPNAPSTQIVITEAIRVLHTVEASRDAILTQMQALAKTLPEYSLVREMPCIGDTLAPRLIAEIGDVRRFHSKRALIAYAGIDAPPYQSGKFCANNRHISKRGNRYLRKTGYEVMQSYVMHKPANDPIFTFIEKKRSEGKSGKLAMVAGLNKFLRVYYGKVTELYRSLPAIE

SEQ ID NO: 153781 - protein, 323 aa, unidentified
MTRIICGVDVCSKFLEARIGQQGAANTFPNHPEGISALGAFCQAHQAELVAMEATGGYEQQAFALLSEQGLGVAILNPRAVRQFAESMGRLEKTDRIDAAMIAWYAEVKKSKALCLAPQSQQHLRALVTRLRQLTEVRTAQLNQRRLVTDRSVQASFTKMLAFLGGQIRDLEQRIAKLIEQDPLWRELNQAFRTIKGVADRTVARMMAEMPEIGTLPNKTISKLAGVAPLARDSGKYQGKRVVRGGRASVRDLLFIVASVVGRYEPDFVAFQQRLKKAGKPPKVIRIALAHKLLVRLNAKAREVRQRLLGLPSSSPVLLLETI

SEQ ID NO: 153782 - protein, 347 aa, unidentified
MIYRNFVGLDVHARTIVGCVIDVDTGEVVHRRFGYELAEVVAWIRSLPGVSKSVYEAGPTGFGLFRLLTGAGIACVVAAPSKLQRPSGERVKTDARDAFHLARLLKLDEVVAVHVPSVVEESARDLVRSREDTRQELMGTRHRLSKLLLRHGFVYCDGQAWTQKHDLWLRRHRPEDPVLQITFDANYEAVLQATARRDRLDDAIGVMAAQSQFTPLVDRMGCLRGIGALTGFALAVEISDWHRFTGNTIGAFLGLVPSERSSGQTRSLGGITKTGNSHARRLLIEAAWQHRRNYLPSVRSVLQSRWEKAPVEARLRGQAGNERLHHQWVKFTLRKETAGGGKRRDRP

SEQ ID NO: 153783 - protein, 388 aa, unidentified
MTNGYYVGMDVHQRTTSLCLMDGEGTVVREWKVRTAPKELDELHRELRRLCGDTPVTLGLEASTAGKATFQHLRKLGRNVAMAHPRALRAVTTSETKTDSNDARTLAHLLRLSFFPRSYVPEEPIERLRTLVRLREEQVDKLRRAKIQVRTLLVKHQLQHESLKYDDIFGVQALHWLKGVDLPDPYAQRQLVLLLEEGALYARQVDELTRELAKFGADEKTVAILQSVPGIDYVLALTILAEVGDVHRFPNRRKFAAYCGLVPKNRDSGEVVGRHSKLRHGSSRLKWALMVAVQAIRKSGKGRFAILLRRLEKRIGTPKALAAVAHRLAFTVYGLWKTETLYDEISAQQYAWKRRRLRRHAAEAPAAPRPVEAVERMLKQIGAMGVGS

SEQ ID NO: 153784 - protein, 340 aa, unidentified
MFLLGIDIAKLNHVASCIDSSTNEVIFSNFKFKNDFKGFSALLNKIKSFDTKNLIIGLESTSHYGENLINFLFRHDFKVTLINPLQTSHLRKANIRDAKNDNLDSLNIAKSLLFTKLNFVSEKNIECFSLKKLTRFRSNLIKQRSKAKIQLTSLLDLLFPELQYLFKSKIHSKAIYSLLKKYPSTEEIVALKDDEISNLLYASSKGHFKKEKSIELKSLAKTTVGIKDTSISLHLIQLMELIELYTKQIKDIEIKITDTVNKLDTTLLSVPGISIIACAIILGETNNFENFSSSKKLLAFAGLDPKIRQSGNFNASSCRMSKKGSPYLRYALIFTAWNIC

SEQ ID NO: 153785 - protein, 398 aa, unidentified
MSSPTSKRRRSSVRVSASAASSKRSEKRQRTQPAGDRLCLGANNAVTKLDPRRSSGLSPNSRLSRREACLAPSSHPQERVLPVPDSPPQVFVGIDVSSEKLDLATLPASQPSSFVYDDKGLAALREKLLALKPHCIVVEATGSYHRRLVVMLWTSGLPVAVVNPRQARDFAKGVGHLAKNDRIDAQMLARFGQQVAPRLTPPSSENATLLTELAARRQQLVGMRTAELNRQKQVLSKKAAKSIATIIKALDSEIDNLDDDISSLIQSDQRMAEIDALLQSVPGIGLKTSSLLIALLPELGSLNREQIAALVGLAPYTHESGKLKGKRCIWGGRAPVRTALYMATISALRCNPKITAFGERLKAAHKPFKVLVTACMRKLLITLNAIIKTAQPWTPQNA

SEQ ID NO: 153786 - protein, 364 aa, unidentified
MGWTPPDGIDVPEWRCFTPLEEASVTEVTTIGLDIAKHVFQAHGVDATGRAVFRKKISRAKLLAFFAAQPRCLVALEACGGAHHWARELIKLGHDVRLIAPAYVKPFVKRQKNDAADAEAICEAVQRPAMRFVAVKTEAQQAAALVFRARDLLVRQRTQTINALRGHMTEYGWVAPQGPSHMAKLAELLEDPLAVPGPVQAICRVLLDSLAMLDRQIAVLDKEIARRAQEDEVARRLMTIPGIGPITATAITALAPPPETFTKGRDFAAWVGLTPRQHSSGGKQKLGAISKMGERTLRRLLIIGSSAVVLQASKRGAPKGSWLAHMLARKPRMLVTVALANKTARIVWALLVKQEDYQAPAMTA

SEQ ID NO: 153787 - protein, 428 aa, unidentified
MIKANSIKLAAINPATLIVGVDIAKELQWARFTDYRGLELGKAVKFANNKDGFANILASIETTCKLRGFEQVIVGMEPTGHYWKPLANYLSLHELKVVMINPYHTKRAKELDDNSPTKSDRKDSLIIARLVRDGRYYEVYLPRDIYAELRVLSNTRIGLIKRQNALKNNITAVMDEYFPEIKTVFKHPLKGKASLQVLKSCPFPELILALGVEGVLAEIKKAVKRSVGRKKACALVEAAQSSIGVNYGLTAAHLKLRLLIEELELLTIQLEQVKGAMSLALSETGYKDLLLSIPGVGIVNAAGFLGEIGDPLRFEHPNQISRMAGYNLIEDSSGRNQSRTVISKRGRKNLRSILYQMALVMVAKNNEMKELYQYLKKRPDNPLKNKQALVVISKKAVTIIYHMVKKQACYEAELVFNQFRKNQMKQVA

SEQ ID NO: 153788 - protein, 340 aa, unidentified
MNIKRIGLDLAKNVFQIHGVDHHEKVVLRKTLRRAHMMTFFSGLSPCLIGIEACGSSHYWARELTRMGHTVRIIPPKLVKPYLKGNKNDANDAAAICEAISRPGMRFVALKSEAQQTLQAEHRVRARIIRERTALCNEIRGLLSEFGLVLPVGINHVRKILPEILSQQEQWNDRFIRLLCELSEEMQMLDERISRHDRRLQQAARDDIRIKRLMEIEGFGPIVASALVAAGGDAKQFKNGREMSAFIGLVPRQHSSGGKERLGHISKRGDSYLRTLLIHGARAVLRFSAGKTDRRSLWLQSVAERRNNNIAVVALANKNIRIAWAILNRGEEYHGVKNAA

SEQ ID NO: 153789 - protein, 405 aa, unidentified
MTFILAFDVSKGESYKVLYQDEYCLSEGKITHTQQGFHLLLEEIQSLPDTPEIVFEATGVYSRPLEKFCQDNHLFYSLLNPLEAKKQLEEGSLRSWKTDQADAHQLAQTHWKNQRPIKQLQQSHYLDLRDLSRFYQEIEEKIKRIRMDLHNALQLTFPEVEQFFSSRVTLYALSLIELFPHPAFVLSSSRTKIKNRLMKATRKKISENRAWQKADQLLAYASCAYPAVDSDSIQCQKVRYYACLLQDLLEQKDQLAQQMIERAQPFEAFQLYQSIPGIGELTAVLLLGELGDIQRFSTSNKLNAFVGIDIRRFQSGKYVGKDHINKRGNPKARKILYFTIRNMIRQQRAAPNHLVDYYYKLKKQPAPKKEKVATVACINKLLKCMYSMVRNHTRYAYAYTASNDQ

SEQ ID NO: 153790 - protein, 473 aa, unidentified
MKIGYHPRAPTPGHVDDVWYLESAPKLTRELPGPRIVAIEHAEQSREQDAPAGAGAHRRGGDAMERVIERCCGLDVHKKTVVACVRVPGRTSAREQQVRTFGTTTAELLALRDWLAGYGVTHVAMESTGVYWKPIFYVLEDAFTCVLANAAQIAQVPGRKTDVKDCAWIAQLLEHGLVRGSFVPPAPIRELRDLTRYRAALIGEHTRETNRLQKVLEDAGIKLASVASDVLGVSGRAMLDALTQGTHDPDVLAELARGALRRKLPALRQALTGRFRPHHAFLVSQVLAHLDYLDEVIEALSTHLDEVMAPFAEEVSRLDTIPGVNKRTAEVLIAEIGVDMGVFPTAGHLASWAGLCPGNNESAGKHRSGKIRKGNRWLRGALIQAALAGGTRATKGAFAARYRRVMRHRGHKKAVVAVAHAMLVAAYHLLARHTTYQEPGADYYERRHAERVRQRAVQLLERQGYRVTLEPAA

SEQ ID NO: 153791 - protein, 350 aa, unidentified
MIIIGCDYHPGFQQIAFVDTETGELQERRLQHREEAEKFYRDLAAQGMKVRVGMEASGHARWFERLLSELQFELWIGDAAEISSRRVRKQKTDRQDAQLILKLMLKDDFPQIWVPSWENRDLRQLLWHRHRMVQARTRMMNQLQAVALNEGLRCKKKLWREAGREKLESFQLAPWASQRRRDLLELLDQLNPTIAKLTQAIEEEVKRYPAAQRLRTHPGVGPLTALAFVLIIGKADRFQGGKQIASYLGLVPLEKSSGNQRRLGHITKQGNSLLRFLLVEAAQVTVRSLPEWRSKYCHLTMRRGRKIAKVAMARKLAVRLYWMLRKEWDYEQLTKFGSHAGQPGNRHGVK

SEQ ID NO: 153792 - protein, 316 aa, unidentified
MEVLYQSCAGIDVHQANIVVCILHGPLTSTRPKREMATFDTTTKGLRACHDFLSQFHVEAVGMESTGVYWRPVWHALCDDFELILAQPAHMKAIPGQKTDKKDAHWIAKLTRIGLLPRSFVPDETIQELRELTRQRKHYVESRNRETNRIHKILQSGGIKLTTYIEDIMGLSGRNLLQLLVDGTPITPRIVHQSVYTSLKKKVPQLLEALDDYFSDHHRFMLKQSLEIYDFYQKQIELLEERMNVYLSQYEKHVEILDSIPGIDVITASVIISEVGVDMSQFPTFGHLASWAGLCPGNNESAGKNEVPRFDTEIHI

SEQ ID NO: 153793 - protein, 361 aa, unidentified
MKKPAQHPISEGPRRQARVEITIGIDLGDVWSHYCTLNQDGLVVDRGRFRTTPKAIEKWFTDVAPARVAMEAGTHSIWISEQLQELGHEVIVANVRELRAISHSDRKSDQVDAEKLARYARLDPNILRPIAHRTVAQQEALTLIRARALLVRLRTAAVNAVRGLTKACGYRMPASATTCFAQRSLAVMPPGLAQALGPVLQQIADMTVKIKQYDRQIQQLGQTEYPETQALLKVHGVGHLTALTFVLTLGSKERFGRSRDVGCYLGLRPRRSQSGDHDPQLGITHAGNAYLRSLLIECSNHILRPHGRDSALRQWGLHLAARGGKQAKSKAVVAVARKLAVLLHRLWTTQEPYIAFYEQAA

SEQ ID NO: 153794 - protein, 333 aa, unidentified
MRKTIFIGLDISKLTFDACLLPENGKEKHKVFDNTDAGHAKLLRWVETLVADASVHYCMEATGSYNLALAQFLTEQERFVSVVNPFYTHHAALTGGQGNKTDKADARTIAHYAKAHTPPLWHMATPEVRLLTALLRRREVLEEQCQAEKNRLGTPGVLAPVVASLEKSLAFLKEEIRLLDHHIREHIEQSPRLRSDRDLLQSLPGIGTKTAEWLLGEMPDVHLFASAEALAAYAGLAPKQQQSGTSVKRPTRITRRGSARLRKALYFPAITALRYNPLVQALGERLQAKGLCAKQRIAAAMRKLLMLAYGVLKHQQAFDPKWKSVGTATTAEA

SEQ ID NO: 153795 - protein, 371 aa, unidentified
MADRKVGKVKGCRMNCLVAGIDLGDRESLATVLSPIGDVTDRFTFPMNEEGYAYFASRVPKDARVAFESTIMAYPISRALRMHGYSDVTVAHPKTLAWIVRSKKKNDRVDSLKIAKLHMAGMLPESHLLDRDQQIARDLLVQRVKLGVEIGRLKNSLIGYLKREGVYDSLPKTGDNFSIKRREAIRSLKFNDERDLVLSTMLDRLEFLERQCLPLEESVRANAKLSDDVRLLMSITGVDYYLASLTSSFIGDVNRFPSDDHLASFLGIVPTSRDSADVKRRGKMTKDGSSIARWALSVMVDTVMRHNEPIREYYVGVKKRTGSGKLAHVSTMRKLTRMLYHMLKARENWKWENPQLTERKMSKLEIGGDVS

SEQ ID NO: 153796 - protein, 348 aa, unidentified
MRFYTISHKHYCGIDLHTKMMYVCILDSDANILIHKNIPTNGKAFLKLIAPYREDIVVGVECMFSWYWLADLCAKEGIEFILGHALYMRCIHGGKAKNDKVDSEKIARIMRCGDFPLAYAYPAELRPVRDLMRRRSHLVRIKSEIQSHISITNYQYNLEPFDKNIVHKGNREGIADHFDNASVRLNVETDIAVMDSLHDQIRNLENYIIRHAKDYDGRMLYRLKTVPGIGDILALTIMYEILSIDRFPTVQKFCSYSRLVKCANESAGKKMGTSGSKIGNAHLKWGFSEAAILFIRGNDKAQKYVTKLSKKFGKGKALSILSHKLGRAIYFMMKRNDVFDMNYFFRNS

SEQ ID NO: 153797 - protein, 387 aa, unidentified
MSHSTPESDRIMIGIDPHKASWTAAAVGPGLQPLATVRVPVGPHGDLRRFVARWPDAIWAIEGAGGLGAPLAARLSADGIAAVDVPAKLAARVRVLSTGHGRKNDDADAISVAVAALSAAGLRTVTVDEEVTALRALVEHRDDVVKTRTQTVNRLHVLLTQLIPAGAPRQLTADTAAQLLRTVRPRSLGPRTLRRLAADLITEIRRLDRRITVANTEIADAVQASRSTLSELRGIGNLTTGKILARVGDVHRFRSAAAFASYTGTAPIEVSSGDVVRHRLSRAGDRQLNCCLHTMAITQLQRDSPGRVYYLRKRADGKSHKEALRCLERRLSDVVYRCLIRDADPQNGAGPRGHQGATTNSSATGSTPTAGSSDKSLPGPATTDSTT

SEQ ID NO: 153798 - protein, 402 aa, unidentified
MYNAVGIDVSKGKSTVAVLQPAGVIIRKPFNVNHTSSELDELAKYIGSLEDETRVVLECTGRYHEPVVKTLSEAGLFVSAVNPHLIKNFGNNSIRKVKSDPADAKKIARYTLDNWIELRQYSSMDNTRTQLKTLNSQFSFFMKQKVAAKANLIALLDNTYPGVNKLFDSPVRDDGSEKWVDYAYSFWHVDCVRKIGLKTFTERYQAFCKKHHYNFQPAKPAELFLASKDLIAVFPKEASYKLLIQQSIQQLNLASSHVEELRSKMNELASTLPEYTTVMGMYGVGKTFGPQLIAEIGDISNFSHREALTAFAGVDPGVDQSGTHNSKSNKASKCGSNRLRKTLFQIMSTLLQTAPEDDKVYQFLVKKRAEGKPYYVYMTAGANKFLRIYYGKVKECIRNLEQ

SEQ ID NO: 153799 - protein, 408 aa, unidentified
MKTLHKRCAGLDVHKVEVVACLRLVARGKASYEVRRFPTTTKGLIKLAEWLEAAQCTHVAMEATGVYWKSVWHMLEGRFTLILANAAHIKGVPGRKSDVNDATWIADLLAHGLIRASFVPPQPIQELRDLTRTRKQLTREIVQHTQRIQAVLEEANVKLSSAITDILGMSGRRILKAIVAGETDPAKLAELGGPQLAASRSDLADALHGRVREHHRFLIGQHLKTIEQLEATIAAFDTRIEAALRPFRDTIERLKEIPGLSQTSAAILIAEIGADMNQFPTAGHLLSWAGLVPRLDESAGKRRSTRVRKGAPWLKPVLVQCAWAAARKKNSYFQAQFLRLKARCGPKKAVVAVAASLLATAYHMLADGTCYQDLGADHFARRDPARIVAKLANRIRSLGYAVDIRAAA

SEQ ID NO: 153800 - protein, 312 aa, unidentified
MNEFVGIDVSKAKLDVCAHASGASFTVENNEAGLQQLCERLATMGPELVVLEASGGYERLCAAALAHAGLPVALVNARQVRAFAQATGVLAKTDRLDARVLAHFAAAVRPALRPLPDAQSQALDELLSRRRQIVAALVAEKNRLALARAPLVKRTVREAVRTYERMLDLIDHELDGLIQASPLWREKEDLLRSFKGIGPVSARTFLADLPELGTLNRKQIASLAGLAPIARESGAWRGRRSIFGGRGQVRAVLYMATVCAIKTNTVIRGFYHRLREAGKPAKVAIVACMRKILTILNAMMRNRTRWQPPVNA

SEQ ID NO: 153801 - protein, 418 aa, unidentified
MIDDQQTWAGVGELPEGNIAGRSTMHSVGIDIGKRQHVAAICRRGERTADKPVLRFGADRAGLADLERWLARHGPVERVVMESSGHYWLPLAAALHRASVPVAIINPVSANAFGKRRLQRVKSDPADARTLAALGMADQPRTREPLAGAELREAARFAMHLVTEQSRIDNKITRLIDLGFPELEQAYDDPTCRSALAVLRLAPTAAAVARKRVATLADANRLPGHRAVGTKKAERISALAKDTIAPPELAAQIGFEMELLIAQHDLLEQQIAQAEGRVAGLLDGELARRLQTIPGVGPAICATLIAEIGDIQRFTDFDQLVAYAGVHPAEKSSGQKGADPETSWHMAKTGNAYVRAALYRMSIVGLQHNPTIKAHYARKRAQGKSKMNAVGHCMKKSLAIVWGIWRGGHDFTPEPPIA

SEQ ID NO: 153802 - protein, 487 aa, unidentified
MHPRTTNKFLETFDVYRFSFESAGALALDNEYSGLAVLPAHYIAFADRKRARPWTSIYHCGRYDVKPLATQQFTAYVGIDWADTKHDVCLQVPGNELREFDCIRHQLADIDQWAQSLHQRFGGPIAVALELAKGPLVYALQKYDFFVLFPINPLTLAKYREAFMPSRAKDDPTDAELALDLLMRHPERFTPLRPQSVQMRTLLSLTEHRRELVGDKTRFTNRLTNTLKQYYPHALDWFEQHDTLLFCDFLTRWPTFPQVKRARRASLEAFFYAHNGRRPNVISARLGAIKAAIPLTEDMGVIAPCRLQVLVLIEQLRTTLQAIDRFDREIAQLAPRLPDYCLFQDLPGAGPHLAPRLLAAFGEDRQRYQHADELQKYAGIAPVTERSGKKSWVHWRLRCPTFLRQTFVEWAGQTINKSFWAGAYYRQQRAKGSSYQATVRSLAFKWIRILHRCWQTRTPYDESAYLNALRKRGSPLLKHLELDAQSA

SEQ ID NO: 153803 - protein, 346 aa, unidentified
MKITTIGIDLAKNLFQLHGVDERGKPALRRAMKRDDMLPYFANLEPCLIGMEACGSAHHWARKLIVLGHTVKLMAPQFVKPYVKSSKNDARDAEAICEAVTRPNMRFVPLKNVEQQAELSTHRARQGFIKARTAQGNQIRGLLSEFGIVIPKGIAHVYKRVPEILEDGENGLPGSMRQLILRLTDNLKGLDEQVVALGKEIKQLHAGNESCRKLAEVNGIGPLTASAMVATVGDAKNFDRGSQMAAWIGLVPKQHSSGGKTVLLGISKRGDTYLRTLLIHGARAVIRHAENKPEYADSWLGKLIARRGKNVAAVALANKNVRIAWALLTKESKFHPDYVAVKPTAA

SEQ ID NO: 153804 - protein, 363 aa, unidentified
MDVHKEKIVVVGLPEEGNHPVMREEFGGNDLSRLVKRLRQLAKSYRVEACYEAGPCGYGLARALLRAGMECRVAAPSLIPRRPGDRIKTDGRDARELALALRAGTLKFVRIPMKEEEEVRGLIRCREDIAKEVRRIKHVIAHWLLIHEQRALKGVKGWTQAHWRWMRGLELSSLDRTVLDHYLDVLHLLVERLRQIEQQVVALAETDPYRERVTRLRAFKGFSPLAAMRVIAEVMEFGRFPRAAAFMKFTGLVPSEYSSSDRIRRGRITKAGNSHLRCVLVEAVQRGTRKAHLGRDLLKRMACVSGSLREVALRCLTRLHHKFWKLTRRGVAGGKVKVALARELAGFVWAMMTLPETPDAAVA

SEQ ID NO: 153805 - protein, 343 aa, unidentified
MFYVGLDVHSSVIAVCVLDAGGQVVRRTKVRQLDQLVPVFELLQQPFQVCFEASCGYGRIAEFLQRYAARVVVAHPGQLSLIFRSKRKHDRIDAEKLAKLLALDMVPAVHVPHADVRAWREAINFRSAQIGKRTRVKNELRALLRSQGIVPPKRPGIWTKKGIEWLKALSFDQPLLRLRRNQLVLELEFLTQSIQQVEVELAKYSADDPRVELLQTIPGVGPRTAEALVAFIDKADRFSNAKAVGAYFGLVPCQDQSGGPNRLGRITREGAPVVRKLVTEAAWQGLRRSPTIRAYFDRIVAGGSTKSDKDRRKIALVATAHYLGACPSSSGGRVQNFLQYPNR

SEQ ID NO: 153806 - protein, 313 aa, unidentified
MKSKKPEDIGEIAVIGVDIGKDTFHLVGFDQSGERVLRKKIKRLSLKSVFEELPRCVVGMEACMSAHFVSRMLRALGFEPRIIPAIYVKPFNKGQKNDYNDAEAIAEAAMRPNLRTVTEKSQDQLDLQAMHRVRSRLVARRTAIINQIRAFLIEQGITVRAGRHRLQSSFETILENRRAEISPRMRRTLLGLYGDWLWVDERIKSISSEIEEISRTEENSAKVMTVPGIGPLISTAIVAAIGKGEVFDRGRDFAAWLGLVPRQFSTGGRTILGRISKRGNNYLRMLLVQAANVILMRPHPGMRSGLARGCAGL

SEQ ID NO: 153807 - protein, 315 aa, unidentified
MAMPVSASKPIVGVDVAKNELVIYHAELGLLEEIPNNKTAIKKWLKALPSTVAIAVEATNIYHLEFADLAYEAGCVIYMVGGYELKHYREGVKVRAKTDALDAKLLARYLKNEHEELHPWTPPSPLYRQLLSLFRRRAALVQARVGLVQSWANEPLLKTAFAEQVKSMQQLEMLIEKTINDQLKEAGLLGQLKRCLKVEGIGFLTGARLITAFQRGDFRNADAFIAFLGMDLRVSKSGQKDGRRSLTKRGDPEARRLLHNAAMSASRTEAWKDFYQEQRARGFSTTQALVMLARKLARVVFALLKGQDEYQPKVS

SEQ ID NO: 153808 - protein, 344 aa, unidentified
MEYYVGLDVSLRQTSICVVNQTGSIVQEGVVDSDPDTIASFVRSKAPGTVRIGIETGPTTTWLWTELKRLGLPVICIDARHAKAVLKMQINKSDRNDAVGIARIMQTGWFKEVRVKDLDSHSVRALLASRALLVKIKRDLENQVRGLLKNLGLVIGRAKFNVFAVRAEELIEGRPELVVAVRPLLEARKAIEQQVDDLDRKVQKLARHDAQVRRFMTAPGVGPITALCFKATIDDPTRFKRSRSVGAYVGLTTRRHASGEVDWSGRISKCGDAMLRMYLFEAAGVLLTRVPKWSGLKAWGAKLTKRNGLRKAKVAVARKLAVILHRMWIDGTEFNWSTKKAARA

SEQ ID NO: 153809 - protein, 385 aa, unidentified
MAPPRMPEAVIGLDVGKLSHWACVATRDGEILLSAPVANREGDLDSLFGRFPDALVVVDQSRNIGALALARAKAAGMSAAYLPGLAAHGAARLFAGDAKTDERDAMVIAKTALGIPDALLPVGDPGPTVAAARALAAQRNFLTCENTRSKNRLRSILLESCPAFEALVDLSDGPQLRLMASLGGAWSVADAGPRRAAALTRGAARGKIEALVRSTASSTRPDAAAIAAEDRAVRLLARRISENSAEIDVITAEISALLEGDDTYRCLLTVPGIGPKTASELAISIDIEDFPSHDRLASYCGLAPRNRQSGTSISSVTASRQGNKRLKNLLIFSCNCLTRTEGRWGDYYARCRERGMPHGKALKALARKRLKVIYAIMRDRVPYAA

SEQ ID NO: 153810 - protein, 477 aa, unidentified
MQEKKHIGLDLGVKSKSKVYIVDQAGEKVRPGFYIQTNPQELDYMMKQALKGTSNEASLDLIMEPTNVAWFKVAVYIRREYPQVKIYRVKSEKVQDLRKFYRKHTKTDSLDARALAKMPVVDFDSLEEVYIRPKDILALNTRCKQRARLVEEATAKRNSISDQIELGFPHLVDCFSSKFTTPFIRFCERYANPFKVRRLGKEKLLKILIKLGFRKDVSILAENIYQRTEEACVLFGGEDSIIDYDDFQDRIHSEFRIFKALQKEIDKVTKKLEDLYKKCFPEKRLNSIPGIADVLGAVITSTIGDPLRFSSARSLVGYMGYYPKEDSSGLSSKKGLRMTKAGPNIAKGSLYLAANVGRLIDPQLGKTYYEQMVVRGNPHTKAVCRVVTALIPRILRVMKEDRDYVICDLEGNPISKKEGRKIVKEQFFVPEEVRQRLSNRKRMPLNKKGRTKPQYVRGSKAPQIRVDSSPGIVFSLN

SEQ ID NO: 153811 - protein, 360 aa, unidentified
MNGHKYVALDVDSANIVAGVHDCKGKQVMQAHIRTNSSDIREFFKAMNGTVHVTFEEGTHAAWLYDVIRPLVAEVIVCNPRHNKLLQAGNKADKIDVAKLAKLQILGELQPVYHGDQTMEGLKHLVRAYQNLIADKTRVTNRLKALFRGRAVGCRGRGVFNEEQQEEWLGKLDIEGLQTRGGYLYEELKCLVKLKEKARKAMCLEASRHPAFKLISSNVPGLGPIRTAQIIAIVGSPYRFRTKRQFWSYCGLAVVTRSSADYEWVEGRTRRRKKAVQTRGLNKNFNRPLKAIFKGAAVCAIQKDEFKQYYQRMIDKKIRPEMALLTTARKIAAITLAIWKKGETFDPKRLNQAGQSTDNQ

SEQ ID NO: 153812 - protein, 340 aa, unidentified
MEIAVLGIDLGKNSCSIVGLDDDGAVVLRRRMRREGVIKFAGKLRPCAAAMEACCGAHHLGRVLRAQGHDVRLMSPEYVRPYVKSQKNDDRDAEAIAEAATRPTMRFVELKSEEQLDMQTLHRARDRLVGERTALINQLRAVLLERGITVAQGRRRLERHLAGLDAQGGLSQRMRVLIEDMRLQWRELDRRIAEFDKELAEWARNEEAARRLMSIPGIGVLNATALIAAIGQGGSFARGRDLAAWLGLVPRQVTTGGKPRLVAISKRGNKYLRKLLIHGARAALPTLLASPTLLGAWLRGLMARMHKNAAVVALANKLARMAWAVLRHGETFRFAVSATA

SEQ ID NO: 153813 - protein, 323 aa, unidentified
MPKTHSQKASAKELFDFLNRHYPEAEYHAVYEAGFSGFSTYYALKEYGIECSVVNAADVPTTQYESVMKSDPIDSDKMARALRAGMIRGIYIREKDNLDDRGLVRLRKSIQQDLTRYKNRVKHLLHANGVEIPEQFDRSPNWSKAFNNWLRDDVVLLSSTRASLDMLIDQVETLRQNLLNVTKKVRNLRCKDEYAEKYDALTSIPGIGPICAITLLTEIYDIKRFKNERQFASYLGLVPTCHSSGEKASFGEMTFRGNKHLGPLLIEASWVAIHWDDALSVAFTNYRRKGLMPQESIIRVARKLSNIIFSMLKTGNHYAPANA

SEQ ID NO: 153814 - protein, 478 aa, unidentified
MIHSVGIDVHKGRHRVYCLDERAQVCDAFSFQTTPEGLSTLGEHIFRDGSNPVVVFEPAGLSWLMVAAYLRSQRPECRLVKAKGQKVAALRRYLRTSAKSDRIDALTLAKMPFIDPERLDELYLAPAETQALLRLTRQRKRLEDQRTAQKKRIGAIVDGYLPGVRQAFSYAWSIRARAFFHSGINLFKVVREGEEALCRFFAQAKPRDKGEKAEGHLVYNACQNALAIVQLCQAAGSLNEEFYADLQDEIDRELRLMEAEEAEIEALDRRIEELYHRLHPSDNVRTIPGVGEHTAPVFVACIGDPDRFPSQSAFANWTGVVPGAKQSSETESKGLRMTKAGPAVMKWSLYQAGQIGRQWDPQLAAVYYRQMVYHGKNHKQAMGAVMSHVGARVFTVLRQDRPYQLRDTEGKPISNMAARALILAKYQVPEDIRKERRRSKGRKAHTTIAPKKEGTLVSSIHEAARAPQAVMTKSSPGP

SEQ ID NO: 153815 - protein, 375 aa, unidentified
MKEKVRFLGLDVHAETIAVAVAEPDGEVRSLGTIPNRGESIRKMIKKLGPAEKLRACYEAGPTGYVVYWQLAELGIQCEVVAPTLVPVKIGDRVKTDRRDAEKLARCYRSGDLTAVCVPDEGSEALRDLVRAREAAKQDQMRARHRLSKFLLRSGQRPPTGVRPWTRPYLIWVAQLRFTQVAQEATRQDYLHEVEHMRERVARLEQAIMEAVKLASPALQQVINDLQALRGIADISAVSIAAELGQVSRFGSARQLMGYCGAVPSEDSSGKRIRGGSITKTGNAHLRRIVGEAAWSYRPPPGIWYGLRRRQESISEEVKEIAWKAQHRLHKRYMKLGAAGKPQGKIITAVARELLGFIWAIGTRAETAVSQRAAA

SEQ ID NO: 153816 - protein, 352 aa, unidentified
MRKECSTVSFKNQVIYVGIDVHKSSWQVSIRHCRHHLANFSMNPDALKLAEHLSRNYPEAEYRSVYEAGFCGFEIHRSLCGLGILNIVINPADVPTSGKERANKNDCLDSRKLARELENGSLEGIYIPQEDNLVLRNLTRRETQLTGNIIRAKNRIKSHLYFNGLKFRSWSGSSLKIMESDAVKRHDFALCSLLRELRFLRLEKLQVVRDEKECLKFLNREKTQENLQSIPGIGFRTAVVLQSELWDLKRFPDKDHFKSYVGLAPRLVGSGEHEEVKSAGNRKKKQLHYLLIESAWRAARFNLEYRARYGLLIAKGISPQCAITIIAKKLLMSIHAVWTQERNFKVLLPGTK

SEQ ID NO: 153817 - protein, 446 aa, unidentified
MNHARLSEHRQFLAGKIVVGIDPSKDKHQAAVVDPQGSQMGRSFSFPTTRAGYDRLLSSELPKILGTSAPERVVFALETACNLWETLAFFLHNRGYTVVLVSPLSTHHARPILSIEFSRTDPKDAYVVATVAQRGAFTVYERFPAANNATHLLAITYDKLRKELAQNRARVRAMLDRLFPEFPRIINPHTDSAVYLLKRYLFPDDFLALDIDLESEALAKISRRQLGREELLELRAAACTSIGVVRQDDERIAERLALDAFLATIETLEHQFTQLERELLKRVEPLEQYQRLTSLSGVGKRLAALFLAEVRDLSRYTHFKSIEKLAGFNLRLFDSGRFTGTRHISSLGNARLRWILYKMAEETARRVPEVRRKYLRRQIKRRSHIRNVVACVPTLLQLIIAMEREKRPYQHRQDHLNELNELEAKYQALRAASPKNTKRKEAKAAA

SEQ ID NO: 153818 - protein, 346 aa, unidentified
MNNLNVVGVDLAKNIIQVSVITPAGKELQNKALTRKKFSEILARQKPSMVAFEACAMAHYWSRIAQLHGHTAKIIPAKAVTPFRQGHKTDSNDALSVAEAARRPNINEAPMKTVEQQGIQAIQRSRELLVHDRTALSNHIRGLLMEFGIVIPKGFAALHRRIPEVLEDAENELPDLYRPTLNLLYGRLITIKDDIDVLNKQIAAIVKQNVACDRLTRLEGVGPISSVLLYATLGTGKAFTNGRQFSAYLGLTPKQYSSGGKTVLIGLSRYVANKRLRSVLIQGARAYVHRLKDPKTPKERWLWALIQRAGYGRAAVALANKNARTAWALLTQGEEYKREYEVPLAA

SEQ ID NO: 153819 - protein, 316 aa, unidentified
MSTTLPTDCFVGIDVSSQTLDVCRLPAGEVFTENNSGKGIQRLVGRLKKTLPTLVVLEATGGYERSLVLALAEAGVPTAVVNPRQVRDFARARGILAKTDSIDANVLAQFARDLRPAPSEAPSERQLELEELLARRRQVIAMRTSEKNRRQQVRGQAVVKSVKTLLRTLDHEVTQLEERIAELLQQCVHATEKLRLLTSTPGVGPTVGQTLVIDLPQLGQLNRREIASLVGVAPHNRDSGQRRGRRCIWGGRSHVRSALYMAVLASLRCNHIMRAFYDRLRAAGKPAKVALTACMRKLLTILNSMLARNTPWKTTN

SEQ ID NO: 153820 - protein, 317 aa, unidentified
MALHRAFVGIDVSKEWLDLWLAPLKRFERAGNDGAGWAAVIGLLKSLGIEAGVVVAFEATGGYEQGLRRALLEAGFDVRRLNPLRVRLYAKSLGRNAKNDRIDARVIARYAEAADTTPDILDPARERLAELVSHRRRLVDERVAIGNQTSTLHCVLLQAQNRKRLALIERQIDETDALILEAVGQVPSLVAKVGLLKTLKGVKDVTAIALVALLPELGRITRRAIAALVGLAPFDHDSGKFKGTRSIAGGRAAVRTALYMAARAAARSKSPLGDFYKRLIAAGKSPKVATVALMRKMLVTLNAMIRDNEAWKHAKPC

SEQ ID NO: 153821 - protein, 388 aa, unidentified
MQNAADRPQAPTPIRTDLGAIFISMELSRTSWLLTSLSPGGGERMSKHTVRSGDVAALRTRFSQLKDKVRVRTGQLVPIIVIQEAGLDGFWIHRLLQDEGIESHVVDPASIATSRRRRRAKTDKIDGESLVRALLAFKRGEPRVCAMVRAPTPQEEDRRRVCRECKTLTAERIEHVNRIKGLLFAQGISDYEPLLHKRRERLEELRTGDGRPIPEHLKAQIGRELDRLELILRQIKSVETERDALLRPSEEGTPAPGSMLKTLKGIGAEFAGVLWLEGLFRSFSNRRQVAAYAGLAPTPWRSGSIAHEQGVSKAGNPRLRTTMIQLAWLWVRHQPRSILTLWFRQRVQLNGGRIRKVMIVALARKLLIAFWKYVTAGVVLEGAETTAA

SEQ ID NO: 153822 - protein, 324 aa, unidentified
MKNLHVIGIDVSKKTLDICVIFDEKTKKKSFANSESGFTALVAWINKLGLMNPHICMESTGCYGDGVAEFLYNAAFKVSVVNPLQIKGFRTSKMVRQKTDSSDSEIIAQFCRQNNPDLWHPKPRENKELHEINVRIEALKNELNRLTNSLEKKMLNKVVKASIDAEIAFIKKAIDKLETEVKKIIDRNDKLKHRFELLVGIKGVGPKMATTILADMPDVSNFKTAKQFAAYVGVTPSHFQSGTSVKGKSRISRLGSKTVRKVLYMCSLAVKNHNPFFSNWVQSLTKKGKAAKVIIVAIMRKLMHLFFGILKNNAAFNENLAFAP

SEQ ID NO: 153823 - protein, 334 aa, unidentified
MDKVTTVGIDLAKSVFSLHGVDGAGRVMLRRTVRRDQLIQTVAALSPCLIGMEACSGAHEWGRRFQGLGHTVKLMAPKFVAPYRKSGKNDGNDAEAICEAVTRPSMRFVPVKSVEQQALLAIHRVRQGFVVERTATINRLRGLLCEFGVVLPLRSVTVRRQAAAAAEKLPELARRAIGDLLEQLRVLDERIGGYDREIEAQARLCEPAQRLMKIRGIGPTTALAIVATVGNAREFKNGRQFAAWIGLTPSQYSTGGKPRLGHISKRGDAYLRNLLVQGARSVLNSASAHQDRMSRWILELQPRRGYYRTLVAIANKNARIAWALLAKGESMRSA

SEQ ID NO: 153824 - protein, 479 aa, unidentified
MAKGEEQAVVDVRQQKLNRSQRREFTRQLWSPDPGLTVVHPNAAGIDVGNSEHYVAVPPDRDEQAVRSFPCFTEDLRQLVAWLKRCRITTVALQSTGVYWIPLYDMLEAEGLEVYLVNAQHTKNLPGRKSDVQESQWMMKLHTYGLLNSSFRPGSEILALRCYWRHRAEHVQAAATSIQRMQKASTEMNLQLHNVISDLSGVTGMRILRAIVKGERDRNKLAAMRDSRIRASEEEIAKSLEGNWRPELLFVLQQELDTYDMYQRKLAECDVEIQKQMAALAARPQTLPAGESKTSTPSPKKYKRRGNAPAFDLRSELQRITGTDLTRIEGVDVMTAQTVISEIGLDMSRWRTEAHFSSWLGLSPSHDISGGKVLRKGTRKVINRAATALRMAASTLIKSKSYLGAQYRRFRTRLGAPKAITAMAHKLARLIYRMLKFGEDYVAKGEAYYEAKYRESQIRFLTKKAKELGLQLAEITTTV

SEQ ID NO: 153825 - protein, 379 aa, unidentified
MDVLMTRCAGLDVHAETIVACVMIGEQDDELFIETETFPTLTKDLFRLLKWLENHGITHIAMESTGVYWKPVYNILEDYFDITLANAQRIKNVPGRKTDVSDAEWIAKLLRYGLIEKSFVPPEDIRNLRDLTRLRKKWIGHLTSEKNRILKVLECSNVKLNSVISDVFGVSGRKLLSKLIQNGYVDSIDVEISIHGRMKHKKQMITDSLFGTLNDHQIFLIKQSWQHIVYLESLISQIEERIDEILKNYKEEVELLLTIPGIKKDSAAIIIAEIGVNMEQFPTSQHLASWAGVAPGNHESAGKRKSTKTTKGNPHIKTVLCEVAWAISRSRNRWLAAKYWSIAARRGKKKALVAISHRMLRIIYSMLINKEPYKEPLIN

SEQ ID NO: 153826 - protein, 416 aa, unidentified
MKAWSQITHYAALDWARDHHDIVMVDRSGAIVTEFRIPHSTEGWKDFRSRLAPFPDLAIAVETNQGPAVEQMAAAGLQIYPVNPRSAKHYRDRKRPSGVKNDRIDAWSLADALRVDGHGWRPLVPEDPLVAELRILCRDEVSLIELRTSLVAQLRYTLHRYYPAALEAFEDWTYPTCWDFLVQYPTPGILAAAGPRKWRAWLTSHKFHFPAANEKRYEVFARATELQGCAATVAAKSLTAVSLAKVLRTLEAQLRDFRRQIADRFEKHPDHALFGSLPGAGPKMAPRLLSELGADRTRFPSADVLQCYAGTAPISYQSGQTDRTLMRRACNLELRQAVHIWASLSMRKSAWAYAYYLKHRKDGQSHSCALRCLGQRWLNILWKMWQSHTCYDPDLHQKNQLKHGSWVLKLETENTR

SEQ ID NO: 153827 - protein, 412 aa, unidentified
MDETEVGRIASWVGLDVGKEDHHATVVSAAGERLFELAVRNDEAAIERLLDRALESGPCALVIDQPGSIGSLAVCLARRRGVPVAYVPGLVMRRASELYPGEAKTDRRDSFVLADTARTHARRLHWLEGSDETLERLRLLGGYDDDLAHDVNRTANRLRDMLLAVSPALERVLGPRLDHPVARALLARYPTPTALRAAGRRRLAPLAKRHAPRMGARLVDDIQAALDAQTVTVPAEETAGRVIRELAEELDRLADRRDRLAAEIEQTFTSHPQAPVLMSIPGIGARTGARILTEIGDINRFPTPGHLAAYAGLAPVTRQSGSSINGETRSRRGNHRLKNAMWLSAFCSLHHDRSRDYYARKRSEGKLHNAAVMCLARRRCDVIHAMLRSGLSYGELPGPARPAPKPEIALAA

SEQ ID NO: 153828 - protein, 337 aa, unidentified
MKLYGGIDLHSNNSYIVLMDSGGTVIQRSRVGNDMGLVLRSLAPYREQIDSLVVESTYNWYWLVDGLKEAGYPVKLANPSAMQQYQGLKYSDDRNDARWLAEMLRLRIVPTGYIYPEAQRPLRDLLRQRSFLVRQGQLLHTGNILCRNQGRKSSRQQIRQMTVADAQQLFPDRERTLAVESSLRVIEVLEQQIAAIEKQVLSRIKPEAGFQNLQTVYGIGPILAMTIWLETGDISRFHQVGDYASYCRCVASTRLSNAKKKGENNSHNGNPYLAWAYVEAATYAARFYRQASRFVERKTAQVNRTLAIKALAHKLARACYYVLRDGVVFEPTRLLGS

SEQ ID NO: 153829 - protein, 267 aa, unidentified
MFHVGLDIHTKHIAICALDEKGQVVHRSQVRTIQDLVRVLTGLPDRCEVCYEASCGYGHFHDLLRPLATRVLVAHPGQLRLIFRSKHKNDRNDAERLAKLLYLGEAPAVHVPSLEVRTWRELINCRSQVIAKRTRAKNTVRALLRSAGVTPPKSPGLWSKKGLAWLRQLELPTASQQLRRDLLLEEIEGLIRPVRRVEQQLNRQAGQTGAVARLRSIPGVGIRTAEAMAAFIDDPQRFGDAKAVGCYFGLVPCQDQSGDNCRPLGPR

SEQ ID NO: 153830 - protein, 480 aa, unidentified
MNNKVRRTKKQVNVENQAINLLEKEELKKKIEVVEKELRSYTWRELETNGKFAKNDKLSFITDDMLIVGCDIGSESHYIRAIDIRGRELSRGAYEFSNTVEGFENARAWMLELAAKNDKKQIALGLEPTGHYWFALATWMISNGISVVQINPYAVKQSKEIEDNSQLKDDRKDPKLIANLVKDGNYGMPYLPEKVYADMRRLSMFRDQLTEDRIRNINRLHRELKIYFPEYMDAFGKIDGAFTLEVLKVSSIPSEIVALGAEGLRDIWHNAKLRGRGYSRAGEIVSYAEKSVGLTDGTDVGREAVKWYAEQIMKLDEQLAAIESALHKKCREIPYAENILAINGIGENILAGILAEMGDISRFDDVKEIQKLSGMGLVACSSGKHKGQTKISHRGRKRLRYWLFQAAKSAVSHADEFKQLHEYYTTRTNNPLKKMQSLIVIACKILRVIYTILKTGTTYDPQKLLKDIKRPVLTQAPMAA

SEQ ID NO: 153831 - protein, 338 aa, unidentified
MSIYAGLDVSDKSTHVCVVDGEGAVLRREVLASDPDVIAKWLGRYCPDLVRVVLETGPLSAFLYHGMVARDVPVECICARHAKGVLSARVNKSDVHDAEGIAQMARTGWFKRIHMKASATHFDRAAIRIRAQLITARTAMINQLRGLLKLFGLRLGSARAPGKRTDRLIVLYAQRPDLEALFAPLMASIEVIEAQLRASNRILEKRAASDPVCARLMTVPGVGPITALTYTMSIEDPRRFARGEDVGAYAGLVPRRSQSGERDTQGHISKAGDPMLRRSLYEAANIILSRVRQPFALQRWGRKLAEVKGPKRARVAVARKLAILLHSLWLNETEFRWV

SEQ ID NO: 153832 - protein, 269 aa, unidentified
MDADGRIIREAKILSEPDALIAWFGAHGVAMERIRLEAGPLSQWLHAGMVKAGLSVELIETRHVRAAFKTMPVKTDKKDARGIAQLMRLGWFRPVHCKSLAAQEVRALLTARKLIQGKLHDIEMSIRGILRGFGLKVGPTTRRTFAGRIRVLIAGHSTLEAIAMALLKVRDALVHEFAGFERKLHAIARQDDNAQRLMTTPGVGVLVALTFVAAVDAPERFRSSRAVGPHFGLAPKKYQSGETDHSGRISKIGDMGVCAPRSSRRPTSS

SEQ ID NO: 153833 - protein, 348 aa, unidentified
MTIVEPVSARAVTGGVDTHLDVHVAAALDDIGGLLGVESFDASPGGNNRLLGWLRSFGDVARVGVEGTGSYGASLARSLRSEGVTVVEVDRPNRQARRRTGKSDPADALEAARAALSGRAQGAGKTRDGNVEAIRALVVAKRSARSTRIASLNQIRHLGFTAPDGLRERLRGVSRDHIGALAAGLRPRADSDPVMTATKTSIRILGRRVLALDDELAAIDALLAPLVAATAPSLLGLHGVGVDTAATLLVAAGDNPGRLRSEAAWAHLCGVAPIPASSGKVTRWRLNRGGDRQANGALWVVVITRMGSDPRTRAYVERRLKEGRSKPEIIRILKRYVAREVFGHLPRA

SEQ ID NO: 153834 - protein, 345 aa, unidentified
MPIVGGLDIHRKQITFDYLDTVTGEVKRGQIAPADREHLRAWLARFAGRDDAAFAVEGCAGWRYVADELAAAGIAAHLGEPADTAALRGRKRHAKTDKTDARHLRTLLAEARLPECWIPPEHILEYRALLETYHDLRTAHTAWVQRIHAVFFHQGAPPLSDDALRTEQGLATLRAAAAAHLSPAGQQQVATALDMLAATEARLGPLRHQLADAARHLMGAKVLAARLYGVGPLTALALTCWLGGKGRFSSSRKAVRFTGLDITVHSSDRKGPPGRLSRQGPPVLRWAVYEAGKTHARTSAPDHAYYATVKDRKNSKRACLSEARKIVRQACHILTELGDDALTAA

SEQ ID NO: 153835 - protein, 345 aa, unidentified
MLHVGMDLSRHRLDVRVLEEDGATVAELAVAPTGPELRRLAARFALEAPVRGVIESMNGARFVHDTLELAGWEVAIADAQKVKGLAPLACKTDRIDAWVLAELSRRDLVPAIWLPDPTVRAHRERARFRLHLVHHRVGLKNRIHASLIAFGHVCPTTDLFGRSGRQRLAELEFPEPWASDIAACLELIDHLDRQIAVIETDLRREGADHRYVPLLLTVPGISWILAYTIAAEIGDIARFESPKKLAGYSGLCPRVYQSGDTDRRGRLTRQGPKYLRWALVEAAVHAARHPAYVDHYQRTKVRLGRQRGAKVARVEIARKLTEAIWHMLTNGEPFAPAGPTKTLAA

SEQ ID NO: 153836 - protein, 387 aa, unidentified
MLTTTHDTEEIIERVAALDIGKAELMCCARVPDEDHPGRRLQEVQPYPTLTRSVLGLSDRLRCLGVTRVVMEATSDYWKPVFYLLEAAGFETWLVNAKDVKHLPGRPKTGKLDAVWLCKVAERQMLRPSFVPAPPIRQLRDLTRYRADLVAARTAEKQRVEKLLEDACIKVSSVVADIFGVSGRDMLAALAAGERNPKALAQLARRSMRAKITVLEEAFTGHFTGHHAFLLQTMLGRVDAISADIAALDDRIAAQAAPLADAIARLDEIPGISLASAYVILAEIGTDMTRFPTAGHLASWARVAPGITESAGKKKGKGSTGHGNAYLAAVLGNAAAGAAKTETYLGEKYRRIARRRGSKRAIVALGRSILVIVSLGDLGVGLAKARK

SEQ ID NO: 153837 - protein, 354 aa, unidentified
MNYVGVDIHKRYSVLVAVDERGRELARGRISGNSVHAFAQFFEALQGPGKVVLEACWNWGRIYDVLSEIEQVEEVVLAHPLKTRLIAEAQIKTDSLDALALATLLRGNLIARAHVPSKATRARKELLRQRLYWARRRTRVRNRVHAVLDRQRELEMPQCSDLFGCKGLNALSKLRLAEPDAILLGEELDLLKLIDSQIKAQEGRIVAFNANEQATQYLQSLPGMGKILAAVAAAEIDAIERFDGAAKLCAYAGLVPTTYGSGGKVHQGHLLKSRNKWLQWAFIEAAWVAVGCSSYFGGIYRYQRARGKKANIAITIVARRMCRIAFTLLKERRNFQEQHRTFPGRSAVRLTAAA

SEQ ID NO: 153838 - protein, 431 aa, unidentified
MKVMYERVAGIDVHKDMIKVGVRSPGDKAWTRKTEILEYRTFYGVLQLMAADLRKRAVTHVVMEASGVYTEPVYYALCEQDFERVEVINPAHAKALKGHKTDAKDCARLAELYECGLLRGSYIPAAELKELRDLTRYRIKTVQARTSEIQRLGKALESAGIKIGSVVSDITGKSATAMVEALIDGERRGTVLADLAIGRMRTAGKLADLSMALAGRFTEHHAMLCRLHLDRLAVFDTAVGGLDERIAARAVPWRREQDLLKSVPGFGDIVSQAWLAEIGPAPHQWFSSHEKLASWVTLSPGNNISAGKRKHGRTGDAGTYIKPMLVQAAWSAIRTPGRLQARYGRLVRRFGGAKNPAAKKKAIIAIAHTLLKIAYQVLKSGMPYQDLGADFYTQRESPQQRQAYLLRQLGKLNPGCTITISPPEAALTSGA

SEQ ID NO: 153839 - protein, 371 aa, unidentified
MKSIIYVGMDVHSPNYTLTSYMVGNDNCFATVQVEPDYKNILKYLEKVQENMGTPCEFHCGYEAGCLGYVLYHQLRDHGIDCTILAPTTMPTYQKKEIKTDKRDAQKIARCLAFNTYSAVYVPTKADAAVKEYIRMRDAHQTALKKVKQQILAFCLRYDFNFTIGKSYWTQKHLDWLKKLPMDDLLREVLDEYLMTYQQLMDKLERFGKRIEELAGSPAYAEGVKKLTSLIGIRTHTALALIVETGDFSRFAKASQFASFLGLVPGERSSGEKQVRTSLTKAGNTHLRRLLTESTQCYSRGRIGFKSKALKARQEGNTPETIAYTDKANERLKRKFYHMVLKNNKKRNIAISAVARELSCFVWGLMTGHTA

SEQ ID NO: 153840 - protein, 315 aa, unidentified
MTETVFVGVDVSKARLDVATARGEQTWSVGNDDDGVGELITKLQPLAPALVLLEATGGLERRVLARLVGAGLPAMAVNPRNVRDFAKSLGKLAKTDRIDALVLAKFAQAVRPELRAIPDEHTQALQSHLTRRRQLVEMIVAEKNRLASTELAKYRRQIKDHIEYLQKELNINDYDLDQAIQRTPAWLEKVDLLESVPGVGRVTASTLVALLPELGTLGRKQLAALVGVAPFNRDSGTLRGRRSIWGGRSAVRAVLYMAAVTGIRCNPVVRALYLRLKAAGKRPKVALVACMRKLLTILNALLRTRTPWRRQEVSA

SEQ ID NO: 153841 - protein, 434 aa, unidentified
MKIVYPICCGVDVHKKMIVATIATTDNKGITRYITETFTTINCDLYNFRTWLTAHNCFDVCMESTGKYWIPVFSILEQGGIRVLLTHPKFVRAIKGKKTDKKDSKWIADLFKHDLVSASFIPPPEIRALREIARYRYKLVCMCSSEKNRYQDCMTISNIGLASVLSDPFGKTATDIMKKVLSSEVFDDEDIEKLIRGTAKKKTELILESIRDCHIESDQRFKMNEVSKHLDYLEQSILRTEIELYTRIEPYMHIVTHLANQLPGVTQLSAALILAEIGVDMSVFESDKHLASWAGLSPTNDQSAGKKKSVRISKAGQFLKPLLVQCALSAVKSKKQPYFNNKYQRLKKRRGHKKAIIAIARMMLTCIYHMVQTGEAFNPSDLQATCRMAHKKQPLTDETAIAYLAAQGYDVSVLTKISPADDSPVIDSSLKKTA

SEQ ID NO: 153842 - protein, 336 aa, unidentified
MLDANGKLVMESILETHASTLRDFLAGIRGQLNLTFEEGVAAEWLYGVLQSDVDKIVVCDPRKNALLKAGNKNDRIDARKLAELLRGGQLRQVYHGNRGVRTLKELAHNYLVLTRDVTRVLNRIKAVYRSMAIRCPGQRVYHPRYRQQWLEQLAVPGLRRRAERLYQQLDLIQPLRQQARRELLAESRKHAARQLLEQIPSIGPVRAALLIAILQTPHRFRTKRLLWAYSGLGLEIRTSSDHDFKNGQLQRRPKQISVRGLNRNHNPELKNLFKSTALSASLRPGPWQECYQRMLAKGVKPAMAQLTLARKIAAVVLTLWKKGENFDPDKLTMQAA

SEQ ID NO: 153843 - protein, 338 aa, unidentified
MELYAGIDLHSNNSVVSVLDEQDRTVFAKRLPNDLASIVDVLKACAGTLRGVAVESTYNWYWLVDGLQDAGFIVQLVNTAAVKQYDGLKFSGDFSDARHLAHLMRLGILPTGYIYPREERAVRDLLRKRGQLVRQRSTQILSMSNLVARNLGAQATGNEIKRWQLEEIDAMPLLAEQRLALKANLAVMRCLDAQVTAVERTVLAKAKLRKDYQALTTVSGIGEVLAMTIALETGDVTRFDGPGNFASYARTVHSRRESNGKKKGEGNAKCGNRHLAWAFIEAAHFAVRYDAAIKRWYQKKCASALAVVAIKAVAHKLARACYYIMKDGRPFEVSRAFG

SEQ ID NO: 153844 - protein, 354 aa, unidentified
MANTTGTEPQAFSSIGVDIGKDVFHLVGFDSNGKVVLRRKIKRLALVSTFENLSPCVVGMEACLSAHFVSRTLRKLGFEPRIIPAKYSKPFVKGQKNDYNDAEAIAEAALRPNLNLVAEKTQDQLDLQALHRVRSRLVSRRTATINQIRAFLIEQGITVRSGAHALRNSLFAILKNREDEISPRMGDIIIGLYEDWLWLDERVESTTNDIEAISKREGNCQRLMSVPGIGPVISTAMVAAIGTGEAFERGRDFGAWLGLVPRQYSTGGKPILGRISKRGSKYLRTLFVQAAHIILMRPHNWEKFSFGPWLTEASKRMHENKLAAALANKLARIAWSILRHGKDFDTHRIEVTAI

SEQ ID NO: 153845 - protein, 350 aa, unidentified
MLIIGCDYHPGFQQIAFVDTETGELGERRLAHREEAEQFYGMLKQRSIGVRVGMEASGHARWFERLLSELQFELYIGDAAVVRTKRVRKQKTDRQDAQLLLKLMVEDRFPRIWVADAENRDLRQLLWHRHRLVQMRTRVMNQLHVVALNEGLRRKKALWRPAGRRELESLLLARWAGRRRQDLLDLLDQLTPKIQELTRALEDEVEKRPVARRLMTHPGVGPLTALAFELVIGIPKRFACGKQIASYIGLVPSEESSGDRRRLGHISKQGNSLLRYLLVEAAQVTVRSQPQWRSKFFHLAMRRGRKIAKVALARKLAVRLYWMWRQGLDYGQFENFGSHAGEPGNRHGVQ

SEQ ID NO: 153846 - protein, 393 aa, unidentified
MSNPQIIRLMRAVCGLDVHKDSVFLCILHDSGEIIEKVFGVLTHELRDMRRQMQSHGVTEVTMESTAVYWIPIWRVLEPYFHLKLVNPYFIKQLPGRKSDVKDAQWIAECTLKDLVRGSFVPPERIQQLRQYDRRIFDLDAEIVRKLSKLDAVMQRCNIRLSNYVSNTDTKSYKDVVRKLCEGVTDPEELIDEIYSRIINRHGRETILAALTGVVSDAEKDTMRQLRDELDLAEKHKQECMDKMLHICQTYYPNELKRLMTIPGIKERAATSLIAEIGVDMTKFQTAAHLASWSGLKPRNDESNKKIKSRRITHGNIFLRKTIIECAWGASRTKDCFFSRFSYHQTQVRKKNKMKVLVAVARKLLIAVWHVLHDETDYKDFGADCDTSVGNNG

SEQ ID NO: 153847 - protein, 408 aa, unidentified
MRVVGLDIHRVFAEAVMLDDGRVTRLGRVGMTRDHLAAFAQTLTHDDDVVIEATGNASAVAEVLRPHVGRVVIANPRQVRLIAEARIKTDVIDATVLARLYASGFLPEVWIPDEHTLGLRRQVTRRTQIVRQRARLKTIVQSILHAHLIPQCPHADLFGPRGRAWLLRQPLPADESDAVERHLREYDRLTDDLRVVERELARDALTNPKVKRLMTIPGVDMVVAVGLMAAIGPAERFPGPDRLVAYLGLNPTVHQSGEGRPRHGRISKQGRIHARTMLVEAAWQAVRGPGPLRAFYQRVARRRGNHIAAVAVARKLAVIIWHLLRREEDYAWVRPALHAKKLRDLELRSGEPARRGQRGAAYAYNLSRTRVEEKRRAEQAETAYRRLTEGWSRRGRRVPTGPAKEERP

SEQ ID NO: 153848 - protein, 410 aa, unidentified
MDTLIERCAGLDVHKDTVVACVRVPARGGGREQSIQTFGTTTAQLLALRDWLVAHGVTRVGMESTGVYWKPVYYVLEDAVECWLLNARHLRNVPGRKTDVADAAWICQLVEHGLVRPSFVPPKPIRELRNLTRYRKAQIEERTREAQRLDKVLQDAGIKLSSVASDVLGVSGRAMLRALIAGTRDPETLAELARGTLRRKIPALRQALHGRFGPHHALLVGTILAKLEFLDEALGHLSAEIEQVIAPFAAEAALLRTIPGVDRRTAEAVVAEIGVDMSRFRAAGRLASWAGWCPGNNESAGRHGSGKTRKGSKWLHTYLTEAAKAAARTKGTYLGAQYARLRGRRGSARATVAVGHSILVAAYHILDRHEPYRELGPDYFRRRHSREHQTRRLVSQIEALGYHVRLEEVA

SEQ ID NO: 153849 - protein, 346 aa, unidentified
MLHVGLDLSRKRIDVCLISDQGELIDRFAATPDRDGLHGLARRVAVYGDPVRGVVESMNGARFVHDELVAHGWEVLVADAQKVKGLAPLACKTDKIDARVLAELSFRDLVPAIWLPTFELRREREISRWRLHLVKHRSTLKNRVHSTLITFGHQRHMSDLFGVAGRKLLGELDMPEPWRSHVDASLVLIDDLEVRITQIAKELRRSGADHRYIPILMTAPGFGWITSFTVACEIADISRFSSPVKLTGYTGLCPRVKQSGQTDQRGPLSKHGPKYLRWGLMEAAIAASSHPLYRERYQRTKRRLGKQRGPKVAQIDLARQLTEAIWYMLTRNQPFAPAGAIFRLAA

SEQ ID NO: 153850 - protein, 420 aa, unidentified
MDVVLERCAGIDIGKDEVVACVRTPGAGGGGRHKDTRSFRSFVGDLDAMADWFTDEGVTEVAMEATGAYWKPVWFVLEERAFELKLVNAHHLKILPGRKSDVLDAEWIAELLEHGLLRGSFVPPRVIRELRDLTRYRKRLVQTHTQECQRIQKTLEDAGIKLDSVASHVMGVSGRAMLRALIAGERDPEALAELAKGKLRKKIPELRRALQGRFGDHHALLIGMSLDHIDHLEATMARLDHQIDTVFAANTSEAGIPFERARDHLDTIPGVATRAAEAILAEIGVDMSRFPTAGHLASWAGMAPGNNITGGKRGSGRTTNGDVWLGEVLNQCAWAAARTRDTYLSAQYWRLARRIGNKKAAVAVGHSILVICWHLITNDADYHDLGGDYFTRRHDPARHRDRLIEQLHGLGYRVTLERVA

SEQ ID NO: 153851 - protein, 318 aa, unidentified
MSDSVFVGIDVSSQMLEVASSGQANTWQVSNDVAGLETLVSQLSAIRPGLTVLEATGGYEFEAACALQAAGLAVAVVNPRTARDFARAMGALAKTDALDAKMLAAFARVLHQHPERDRFVKPLADAELQRLQALVLRRRQLVQMITSERQRMRISHVAARPSIERVIEFLKTELGDADTEVAAHVQRHHAELADALASVPGIGAASVAVLLAELPELGKLDRRRVAALVGVAPLNRDSGQMRGQRTIWGGRADVRRTLYMATLTAVRHNPILKNHYEHLLATGKRKKVALVACMRKLLTMLNAIAKHGTKWDPTLHNA

SEQ ID NO: 153852 - protein, 336 aa, unidentified
MAIVKVFVGLDYHNESIQVCVMNVKGKVLVNRRVLNDRQAVTQALGKGRRVAAAAVEACGGAAHLADELIHDAGWPVQLSHPGYVARLKQSPDKSDFSDAQLLADLARVGYIPKVWLAPPEVRELRRLVRFRQQLADERRNTKLRIGALLREHRPPSPPGRPWTVAWRRWLDEIELPEQTRWIIQEQLERLSTVNLDIKRVELRLGELVEHDRLVQFLLTRPGIGLITAVTLRAEIGRFDRFHSGKQLSRFCGLSPRNASSGNRQADAGLIRAGRPQLRAVILQAAHRLKRYEPRWRALAARLRRRGKPGSVIAAAVANRWMRSLYHEAKPWSIAS

SEQ ID NO: 153853 - protein, 348 aa, unidentified
MTISMIGLDTAKHVFQVHGVDAAGKAALKRKLRREEVIPFFEQQERCTVVLEACGGGHHWARMLAQLGHEAKLLAPEAARPFVKQGKKNDATDAAALCAAASRPEVTFVPVKSPEQQGVLALHSVRTLLVKQQTMLANAMRGLATEFGLVVAKGIHKLDALEAQVQAEASMPATAKQAFAELHGHSQAAATRIAGLEAQIVAHARQDATARRLATIPGIGPITASLIAATVGDTIGSFKSARHFAAWLGLVPRQHSTGGKTRLGRITKAGNGEIRRLLVLGATSMVFRAGQWNSAAGAWLRGVLERRPVRLATVALANKMARIAWAVMTRGEVYQAKGRAPAAAAAVA

SEQ ID NO: 153854 - protein, 479 aa, unidentified
MQEKDETTMQTTIPGVIAAGMDVHKDKIDVCVRIGDGSPDGNVIIKTFDAMRKSLFELRNWLISLNCFKVLMESTGVYWMPVYSILEEVEGMNVGVGNPRDLKNAPGRPKTDKEDAKWLSRLCMFGLVLKSFVAKRPFRALREYTRYHKKLVQERAREINRIEKLLQLNGFKLSSVLSDITGVSGTRILKKLAEKGELSLYDIQERLDKRCKHTPEEIEFAINGVMKPTSRLLLKFQLKKLEHCDKDIDEMYDLLLQLSKEHGWAIRIIETIPGMSTLSAIYIIAEIGTDLSSFKTANHLTAWAGLAPKDNKSADNVRPSKTKKANRYVKSLMIQCAWAATNTRNTRLSLWFWRNKSRLGEKKAITAVARKQLCYIYAMLRDGVVYDKSLDDAYANNIRVTKLDAAQKILGSRKSDTQTSSKSVNSRDVQIASAIDSPPEPMLAEKQSENVVQTENGIESPSYTTPQKKRGRPKKVVIT

SEQ ID NO: 153855 - protein, 377 aa, unidentified
MATTRTVLRDQLTAKPGDLYMSLELGDKHWHISIGGERRSVSHYIVEAGHTEEVADCIAKAAARLHTARVHSCYEAGRDGWWLHRWLTELGVDNIVVDPASIEVNRRARRAKTDRLDADKLLAMLVRHHRGERVWSVLREPSPSDEDARRAHRELQRLTHERIAHTNRISSLLVLHNLRPRIVIGGRDWPVWWNEHREQVPPTLRAELEREAVRLKVVKEQVRAIEAARARELAEGKQPLVAQLVRLRAIGAKGAWVLVKEVFGWRHFANRRELAGSLGLVPTPYASGDSEIEQGISKAGNRRVRALLVELAWSWSRLQPGSALTQWFNRRFAGAGKRMRRVGIVALARRLAIALWRYLQTGEIPIGARLKPAGSGI

SEQ ID NO: 153856 - protein, 360 aa, unidentified
MKIVGCDFHPSWQQVAIFEPETGEIAELKLLNGDGEAERFYRELEAPALIGIEACGKSQWFIELAERLGHVVWVGDAAQIRASYVRKQKTDRRDAGHILKLLRESRFPRLWTPTAAPRDSRQLLIHRHKLVEIRTRVKNGLQHLALNRGFPKQSSRLCGVRGRAYMEKLPLAGWTARRREDLLKLLAELDQQLGELDDAVQRAADEHPQARLLMTQPGVGPITSLAFVLTVGDVSRFKRSNQVASYLGLVPREHSSGGRQRLGSISKQGNRFMRQLLVESVQTVNRLDEGFRKQYAARCHHKAKGVAKVAAARKLAVRLYWMLRQNVGYPEIARIESSPRVALRGESHLATVNGRSRIQQ

SEQ ID NO: 153857 - protein, 369 aa, unidentified
MTSIIYVGMDVHTTNYTLCCYSFENDQIFAQAQMEPDYRNIIKYLERVRMSYGDVHFLCGYEAGCLGYSLFHNLVGQGVDCVILAPSTMATTKKKGIKTDKRDAANIARCLAYNTYSAVNIPTATDNAVKEYIRMRDDAKGTLKRYKQQLLSFCTRHGKQFTEGRNYWTQKHMAWLGKLDFGHPVLQETFQEYLILYTQSLDKVEMFDKRIEELAQREEYAENVKKLCCFIGIKSFTALAMLVETGDFGRFAKAENYSSFLGLVPGEDSSGDSIQRTGITKAGNSHLRRLFVEAAQSYSRGAAGKKSKTLAARQSGNEPKVIAYADRANERLKRKFYRIMFKSKRNIAVVAVARELACFVWGMMTDNVA

SEQ ID NO: 153858 - protein, 357 aa, unidentified
MKIIGVDLHTRQQTIAMLDDETGELVERELPHEGHQVREFYAALPKPVLVGVEATGSLHWFLRLLEELGIEFRVGHPAQIRAAEPRKQKNDRRDARLLLTLLAENRFPAIWMPSREQRDLQTLLRHRDQLVRLRTRVQLSLQAVALNHGLRRGHALWTRTGQHALRALPLATHAGAQRDTLLALYPALESPIQALDREVEQQARRRAQAQRLMTHPGVGPITALATEVFLGDPRRFADGKAVASYVGMIPSERSSGGRQRLGRLSKQGNSLLRFLWGEAAIHAVRRDPELRRFYRRKLVQKGMGKARMAAARKLGIRLWIMLRDEIDYTEFCRRGCSRQQSSGATGAGMPAAGQWSN

SEQ ID NO: 153859 - protein, 355 aa, unidentified
MNSEKYIGLDVHQATIVVAVMDSTGKLVMESILETEAATILQFFAGLRGNLSVTFEEGTWSAWLYDLLNPHVDKLVVCNPRKNALLKDGNKSDRIDARKLAELLRGNQLKSVYHGESGVRMLRELSRSYLTIVKDLSRVMNRLKAVYRSWAIPCAGRDVYYRRHRAQWLDKIREAGVRRRAERLYEQLDMLQHLRQQARRELLAESRKHAITARLRQIPYLGPIRSALAVALMQTPHRFRTKRQLWAYSGLALETRISAEYRMVEGQVRRSKKLLSIRGLNKDHNHDLKGLFKGAATMASVRPGPFQDFYQASLAKGIKPTMARLTLARKIAAITLTLWKKGESFDAEKLKSQAA

SEQ ID NO: 153860 - protein, 323 aa, unidentified
MSQPNLQCMGIDVAKLSLDIATTDTIEPFTVGNDEDGFAVITDKLKHTKINLILMEATGGLEAAIACKLQSEGYDVVVINPRQARDFARSMGYLAKTDKLDAAMLAQLALVIDLHPDRSRYIRHLPDEARAVLAAMVVRRRQLNHMLVAERNRLYPSHPQSRKSIDNIIDALQNELDRINEQMKQHMTAFFQEQARLIGSVKGVGDITVASLIAELPEQGKLNRREISALTGVAPLNRDSGKMRGKRTTFGGRAGVRATLNMAALVATQFNPAIKLFYQRLLAAGKPKKLALVACMRKLITILNTMLRKGEEWNASFQSQVIS

SEQ ID NO: 153861 - protein, 464 aa, unidentified
MKRKMNQEKKYKRLKGHLDCINLFAAGIDIGSTSHFVAVPPELDAQPVREFSCFTKDLIGLADWLIQVGIQTVAMESTGIYWIPIYEILEERGLEVLLVNAHHVKNVPGRKSDVQDCQWIQQLHTHGLLRGCFRTPEQGIALRAYMRQRETLVKKASEPIQHMQKALRQMNLLLDNVVADITGKTGMGIINAILKGERNPVKLARLRDGRCKHDEKTIALSLEGHYRKEHLFSLRQSVEIYNFYQQQIIECDAAIKEEMASLESKGNQDNVPSAGKRKSKSSLNFDVHSELYRLTGVDLTNINGMNENSVLKVLAETGSDMSYWPTEKHFSSWLGLSPNNKITGGKVLSSKTKPTANRAAAAFRMSAYTLHGSNSALGAFYRRQRARLGAPKAITATAHKLARTFYSMLKNGTEYFDRGKEYYEKQYRDRVTKNLKKRAASLGYLLVPNINQDGKIKNVVISTS

SEQ ID NO: 153862 - protein, 425 aa, unidentified
MSEKDYNRQVAKRERIGRETLVIGVDVGNAWNAAGFMNKEGKVLGSCAKLYNSREGFEEFVKMTEVFKAKHGMNSVLIGMEPTGHYWRKLAYFAKDRGYEVRFVRTTALKHHREIDESASAKSDKRDALTIANITREGKYIDTVIEDGVVRQLRTLSKVRERLLRYSVGAKNALHAALDDYFPELHEIFWSMNSRSLWAVLDQCPFPEDVLSMKVSALCKLIARSARKKAGAAQKAKALKQAAKKSIGVKRIGSADCYRVKISLEEVKRTVLMLKGIDRQMKGVLKEIPSSEYLLSIPGIGPLSAAVFLGELGDPAYFQNARQIVKYAGYDPQESDSGSRISRRFISKKGRWLLRKFLFFMSMRVVVLSNYFKEYYQRKLQTKNRVGQLPRKKEILCAVVIKLIKVIFALLRDKRRFQDTVTIAV

SEQ ID NO: 153863 - protein, 422 aa, unidentified
MSEVTFPRLVSRGCGIDVHQKVVVATIDGEGLTKETREFETFTSSLTEMRHWLETNGITHVAMESTGVFWVPVFTILEKSIPNVWIVNARHIKYVPGHKTDRKDSAWICKLLLAGLLKPSFIPPPEQRNLRELTRRRRQLVQEISSEKNRMMRLLEQCNIKLKSVMSHMDGKVATQLLDKLCSGEEVTMDYINSVYHGRLNATPEELYKACQGKIDNDNLFLMYIIKAHIYEMEKLVAQLSERITEKLSPQRAILDMLKAVPGLDLRTSENLLAEIGFDMSKFPSAKHLGSWAGLCPGNNESAGKRKSGRITHGNKQVKAVMTEAAWASTRTKNTFYSERYHRIAARRGKKRALIAVAYSMLTTVYNILANNVTYNELGAEFVTLLIEKKRKRYLTAELAKLGYEVQIVKKQLPLKTDGCST

SEQ ID NO: 153864 - protein, 423 aa, unidentified
MKALSQIRPEEVLPEAMKNPAEVLFIGIDISSENHVVRAVLGNMNELKDKFIFTSTFDNLIYFCDWVYKIKKRYNAKHVFIGIEPTGQYWLPVYEFIRDNLPEVGIYEVATRAVSCYRKMKNSNSSKTDPRDAYIIAELVATGNCCRPIQHTYLTRNLREAMRLYDEASTRLQQARQQLMAMVQKSFPEALSSVSSPEGIDGIFNILQYSIEPKVITKIPLEQWIKLKSRRGVAHKKLQNLYLMAQHSLGQIDNNEIRKHLWKIQWTSWKNADQRCNDLENILKEIIDAHDATPFLLTVDGVATITIAAFLAGVGDITQFSSEKQVEKVFGLDFFRWQSGKMDCQPHITKRGYSIGRHYMVLAAKRLIKYPKPKIWYNKRPKKNKNGKPGMAGVIALTAKLIRIMFAVAKEGKPYDASLAFKS

SEQ ID NO: 153865 - protein, 345 aa, unidentified
MDHFAGLDVSVKETSICIVDDAGKIVREVKVASEPEALLAVLKNLAYHFKRIGLEAGPLSQWLFSALAEAGLPVICVETRHMQAVLKAQINKTDRNDARGIAQMMRAGLYRPVHVKTIRSQKLRMLLTHRKLLQSKAIAIENDLRGTLRNFGLKVGMVGKVKFEARIRELVENLPDLAVLVEPMLIVRRTLREQIVILHRRLLAIVRDDEVCRRLMTTPGVGPVVALTYRATVDVPARFRKSKAVGAVFGLTCAKYQSGEVDRNGRISRCGDEMMRVMLYEAAQSMLRSKKWSWLKAWAMQIARRRGMKKAIVALARRLAVIMHRIWVDGTEFRWTREQATAAAA

SEQ ID NO: 153866 - protein, 317 aa, unidentified
MNSKNNQNEINVGVDTGKTQLDIYIRPLDIYFTVTNDENGIKKAMKELKKHTITRVIIEATGRLEQPFIMACAEAKIPFVIANPVNIKRFAGAIGQKAKTDKLDAQLIAFFGEAIKPSLSTLKPEQMRLMSDLLSRRRQLMDMQTMEKNRSQIMPKTISSLIKPILTALKNQIEKVDNKLQKLINECDEYKMKNDIIQSVPGVGNVVAFNLISDMPELGYINNKEAGSLVGVAPFNRESGAYEGKRMIRGGRPKIRTAMYMAMMSAIQCNPKFKGIYQRMVAAGKPKKVAIIACIRKLVTIINSMVRDGVMWDPKMI

SEQ ID NO: 153867 - protein, 378 aa, unidentified
MDVIYPRCAGLDVHAETIVACALWEEDGHIQKDIQTFSTFSKGLGDLLEWLEEHGVTHVAMESTGVYWKPVFAFLEGYVDLTLANPQRIKNVPGRKTDVSDAEWIAKLLRHGLVEKSFVPPADIRELRDFTRLRKKWVGQLTSEKNRIQKVLESSNVKLGSVLSDLFGVSGKDILARLLEKGYVDKDELDQCLRGRLKTKKQAVYDSLLGTLTEHELRLLRLLWKHVEELERLIEEVDQHIDRLLEPYREEVNLLMTMPGVKKQTAAVIIAEMGTDMSVFETPERAASWTGLSPGNHESAGKRKSTRTTKGNPHLRSALCEAAWSAARSKTHPLSRKFWSLAARCGKKKALIAIARRMLVIIFCMISRKEPFRQPQLI

SEQ ID NO: 153868 - protein, 347 aa, unidentified
MTIVEAAPGITGGVDTHLDKHVAAALDPLGRLVGTESFPADAGGYKALLGWLEEFGQVTKVGVEGTSSYGTGLARFLRRHGVEVVEVDRQNRQSRRNQGKSDPLDAVEAARAAISGRASGAGKTKDGAIEAIRVLVVAKRSARQARVKAITQMRHLGFTAPDQLHSRLKGLSVSALVTESAQLRPTRSTDPVTAATKASLSSLAHRIKSLDVEIAGLDEKIEPLIAAAAPDLLALFGVGPDTAAGLLIAAGDNPERLHSEAAWAHLCGVSPVPAGSGKTSGHLRHHQGGNRQANSALWRIVMVRIAHDPETTHYFERRVKEGRTKRDVIRILKRYVAREVYRHLPRG

SEQ ID NO: 153869 - protein, 338 aa, unidentified
MDKYSGIDLHSNNCVVVVTDDEDRVLCEKRVPNNLQQIAALLAPYREELKGVVVESTYNWYWLVDGLKQEGFPVVLANTAGLSQYSGLKYTGDEHDARHLAQVMRLGLLRTGYVLPPEVRAIRDLARRRLQLVHLCTMNILAVETQVARQTGAHISSNVVRKLTSDEIDRWDWCDDAKLSVKANLALIEAISIQIKVIEKRLHERIALHPHYAVLRSVPGIGEVLASTIMLETGPIERFADAGKFASYCRCVGSSRYSNGKKKAEGNRKNGNAYLAWAFIEAAHFAMRYNEAAKRFYERKKAKTNTVVAIKSLAHKLARACYHMLKEQSLFDERRCFA

SEQ ID NO: 153870 - protein, 349 aa, unidentified
MSKGLCIGIDVSKHRLDVATYPITESKDFANDTHGIAELLSWMRGLEPSLVMLEASGGYERVPASSLAAEQIPTRVINPRQVRDYARSRNILAKTDAIDAEIIAAFASVTEAEARPVPDQQAQQLKALVTRRGQLVDMITAEKNRLATAPKCVIESMKRNIECLQAELKRIVNDIDATIEANPEFQAKSKIMQTMPGIGKTTAAALLAELPELGTLGAKQIAALAGLAPYNCDSGKQKGERHIWGGRASVREAMYMGTMAATRYNPDIKEFYKRLSTPKDETNGCATNNSTKSKNNNKNNNKNNTKTSSKKDDNKPFRVKLIACMHKMLVLLNAMLRDNTQWRPAAQIA

SEQ ID NO: 153871 - protein, 310 aa, unidentified
MDAIYVGIDVSKDRLDVHVRPSGEAFAVTRDGKGLDALVERLRALLPTLIAVEATGGFETIVAAAVGGAGLPLVVVNPAQIRHFAQALGKRAKTDPIDAAVIALFAEAVKPELRPLPDEAQRLLSELVSRRRQIIEMIVAERQREKRVANTRIRKGISRHVRVLEKELPEIDGDIGTLVRGSPAWREKEDLLKSIPGIGDVLARTILAELPELGTLTRREIASLAGLAPFTRQSGRWKGKSMIAGGRSAARWALYMAALVASRHNPPLKAFYRRLLAAGKPKMLALIAVARKLLTTLNAMLRDNKKWQHA

SEQ ID NO: 153872 - protein, 348 aa, unidentified
MKNKSFVGIDISKNVIDVSIFREDTNIKMFPHEVFNNTRKGFGDMCSWLKKSRVVLSQALFGMEFTGCYSLDLEKFLTSKNYSFCMLSTRIVKHHPMGTIDKRDKNDSAKIADFLYRYDGTECAKPYKLPSKAMQQLKQLVNERKFLVEQRTNFMNRMQMFETKEDSAMYESYIKKLNHDIEKIDQEECELMSKEEDVFDTFQNLLTIPGIGFVNATNIIAITRNFTAFDTARQYARYVGVAPCSHTSGTSVKWRARPSAHCNGQVKADLSMAALRAVEYDVEMQMFYNRKLGGRKDSDTKRKALNAVKFKLIRRMFAIGKQKRKWEVLKTSDDRKNLHIEKSKASEL

SEQ ID NO: 153873 - protein, 354 aa, unidentified
MSQTFKTAIAVVGIDIGKNSFHVVGLDTRGAIVLRQKCSRGQVEVRLANMPPCLIGMEACVGAHHLSRKLKELGHDARLMPARYVRPYSKGQKNDFRDAEAIAEAVQRPTMKFVATKTADQLDLQALHRVRERLVSQRTGIINQIRAFLLERGVAVRQGLRFLRAELPRILATPPDVLSPRMVRVIEGLAGDWRRLDERIEGLSSEIEAVARQDTACERLMSVPGIGPIISSAMVAAIGTGDVFSKGRDFAAWLGLVPRQISTGDRTILGKISKRGNRYLRVLFVQAAWVVLIKPKSWERHGLKPWIEAAKKRLHRNVLAIALANKLARIAWSVLARGRAFEVRKVDEAAAQPA

SEQ ID NO: 153874 - protein, 315 aa, unidentified
MTTSYYVGIDVSKDMLDVCVLPTGESFRLSNDKAGIAMLRKKLQPLSAERVVMEATGGYEAEAVLTLGLAGLKVCVVNPARVRNFAKADGQLAKTDKIDAGVIAKYGERMLPEVRTLASEEVRDLDALVTRRRQLVQMITSEKNRMGISARGLRPGIQTHIDWMTGEVGRIETDLDQAIKATAGWQEKVELYTSAPGVGTKTAHSLIAEVPELDRISAKQISALVGVAPYPRESGMFKGTRRIRGGRISIRCMLYMATLSAIRCNPVIKAHYTQLRARGKLFKVAMVACMRKLLVILSAMARSNTPWNSGFAAAA

SEQ ID NO: 153875 - protein, 435 aa, unidentified
MEEVEDEPLFCDRVAGIDIGKATVMVTIRVPSEARAKGRQQETREFGTTRRELLALADWLRCWQVERAGMEATSDYWKPVLFTLEQEGFDCLLYQASQVKALPGRPKTDKLDSVWLARITEQGSLAGSFVPPEEIRRLRTHTRYRRKLVQMRTAQKERCEKLLEDAHLKLSSVISDIHGVSGRDMLRAIAAGERNPKVLAQMARGVMRSKIARLEQALDCSFFTGEHAFILTMMLDSIDSLTAQAGVLDARIADMCQPYQRQLEQLDEIPGFGTTTAQDLIAEIGTDMNVFPTAGHLASYARQAPRVKESAGKRKGKNATGRGNPYIGGALGEASISAGRTQTFIGEKYRRLTRRMPKRKAQVAIMRSQLVIAHALLSDPDARYQDLGPDYYERKADIRRRARNHARALERLGYKVTLEAIDPGTGELHLVATAG

SEQ ID NO: 153876 - protein, 411 aa, unidentified
MEVIHARCAGLDISKKDAKVCVRVAGAGRRKTVETVTTWGSMTSQILALREHLIAERITCAVMEATGDYWKPFYYLLEGAGFEVLLVNARHVKNLPGRKTDVADATWLAQLGAHGLVRGSLVPPEPIRQLRDLTRARTAITRERSREVQRLEKLLEDAGIKLSAVASDILGVSGRAMLESLIAGNRDPAALADLAKRRLRSKIPALTEALTGRFTDHHAFLARVHLDLIDQHTAAVADITARIEATIKPFHWFRDLICTIPGISTLTADVIIAETGADMTRFPTAGHLASWAGTTPGNNESAGKVKSSRTRPGNPYLQGALGAAAMACAQNPVTYLGARYRRIAARRGPQKANVAIQHSMLIAIWHMATNGCLYHDPGADYFNQLHPERAAKRAISQLEAMGYHVTLTRAS

SEQ ID NO: 153877 - protein, 401 aa, unidentified
MSFKILKNNCCGLDVHKTWIFACIGITDSNKRTVYKQARFSSFTKGLQELCHWLAKYDCTDVCMESTGKYWIPVFNILEKNNIWVTLSHPKYTKPQKGNKTDRKDAKWICDLYMCGMVKPSFIPPADIRELRDLVRYRFKLTCMITGEKNRAHNCLTVSNLKLDDVFSDIFGRSSRSITEQILQHPGETFDVAPFVHGRCKTPIEEIQAAVDGAVSKEQAVKLRQCLNHIDELEMHKSEIEREIFRLSDKYEDILTLIRTVPGFDKNPMTAIQVLSEIGGDMSVFPTAKNLVSWAGCCPHNDQSNHKIKSTRISRAGSYFKPVLVQVANALIKSKKHPEFSTRYRRIKARRGHKKAIIAICRMILTAIWHILTDLKPYTAKGFLEPRPVSKEKSSYCFTGT

SEQ ID NO: 153878 - protein, 328 aa, unidentified
MNTKVGVDGGKTKFDAAVMTSQGKYRTKVFDNNPAGFAAFAAWLDAYVPAGRSQAHVCMESTGSYHEALACFLFDAGIAVSVVNPLRVKRFMESEGVRNKTDRGDAKALARFAQKNEPECWEAPAPAVRTLQALVARLDALMEMRQAERNRQEVSHPSVQPSIEAMLGSIDEAIAEVRRQIAATIDDDPDLKRRSELLETIPGLGDRTIPQLLAYIGRPQRFKSVKALTAYACLSPLIRQSGTSLDRHKGTHPTGHHALRSALYFPAMVAGRHNPSVAAFWARLKAQHKPGKVIVVACMHKLLAIVYGVLKSGRPFDAQVALGHGPHS

SEQ ID NO: 153879 - protein, 352 aa, unidentified
MKKYNQVIPEGKTVFVGIDIHRNSWHLTAVVEDEVVFSGALPPDPEALLKFLIRYGNNPIEAVYEAGYFGFWLYELLMDSGIKCIVTPPTLVPMEYGNHVKTDKRDSRKLAYLLSKNMLKKVWVPSQQQCGHRQVLRRRQKLIGDRMRVQHRIKSELSFYGITIAMPTGLWTARFVKQLQEINFDDSHHQQSFWILLEEYEFLNKLAEQQTHLLKDLAASELYKKQAELLRTIPGIGPISAMSLLLELGDISRFAKAGQLAAYVGLTPAQYSSGDNIRMGRITRCGKNSLRAVLTEAAWTAIKKDPELRSVYDKLKFRRGAKKAIVAVSRRLLLRCRRVLLDMRPYCLKEAA

SEQ ID NO: 153880 - protein, 456 aa, unidentified
MATERRRRGKASGQLSTIHPHAAGIDIGSTFHVVAVSGEQDDEPVRTFRSFSSDLHAMAAWLEDVGIKTVAMESTSVYWVPVFEILEARGFEVLLVNARDVRNVPGRKTDVNDAQWMQKLHQHGLLRGSFRPRDALVALRAYLRHRQSLVEYAASHVQHMQKALMQMNVQLHHAVSDITGVTGLKIIRAIVSGEYAPEELAKHRDVRCAASEETIREALTGNYRPEHVFALAQALELWEVYQAKIAGCDVEIEAVLKSLNEKRPDPEKPLPARRQPKVKHEPNFDVRTALYTMLGADLSQIHGFGPYTVLRLVAECGDDMTKWPTEKHFPSWLSLAPGNKISGGRVFSSRTRRSSNRAAALLRLAAVTVGRTQTALGAFYRRLGARIGKAKAVTATARKLAVLFYRALRFGMTYADPGAEYYEKRYRRRVIDNLERRARGLGFKLVQNDVAHEGVS

SEQ ID NO: 153881 - protein, 404 aa, unidentified
MHGTSISTSRHQYTRILALDLGKFKSVLCDFTPATAAHRFESLATTPAAVHELLAALAGESPASVLVVMETCDTAGWVHDIAVALGLSVAIANPSNEAWRWTKVKRKTDRDDALKLARMADRCELPTVHMPSPQQRQRRRLVHHRRVLIQRRTQIKNQVRSIYSQQGRSTQLPRGSKCWTSIGIAQIRQEARPLSRCSVDELWRGRLHVELAVMATLDKQIAAVDHKLDALADEDPRAQLLQSVRGVGPRLAEAVVVHLDDPHRFTSAAQVASYAGLVPKQMESGTMKRVGKITRRGPALLRGLLVEVAWCVYCLNPWAKAFVQRVSRGMKSRKRIAIVALARKLLVMLWAMLRDNQPWRAPGERSKNYGEDRGRTADGCAVSPPEDTAARKPVSSVAAALLAH

SEQ ID NO: 153882 - protein, 345 aa, unidentified
MNKPTSTSTSTLFCGIDVSARSLSVALIEPDHSVSQREFANSTSGHKALLGWLVKHNAPVRVSLEATGIYSLDLSLALNAAPHIELAVLNPRQVNRFAQTLRRSKTDAADAIVLAEYSQRMPFTAWQRPGVEHLHLRTISRHIESLVVDLAEVKNRLHTVANSSTTPRVILVDLKQAQAAFERRLVKMRSEASKLIQAEPVLRLRFQLLVSVPGIAQVSALHILSELLLLPPGMTVRQWVAYSGLDPVHQVSGTSLHKPSHISRAGNRHLRRALYMPSLSAVRFDPHLRAFYQTLKTRHKTGLQALMAVERKLLHAIYGIFKSGQPYDGKRLFPNIQLEVESIAG

SEQ ID NO: 153883 - protein, 375 aa, unidentified
MAKTKINSTPRLVVAGCDLHTNFVTVAYVDGKGNLIYEKRYPTSIRGIALLVIDLATIKCRRVAIESVSHFWVYFTYTLQSLYSRITGLALRIVIANPYSTRSFGKKTDSLDALRIARLLLASNLIASNIPRSLEEYLFKALCRLRVKLAQERSKALNRLRKLLALLGYRPSRLTKRVLRAVEKLALGESPPEAFKSTELGAPEELGIEPLPIEARSMLKAILKIYNCLSVEVKALDSLIERQAKKFYGELYDYVRTVPGIGPLLAAIILAETVDARRFPSASHYKSYCGLSPRLLESSGKVRLGRCRWGNPLLRWAFYMAAVRAVLYDDELRSFYERLIARGKPRRVALVAVAGKLARRTWAVMVKREPYKPRR

SEQ ID NO: 153884 - protein, 392 aa, unidentified
MFYVGIDIAKKNHEASIINSKGELLDKSISFSNSQAGCTKLLSLFAKFEADSSNLTIGMEATGHYWLSLYSYLIDLGFTVYVINPIQSNAFRKMYIRQTKNDSKDSFVIAQIMRFGEFSSTSLADENIMALRQLSRYRLALVDECSDWKRKCIALLDQVFPEYSKLFSDTFGVTSRELLSKYPTPEDMLNIDTDTLSNLLSKGSRGRFGISKASEIQESAKNTFGVKFAKEAFAFQIKQIIAQINFIEEQLKELEIKISTLLHQANSVITTITGVGDVLGAVIIGEIGDIARFKSAPKLVAYAGLDPSVNQSGDFAGTKNKISKRGSPYLRRAIWLAANTAAFRDPSLSVYYQSLKARGKHHLTAIGAVARKMCNIIFAVLRDNRPYVTDIK

SEQ ID NO: 153885 - protein, 342 aa, unidentified
MQQSIFVGLDLGSSRCHQTVINADGALQMSRSIPTSEQHLRSAFSTLGDNARVHLESGELADWVYSVIKPLVAEVVISHSRTLAWIGKDSQKDDAVDARKLAELLRLNRVHAVYYEQNDDRRTFKQLVTHYEQMSREQARLKSKIKARLRHLGIIRSDARLFTKSGQVALLDELKEPSIKQMLAQTFAVLNQMLDVLGQAKRAMIAAACHFPEVRLLQTAPGVGIITACRFVAYLQTPARFSNKRKLWRYCRLGITRRESNGKRLAHPRLDSAGVGSLKDCSRKIFEAARRTKKDNSFKRAYEQSLLSTKNAVHARLSVQRKILSTLRAMWLTMQPYHDTGT

SEQ ID NO: 153886 - protein, 370 aa, unidentified
MSQSSTLFIGMDVHKESIAVAYVAQDHGADVTYLGAIGTRQCDIDQLLRKMQSKAKHLVFVYEAGPCGYWLYRYLTKKGYPCWVVAPSLIPKKAGDRVKTDRRDAVQLARLMRSGDLTPVYVPKVEDEAIRDLSRAREDTIGDLKAAKFRLKAFLLRQDIRYTGRANWSPAHLRWLSEVVCPTPAQQIVFQEYVRAVNEHTERLQRLEQELHEQVKAWRLCPVVDVLQALRGVQFTVAVTTVAELGDLTRFDNPRQLMNYLGLTPSEYSSGERRRQGGITKTGNAHARRALVEGAWAYRYPAKVSRHLQLRLEKLPKPSQDTSWKAQVRLCKRSRQLSARGKNPNQVVVAIARELSAFMWAIAKQVPVTA

SEQ ID NO: 153887 - protein, 368 aa, unidentified
MNKNTLGTALTVGAEELKNQKAAKAKRIVMASDVHLRGYQVARKIDNGPIGPVANFRSQEELLLYVEKQKQQAEEVVLVYEVGPLGYGLYRALQACGVTCYVCAPDSSEQKKKRRKNNAIDTRTLTSNLFNFLNGNERALQLVRVPTEEQEQARLQSRQHDQLVEERKRLGAKGNALLLSQGFGSWKNWWRPKAFSRLSQLVPGRLLELLETWVDLLRKLDEKIGRAKAALAKRCSGPRPKGAGAPSLVQLQSEVLDWGLYSNRRKIGCLAGMVPSEWSTGDSQWRGSITKVGVPAIRRIITEMVWRMILFQPQYKAVQKWQEVLRGTNRGLKKKAVVAIGRQLMVDLWRLQTGRVSAQELNLVMIGG

SEQ ID NO: 153888 - protein, 338 aa, unidentified
MAIVGGFDLHRRQITFEYVDTASGEVSRGRVAPADREHLRAWLRRLEGQEAAFAVEACTGWRFVVEELERAGAQADLAEPADTAALRGPKRRAKTDRADARHLRELLMAARLPESWIPPAHVSDARTQIRLYKTLVDERTAWLQRVHAILFQLGAPAVPGLARASGRGRLDLAALPPAARSAVEVALRSVDRVNEELDTLRPELARLARAQSGCRALQAHYGIGPLTSVAIWAELGDCGRFSSSSDAVRHSGLDVTVHSSDSRRARGHLARQGPGVLRWALFEAAVCAARPASPDHAYHLQVKARLCHQRAVLSVARKLARWCHHTLRALGDQALAPA

SEQ ID NO: 153889 - protein, 421 aa, unidentified
MKPQVSEAFAAFVGLDWADAKHAICLQAAGTVQREFLSLTHSPETVHTWVQTLRTRFHGQPVAVCLELNKGPIVSALRHYDCLVLFPVNPLTVAKYREAFTPSRAKDDPTDAELLVDILLKHRDKLAPLNPQSPAMRALAQLVEHRRRLVGDKVRLTNRLTSALKNYFPQVLQWFAEKDTAIFCDFLSRWPTLKAAQLARRTALEGFFRTHHVRSTDLIATRIEAIKSARALTTDDGVITPNAILVHALVAQLRVTLQGIADFDRVIVQRAQDHPDFPLFDALPGAGAVFAPRLLVAFGEQRERFTSAEDLQKYAGIAPVTERSGKKAWVHWRLQCPKFLRPTFVEWAAESTRHSFWAQVYYQQQRDKGKAHQAAVRALAFKWIRILYRCWQERTPYDEAIYLQALKRRNAPLLHNLADMS

SEQ ID NO: 153890 - protein, 390 aa, unidentified
MIRFYQQQHRFYAGIDLHARTMRVCVLDASGTVVLDRNLPCHFETLLEAIAPFRDGIVIGVECMFGWYWLADHCAEQQIPFVVGHALYMKLIHGGKAKNDRIDAYKIAHLLKGGNFPLSYAYPKGMRETRDLLRRRMYLVHKRAELITHLEILNAQNNLPPFGKKLSYAANRAELNIPERFTDRSVKMSATLDLDLIDKLDELIGKVELYLTRTAKVDDVQTYHRLRTIPGVGPILALVLLYEMHQVERFEHVGQFLSYARLVRCEHESAGKKLGWGGQKIGNAHLRWAFAEAACLFLRGSERARQWKQKQEKKHGSAKVLGILAARLARAVYHLLRKHEAFDEERFWSGQAPAAQAPTKPAQPAPAQGARSTRHAAGRGTRSTGRAAAR

SEQ ID NO: 153891 - protein, 326 aa, unidentified
MTDYVLGVDVAKNSLSFCLIDSANRQVVLEANTQNNEREVERLLSSLPVTNTRSVCVAVEPTNTYWYTVAETARLAGCKVVSAPPKATKLFLRSVSPRVKNDRLDAKGIALYAASMDLKAYQPKPQELRALDELLSLRRKLSETIAYYSQMANAGSSAADIAANMLESSKTQLAELDRRIRDALKTLEPAKKLIEVPGFGPVVTAALVSKLLSIPFKTSDAFVAYVGLDLKVTESGQSRGRRRLSHNGDAELRRLLYLAAQATLCAKNSPFAQIYQRHIADDRNLTSTQAICVTARKMARTAWSIVKFGSSYDPNRVFQSPLDRKA

SEQ ID NO: 153892 - protein, 378 aa, unidentified
MNKRSKLNFSGQLIYIGLDVHKKSWSVSIFTKHGEYKSFSQTPKAETLMKYLEHHFPGAQYHSVYEAGYCGFWIHDQLKEKGIQNIVANPADIPTQDKERRNKRDRVDCRKLARGLRSGDIKGIYTPPRWKLEDRSLIRTRLSMGRKQGRCKNQIKSMLLFYGVDIPEQREMGHWSRRFIRWIEGIQMQRASGDVALKIHVEELCHLRQVIAKLNRAILALSRTEEYRDWVSLLRTVPGISTLTAMIVLLELGEINRFPSLDQLCTYVGLIPDIQGSGEKEHVGGITQRGHSYLRWLLVEASWVAVRKDPAMMEAFNEYCKRMKKSKAIIRIARKLLNRIRYVLKNKAEYVPCVIEYPGERRRRIGSTEPDLEDRPCG

SEQ ID NO: 153893 - protein, 315 aa, unidentified
MAKEFFVGIDVSKEFLDVGVSPTGEFFRETHDARGLKSLVKRLVGLHASLVVLEATGGYEMAAWTALVKAKLKVAVVNPRQVRDFARAEGQLAKTDRVDAMVLARYASRMQPEPRKLPSDEQQELGGMMARRRQLLAMISAEENRLSRAKSPLQRRIASHVSWLRKELLEVDRDLSDRISKNTEWRRKDELLRSIPGVGPVLSRTLLAELPELGSLNRKQVAALAGVAPLARDSGLHRGRRVAWGGRAQLRGALYMAALVASRRNPVFSAFYKKLVAAGKPKKLALTALMRRLLVVLNAMVHQNVAWNPSMAASR

SEQ ID NO: 153894 - protein, 360 aa, unidentified
MFSERTSVGLDVHARSVAAAAIDSVTGELFQTRLTPAHDHVREWVLSLPGPVAVAYEAGPTGFGLYRSLIESGIRCEVVAPSKLQRPAGDRVKTDAKDAVHLARLLRIDEITPVSVPTLEQEAARDLVRAREDVRRDLMGARHRLSKLLLRHGIVYSGGKAWTGKHDAWLRTQRFAMPSTQMTFDAGYDTVLTTSARRNRLDQAIKAIATDSDFTPVVRRLACLRGISMLTAFALAVEIGDWHRFTGNTIGSFVGLVPSEHSSGASRVQGPITKTGNQHLRRLLIEAAWHHRPRYAPGAVMRARWDLAPAAARARGDLGNRRLHGRWVGFDARSKRSVIANTAIARELAGWCWSLAILED

SEQ ID NO: 153895 - protein, 321 aa, unidentified
MQFIGNDMAKATFDAALPLSNGKYRTKAKFPNTPKGHAEFVAWRAKHAPDAAVGMEATGVYHEALARALVEAGVEVYVANPARVKAFGQADGVRTKTDRSDAKLIARFFEAQRPEKLHPYVPPTPSEVKLRALVRRRDDLQEMLQMEHNRLEVADISVQRGIKDVIQTLEEQIKQVQKAIQDHIDNDPDLRNRHRLLTSIPGVGDTSSAQLLAFLGDLNRYSDVRQVVAHAGLNPAQRQSGNYEGKARISRVGDANFRKKLYMPALTGKTHNPALKDFAERLSKKGKPFKVVMCALMRKLIHLVWGVLRSGRPFDPEIALA

SEQ ID NO: 153896 - protein, 354 aa, unidentified
MSQQLRTTITVIGIDIGKNSFHVVGLDKRGAIVLRQKWSRGQVETRLANMPPCLIGMEACVGAHHLSRKLKGLGHDARLMPAKYVRPYSKGQKNDFRDAEAIAEAVQRPTMRFVATKTAEQLDLQALHRVRERLVSQRTGVINQIRAFLLERGVAVRQGLRFLRAELPDLLATRTEALSPRMTRVIEDLAGDWRRLDERIESLSTEIAALAHQDAACNRLMTVPGVGPIISSAMVAAIGTGDVFSKGRDFGAWLGLVPKQISTGDRTILGKISRRGNRYLRVLFVQAAWVVLIRPKSWERYGLKPWIEAAKKRLHHNVLAIALANKLARIAWAVLNKERNFECNSMDKMASRPA

SEQ ID NO: 153897 - protein, 399 aa, unidentified
MLAVGIDISKSKSVAAILNQDGSMHTSPFEFHHTQPELDAFIKYILNSNQSATILMENTGHYHYPVLKAFREAGLPVCMVNAYQIKKFGDMDLRKAKTDKKDAVRIARYALEKSYSLVPYTSMEQKYEDLRFLARQYNQRMLTLKNNKVFLLNLLDETMPGITNILPLTTRTPETSLSVLFINRFKSYDRIKKMGKSRFLDAFEKIARKSRNRQTKTYGLAIYEAALRNITTRGENEYTLAAQDQCLELVCESQKAADSIILKMQTLAETLPEYAVLRSMAGVGDRLGPLILAEIGDIRRFHSGKALNAYAGNDAPPYQSGTFESHNRHISKRGNAALRKYCFEVMQALKLTRPQNDPVYLFLLKKEQEGKPYNVAKMAGVNKFLRIYYARAMETLKQQ

SEQ ID NO: 153898 - protein, 401 aa, unidentified
MNAVGIDVSKNKSTVAILRPFGEIVTKPFDVKHTSSDITHLISQLKSLNGDTRIVMEHTGRYYEPMAQWLSDAGLFVSAVNPKLIKDFGNNSLRKVKTDKADAVKIARYTLDNWCDLKPYSNMDELRRQLKNMNRQFDFYMKQKTAMKNNLIALLDETFPGINTFFDSPARTDGSQKWVDFATTFWHVDCVRKQSFSSFSKRYQSWCKKKKYNFQSQKPKEIYEFSQELIATLPRDNVTKLLIQQAVDQLNIASKNVESLRLLMNQTAAKLPEYPIVLSMAGVGTTLGPQLIAEIGDVSRFSHKGALTAYAGVDPGANQSGDYEQQSVRTSKRGTPQLRKTLFLIMDSLMKLAPPDDPIYGFMMKKRAQGKDYYVYMTAGANKFLRIYYGRVNECLASLTT

SEQ ID NO: 153899 - protein, 392 aa, unidentified
MVYVGIDVAKDFHECAILSQDKEVLLAPFSFSNTKEGFVYLKEMINLAGNADPLNVKIGLEATGHYSVALLSFLEHNGWRIIYLNPLSVANAKKARSLRRTKTDKSDALYIAELIIDERLRAYTASSPDILALKSLTRARYRLSKELQIIKGRIKRSIHLLFPELPNLFVNLYRKAVLNVLKKYPSAEDVSKANLTVLTNLLKSNSHGVFGKTKAKQLKERAKNSIATYSPGDALELKLLAERILFMHEQRATIDEEVERIMREINSPITTIPGIGNITGAAILSEIGDISRFDTSSKLQAFTGTDPCVYQSGKFNANNTPMVKRGSSYLRHSLYLATCMASMTSPTFSSYVAKKKEQGKHYYVAIGHAMKKMIRIIFHVLKTGKSFVELSA

SEQ ID NO: 153900 - protein, 391 aa, unidentified
MFIVGIDIGKRNHEATIIDQGGSIIGKAFRFANSITGFNRLKEIVKRVTGYDVVFGMEATGHYWLALYTHLRKEGFVIHVINAIQSDALRAMYIRQQKNDSRDSFIIADVIRFGRFCETTVSPPDLFALRELCRHRFYTVDSVSDIKRKVIALLDQIFPEYENLFTDTFGKASLELLSEYTTPEEILNVDTDKLVETINIASHGRLGLKKASEIQDAARNSFGILLATDTIALLIRQYIEQIRFVEKQIDLLDAEIARLLSAFETQLTTITGVGPTLAAVILSEIGDVKRFNSAAKLAAFAGVDPTMKQSGDFTGSRNRMSKRGSPYLRRALWLAATVASFKDPAISAFYQRKRAEGKSHLTTLGHVARKMVNIIFAVLRDNSPYSPTIAI

SEQ ID NO: 153901 - protein, 401 aa, unidentified
MKRLSGGIDIGSDNHHIIIMDDEEQILYDQKIAHKFSEFYKAVREFREIEKREGGIISFAIEGKNGYGAPFDRILIESGFTLYNVDNLKLKQFRNVFGAEWRNDKRDAKMLAKMLKLRDYLDAENEKAFIAVEKATKINEKLKILSRHQQTLIDEKIRLQNRLRKRLLEVCPEILEIGDTDSKKMLRLLVRYPDFSRYKGLTMGALLKIKMIGKKQASLMLESLRNTKYVEELADIYKTIISSHSRRILELKEEIEMLDKKLEKLGEKSSEVKRLKSISGVGTKLSSRLVGEIGDINRFKNERQLAIYCGVACIDDESGKHKRTRVVYKANKICKATMIEIAGCTIRYVSESATYYAKKRTEGKEHNHALRCLARQLIKVIFKMLKEDRDYILKKEMEKAA

SEQ ID NO: 153902 - protein, 350 aa, unidentified
MMIIGCDYHPSFQQISFVDTETGDCGEWRLKHKEEAEQFYRDLQTRGLKVRIGLEASGYTRWFERLIEELGLELWIGDAAVISRQRVRKQKTDREDAELILRLLTENRFPRIWVASGEERDLRQLLWHRHRLVQMQTRLRNQLHAVALNEGVRLKKRMWRAKGRAQLEALRLMPWASRRRQALLRLLDQVDAEVAQLTASIEQEAKKRPQVVRLMTHPGVGALTALAFVLILGTPDRFPRSRQLSSYLGLVPSEESSGERRHLGHITKQGNTLLRFLLAVSAQATVRSDPDWRRRYLHLTMRRERAVAKIAMARRLAVRLYWMWRNQCDYAHLPKLGSYVGQPGNPHGRQ

SEQ ID NO: 153903 - protein, 421 aa, unidentified
MLYVGIDWAEKCPNEFSILTEDGTLVKRGSIPRSVDGARELAEQLARLRSDPAEVLIGIDRKNDVLTSVLHSEGYEVYPLNPLSTDRARQIYYPAGQKDDGADSLVHAQMVRTDRRRLRPLGDRDQKDARLRRLLKTRAQLVDTRAQYLQRLGSVLAEASPILSGLCEDLRRQWVVDLLRRWPLEQDFCGVHGNSLNAFLARHSMSQETERKVRSARRQTPYRHPEQMAECYRGEIEAMLDLIASVQEQIDRLEAKIEKLRAEHPDNEIFSSLPTGGAITLAALCTAFGPDRQTPYGWRDYSSYFGTSPITRQSGASRRVRMRRARDPVMHRALLHLADATRRKADCWAHGYYRRKREEGKGHYHALRCLACRWVKILHAMWRHRRPYEEEFHLRRRRERGGIVASGGSPEPDFSAERSRK

SEQ ID NO: 153904 - protein, 427 aa, unidentified
MRFIALDVHRDFCEVAVKDESGLRLAGKVRTAVAELQLFAQSLAPDDQVALEASEPALQIARILEPHVGGVAIANTRKLRAIAESKVKTDKLDASTLCELLAAGFLPAVWSPDEFTRALRRRLQRRAKLVRARTRAKNECHAVLARNLKGKPPMSDICGRKGRRWLAALPLPADESETIACCLREVDFLDSEIALIERELAAQALDCEEIRRLMTVPGVSLVSAATFVAVVGDAKRFPSPKKLVSYVGLDPRVRQSGEAPARHGRISKQGSPEARHMLCEAAWVLIRTPGPLRAFYARVRARRGAQIALVATARKLSVLFWHLLTREEDYAFQRPTLTRRKLRGLELKAKDGRRSWPSGHAVGTRQDREREREYAEQVEAAYRRLVADWQPRAPRSGAGATRGRASSSHLLGEETATRQGSAPEPAL

SEQ ID NO: 153905 - protein, 367 aa, unidentified
MQKIRFVGLDVHKESIAIAVADGDGSAPENVATIPNDKVALLKQLKKLGSGATLRCCYEAGPTGYVLLRELRAAGIDCIVIAPSLVPKQAGDRVKTDRRDAVKLARFLRSGDLTEVHVPEAATEAMRDLERSRDDAKRAERVSRHQLTKFLLRHGRRYEGKTAWTGMHLDWIRKQVFDHEAHNRVLVDYVQAVETATARVDRLTKDIVELVESWSLRPLVKALQALRGVQIITAVILAAELGDFARFASAPALMAYLGLIPSEHSSGETRRRGRITRTGNGHVRRILVESAWSYRFRPTMSWEIRKRNEGVAPAVQAIAWKAQQRLNGRYKRLMGKGKNKQQTVTALARELAGFVWSIARQPQLLAA

SEQ ID NO: 153906 - protein, 415 aa, unidentified
MTDVIIGVDPHKLSATIEVVDHQERLLGSGRFSTDKAGYRAMRTYVKTWPRRVWAIEGANGAGRPLAQRLVEAGERVVDVPAKLAARVRLFDTGHNRKTDALDAHSIAIVAVRTAGLRVLAPDGELEALRMLTDRRDELARLRVQTVNRLQRLLSELLPGQRKRDLSALQAKAMLATVRPRDIAGKTRRRLAAEELADLVAVDAKLKKIKAELKTAVQQRGSRLMQIHGVGPAGAARTLADVGDVARFTDRNRFASWTGTAPLDASSGEQIRHRLSRAGNRRMNHVLHVAAIVQLRNDTEGRAYYRRKLAAGKTPLEALRCLKRRLSDVVYRQLVADADTAEETGPGGHCGASLDSSAVDLPPHVDTSDQPLPGPAQPTLPQPRPVRTPTRPRQPAVRNDAQEPSRWSAPPDERP

SEQ ID NO: 153907 - protein, 344 aa, unidentified
MTSMNFIGFDIHKKTISYCVKDAAGEVLAEGTILSTRQSLDVWMRTLCEPWTVAMEATMFTGWIYDYLLPHAAAVKVAHPLMLRAIAAAKKKNDRIDACKIADCLRCNFLPECYMASTEIRERRRTLRYRKLLVRQNVQLRNKVSQMLMESGVVYNKQKLHKVGYFKELMTTNPDIREGLRPLLTICRETIVRIGKTEGALVRSLARDPLLSDRVQRLMTIPAVGPITALTWVLEVDDVARFGSVKQAISYCGLCGAERSSADMVKRMPISKQRNKHLQSVLVEAAKLGPRLSPDLALVYETEKQKGHANRATIAVARKLVAYLLAVDRSGREFVVAGERREAA

SEQ ID NO: 153908 - protein, 354 aa, unidentified
MFHVGLDIHTKHIAICALDERGQVVHRSQVRTIQDLVRVLTGLPDRCEVCYEASCGYGHFHDLLRPLATRVLVAHPGQLRLIFRSKHKNDRNDAERLAKLLYLGEAPAVHVPSLEVRTWRELINCRSQVIAKRTRAKNTVRALLRSAGVTPPKSPGLWSKKGLAWLRQLALPTASQQLRRDLLEEIEGLIRPVRRVEQQLNRQAGQTGAVARLRSIPGVGIRTAEAMAAFIDDPQRFGDAKAVGCYFGLVPCQDQSGDKNRLGHITREGAPVVRQLVAEAAWQAQRRSPTVRAYFERVQRDDPQRKKIALVATAHYLVRVMWAMLKRGTDWQEGPALATASGAAAGGDPAPEVD

SEQ ID NO: 153909 - protein, 366 aa, unidentified
MKKIITVARNRNEIFKQPQLTIGLDLGDRISHYCILDEIGNVILEQSVPTTPKGMQQVFSKISRCRIALETGTHSPWVSRLLTQLGHDAIVAHARNVQLITESSRKDDRLDARTLARLARIDPELLGPVRHRSAKAQIHLTVIRARATLVSARTALVNAARGLTKSYGERLPKCGTEQMNREIAKGLSPELRDVLEPLLGEIESLKERIAEYDRRIEQIAKEVYPEVALLKQVKGVGTLIALTYVLTLDDPHRFRRSRDAGCFLGLRPGRRNSGMSEPQMHISKEGDAYLRTLMVQGAHYILGPFGQDSDLRRWGLKLAERGGKNAKKRAVVAVARKLAVLLHKLWVSGEVYEPLRNNHQVVSAVA

SEQ ID NO: 153910 - protein, 333 aa, unidentified
MVEGTLGSHHKEGSKKMSKYSMICAGIDTGKRKLDVALDGRAERLQVDNNADGHKALSVWLRRHRTKRVGIEASGGYEQAVVAELRRDHFQVIVFQPAQVRAYAKFHLQRAKNDKIDAALIAACTAAAKKIHAPPDPRLAPFSQHLTMIEQITEDIARFKTRRESCRVPRIGRFWDEEVARLKRRLKIELEQLLAAIREHRDLAERLDLIASVDGVGERTALAILVRMPEIGTLSREQAAALAGLAPYDDDSGDQVGARRIDGGRERLRKSLYAAALAASFRWNAQLGAMYRRLLAAGKAHKLALVACARKLLIFVNTVVARGTPWTKNTAPV

SEQ ID NO: 153911 - protein, 399 aa, unidentified
MKESITFVAMDVHKKQHSVAMLLPNAQTPDEWTVVNTAAALKKMVRRICKKAPGRVLVCYEAGVCGFALQRQIQSYNERVTCIVIAPSLVPITPGQRIKTDRRDARKLVKYLKAGMLTEIHPPDEEAESIRDLVRSREAAGEDLLRARHRLLKFLLRRAMHYRDGHHWTQKHLRWLSGLRFDREQDQYIFRGYLSEIGHHKDRVAELTGVIEAAAVKAPYAEPVGWLRCFRGIDTVTAMTIVTELYSFERFSSPRQLMSYLGLVPSEHSSGESEHKGGITKTGNRRVRRVLSQAAWHQAKFPGVSAALKMRRKGQPQWAIDLADRAMHRLYSRYKRLVYKGKVPTVAATAVARELAGFIWATLYLKDQAAMHYRERQPRKKVQAKADCRQTAVEFLAAT

SEQ ID NO: 153912 - protein, 362 aa, unidentified
MRIIGCDLHTRQQTVAMLDTTTGAVERQTLRHDGSNTREFYSALPRPVLVGIEATGSMHWFLNLMEELGIECQVGHPGKIRAAEPRKQKHDRRDAELILTLLVENRFPSIWLPSKELLDLRALLLHRHQWVRMRTRVQNALQAIALANGLRRGPSLWSQTGQDMIASLPLAPHTAHRRSELQAIYGKFQAEVEKLNQRVEEQACKRPGARLLMTHPGVGPITALATDVFLGDPTRFADGKALASYVGIIPREYSSGGRQRLGGLSKQGNPLLRFLWGEAAAHAVRRDPELQRFYRRKLLQKGVGKARVAVARKLGIRLWIMLRDEIDYKEFCRRGQMQQRSGDACAGMPEARNGADSHRPID

SEQ ID NO: 153913 - protein, 363 aa, unidentified
MENSSTATGIGKRWTVGIDVGDKTSRLYVLDEEGEVVEEGWLATTEPAFRRRFAATEPCLTVMEVGTHSPWLSRLLEGLGHECLVANPASLKGKQRKKSDKIDAEKLARWARSDPKILEPIRHAGAEVQADMALIHSRRSLVEARTKLINRTRGLVKSFGGRLPKCDSDYFAVKMKHLVPEALVGPVEPLLRLIAELTAEIKGLDRQVAALADKYSQATAPLMQVKSIGPLIATTYALTVRDPARFRKSRQVGAYLGLTPRQQSSGQREPELSITKAGNVYLRKLLVNAANHVLGPFGSDSDLRRWGLKKAEGGKVARKRAIVGVARKLAVLLHHLWLTGEEYDPLRRHAMVEEASSPPRQPA

SEQ ID NO: 153914 - protein, 339 aa, unidentified
MQVVRIGLDLAKYVFEVHGVDSHGKVVTRKTLRRDAVTQFFANLPRCLVGMEASNGAHYWARVLSDLGHEVRLISPQFVTPYVKSNKNDRNDAEAICEAVGRPSMRFVPPKSVDQLAIQAVHRIRRRLVADRVRLVNQVRGLLSEHGIVIARDITQLRRGLAVIVGNEADGLSDMVRSLMRDLQTELTELDRRIRTYDRRIREIFRTNEQCQRLARIEGIGPVTATALIAAVGDRTCFKNGRQFAAWLGLVPKQRSSGGRARLFGISKRGDRYLRTWARAALGKAAGKQDPRSLWLSKLRARRHPNVAAVALANKNARVVWAMLSTGTFYEPALALETA

SEQ ID NO: 153915 - protein, 354 aa, unidentified
MSQKLNAAIAVIGIDIGKNSFHIVGHDHRGAIVLRQKWSRGQVETRLANLPPCLIGMEACVGAHHLSRKLQMLGHDARLMPAKYVRPYSKGQKNDFRDAEAIAEAVQRPTMKFVATKTADQLDLQALHRVRDRLVGQRTGVINQIRAFLLERGIAVRQGLHALRSELPGILATRTDVLSPRMLRIIEGLAEDWRRLDQRIEGLSGEIETLARQDEACQRLMTVPGIGPIISSAMVAAIGAGDVFSKGRDFGAWLGLVPKQISTGDRTILGSISRRGNRHLRALFVQAAWVVLVKLRCWERYGLDSWIEAAKKRLHHNVLAIALANKLARIAWAVLNKGRAFACAKTQETVSRPA

SEQ ID NO: 153916 - protein, 367 aa, unidentified
MKKVSTAATKRNRNFSQPNLTIGLDLGDRSSCYCVLDETGRIVMEQKVSTTAKALQAAFGAMPRSRIALETGMHSPWISRLLSGLGHEVIVAHARNVRLIGESRKKDDRLDAQTLARLARIDPQLLCPVRHRSAKAQADLTVIRARAGLVRARTALVNTARGLAQSYGERLRGCNVRNLNPEKAEGLSPELQAALQPLLVALESLSEQIGEYNERIDKLAQESYPQVGQLKQIKGVGTLIALTFLLTLEDPHRFRKSRDVGCYLGLQPGRRNSGQSQPQMHISKEGDPYLRTLLVQGAQHILGPFGIDCDLRRWGLKLAERGGKSGKKRAIIATARKLAVLLHHLWVSGEAYEPLHNRHPAAMPAAA

SEQ ID NO: 153917 - protein, 393 aa, unidentified
MICVGIDVAKDKHDCVILNSEGKALTGVFTIPNNADGFDTLLQKIHGCTSPDDKIKVGLEATGHYSYNILGFLLNQGLPTYVINPLHTNLFRKSMSLRKTKTDRVDAKTIAAMLMSNVDLKSYTDTAYHNEELKSLTRYRFVKVSERAQLKQSVSRLVTILFPELEKLVPTLHMSSIYALLIEFPGAKQITEAHLTHLKSLLKDASKGRYGRDMATEIRDAAKHSIGSVMPAKSLELRHTIRLIRELDSAIEDIESAIEAIMDEIQSPITTIPGMGFRMGAMILAEIGDFSRFDSPSKILAYAGMSPSTYQSGQLSLAGTYSHMEKRGSRYLRYALYNATKYVCHWDPGFAAYLAKKRAEGKHYNVALSHAAKKLVRLIYAMEKSRQPYNSVA

SEQ ID NO: 153918 - protein, 339 aa, unidentified
MANVAVLGIDIAKNVFQLHGVDCDGQVALKRRVMRDQLLQITEAMPPCLIGIEACTGAFHWQRHFESQGHTVKIIAPQYVKPFVKGQKNDGNDAQAICIAVQQPHMRFVPKKSIIQQDIQGLHRARQRLVNHRTALISQMRGLLLERGVAIPKSASVAQRTIPEIITNPRIDITELTRDIIGTLHAFLLQLNEKIKYFDRQIEAVFRESEVCQRIAKIRGVGPKTATAVVAAVSDGEDFKNGRHLAAWMGLVPRQHSSGDRRILLGISKRGSQHLRTFLVHGGRSVVRTAQRKSDPASEWVNELRERRGYNRAAVAVANKNARVIWALLHHGGEYRANP

SEQ ID NO: 153919 - protein, 317 aa, unidentified
MTDTWIGIDVAKDELVVGLLPTTTWAVANTELGIRELRARLGPLAPTLIVLEATGGYELAVVAALLESQLPVVVVNPRQVRDFAKATGELAKTDALDALVLARFAERVRPAIRPLADDAQQALDALVTRRRQLLEMLQAEKNRAGQVFAKDAKLVRRSLTLHIRYLEKELGEADAALTQAIQASPIWRAQEQLLRSVPGVGRVVATTLLAELPELGRLTRKEIAKLVGLAPLARDSGTFRGRRFIRGGRPGVRAALYMGTLVATRCNPAIRAFYQQLVARGKPKKLALVAAMRKLLVLLNAMVARRTHWSDPTLVPA

SEQ ID NO: 153920 - protein, 348 aa, unidentified
MKIIGCDFHPSYQQFAMVDTETGEASEGRLGHEQGEARRFYEALRGQPVRVGMEAMGNSQWFEQMLAEMGHELWLGDAAEIRRLVVRQQKTDKRDAQHILTLLCDGRFPRIWVPSVEMRDVRQLLRHRQKLVEMRSQVKNQLQHLALNQGVRRRRKLWSREGRAVLEALPLKGWTAQRRKELLAMLEQFDRQVAEKDRAVGVEAERRPEVRLLMTHPGVGPVVGLAYVLTIGPASRFPRGKQVASYLGLIPRERSSGGRQKLGSISKQGNTMMRTLLVEAAQTASRFDEELRRDYCRLKARKHSALARVMVARKLAVRMYWMLRERQEYPQCLVARKQGSPSHSVVAG

SEQ ID NO: 153921 - protein, 442 aa, unidentified
MQREKRSVKKALQDLKMEIRGSQNTLIIAVDIGKIRNCACFVSSSGRVLRRRFFFTNTIDGFNQLMRQSKSYQRKEELPHTLFGMEPSGYYWIHLYEHLINCGKRTVTVSPLAVNRNRETINVSKDKSDPKDAYNIADLMKQGKFYLPIYRDKRIRELKRFTKIYCRLIAQRASLRCRLRGAVGYIFPELEHYFTDILAKSMIIILKKCPFPYQIKKMGKSRFISLLAKKNPRLPKKRTAEIYELARLSVGITGEEESAFFEIKFLLNELEALDRSLVEINARVQNIVSDRDDYRLLITIRGVGPVTASSTIAEIGDITNFSSGKQLIKLSGLDLYGSESGISIHSLRHISKRGRRTLRTVLYQAAINCIRCNAHLKACYLKLLANQPNKKKVKPKAIVAIACKLLRIIYRMLTDKKPFDSTYDQRLREKASLKMVKSSLLV

SEQ ID NO: 153922 - protein, 412 aa, unidentified
MQDILTCAMGLDVHRDIIVACLVKGAVDAEPEAETRTFSTLIPEMQKLRDWVIESECRNIAMESTGIYWQPIYELLESCFDGEISILVVNARHMKNVPGRKTDMKDAQWIATLLRAGLLKGSFIPDKAFRELRHLTRYRKSVVHDITAQKNRIDKFLQSSGFRFTAFLSDTFGASGRNIIRHLIEHGSIDREALDKCLKTKTRNRIDEILVALNGSLSEHQRRFLNMVFRHLEDLEAHKHTVEDEITEEVLKHTDALNLLCSIPGIDVTAAAAIIAEIGTDMSSFPDSQHICSWAGLSPGNNESAGKRKSVHINKGNPYLKSMLCEVAWIMASHRKLYLSGWYWKVKQRKGAKRATIALARKILSIIYTMLKTGTPYNEECFEQRRLRCERKRANRLVNELQKLGYVVVAPD

SEQ ID NO: 153923 - protein, 427 aa, unidentified
MSEVQSGKQEPQFAAFVGIDWADQKHVWCLQAAGSEKRESGELVHTPEAVEAWVGQLCQRFANRPIAVAVEQTRGALVFMLSKYEPLHLFPVPSTMAASMRKALYPSGSKDDPRDADLLLDLLLQHRDKLRRLSPDTEATRRVQNLVEERRKLVDEKTAQTNRLTSHLKIYFPQILDWFERLDTELVCALLERWPTLEELQKVPPAKLRTFFRKHHCRDQALIERRMVAIRQAIPAIRDRAVIEAKSTVVKVIVQVIRSLVEGIADLDEKIEEAAAAHPDFFIFDSLPGAGAVMAPRLLAAFGSQRERYGNAAEVQAYSGIAPVTERSGKKKWVHFRWACPKFLRQSFHEWASHSMAYSVWARSYYQQQRSKGQDHQAAVRALAFKWIRIVFRCWKDGVAYDESKYLAGLARRGSPLSALVATAKTL

SEQ ID NO: 153924 - protein, 362 aa, unidentified
MKEYIGVDLGKRKAVVVKKDRLGKVTGKVTLAVTEAALEKYFSKQDRRSKVVVEATGNWMYLYETIEKYVPEVVLAHPLKTRAIAEARIKTDTIDATTLAELLRLDGIAKAYIPPREVRDARELLRYRASVVSMRMGLKNKVHAVLTKNGMECGFSNVLGKRSRQWLKTLSVRDCYRRELDGYIRLAELSTGLIQEITTKIKEVVSVTPQAQLLMTVPGISYYSALLILSEIGQIDRFPSAKHLCSYAGLVPSVYSSGSKSFHGRITKQGSRWLRWICVEISIHAANGDAAFQSLYRRICRRRGLATAKVAVARKILTVIYAMLKNNEPFRRRRPRHQILAKAWSKKNKESSGHPPGVMIQA

SEQ ID NO: 153925 - protein, 375 aa, unidentified
MKDKVRFLGLDVHAETIAVAIAEPDGEVRSLGTIANRAESIRKLVKKLGSSEQLKACYEAGPTGYVLYWQLAELGVVCEVIAPTLVPMKAGDRVKTDRRDAERLAGSYRSGDLTAVWVPNEGSEALRDLVRAREAAKQDQLRARHRLSKFLLRSGQRPAMGVKAWTQSYMAWVRQLRFPQIAQESTRLDYLHEVEHMGERVKRLEQAITEAVKLASPELQTVIQGLQALRGVAQISAVTIAAELGNMSRFQGARQLMGYSGAVPSEDSSGQRTRRGSITKTGNAHLRRIAIEAAWSYRLRPGVGPALRKRQEGVPDEIKEIAWKAQHRLHKRYLRLAAAGKDQRKIITAVGRELLGFIWAIGVKAEAAVRQPVAA

SEQ ID NO: 153926 - protein, 358 aa, unidentified
MAVTGGTRRIVGGVDTHKDLHVAAVVDEQDRVIGTRSFATTRQGYRQMLAWMRSFGELQRIGIESTGSYGAGLLRFMQQAKVAVLEVTTPDKQDRRRRGKNDDLDAQNAAHAAFAGQRTVTPRSRDGMIESLRILMACRKTAVSARRVALQMIHNTIVCAPDGLRDQLRSLTRMQLVRTLASWRPDLTAYRDLDSAYRIGLKSLARRYLELHDEIADLDVMIAAIVDELAANLVARNSIGHIGAAQLLLTAGDNPERLRSEASFASLCGVSPVPASSGKTVRHRINRGGDRAANSALHIIAIGRLRTDQRTKDYVARRIAEGHSKLDAIRALKRYLAREVFTLITQRRKEINATRIAA

SEQ ID NO: 153927 - protein, 342 aa, unidentified
MKFYCGIDLHATNSFLCVIDDKDKILLKEKLKNDLGTILYALESFSPRPSVVVEATINWYWLVDGLQEAGFDVKLAHSMALYMITGAKVKTDRRDAFSLAKLLRLDAIPEAYIYPKARRPIRDLLRKRKQVVRLRANAYGALRRVLLQYGFYGYSQATIKSLTEEQLDQHLEHFATQAGCHLEVQRIRFYSDQIKILENIILNSVSDDRCFELLQTIPGVGKILALTILYETGDIDRFQSAKHFCSYARVVPGVAQSSGVSKRGRGSKQGNPHLKWAFCQAAALSVRYNTGIRKFRQRHLARRRSKAKKLVTLCIVAHKLAIASYNVLKDRVPFKQELMFGS

SEQ ID NO: 153928 - protein, 379 aa, unidentified
MERIIYIGMDVHSTSYSLCALEPVFGQENKFFFETKVAAEPSNIIKYIDDIESCFANDECTFVTGYEAGCLGFSLYNYLKGRGIDCKILAPTKMSEEKGGKKVKTDKRDARTIAQNLAYGTYSAVFVPTEEDLAVRDYIRMRNDHKAAVKRIKQQINALCMRHGYIYQRTKWTAEHLKYIQRMTLSPLYREILQEYLATMEQLNNKIKAFDVRIEELSKTKRYKDNVGKLACFTGITRSRALAIIAEIGDFRRFLKPLNFAAYVGLVPGEKSSGKKQKRIAITKAGNSHIRKELIEAAQSICRGLPGYKSRALLARQQGNDTTVINYADKASARLRRRYYKLGRCGKKHNVAVTAVARELSCFICGMMNGLTEVQIKKA

SEQ ID NO: 153929 - protein, 368 aa, unidentified
MHELTTGFVGLDAHAESTAIAVAEVGRAAPRFVGTVGPRIAELTKALGKLGGPPSLQVVYEAGPCGYALARELIRLGYRCEVVAPSKIPRRPGERIKTDRRDALNLAGLARAGELVSVTIPDERDEAMRDLSRARVDAVRARLKARQQLKALMLRHGRRYSGKTSWTAAHERYLGEVSFAHPAQDIAFTEYRQAVGEAEVRVQRLNESLTREVEHWRMHSLVSAVMTLRGLDLVAATTLIDELGDLRRFAHPRELMGYLGLVPSEHTTGSKRRLGAITKTGNSHVRRVLIEAAWNYRFPARISRVLQLRQERQPAEIRAIAWRAQLRLNHRYRRLKARGLHHNKICVALARELAAFVWDIGRQVAASP

SEQ ID NO: 153930 - protein, 358 aa, unidentified
MKVCGSDGIVVCVEKTITFPGATDMSSVTLFVGLDYHQAFVQVCVMNEAGAVLGNRRCDNIATAIVEYVRGHGDHVIAAIEACCGAAALADELIAAGWKLSLAHAGYVNKIKQSPDKTDWSDARLLADLIRVGYLPNVWLPPAQLRQLRHVVRYRQQLAQERRTAKLRVTALLRTHRIEFQGSRWTKSWLAAVRDCQELGTEGKWVVGQLLDQINYLQKQLDITEARLRELTAQDVFVQKLLSYSGVGLITAVMLRAELGDMSRFQSGKQLSRFCGISPRNASSGPKQADAGLIRAGNPQLRTVLIEAAHRLQRCDPRWAELGRQMRSRGKPGSLVAAAVANRWVRWLYHQLTKIQVV

SEQ ID NO: 153931 - protein, 309 aa, unidentified
MGLDLAKRIFQVHAVDASGDVVVRKALRRSQVLPFFTKLPPCLIGMEACGTSHHWARELTELGHEVRLMPPSYVKPYVKRGKNDAVDAEAICEAVTRPTMRFVVMKSAEQQAALSLHRTRNLLVKQRTQLVNMIRGLLAEFGIDIPEGLERALKLARQIAAKKSTLDVPAMALQILCLLCDQVLDTHARLQTIDRSILAQQRTNEMARRLSTIPGIGPIGATALAASVADPGQFRSGREFAAWLGLTPSQNSSGGKDRLGHITKMGDRYLRKLLVIGATSLIRRAGVSPRLRIRASSRCSPGSRRAWRA

SEQ ID NO: 153932 - protein, 341 aa, unidentified
MKRYHYIGLDVHKKMIAYCVKQADGTVVEEGKIRATRSALAAWLGLRKVPWVGAMEATLFTGWIYDFLGPHAVELKVGHPLKLRAIVAGKKKSDHLDARTLADLLRCDLFPECYMAPEPIRELRRVLRYRTLLVQEATRLKNKTAGLLMEVGAQYDKERLHGRRYFEALLGRFEDVPPSVIRLLRLSREAQEIFERNQRWLVDELRHHPDLQERVERLQSIRGVGEVTALTWVLEVGEPERFSCIKEAVSYCGLCSGYHESAGKVQREPLSKQRNKHLQTILIEAAKLAPRWNAQLAAVYDRERARGADPNQATLAVARKLVAYLLYVDRTGKPFEVREAA

SEQ ID NO: 153933 - protein, 337 aa, unidentified
MNFIGVDLHKQTISICVVTEDRQVICRQRLACAWEEKILEFFAQWTPYYVVVEATASYEWFLKLVEPMADRVVLAHPKKLRVIAESTRKSDKLDAQVLAEFLALDMIPEAHRPTPRVREHRSLVRHRVYVQRRITSVKTKIRRILSNYNLDRPNLFSSSGLEYLAEVKVSAADRFVLDQLVEEWQQHHRRLLAVAKQLRAFAKQAPVAEREGRAVLDSIPTVGPVTVDVVLSELGDVRRFRSQKQAVSYAGLAPGYRQSAGRAKQLGISKEGSKLLRWILVEAAWRLVGKTRYWGGIYERLRNRCGPKKAIVAVARRLLCVMVSMLQNGRRYQLAKH

SEQ ID NO: 153934 - protein, 354 aa, unidentified
MDIKYVGMDVHKEAIAIAVMNGDGKLVMESILETKAITILEFIQGVRGDLHVTFEEGTWAAWLYDLLKPHVRELVVCNPRKNALMKEGNKSDKIDARKLADLLRGGYLSSVYHGENGLRTLKELARSYLTISKDLTRVMNRVKALYRSWGILCGGQQVYAPRHRAEWLNKIGEAGVRRRAEFFYQQLDALRELRQAVRKDLLAESRKQSATKLLRQVPSIGPIRTALLIALMQTPHRFRTKRQLWTYSGLAIETRDSAQYRYMAGQLQRSKKPQQLRGLNQNHNHDMKAIFKSAATMASSREGAFHDFYQGLLTKGMKPAMARLTLARKIAAVTLTVWKKGAHFDAKQLKLQAA

SEQ ID NO: 153935 - protein, 397 aa, unidentified
MIAVGIDISKGKSTVAILNGDGSIRAHPYEMHHSKADLEALIRYIRAVDDRPVILMEATGHYHYPVLNAFFKAGISFSVINPYLMKKYGDAELRKAKTDRKDALRIARYALEKWCSLVPYTPMDQKYEDLKFLSSQYSQRISLVVKTKIQLINLLDESMPGITGILALKSRNPEKCMLLQFIKRFHSFDYINRIGKTRFMNSYATLARKVGERNAASKGLAIYELSKAGITTRSDSMYMDSALDQCVAILSEAQRAADEVILQMQNIAMTIPEYGILRSMPGVGDRLGPVILAEIGDIRRFHSGKALNAYAGNDPPPYQSGQYESQNRHISKRGNPALRKACFEVMQALKLTRPQDDPVYLFMMKKEQEGKPPNVAKMAGVNKFLRIYYARAMELYK

SEQ ID NO: 153936 - protein, 342 aa, unidentified
MNLPVRIGMDTSKSVFQLHGVDENEVVVVRRQFRRAEMIRYFERLPPVLVAIESCGSSHHWARLLQSFGHQVKLIPPQYVKAYVKRGKNDAADAEALCEAVTRPNMRFVPVKSKERQAACMLMTVRERLVSVKSQLSNAFRSYAAEFGIVGPAGRQNVAQLIKRVLEDDSLPEMAKDLFRLQAEEYATVEARLAKIEAELMRWHRDDDVSRRIATIPGVGPIGSSMLSMKAPPPETFRSGRDFAAWLGLTPKDHSTGGRQRYGGITKAGDSMLRSTLIVGATALLRHIRKGRHKPTPWLASLLERKPPKLVAVALANKFARIAWRLMISGGVYNRPVAAMHV

SEQ ID NO: 153937 - protein, 387 aa, unidentified
MPKAFAQPEFPAAIQINLTAIFVSLELSRSTWIVTSLSPGAGEKMSKHTVPAGDVPALLLRFDELKRKAKARTGKSFPIITIQEAGLDGFWLHRLLESEGVESHVVDPASIATSRRRRRAKTDRLDGEALLRALLAFKRGEPRVCAMAVPPTPEEEDRRRLSRERKTLVAERVEHVNRIKGLLFSQGIANYEPIGRDRRKRLDELTTGDGRPLPDNLKSAITRELDRLELLLDQIKTVEAKRDALLADFRTDTPPLAGKMLLDFKGVGAEIAAVLWTEGLFRHFDNRRQIASYAGLAPTPWQSGSVSHEQGVSKAGNPRLRTTLIELAWLWLRNQPTSALSLWFKARVEGGRGKKTTIVAMARKLLVALWKYVMFGVVVEGAVMKNA

SEQ ID NO: 153938 - protein, 364 aa, unidentified
MFIERTSVGLDVHARSVAAAAIDGVTGELFQARLTPSFEHVRAWCAGLPGPVAVVYEAGPTGFGLFRALTAAGIRCEVAAPSKLQRPSGDRVKTDARDAVHLARLLRLGEVTSVAVPSAAQESARDLVRAREDARGDLMRARHRLSKLLLRHGIVYDGGNAWTGKHNDWLRRQARGQLAGAATLLAFDADYDTVLATAARRDRLDQAIEQIAADSEFTSLVRRLGCLRGIGTLTGFALAVEIGDWHRFTGATIGSFVGLTPSEFSSGASRAQGPITKTGNTHVRRLLVEAAWHHRARYVAGKTMRDRWDLATPAARARGDEGNRRLHQRWATFTARKKRPVIADVAIARELAAWCWSLAVLEES

SEQ ID NO: 153939 - protein, 391 aa, unidentified
MIFVGIDAAKDKHDCFIINSDGEILFNVFTISNNLDGFNELFNSIISLTDDVDNVKVGLEATGHYSYNLLGYLTSKNFKTFIINPLHTNLYRKSQSLRQTKTDKVDARIIASMLMSDVNLKSYSDTSYHNEELKSLCRYRFDKVKERAKLKTSISRLVCILFPELEKLLPSLHMVSIYDLLYEFPSAKHISNAHLTRLSNLLSKSSKGHYTKDTAIKFKEAASKSIGSNMPAKSLELKHTIRLIRELDSEINEIESEIKSIMNDINSPILSIPGISYRMGAMIIAEIGDFSRFDSPDKILAYAGLSPTTYQSGKLDSSHSRMEKRGSRYLRYALFNATKFVCHWDPTFASYLDKKRSEGKHYNVAISHATKKLVRVIYHLEKSKQTYIKAA

SEQ ID NO: 153940 - protein, 389 aa, unidentified
MYGPAVRCKSTGGERSCINVGMDGPTSPGCCPITRSGVRFGQRRWNMTITVIGLDLAKNIFQVHGIDESGRAVLRRKIRRSEVLPLFSKLPPARVGMEACHTSHYWAREIARFGHDVRMMPAQFVKPYVKSQKNDATDAEAICEAVQRPTMRFVPIKSENQQAALMLHRTRDLLVRQRSSLISSIRAHFAEFGIVVGQGIRNVERLLALLGAEGDNRLPALAAEMLGILAEQLREIAARVREVEVKLLAWHRANPASRRLESIPGIGPITASAIVATVGDPRQFQSGRQFAAWLGLVPQQRSSGGKERLGGISKRGDGYIRRLLVHGARAIVGWRKRSAVHTTPWIARLLERRPMNVATVAYANKLARIAWAMIREDRYNPVRAFAAVG

SEQ ID NO: 153941 - protein, 343 aa, unidentified
MAIVILGIDLGKNICSLVGVNEDGAVVLRRRMRRQTVLTFAATLPSCVVAMEACCGAHHLGRLLTAQGHTVKLMSPEYVRPYVKAQKNDDRDAEGIAEAASRPTMRFVDLKSQEQLDLQSLHRVRSRLVGVRRTLLNQLRAILLERGHIFPQGRRKFEAAIDTLVADPAYEISSRIRQLVIDIRSEWQALDSRIEALNGEFVAIARHDETARRLVTIPGVGVLNATALVAAVGNGAAFRRGRDLGAWLGLVPKQHTTGGKPKLLGISKRGNKYLRMLFIHGARAAMPSLSASQSPLGEWLRGLLARTHRNIAIVALANKLARIAWATLRRKTSFDLRHLAVTG

SEQ ID NO: 153942 - protein, 411 aa, unidentified
MGRAAEVVAPSSSIRTDGGCPVVQVNDLSRSLAAFDPISTLVVVVEMSKASWLVAGTVPGVERQPLKKLEPDATALLRLIERWRNEAVRAGRPIRRIALAYEAGRDGFWLARWLVSRGIEVHVIHSASVAVSRERKRAKTDRLDAAMLMRVFLGWLRGERGHCGMVAIPTIEEEDARRPSRERESLVNERSRIINRMKSALARLGIRGFKAHLRKAPERLAALRTPEGRGLPTNTIEEFRRDMARLALVREQITSIEKTRAERLERAPDTGAHAMVRLLARVIGIGIETADMLVQEILSRTLRDRRALARYAGLTGSPDESGMRSREKGLAKTGNARVRRGLIQLAWRFLIFQKDSALARWYRTRTEGPNGARKTTMIVALARKLLIALWRLVTTGEIPDGVELRPAAAMV

SEQ ID NO: 153943 - protein, 376 aa, unidentified
MERGSLMLNTTTFVGLDVHARSIKAVALDAMTGEVRSATFAYDAAAVAEWVRSLDPAAKCVYESGVTGFDLQKRLAALGVDCVVGAVSKMIKPSADRKRKNDRNDAEFLARMLSVGNVVEVWVPDDECEAARDLSRALDDAREDLKRCKQRLSKFLLRHGYVFSETTPTGRRKGSWTAAHWAWIKSISFPEKADNDVLAYYVDAVRQAMEDKKRLEKLVEAEASKPRWKRRVDSVRCLKGIDVTSAADLVFEAGEFSRFKSARSFAAWLGLTPSEHSSGESVRQGGITKAGNKHLRRVLVESAWHYLGCSPHSKDLAKGQVPDPAARRHAAKGVRRLVERRRAMLERGVHKNKANVATARELACWCWAVGCMVEGA

SEQ ID NO: 153944 - protein, 338 aa, unidentified
MRFIGIDSHKDTLAAASIDAQGRPLGSQTFANEAAGFVRLIDWARSVEPERVGIEGSGGLGRQAALALQAATFAVVEVPPQLTAAARRNQRNHSKTDPIDALIIARIVLRDDDLPTVRPTGEIEDLRALVRYRRDLLAERTRLASQLHGNLEQLHPGYQRSIGRLTTLTELDKVRRLLASDASVGARLARQRLARLRQLCKEIAAATREVEAAVSGTAVQLQTIPGVAKLAAAEILAYVGDVRRFRTKAQFAMANGTAPLPASSGRTNRHRLNRGGNRQLNRVIHFAALTQVARYPEGRAYYLRKQAEGCSKKDALRCLKRRISDRIYRSLRLDAVTP

SEQ ID NO: 153945 - protein, 353 aa, unidentified
MESPIVSIDVSNGNSHYMCFIKNNKRFGKVKKIDHDIEGFKRLLEDIQKLEAETNEKVCAVFEATGVYTKPLERFLSKNSIKTYIINPLESARKRKEEIHNKKTDKLDPISISKVYYDKEEMMELKKKDETHNWLRKKNRLYEDQLNHLRKYKVTFQNQLSICFPGYLDLFKDGYSDIPMTILKKYPHPDLLKNKKAETVARYLEKNTCHTHKVSLEYALKIIEFAKKTYPGCEKDDVEVEIFKILLDKVIETQRECEKTLNEMITVASTLEEYRYISSIDGIGPNLAARIIAEIGDIEEFKSREALVAYAGLDPHIYQSGDQDGKHLKISKKGNKYLRCSIVSGCRMFYKRS

SEQ ID NO: 153946 - protein, 392 aa, unidentified
MVVSVGIDVSKDKHDCFIVSSDGEVLADVFTIPNTLDGFTCLLQRIRECTTPQDKIKVGLEATGHYSYNLLGFLLDNGLATYVLNPLRTNLYRKSLSLRKTKTDRVDARTIAFMLLSDAGLKPYTDTAYHNEELKSLTRYRFDKVKERAKLKSSISRLVCILFPELEKLVPTLHIASAYALLEEFPGAKQIASAHLTRLKVLLESASKGHYKRDMALEIRDAARNSIGSRMPAKSLELQHTIRLIRELDVEIAEIEEQIQSIMDELHSPITTIPGLGFRMAAMILAEVGDFTRFDSPDKLLAYAGMSPSTYQSGQLKNCYPHMEKRGSRYLRYALYNATKYVCHWDPTFAAYLAKKRNEGKHYNIALSHAAKKLVRLIFAMEKSRAAYRLTA

SEQ ID NO: 153947 - protein, 318 aa, unidentified
MNHYAAIDVSLELSSVCIVDATGKVVKESKVETRPEALVKFFKGIGLPLTRIGLEAGPLSQWLHAGLTDAGFETTLMETRHVKAALSAMTVKTDRRDARGMAQLIRMGWFRPVHAKSAGSQEARALLVARKQLQHKLTDIELSIRGILRGFGLKVGKVTDKSFELRIRKLITGHPMLQQIAEAMLAARATLLEQFNKLHKAVLKIARYDDICRRFMTTPSVGAIVAITYKSALDNPHRIKKSRNAGPLFGLTPKRYQSGETDVTGGISRVGDEMVRTALYEAANVLLSRVTRFSALKHWGLEVAKRRGTKRAKVAVAR

SEQ ID NO: 153948 - protein, 426 aa, unidentified
MPQRGKKTRGKASGQLSTLNEHAAGLDVGSTFHVVAVRSDQDDEPVRTFRSFSGDLHKMADWLESVGIKTVAMESTGVYWIPVFEILEARGFEVLLVNARDVKNVPGRKTDVNDAQWLQQLHQHGLLRGSFRPRDEVVRLRAYLRHRERTVEYASAHVQHMQKALMQMNVQLHRDVRCAASEDTIRQALTGNYRPEHVFALKQALELWDFHQTKIAECDVEIEAVLKVLNEQRSVPEAPLPPVRHAKARNEPKFDARSALYTMLGADLSQIHGFGPYTVLRLVGECGDDMTKWLTAKHFTSWLSLAPGNKISGGRVLSSKTRTSSNRAAAMLRTAAVNIGKTQTALGAFYRRLAARIGKAKAVTATARKLAVLFYRALRFGMKYADPGAEYYEERYKRRVIANLQRRASGLGFRLVENAPVPEGVS

SEQ ID NO: 153949 - protein, 349 aa, unidentified
MRFYNQQHRFYAGGDLHARSLFLHILDDQGQTRFEKNLPAGPDAFLDAITPFRDGLVVGVECMFAWYWLADLCEDQRIPFVLGHALYMKAIHGGKSKNDRIDAGKIAKLLRGGTFPQAYVYPQGLRETRDLLRRRTFLVRQRAQFLTHIQNTISQYNLPPLNKKLSYAANRQEAKWLDLFRHESVKKSIRTDLDLIDTLDEQINDLELYLTRNAKIDDPNTYRILRSVPGIGKVLSLIMLYEIHDIRRFPEVGNFVSYARLVRCAHESAGKVKGYGGRKIGNGHLKWAFSEAACLLLRASPQAKKWLERKEKKVGKATALGILSAKLGRTVYHLWRKQEAFDAKRFLTS

SEQ ID NO: 153950 - protein, 428 aa, unidentified
MNEVDSIRLEGFRQLKKQIRGSKDYLIVGIDVAKDTHNSFFGTPTGKTLLKRLVFENTIEGFERLLIQADALKVQYGLKKTVFGLEPTANYHKPLGEFLIKAAHMVVLVSGVAVKRNRELLDGRWDKHDTKDSANVADLISQGKCLYYEYPSMELRELRSLLSLKRRLKKQEHGLKVRIRNHLLAQYFPELDRYYEQSESDGLSTVKWCLDPSVIAGLPYEQFLQLVAPQKRAIRQQQRLKAIWKKAPSSIGCQTGKSVEFEAKVMVEALEQIRDTIRATDIKIKEICLQFQEYRYILTIPGFGPDVSSKVLGAIGNPFRFNTGDQVLKMAGLDLSAERSGKRSDYAIPVISKKGKADIRYALYQAAMIASTKNRNFIIYYTNKLRGREKEKGIKTKMRVKLAAKMLIIAWTLMKKKESFNPDYLNIE

SEQ ID NO: 153951 - protein, 363 aa, unidentified
MKENHQVVVAREPVLGGVDTHKDVHVAAILGRTGALLGTAEFPATLGGHATMLVWMRSFGDLLAIGVEGTGNYGAGLTRFLLAEGVRVVEVVRPDRRARRFNGKSDTLDAENAARAVLSGERTSTPKHRDGAVEALRTLRVARTSAVKARRAALQLLRNTIVSAPDRLRESIHGLTRTVLVRTCAAWRPNRDAAHEPTTATRIALRSLARRILGLEEEIADLDELTAALVARINPRLTEASCVGVEIAAQLLITAGENPERMRSEAAFAMLCGVAPLPASSGKTRRYRLNRGGDRAANCALHMAAISRLRVDPRTRTYAARRTAEGLSKKEILRCLKRYLAREIYKLLRPTPLEPDTVAETAA

SEQ ID NO: 153952 - protein, 362 aa, unidentified
MRIIGCDLHARQQTVAMLDTLSGEVVNRTLAHEGNDVREFYSTLPGPVRVGIEATGSMKWFLHLMEELGIDCQVGHPATIRAAEPRRQKHDQRDAELLLKLLLENRFPSIWQPSQELLDLRGLLLHRHQWVRLRTRIQNALQAIALANGLRRGSSLWSESGQQAIASLPLATHTAHRRSELQAMYARFEVEIEQLNQRVLEQAGQRRTAELLMTHPGVGPITALATDVFLGDPKRFRDGKALASYIGIIPRENSSGGRQRLGGLSKQGNPLLRFLWCEAAAHAVRRDPESQRFYRRKLVQKGLGKARVAAARKLGIRLWIMLRDQIDYQEFCRRGQMQQRSGDACAGMPGVRYGAKSHRLID

SEQ ID NO: 153953 - protein, 485 aa, unidentified
MAKRRMSTFERLESGRLNRKQRRELGRQVAVADPGLTIVHANAGGIDVGNESHYVAVPPDRDPNPVREFGCWTAALNQIAEWLQSCRIDTVAMQATGVYWIALYDVLEQHGIQVVLANAQHTKNVPGRKTDVQECQWLMKLHTYGLLRDSFRLAQEMESVRTIWRLRDRHVKEAGRAVQHMQKALTKMNIQLANVISDINGLSGQEIIAAILQGERDPWKLADLKHYRVRASREEVARSLEGNWREDVLFELQQAVDSYHFAHRQMQECDRKLEGYLASLPARMLDIPVQPESTQAATPKKKTKKAKRPRGNQPHLDLKTELKRICGVDLTSIDGIDVMTALTIVSEIGTDVSRFQDETHFASWLGLTPAKDITGGKTIGRGKRKVKNRVAVALRTAATTLLKSDSYLGARYRSLRRKLPSFASAVKAMGRYLAVLIHRLLTKGEAWVDRGATQFERRHTEQELASLSFKARAKGFKLIPITEAS

SEQ ID NO: 153954 - protein, 419 aa, unidentified
MSFKILKNNCCGLDVHKTWIYACIGITDSNGRTEYKQARFSSFTKGLQELCDWLVKYNCNDVCMESTGKYWIPVFNILEKNNLWVTLSHPKYTKPQKGNKTDRKDAKWICDLYMCGMVKPSFIPPADIRQLRDLVRYRFKLTCMITGEKNRAQNCLTVSNFKLDDVFSDVFGKSSRSITEQILQHPGETFDVAPFVDGRCKTPIEEIQAAVDGAISMEQAVKLRQCLNHIDELEKHQAEIEREIFRLSDKYESILNLIRTVPGFDKNPLTAIQVLSEIGGDMSVFPTAKNLVSWAGCCPHNDQSNHKIKSTRISRAGSYFKPVLVQVANALIKSKKHPEFTTRYRRIKARRGHKKAIIAICRMILTAIWHILTDLKPYTAKGFLEPRPVSKEKVLTASQALNLLKQRGYVIKDEPIFIS

SEQ ID NO: 153955 - protein, 356 aa, unidentified
MSRDVKYIGMDVHTEATVIAVRNNSGDLVMESIIATESATILQFMHGLRGELHVTWEEGTWAAWLYDLLKPHAHEVLVCNPRRNALLKEGSKTDRIDAKKLSELFHARMLRAVYHGENGVRTLRELARVYQSVSKDLTRVMNRVKARYRGWGVACAGTQVYAPRYREEWLKKIEQVGVRRRAELLYEELDGLQALRRQVRPELLTESRKHRASKLLRQIPCIGPIRAARLIALMQTPHRFRSKRQLWTYSGLGIETHDSGQYCFVGGQLQRSKKPQQIRGLNRNHNHEMKEIFKGAATRASCGVGPLREFYESLLGKGMQPDMARLTLARKIAAITVTVWKKEERFNAEQLKTQAA

SEQ ID NO: 153956 - protein, 288 aa, unidentified
MENRSMFVGLDVHKDTIDVSIAEGHRDGEVRHYGVIASDLEPLDKVVRALRAPDRALHFVYEAGPCGFGIYRHLTKCGEPCVVVSPSMIPKRSGDRVKTDRRDSLMLARLHRAGELRAIYVPDDTDEAMRDLVRAREDAVVVGTQAKYRLKAFLLRQGRRYPGREGWTLPYRRWLADLSVPSAAQHIALQEYRAAIDETEQRIDRLTEQLRQLAPTWRWAPVVAALQALRGVSFITAIALVAELGDLTRFRHPRELMAYLGLVPSEHSSGPSVRRVSRIAIRNHTGYT

SEQ ID NO: 153957 - protein, 422 aa, unidentified
MRSVALDVHLDFCEVAIVEDGELRSAGRIETKPEQIELFASSLAPDDRVALEVTGNAWEIARIIEPHVAQVLVVSPSDTGIRQARAKTDRLDARTLARLLAAGSLDGVWMPDRWTWMMRRRLSRRSQLVWARSRSKNQVHAVLMRQLVGRPPFADVFGVKGRQWLSALELPLEESETVGAAMRQIEFLEKEIAEVERLIAVASMESAEIKRLMSVPGVNVIVAASFMAAIGDIHRFGSPRKLAGYLGLDPRVRQSGVGPATHGHISKRGSSRARHALVEACWTTVRQPGPLHAFYQRIRARRGHSVAIVAAARKLACLFWCLLTREEDYAYQQPSLTKKKLRRLEIAAGAERYTAKATGIWSANDAVRQAERELARQAEVAYARTVSDWHSSQAVKVGASVTPGRASKKPLKGEAARQTTSP

SEQ ID NO: 153958 - protein, 376 aa, unidentified
MTKGTRFVGLDVHAATIAVAVAEPTGEVRGMGTIPNEPEAIQKLMRRLGPAEQLRVCYEAGPCGYTLYWQLTRAGISCVVIAPTLIPVKAGDRVKTDRRDAEKLARSFRSGDLTPVWVPDAAHEALRDLVRAREAAKKDQLRARHRLQKFLLRHGRRPPAGTAAWTEKYRRWLSTVRFDAPAQEATRADYVAEVEHARERIGRLERALDEAVEATPAAMRAVIDALQALRGIAKLAAVTIVAEVGRLSRFQRPRQLMGYSGAVASEHSSGPRVRRGAITKTGNAHLRRIVVEAAWSYRHRPATGPTLRQRQAGQSAEVTAIAWKAQERLHRRYHRLLARGKMKQQVVTAIARELLGFIWAIGVAVEGQPQPDGRAA

SEQ ID NO: 153959 - protein, 438 aa, unidentified
MTVINTTDLAVTIGIDAAVVADHQIAIRGPGVRDDFRVPPTLAGMTKLTERLRPHAGALVVVEPTAGTWLPLTIAVTASGCRIGFVQSRDSAKLRSAISGRNKTDAIDADMLARCEHVLGVHDAPVPLVGQVGLRRALTRRHHMVVEAHRVECRLWSLLIWVMPDVWRAAGGHTIIQPLLGKWPDMRALGRARLDSITQIVAAHSRDRDPQKRAERIRDAAQGWSEFWDNRLDLDAITWEVTELCGDIALADQRQAAATDHALHCWKQQWPNDVLLSVLGVGPICASTTRAWWGQGTHLRSAKAAGAFIGLNPSNWESGLSASPSRSITKEGPAAMRLAYYQAANVARRRDPQLAFHYRKLMCERGHTHIQANCAVARKLASRTWAVLQTGEPYEPRDLDGHHISETAAVELAESLTVSSEHRRRNHATNPRRSRLAN

SEQ ID NO: 153960 - protein, 423 aa, unidentified
MPRTTVHSDALNVIHANAAGLDVHKMQVTATARLARAGGEAEIHTETFSALPGGLAGLVAWLLGHGVGAAVMEATGVYWEVVFDALESAGIEPIVVHAQHVKQLKGRKTDIADSVWLARICQFGLCAPSFVPPAEFRELRTLSRQRRKVVQLRATLRTRIHQVLDGAGLRVGGLLSDLFGANGRRILDGLAAGRPPGDILDGLSHHVRHRLGELCDALDAKLSAQARFILKDQLDAFDRAGERIAAYDAFIQERLAPHRDRIDLLTTLPGVDTASARAIFIELGPDIGVFPSARHCAAWAGLCPGNNESAGKRRSGRTRKGNTFLRTLLVECAHGAARTGHCQFKGHHKALTVRRGYKRATVATAHKMLRCIHAMLSADAVYRDPQTDYEALMVKRNAPRWIAMLKKHGIDPADWATGKPAAA

SEQ ID NO: 153961 - protein, 344 aa, unidentified
MQTMYYIGLDVHKRTISYCVKDGSGTIRAEGAIPATRFDLDRWMKALPQPWTAAMEATVFTGWIYDHLQPHAAALKVAHPLMLRAIAAAKKKNDRIDASKICDCLRCDFLPECYMASTAIRERRRTLRYRNLLVRQMVQMKNKIGMLLMEAGVSYNKQRLHKAGYFRELLATNPDINEGLGSLLRLCRETVVRLQKTESALVRSLERDALLMDRVERLMTIPAVGPITALTWALEVGEAKRFSSIKKAISYCGLCGAEKSSGSTVQRTPLSKQRNKHLQCTLIEAAKMAPRYSPDLAMLYDKEKQKGNANRATLAVARKLVAYLMAVDRGQRNFQVVETNCIAA

SEQ ID NO: 153962 - protein, 366 aa, unidentified
MSLHRRSAPGAQRRASGRTVSKATPPGVEPAFTRLTVHDVPKKEPMMDAVLGIDIGKTKFHVTLLFANGTRRRKACANSPAGCGELLTWITRHGATRVHACLEATGAYGELVATTLVDAGHQVSLLNPAIIHHYAKSRLSRAKTDPVDADVIADYTAKEHPPTWTLLPREVRELQALVRRLDALLGMQTDERNRAQAGALTAAVQQSIEAVLAHLATQIDAVRHQIRRHMDQHPGLRAQRDLLTTIPGIGESTAALLLAELFNKTFTSARQAAAFAGVVPRPNDSGIHQGRRVMCKLGPARLRKGLYFPAIAAVRFNPSLQPLVHRLRGAGKPPMLIIGAAMRKLIHLAFGVLKSGRAYDPDLAKA

SEQ ID NO: 153963 - protein, 330 aa, unidentified
MNGKTLGIDISKDKFDVYLISATRRRSRQEERGMHRVFQNNEKGFGDLLMWLEENGVDDVHACMEATSTYGDALAMFLHDKGFTVSVVNPFQIKSYRDSELRLTKTDRSDAAVIARFCRSHRPAAWKPLKAENRKLRDLTNRLEDLEKMLYQEKNRLKRPGLDFDVRASIEEMIGILENKIKELQDQMKNHVSSSDKLKKDKDLLCTIPGIGEKTAMMLMGMIGDFNRFDNCRKIVAWAGLAPSIHQSGTSVRGKPFLPKRCMNKVKRLLYMPTLASMRYNPLVRELCDRLKAKGKKGMQIVMAAMQKLLRIAYGVQKHGLPFYELYCEH

SEQ ID NO: 153964 - protein, 355 aa, unidentified
MPLPTTPRAHTPTGGIDAAQNLFQRHGVDAHGKIVLKKRRVRPKVLAFGARLAPCLMGLEASGSAHYWAREWTKLGHTVSLIRPQFVKPYVQRNKNAPHDAEAMCEAVGRPPMRFVPIKSVDQQDMPARPRLRERQSKARTALVNQIRGLLAEYGVVRPQGVAQVRQKLPCILEDAEHGLPRLAREWLQALAAARLAWAQRLQETHPRMQRLLENHEACQRLAQLKGVGPWPATALGAAVGEATTCKNGRECAAWLGWVPRQHATGDKPLVLGSSKWGERSLRPLLIHGARAVVRTVECRQDGRSRWLPDLIVRRGNHRAGGAQANKTARVAWVLLAQGQRYRPAAGVRPWPQDG

SEQ ID NO: 153965 - protein, 377 aa, unidentified
MGWTGRAPAPNGSQSAPGACQERITTMPRTTTLHAVTAIGIDMGKNTLHLIGLDARGAIMLREKVARGRIALRLANLPPCLIGIEAGMATHYVARELAALGHDVKQVPATYAKPFRQGQKNDFRDAHAVAEAVQRPTTRFVPAKTNEQLDLQALHRVRSRLVSERTAVINQIRGFLLERGIVVRQGPRFLRQQLPDILAKQTDVLSPRMARIVADLANDWRRLDERIETVTDEIGTLAKSDDSCRRVMTVPGIGPIISSAMVAAIGNGAAFARGRDFSAWLGLVPKQMSTGDRTILGRISKRGNGYLRTLFMQAARVILLRSANWPKHSFGLWLVRAAQRLHPNVLAAALANKLARIAWTVLAQERSYEARVTKAAA

SEQ ID NO: 153966 - protein, 370 aa, unidentified
MDRKRTSVGLDVHARSVVACGLDGVTGELFERRLTPDHGELLGWLQALPGPVEVVYEAGPTGFGLARFLDEQAVACRVAAPSRLQRPSGDRIKTDRRDARHLARLLHLGEIVPVEVPSIQREAARDLARAREDVRRDLMSARHRLSKLLLRHGIVYYGGKPWTANHDRWLQARRRLPVFDRRGLGVAFDIAYDTVLATVARRDRLDAAITEMATDSQYAPVVTRLSCLRGVSTLTAFGLAVEIGDWQRLTGRSIGAYLGLVPTESSSGASRSQGSITKTGNAHARRLLIEAAWHHRRPNRPSTLLRRRQDKASPSARDRAQRANRRLHARWAGFDARHKLPVVANTAIARELAGWCWSLAVLDSDRPATP

SEQ ID NO: 153967 - protein, 379 aa, unidentified
MKKDTRHVGFDVDLEKIAVAVAEPEGEVRSLGEIPNREESVRRLVKKLGPASRLRVCYEAGPHGYGLYWLLSKLGVHCDVVAPTLVPVKSGDRVKTNRRDALKLARCYRSGDLTAVWVPDAEHEALRDLVRAREVAKKDQLRARHRLGKFLLRRGLRAAAGMKSWTSKHLLWVKTLRFAHPAQEATYLDYLHEVEHAAERVARLERAIDQAIEGLSGEMRAVIAGLQALRGIKQVSAATLVAEVGPLSRFARPKQLMGYSGMVSSEDSTGSSVRRGAITKTGNAHVRRIVGEAAWAYQYRPAMSPEMKKRQEGLSEEVKEIAWKAQSRLCTRYRRLVAKGKLRQKVTVAIGRELLGFIWAIGTLVEREQRNAKLARRAA

SEQ ID NO: 153968 - protein, 414 aa, unidentified
MPAVSSTLTCIGIDWADKEHVFHLIPSTGRAQAGRFCHEPDVIHDTVESWKREFPDTTIAIAIEQSRGPLINALLTHEGLEIYPINPASLASYRKAFAHGGGKNDPTDAMLLARYVQHYRDTLRPLKPADPLTRELASLCEDRRDLVDQRADLANQLRAVLKLYFPVILKLNAAQMYADFLLKFLSKFPTLEAAQKAGATRLRKYFFGIGTPRKAEERIELLLNASPLTSDEVLIRCSRRRVLALVDILKSLNESIDQYDEEIHRLVRQHADYPIVASLPGAADVTHCRIIAALGDDRNRYASAESLQAATGIAPLTHQSGKQKTVTCRWAASKFLKQTFHEFAGLSITRSTWAAAYYQQQINAGKKPQMARRALAYKWLRIIYRCWKDRVPYNEEKYIQRLKDTGSPLAKLIS

SEQ ID NO: 153969 - protein, 372 aa, unidentified
MGEHSEVYVAFDTAKLKHAVAVADGGRGGEIRFVGEIENRPATIERLIRKLARRYKKLQVCFEAGPTGYGLYRQMQALGHDCLVVAPALIPRRSGERVKTNRRDALSLARLFRAGELSGVWVPDEVHEAVRDLVRGRMTAAEDVRRKRQQLLSFLLRHGRIFTGGDHWTRAHRRWLAEQSFDHPAQQIVFQDGVAAIEDAVERRRRLEEQLASLVPKWSMAPAVAAYQAMRGVSFLVAVTFAAEIGDVRRFDTPRQLMSFLGLVPAERSTGEKVRRTGLTLAGNRRARRVLVEAAWSYRHPARVSETLRVRLEGLPKTIRDIAWKAQVRLCGRYRRLNAAGKKLPVIIAAIAREMAAFLWAIGRQIMPATAT

SEQ ID NO: 153970 - protein, 354 aa, unidentified
MNGIKYIGIDVHQATSVFAIRDHQGKLVGESILETQPEPIIDFLKGQRGTLWVTFEEGTYANWLYDVIQPQVTKVVVCDPRKNKLDGNKTDKIDARRLAELLRLNALTAVYHGQDSTRTLKELARSYVSLQQDGTRIMNRVKAIFRGRGIRCRDTSIYQPKNRKEWLEKLKDNGAQLRAERLLEQLESLVPLCAEAQKDLVRESRKHQSYKILMGIPGLGPIRVALILAFVVTPHRFRNKRQFWTYTGFSVVRRGSAEYEITKGELKRAKRKPLPRGLNNNYNRVLKSVFKGAALTAAYHGPFKLMFDQRVDNGMSPNLALLTLARKIASITLALWKKGERFDIERHRLSEQTT

SEQ ID NO: 153971 - protein, 310 aa, unidentified
MEQTYIGIDVSKDRLDVHVRPSDEAFAVGRDSEGLVALIERVGLLDPYLVVLEATGGFELTVAAALVAAGMPLAVVNPRQIRDFARATGQLAKTDALDAKAIARFAEAVRPEPRVVPDEQARALGELVARRRQVIEMMTAERNRRRQLTNRRLIKSVDRLLAVLLKELAELDRDVGDGIRGTPAWRERDQLLRSVPGVGDVVSRTLIADLPELGSLDRKQIAALVGVAPLNRDSGKMRGRRTIWGGRANVRSTLYMAALVASRHNPVLAAFYQRLVSAGKAKKLAITAVMRKLLTILNAIIRDQRPWQTA

SEQ ID NO: 153972 - protein, 323 aa, unidentified
MQTPAAVLNIGADVAKDAIVVACSEGSFPVREVANQRPAVLALLKGLPAGSRIGVESTGTYHELFAEAAHQLGFLVFLLNPKDTHHYAKAVGLRGKTDRVDAELIARMVAHEHTKLHTWIPPTPQQREIDRLIKRRATLISLREAVAMSLYDLGEFTADLKALRTRFNQLIARIDLRVKALVEASPERKQNFTRLCTITGVGPVVGTALVNTLERVPVKSADAFVAFTGLDPRPDDSGQHRGKRRLSKRGPAELRRLLYLAALSAVKTKPWRQLYEHYRARGLSSTAALVILARRIARTAWSIYTYKTEFDPARLTNPVLRTH

SEQ ID NO: 153973 - protein, 342 aa, unidentified
MTIVEDARGVTGGVDTHLDVHVVAALDPVGALLGTAAFPTTPKGYEALLGWLESFGPVVKVGIEGTGSYGVGLSKFLAQAGIRVVEVNRPNREERRRSGKSDPLDAIEAARSALGGKAKSIAKSKDGPVEAVRALLVAKRSARTARTSALIQMRELLVTGPDQLRSRLRGLRISALVAEAARLRPARSGDSVVIATKAALSSLAHRVQELDGELAELDSLMRHCSDLLGRFGVGPDTAAALVVCAGDNPERLHSAAAWARLCGVAPIPTGSGQTSGRVRLHRGGDRQANAALWRIAMVRIAHHPETTAYYHRKLKDGRSKKDIVRLLKRYIAREVYRYLPRS

SEQ ID NO: 153974 - protein, 279 aa, unidentified
MNTIGIDVSCKELVVAVHVEGKCHKAKAFENAPAGHQAIIELLAKLKGEAKVCLEATGIYHFDLAVALSRASVQVMVINPKSAHNFAKVLMKRSKTDVVDAATLAIYCGRMPFVAWQRPADESIGLRAIARRIAALTKLKTQTKNQLHALKATGDTPIFVVEHTMVLPGDMTARQWVAHAGLDPRHFESGSSVAKKPRISKAGNKYIRQALYMPALVATNHEPNVKGYYRHLIEDNGLKKIQAICAVMRKLLHAIHGMLNNNSEFDCACFYTLPDQKTA

SEQ ID NO: 153975 - protein, 367 aa, unidentified
MKKVSTTAGRQAKNFSEQKLTIGLALGDRSSWYCVLDEAGVILLEQRLGTTPKAMREVFGGMPRSRIALETGMHSPWVSRVLNELGHEVIVAHARNVGLIGESRKKDDRRDARTLARLARIDPQLLCPVKHRSARAQADLTVIRGRAGLVRARTALVNTARGLAKSYGERLRGCNVRNMNREKAAGLSPELQRALEPLLAGIESLSEQIRECNERIESLVQESYPQVALLKQVKGVGTLIALTYLLTLEDPHRFRKSRDVGCYLGLQPGRRNSGQREPQMHISKEGDPYLRTLLVQGAHHILGPFGADCDLRRWGLKLAERGGKNGKKRAIIATARKLAVLLHRLWVSGEVYEPLRNSHPAAMPAAA

SEQ ID NO: 153976 - protein, 370 aa, unidentified
MLNTTTFVGLDVHARSIKAVALDAMTGEVRSATFAYDAAAVAEWVGSLDPAAKCVYESGVTGFDLQKKLTALGVDCVVGAVSKMIKPSADRKRKNDRNDAEFLARMLSVGNVVEVWVPDDGCEAARDLVRALDDAREDLKRCKQRLSKFLMRHGYAFSETTPTGRRKGNWTAAHWAWIRSIEFPEKADDDVLAYYIDATRQAMEDKKRLEKLVEAEASKPRWKKRVDSLRCLKGVDAMTAADIVFEAGEFSRFKSARSFAAWLGLTPSEHSSGESARQGGITKAGNKHLRRVLVEAAWHYISASPHPKDLAKGQAPDPAARRHAAKGIRRLVKRREEMLGRGVHKNKANVATARELACWCWAIGRMVENG

SEQ ID NO: 153977 - protein, 394 aa, unidentified
MYSLFVGVDVSKDSFAAAGLDKKARLLFSASPLMNAEGFSEFFTVITSHGKDPSSIVVALESTGPYHLNLYSFLVAKGIRTIVVNPLIIANFAKLSLRKTKTDRKDAVTIARFLFLNRESIQKLPSSQITTDLRDLARERESILKMIASMKNDIKRILQSTFPELEQLVDVLGLTMLSFLQAFPSARLIAQATPEAVAKAFDQGDGRRRISVQYPQIIDLAKRSVATTSPSKELILPGKIETLLHLKERADEITRMLVKLCTSMKQEELTILTSIRGIATKTAAPFLAELGNYQDFASYKKVLAFAGLDPTIHQSGKFEGMSMISRRGNRHLRKVIYNMTFCVVRYAGPFRDYFFKRKREGLPFRKALLATAHKLVRTLFAMLNNKTLYKLEVA

SEQ ID NO: 153978 - protein, 425 aa, unidentified
MSQFHRDASSEPVRSFGSYTAALYEMARWLKECGITSVAMESTGSYWIAPYQVLEASGFEVILVNSRHVKNLPGRKTDVLDCQWLQKLHTHGLLSGSFRPVNKVCVLRSYLRHRENLVHAASAHIQHMQKALTEMNLSLHHVLSDLTGLSAMMIIRAILAGERDPWKLAGIKDRRVKKSQEQIARCLEGDYRDEHLFALAQALELYEFYQAKIAQCDLQIEKQLHTFKAQVDPKKNPLPENPKKKSLKAQSHFELKTHLYAICGTDLTRIDGIDVMSAQSLISEIGLDMNRWKSEKHFTNWLNLCPSNRISGGKPLTRQPRKGHNRAADILRLCAQSAIKSSSAIGAFGRRLKARLDAPTAVKAVAHKLARIVYRMLKYGKQYRDAGERYYEEKYRDHLLRRLQKRAAAFGFQLTPQQPILDPVS

SEQ ID NO: 153979 - protein, 345 aa, unidentified
MQSMYYIGLDVHKKKISYTVKDGSGNVHAEGAIPATRSDLDRWMKTLPQPWTGAMEATIFTGWIYDHLKPHAAALKVAHPLMLRAIAAAKKKNDRIDANKIADCLRCDFLPECYMASTEIRERRRTLRYRNLLVHQVVQLKNKIAGLLMEAGVSYNKQKLHKVGYFKELLATNPDINEGLRPLLRLCRETLVRLQKTESALVRSLQRDSLLAERVERLMTIPAVGPITALTWVVEVDDVKRFSTIKKAISYCGLCGAEKSSADIIKRTPISKQRNKHLQSVLVEAAKMAPRLSPELALIYDREKQKGNANRATLAVARKLVAYLVAIDRSQRDFLVVEKQNRAAA

SEQ ID NO: 153980 - protein, 368 aa, unidentified
MRMDVIGFVTFIGVDLHKCTVTLRAVRADGELLGQLKCDTKCIERIAEWIKSLPGPKWLAVEACPFVEWFIDRFTPCVDRLDIADATELSMRRGKRRKNDPNDALDIALRLARGECPLGYIADPQLMQLRKFGRHWRQLSRSLGKAKQGMKSMLNAANIRGPQFDGPRAHRWFLTFGGLLQPAQRLAFGNYLDQILLIERQREILRREMLTAARSPQFAATEQLLKSVPGIGPIWALIIASEIGPFDRFPNADALEFWAGMTADLKESAGRTQSGNITKAGSATLRWALCQAAVTLCQSDAKQEATRQRFIARMPRAKANVVMSRRLLRTLYAMVRDGKPYQCGERRDRTKAANKAKAKRKARTVQPA

SEQ ID NO: 153981 - protein, 358 aa, unidentified
MSNGSRVQLKMTAGLDLGDKYSHMCLIDTDTSEVIEEGRLRTTPEALRRRFDSEQPLKIAIEVGTHSPWVSRLLEECGHEVLVANARKLRLIYGSKRKTDKLDAENLARLARLDPKLLYPLKHRSEASQAHLAMIRSREALVGSRTQLINHVRGAVKSFGARLPRCSARSFHKKVAEDLPKELVSVLGPLLETIGELTERIREYERKLEEITSEHYPETELLRQVAGVGALTSLTFVLTLEDPHRFSESRSVGAYLGLVPGEDQSGDSDPQQQISKEGDEMLRRLMVGSAHYILGPFAPDSDLRRHGLKIAERGGKNAKRRAVVAVARKLSVLLHHLWVTGELYEPLHNAQRSGDQAA

SEQ ID NO: 153982 - protein, 344 aa, unidentified
MTHYAALDVSLRSVAICIIDNDGKIRLETSVPSEVEDITAVLDTFDGTIVSVGLEAGVLTQYLTYGLQSTGYEVICMEARQVKAALSAMRNKTDKNDARGIAQILRSGWYSRVHVKSMRSHEIRALLSSRRAVLSKCTDLEQEVRGLFKVFGIKLPPRLGHGAFDKTVRPIIEADQALAHALVPLLEARLALYKSFRELDNRVRRMALKDPVCQRLMTAPGVGFVTSLTFKAAVDDPTRFKRSRTVPAHFGLTPRRFQSGDMDISGRISRAGDPQVRATLYTAAHALMTRSSRYSSLKVWGMQLAKKRGHRRAVVAVARKLAVILHRMWIDETSFHWSSEGSAA

SEQ ID NO: 153983 - protein, 355 aa, unidentified
MNDAKYIGLDVHQATISVAVLDSTGKLVMEAILETKTETILQFLRGLRGGLHVTLEEGTWAGWLHDLLKPHVTRVVVCDPRKTGIGKLRNKNDRSDARELADLLYRDRLEPVYHEEHGLRTLRELARSHLSLTRDLTRVMARLKAIYRGWGIPCGGQQVYAACHREAWLAKLAEAGVRRRAEFYYQQFDVLATLRQQARHELLVESRKHSVVNLLRRIPSIGPIRAALLLALMQTRHRFRTKRQLWAYIGLALRTYTSGEYRFEGGHLKRSKKAVAIRGLNRNYNHDLKNVFKGAATWVASNNGPFRGFYEACLERGMKPHLARLTLARKIAAITLLIWKKGVCFDAEHLKVQAA

SEQ ID NO: 153984 - protein, 368 aa, unidentified
MFEHTFIGLDVHAVNVVGHAMNPATGEISTHTMAADPAAVLEWVRRFDPPVKVVYESGPTGFVLARYLHAGGINCVVTASSKLLRAPGDRIKTDRRDARVLAEMLAVGSVTEVRIPDPEEEALRDLSRLRSGTARDLAHARQHVNAILLRHGIRYPKETRWTQEHSRWLHRQRFAEPALQFTYEADVEQAELLDRHLKRIDKQVAATAAACRFAPVIEALMCLRGIQITTAFGLAVEIGDWTRFTGSSIGSYLGLVPSENSSGQSRHQGPITKAGNTYARKLLIEAAWQHRRPYARPGERLIRQLNRVAPATRIRALEGNHRLHHKWEVFDQRHKMSVKANTAIARELAGWCWSLAAPLQQGERMNAA

SEQ ID NO: 153985 - protein, 334 aa, unidentified
MKSGIVHIGVDVSKEKLDVFVPAQRDGMRPETKEVDNCVAGFREIRELARKAKATVCVEPTGGYELELIAFLHRFGVPVAYADALRVRQFARAEGSLSKNDSIDAALISRFADKIGVRVLEAQEVEAVELKRKARFRQTMMDSRTAMANRLETEIDPEMKALLKEQIRLMGKVIDKAERLCLETVGKDERMNALRERFTKVGGVGNLTAISILAGLPEIGKLPDAKLNRLVGIAPEEKQSGTKEWQRRIWGGRRDVRNALYMAAVASIIWNSTLGAYYRKKRAEGHPHKWAIVPTMRKLLSLLNRIARDQNFNPRPEPESTKRNANVGRKKKVA

SEQ ID NO: 153986 - protein, 355 aa, unidentified
MSQEKYIGMDVHQATISVAVLDSRGKLIMESILETKAATILEFLQGLHGSLSVTFEEGTSAAWLHDLLKPHVTRLVVCDPRKNALLKDGSKSDRIDARKLAELLRGNQLTSVYHGEHGMRTLKELGRSYVTITKDLARVMSRIKALYRSWAIACSGTSVYAPRHRAEWLDKIPEPGVRLRAERFYQQLDLLQPVRQQARRDLLSESRKHHAVKLLRQIPSIGPIRAALLVAQLQTPHRFRTKRQLWAYSGFALETHDSGEYRYVRGKLQRNRERMTVRGLNNNHNPEVKNLFKGAAISASTHPGPLYDFYVALLEKGMRPTMARLTLARKIASITLTIWKKGADFDATQLHRQEA

SEQ ID NO: 153987 - protein, 456 aa, unidentified
MKQKTTSQSSRTLPIVGEVEPNAAGLDVGARKVYVAVPADRDAQPVRSFDTFTEDLERMANWLRECGITSVAMESTGVYWIPVFDILERKGLRVCLVNAHHVKHVPGRKSDVQDCQWLQYLHSVGLLRGSFHPEDQVRALRAIMRHRDSLIEMAAAHIQHMHKALTQMNLQIHHVLSDITGVSGLAIIDAILKGERNPEVLAGLRDGRVQASEEIIRKSLVGNYRREHLFTLEQSLKAFRQYQALITACDQELAQYVKDFPSRMDGDQPPLAKEPNKHRPRKNELRLELRSELYRLFGTDLTAVPGISTLTWFTLLTELGPEIGKFPSSPAFTSWLCLCPNNRQSGQRILSTQTRRSKNRINHALRVAAQTLHHSNSSLGAFYRRLRARLGAPKAITATAHKLARILFHLITTRQPYDESVFALADQQQQQRHERYLRKQAQAMGFSLVRTEVQPA

SEQ ID NO: 153988 - protein, 399 aa, unidentified
MIGVEIDISKNKSTVAAIDDTGAIIMKPQEFKHSQNELNKVIQWIKDQEYTVFVVMESTGHYHYPVLKKLYEEGIYVSVVNAYLMKKYGDIEIRKAKTDRKDAIRIAKYAIEKRFTLKRYEGEDEKYNDLKFLSRQYNQIVSIRVKAKIQFNNLLDEIMPGINKILTRITGNSSKILYDFVEKYEHFDNIKRKGEQKFIKEYSAWSKKKGYRNGAIKALKIYELAQNSITTRSANNSTYIALKNCIKILRETEESSNSILTQMQTIAYTLPEYKIVRELKGVGDKLTPRLIAEIGDVRKFSSAKALNAYAGNDAPPHQWGQFEGTKRHISKRGSSSLRKVGYEVIMALKVTKPTEDNAVYEFMIKKESEGKAKNVAKMATLNKFLRIYYTRVMNLYKTL

SEQ ID NO: 153989 - protein, 340 aa, unidentified
MQITTKFYLGIDVSKHWFDLSLLTVINHQKQIMVTERFDNNETGIKQMEQWLKKQNVSFNDNTLLVIENTGIYHRLIWEFCSTHKLPIHIGNAAHIKWSFGIARGKNDVIDSQRLCNYAHKHADELKATPELNPVFIELKDMMTSRSKLVSQLGSIRSHLKELKLSNNKATQKLIEQAHKPVLDGLKKSIALIEKQILNIIHKDDTIKTNYDLLITVPGIGHLTAVYILCCTNNFIDKISGKQLACYAGVVPFQDNSGSSIKGRNKVHKMANKELKKMLHLCALSAVKCYPEFKQYYERKKKEGKHVMSVLNAIRNKIVLRAVAVVNNQKPYVENYRKAV

SEQ ID NO: 153990 - protein, 344 aa, unidentified
MKYYAGLDVSLQETAICVVDEDGIVVSEGKAASDPDDLVRWLAATGLPVTRVGLEAGPLSPWLHAGLREAGLPAICIETRRMKGATAAMAVKTDRNDARAIAHAMRVGWFTAVHVKSAGSQELRLLLSNRRTLLEKRVAIDNEIRGTLKAFGLKLGAVTVAAFEARVLELLAKRSRLLVMVRPMLAARAALRQQCEVLHGMVLKAVRASAVCRRLLSVPGVGPIVALTYATGVDDPARFIRSRDIGPHFGLTPRKYASGGIDRSGSITKAGDGAVREVLVQAALTLLTRVHRWSALKAWGTAVAKRRGLRRAIVAVARKLAIIMHRMWANHTTFNWAPESVALA

SEQ ID NO: 153991 - protein, 374 aa, unidentified
MTMMQHRQIRYIGLDVHKVSITVAIAEESGAPTSYGSIANDPSAIRKLMTRLGGPEVELRVAYEAGPTGYALHRQLAKMAIDCIVVAPSLIPKQPGNKVKTDRRDALKLARLLRSGDLTPVWVPDEAHEALRSLVRARADAKADQLRAKHRLSKLLLRQGCRPPSGVRNWSQRHVQWLRQLEFEHLPDRVVFADYLAEVTAAGERIKRLEAALHQCAQNSSQVALIRALEAFRGIGFLSAVTLVAEAGDLRRFRTAPQFMAYAGLVPSESSSGGKQQRGSITKTGNSLLRHVLGETAHHARHAPRVSSKLKQRQADVPHEIVELAWRAQLRLHARYRHLSSRIGSLKALTAIARELAGFIWAAGQVLQEVPTAA

SEQ ID NO: 153992 - protein, 371 aa, unidentified
MTLFMGEPHMLYVGIDQHKRQLTVCVRDNQGDAVLRRQVGTGWLEVDGFLESLLERSMPEGGYVAVMEVCGFNDWLLKRLARWGCTQAYVIAAPPRLRKKTDRRDAAKLSELLWINRERIAAGSRLVEIHVVYQTTEQEEEARRLTHLRYRLGRERTRIKNRIAGLLRRHNLEHECPTKKLFTQQGLDWLTEVELAELDHIALDMELERYRLCSKHLDRVNRLIHQWAAKNPTIKLLRTLPKIGEYTALALWAHIGPIARFPHARSLANYFGLTPGCRNSGGSARPGGITKAGHPIVRFLLSQAVLHALRNDAGLRSWYRQVKRRRGAKIARVAVMRRLCEALWHMLSKQEPYRPMGSGEPTRRSKTACAA

SEQ ID NO: 153993 - protein, 323 aa, unidentified
MTLPKLGIDVSKKTIAVALLRGDKVRHKSFANSTTGFGLLQSWLIDHGVSHVHAVMEATGSYGDALAEFLFDTGHQVSIVNPAQVLAFAQSELKRTKTDRVDAAVIARFARSHEPQPWNPPPRELRELQVLVRHRESLLDHRNQLSNRLTEGRLIPSVATSLETLIAAVDEEIKSVERQIREHIDQNPTLKTDLDLLKSIKGIGDQTAVQLLAEIRQLHDYKSSRQVIAYAGLSPRNIVSGTSVRGRPRLSKIGNSRIRKALYWPAITALKHNPIVRALGERLTERGKHSLVIIGAAMRKLLTLAYGVLKSGKPFDENYAKSC

SEQ ID NO: 153994 - protein, 342 aa, unidentified
MQTVTTVGLDIAKSVFQVHGIDAKGDVVIRRQLKRRYVLAFFPKLPSCVGIEARAASHHWSRELTGLGHTVRLMPPAYVKPCVKRQKNDMADAEAICEAVTRATMRFVPTKAPEQQSCLVLHRTRHLFIRQQTAVINSIRAYLAEFGIVAPVGRRGVEELLHVVADPSDKRVPEIARACLAALGAQLLSLKEQIVKFDRMIMAWHRSNETSKRLHYIPGVGPMLATALVASVADPRTFRSGRNFSAWIGLVPKQHSSGGKDRLGSISKQGDRYLRSLFTAGALAVIRYAKIHGTKHRPWLAALLARRPTKVAAIALANKIARMAWAMMAKGECYKEPAALAA

SEQ ID NO: 153995 - protein, 386 aa, unidentified
MQKLNDLSRCLTPLEPDGTLIAVIEMSQSSWLVAGIVPGIERQPLKKLKVDESTLLNLLHRWREEAEKAGHRIKRISVAFEAGRDGFWLARWLRARDIEAHVIHASSVAVSREHRRAKTDRLDTELLKRAFLGWLRGERDHCKMVAIPTIKDEDAKRPNRERESLVAEQNRIINRMKATLIRLGIRGFNPKLKKAAERLEGLRTPEGEPIPLNTLAELHRDMVRRRLVSDQIRQIENVRLEHLKQAPSDGPHAMVRLLARVIGVGIETADMLVQEVLSRNMRDRRAIARYAGLTGSPDESGTKRREKGLARSGNARVRRGMIQLAWRFLMFQKNSALAQWFQTRTKNARGTRKPMIVALARKLLIALWRFVREGVVPDGVVLRPAS

SEQ ID NO: 153996 - protein, 419 aa, unidentified
MKPWAAITHYAGFDWAKDHHRVVIVDAQGRIVADFEFNHSREGWQSFVEQTSAFANLAVAIETSQGAAVDQLLQRGYAIYPVHPVAAQSYRERKAPSGTKTDHLDAWGLADALRVDGHGWRVLQPTDPLTEQLRLLCRDEVALIEQRTALVNQLQQALAEYYPAALAAFDDWTKAFTWEFVMAFPTPQALVKAGQRRWENFLHKHKLWRPETTEKRLQIFSQADQFKASDPIVAAKSQLAVCLCKLLRTLGLQLDIYRQQIEALFRKHPDHDLFGSLPGAKDVLAPRLLAAIGVNPDRYGSHEVLQCIAGTAPVSYQSGKLNKVRIRWACDKFLRHTVHLWADCFWKASAWGRAYYRQKCEAGMSHACALRCLGQRLLKIVFRMLKDKKPYDAELHARNQQKHGSWVLKLVHEPVAQPQ

SEQ ID NO: 153997 - protein, 372 aa, unidentified
MKYNTLYVGMDVHKESFTLCCYDMNEDKIFYTQKIEADYKQVLEYLNAVRSAVGNDVKIVCGYEAGCLGFTLYHQLTYYQENCVILAPSTMMQTAKKTFKTDKRDAANIAKCLAYHTYSPVHIPTKQDEQVKEYIRMRDDHKQALKKIKQQIISFCMRQGYSYTATKKYWTNQHLTWLQKLDADGLHKEILEEYLLSYHTLTDRLERIDQRIEELAADETYHDSVKKLSCFIGIKTHTALATIVEIGDFKRFPSAERFASYLGLVPGEDSSGNTQKHLSITKAGNSHVRRLLVEAAQSYVRGQPGYKSAALKERQTGNPTPVVGYADKANERLRRRYRRMVLNQNKRPNVAKTAIARELACFIWGMMTDNIA

SEQ ID NO: 153998 - protein, 386 aa, unidentified
MSRPSNILLPAINYDHTLVLSVELSNKSWVLAAQVPGLPRTKAQRTIEPNKNALLAAIDGYRARAAAVGYTVDRVITTYEAGWSGFWLARWLVAQGVEVHVVQPSSVPVDRRLRRAKSDGIDAELLLRTLLAWLRGEPRVCSMVPIPDEADEDARRCVRERTELLSDRVGLTNRIGAVLATLGVNDYNPLLQSRRRRLAELRTGLDEPIPPNALAKIERLLARLELVLAQIAELERERDEVAAADAPDRAGKMIQQLASLRGIGVPSATVLVREAFVRHFPNGKALGSYAGLTSTPYSSGGIDREQGIGKAGNRRLRTVMVELAWLWQRYQPGAAQVAWFRDRVGSTGRRIRKVMVVALARKLLIALWRFVIDGVMPEGAVMKPSI

SEQ ID NO: 153999 - protein, 350 aa, unidentified
MAILAERFVHVIGVDTHKRSLTAAVLNSLGGVLESCEVPANNAGHRHLLAIAARYSGPVLWAVEGTGSYGASLTEQLVGAGYAVTEVDRPKRPARKRGKSDEIDAVRAGREALAMKQLNPPRRRGVREQLRVLHVTRAEFVRTNTALANHLQHLVVTSSETLRLRFLEFNPRSHASERLAKKCAAARVGRLTSEDQTRLRTMRDVSRLIVDLSRQADAYEREMKRLVEAMAPGLLGQPGVGTLTAAQILVSWSHPGRIASEAAFASLAGVAPIPASSGQTVRYRLNHGGDRKLNAALHMVVLSRCRYDQGTRDYVARRTAEGKTQRDIRRCLKRYLARQLFRFLSALDKG

SEQ ID NO: 154000 - protein, 420 aa, unidentified
MGRLKIVYPICCGVDVHRDFLIACIASTNPQGVTEYQSRRFSTYTGNLRELRDWLLSNQCKDVCMESTGKYWFPIHNILEDSCHVVVSHPKFVKAIKGKKTDKKDAQWIADLFKHDLVRGSFIPPKDIRQLRDLCRYWVKLSSYMTGEKNRAQNCLTVSNFKLDDVFSNVFGKSASAITTQLLEHPGEPFDVTPFVHGRCKTPIAQIQEAVDGIFTHEQAEKLKIIRSHMDSLEMHKAELESLILDIAQAYLPQVELLLTVPGISDALTAIRILAEIGADMSVFETSKHLCSWAGLTPQNAESAGKKKTTRIGKSGAYLKPLLIQVALAASRSEKHPEIYGKKNALQKRRGKKKAIVAIARRLLTAIYHILSKNEPYAPAAYTKVDMPPRARQISQEKAFELLARMGYILSDPLSHPLPG

SEQ ID NO: 154001 - protein, 410 aa, unidentified
MKSAVITAVGVDVSKSKSTVAVRRPGGEIVMHPFDVRHTNSDLKKLVSTLKKLGGDIRVVMEHTSMYWRPIALTLKKAGFFVSAVNAMLIHDFSDNSIRKLKTDRADALKIANYALTFWDTLPLLNDEEETRLLLKMQSRANERITATATVLRNGLIALADQTFAGVNLAFDPNTKNTDGHEKWVDFFLRYWHRDCVCQYFMEVCTESYRGWCKRKNYKFRTATAHKIYIMAQECVATLPKCESTKTLIGQACKSLNAVCEARHNTQLEMQRLAALLPEYEIVMQMEGAGPVTGPALMAEIGDVRRFKNKKALVAFAGIDAPPFQSGAFESKSRHVSKRGSPHLRRTIFLVSNIILTLSNPENAVFCFMGKMLRGKTLLCLYCCRKRKVLAHLLCSRERVPSLSSSSGCL

SEQ ID NO: 154002 - protein, 414 aa, unidentified
MNENTLCEFKAFVGLDWADKKHDICIQVADSSEREFYQIQHTVDDIERWAYSLRERFNGRIAVAVELSKGPIVYALQQFDFITIFPVNPTTLARYRNTFTLSSAKDDPTDAEFALELMLRYPDKVLPLIPQSENMRKLAYLVVSRRKLVEDRRRLANRLIATLKQYYPQVLDWFSHKNTTLFCDFILKWASLQELKKARKQSIIKLFKSSSSRTIPLIEKRLQAIKTAKPLTEDRAVISAHRLEAMALAAQMLAIIHSIKVFDVEILSTFKALPDCPIFSELPGAGSCLAPRLLVAFGEDRSRYKSAAEIQQYAGIAPVTERSGKRCWIHWRWQCSKFLRQTFVEWSAKTVSQSYWAGVYYQNQRDKGKSHQAAVRSLAFKWIRILYACWQSKTPYNETRYLNQLRERSSPIIV

SEQ ID NO: 154003 - protein, 318 aa, unidentified
MTQSLSSFVGVDVSKDRLDVAVLPSGESWSTANQDEDIKSLVKKIRSLKPELIVLEATARLEMPLAVALAAKGLPMAIVNPRQVREFARASGILAKTDRIDAQVLARFGEKMRPEVRPLKDEETRELTALMTRRRQLMGMLVAEKNRLAGAPKSVHRDIRTHLNWLKKRLVDIDDHLADKIKNSPVWREKETLLQSVPGVGPVLSTSLMADLPELGTLNRRQIAALVGVAPFNRDSGSFRGKRLVWGGRRHLRSVLYMATLAATRSNPVIRTFYHRLCEAGKPRKVALTACMRKLLTILNAILKSQTPWQAQCASSIT

SEQ ID NO: 154004 - protein, 334 aa, unidentified
MKMDSVYIGVDVSKAKLDVYVPAKREGLRVATFEVDNNIAGFRKLRDAARSANATVCVEPTGGYELELIAFMHKFNVPVAYADALRVRQFAKAEGSLSKNDCIDAALISRFAAKIGVRVLDRQEVAAVELKRKTKFRQTMISLRTTLKNRLETEIDKEMRGMLNEQIRHIDRMIKKIERSSMETVSNNPSMKSIVERFAKVGGVGEVTAISLLSGLPEIGHLSDSKLNRLAGIAPEEKSSGTREWQRRIWGGRKDVRNALYMATTAGLQWNSILNDYYRKKRAEGHPHKWAMIPTMRKLLSLLNRIARDPNFSPIPEPESTKDNARAGRKKKTA

SEQ ID NO: 154005 - protein, 431 aa, unidentified
MNYNQNHKIAQITPKTLVIGIDIAKHHHVARAQDYRGIELGSTCFFDNTQEGVRTFIHWITQIKDSYEMESVITGMEPTGHYWLNLAHILKEEQIKFVTVNPLHVKHSKELDDNSPTKNDVKDAKVIAQLVKDGRYSEPTIPQGVFAELRVAKKLRDLLNVDLQIVQGQVHNWIDRYFPEFFTVFKSWEGKAALHLLKLEALPEELVRYTEEELLEYLRQAVKRSIGIKKIQVLKEAANRSIGIRQGAMMAKMELRTLIQKYELIQNKFEELDQTLDTLLQDIPGVDQMLEITGIGRDTVAGFFAEVGDLSEYNHPRQITKLAGLSLKENTSGKHKGRTRITKRGRKKLRALLFRASMILVAKNKAFKALHHYYTTRPDNPLKKMQSLIALCNKLIRILFSIGKKQFVFQEEKMLKDIPHMHAFIQEPVAA

SEQ ID NO: 154006 - protein, 350 aa, unidentified
MENENRLPPPVWAGFDVAKKTFDAALYLPVDPGQQPREIKDLPKKSFSRTPEGVREFHHWSFQVREKAGIEGGSLRIVMEATGRYSSELTGWLNNEISFTKPAIENPKTVNAFINSLKIRNKTDPIDAGALARYGAERMPEAFEKLPEDYQYLREIVRQRIAIKDQLTAARLRMNEMSSFKKLAKIQQSVIDSLEKAVEKLELEIKSCVNNSEELKKSMEKAITIPGVALITAATVLGECGPLYHYKSRQLGSYSGLAPQIKQSGTSVRGCHISKFGPGNLRRVLYMASLVAMENNPRMKSLYTRLISNGKKPLQARCAVMHKLLILIRAVVVNGMEYNENYSQNPVLNS

SEQ ID NO: 154007 - protein, 355 aa, unidentified
MDSKKYIGMDVHQATISIAVMDSRGKVVMDSVIETKAATILEFIQGVRGALWVTFEEGTCAAWLYDLLKPHVAKVVVCDPRKNALLKVGNKNDRIDARKLAELLRGGLLSPVYHEGASVRTLKELARSYLTITKDLTRVRNRIKGLYRSWAIPCAGQKVYSPRYRSAWLKQLTEAGVQRRAEWLYQQLDDLQPLRREARRELVTESHKHPANKILCAVPWLGPIRVALLIALIQTPHRFRTKRQLWAYSGLALRTRVSGEYRVTGDQLQRVKRQPSLRGLNENHNHELKALFKSTATRASTAAGPFGDFYAALLATGMRPTMARLTVARKIAAIVLTIWKKGDRFDPEHLKRQAA

SEQ ID NO: 154008 - protein, 538 aa, unidentified
MEILYSRCCGLDVHKKTITACSITPKGKELRTFGTMTPDLLNLAEWIKAEGCTHVAMESTGVFWKPVYNILECYNVEILVVNAQHIKAVPGRKTDVKDAEWIANLLRHGLLKSSFIQNREQRELKELVGYRKSLVDERAREVNRIQKVLEGAGIKLASVATDITGVSGRSILDAIVSGVEDPKFLASLSRGKLKNKHEQMEQALQGLVGKHQRMLISTQLKHIDFLDQEIARLDQEIEEQMRPFEQEIAFLDAVPGIGVRSAQVILACIGTDMSRFPTTSHIASWSGLCPGNNESAGKRKKVKSKKGNPLLRTTLIQAAKSASHTKNTYLSAQYHRIAARRGKNKAAVAVAHSILVIVYCMLKHHRPYQEMGADYFAKTNAKAIKNRAIKQLEMLGFRSGSRPLNFSLFVFSLKATLLNPFGRGLVRCCLSGTVIFRTVKYIVSQVIVYRMNPAAEVFYQFFVAFSKSDQFITVHLFYPEILAVCIHRGLSLWYQLYIPTHAGYQVLRRKAPGYIQYTLDRPRGKYNSLIPDLRIYSG

SEQ ID NO: 154009 - protein, 322 aa, unidentified
MNENTNYFGIDISKDVFDVMGSDGLFHQFSNEVTGFKKFIKLMECNSHCVMESTGVYHLRLAYYLIEHNIKVSVENPLSVKRFIQMKLSKIKTDKSVSKMIYEYAILNNPNLWTGQTKSQIECSHLLSLSNLYTKEIIVLKNKLHSEEAQGSPVTRVIRSIKRSLSYYKKEIETLETTVLKLVKEEYQDLHSRIKSIPGLGAKASALLIVLTDGFERFNTASELCSFAGLTPIIRESGSSIRSRPRISKMGNRRLRKVLFICSFSASKHNKACKELYNRIVAKGKSKKLALVAVCNKLLKQAFAIAKSHLWYDENYRSVLVR

SEQ ID NO: 154010 - protein, 354 aa, unidentified
MIIIGVDFHPAYQEIASVNTDTGEYQEKRLAHPQEAEEFYRSLTSVGQAVRVGMEASGQAQWFERLLEGLRLELWRGDAEVIRAKRGRKQKTDREDARHILKLLLKDDFPRIWVPSWENRDLRQLLWHRHRMVQARTRVMNQLQAEALKEGLHCKKRLWRASGRQQLECLPLAPWSSRRRGELLELLDRLNPTIAELSQAIEREAEKCPEAQRLMTHPGVGALTALAFVLIIGNAERFGCGKQVASYLGLVPLEKSSGNRRRLGHITKQGNSLVRFLLVEAAQVTVRRLPEWRSKYHHLVMRRGRKTAKVAMARKLAVHLYWMWRKEWDYEQWKKFGSYVGQPGPGDGVRSNIE

SEQ ID NO: 154011 - protein, 344 aa, unidentified
MKVTTLGIDLAKNVFQLHGVNEYGKTVIKKQIRRDQMAEFFANLPACLIGMEACGSAHHWARKLEGFGHTVKLMAPQFVKPYVKTNKNDAADAEAICEAVARPNMRFVPIKNIEQQAVLALHRVRQGFVKARTAQANQIRGLLSEFGLIVPQGIGYIASRVPELIEDAGNELPGSFRMLIERLLDHLRALDRQVVELETQIVRWHCQSAASSKLAQVPGIGPITASALVASLGDAKNFDGGRQVAAWLGLVPKQHASGGKQKLLGISKRGNTYLRTLLIHGARSVIYRAQNKPESCRWINGVVSRRNKNVAAVALANKNARIVWALLANEREFRPDYTTAKAAT

SEQ ID NO: 154012 - protein, 349 aa, unidentified
MPIVADEYTQVIGVDTHARTHTYVVLDTRTGGIIDTAMFPTNPAGLARALAWIDRRTSAGRLAAIEGTSSYGASLTEALQQAGIPAVEARPPRRADRGARGKSDPIDAEAAARAVLRTDTALLSWPRTGKIRSALRLLLSARRSMDGQWTASRNALIALLRTIDLGVDARRPLTDKQIASIAVWRHHPSDDIDRLIARGEAVRLARDVIDLTGKLEANHDALRLHVSALAPSVLDIGGVGPVSAAVFLTAYSHVGRVRSEAAFASLAGAAPIPASSGNTSRHRLNRHGDRRLNSALETVARVRLSYDPDTRAYKQRRLAEGKTTREVKRMLKRYIARQIYRHLTATMTA

SEQ ID NO: 154013 - protein, 343 aa, unidentified
MDHFAGLDVSVKETSVCIVDDTGKIVREVKVASEPEYLLQILSSPAYHFKRIGLEAGPLSQWLFSALAETGLPVICVETRHMRAVLKAQINKTDRNDARGMAQMMRAGLYRPVHVKTLRSQKLRMLLTHRKLLQSKAIAIDNDLRGTLRNFGLKVGMVGTVRFEARIRELVENLPDLAVLVEPLLTVRRVLREQFCILHRRLLAIVRDDEVCRRLMTTPGVGPVVALTYRATVDVPARFRKSKSVGAVFGLTCSKYQSGEINRTGAISKCGDEMMRVMLYEAAQVMLTRTNKWSWLKAWAMKIAKHRGMKKAIVALARRLAVIMHRIWVDGTEFRWTRGAAVA

SEQ ID NO: 154014 - protein, 474 aa, unidentified
MIKSVGIDFHQGKHVARCLDEKAQLCDGFSFQTTPEGLATLEEHIFRDGSNPVIVFEPAGLTWFILAICIRARHPDCRLVRAKGQKVAALRRYLRGSSKSDRIDALTLAKMTFIDPEQLDEVYLPPAKIHALQRLSRQRKRLESDISAHKTRIGAIVESYVPGVRKAFSDPWSSQARAFLRCQLNPLAVAHDGEKALHSFLVRARHRNKTDKEESHRIYLACQSAADLYELSSRAEAVDDEFFSVFQEEIERELRLMELEEAESEAIAKRMEELYRELHPSDNLRSIPGVGRVTAPMFLATVGDPARFHNQSAFVSWTGVVPRTRQSSDVEAKGLRMTKAGPAIMKWALFQAGDIGRRFDPQLASLYYREMVHHGKNHKQAMGAVMSHLAARVIKVLQDGRPYELRDNEGKAISPAEAKKLILLNFHVPENIRRERRRRNPVKRGFLKSQGTALPRINEAAVAPQPAKTTIPEN

SEQ ID NO: 154015 - protein, 345 aa, unidentified
MSELYSGRQFVGIDLHRRRSVIVRMTAEGDPLECVRISNDVEMLSTVMARAGESPEVVLEATYGWYWAVDALRDLGAQVHLAHPLGVKAFEYRRVKNDERDARDLADLLRMGRLPEAWIAPPATRELRELVRHRAKLVGIRSNCKAQIHAVLAKCGIQVSMTDLFGLAGTELLDRLELPRPYAARIASLRRIIGALDFEIDAFAGQVRGRLARDPGFLAVQAIPGVGPILGAVFVAEVGDVHRFARAEELTCWAGLTPKHHESDTHVHRGHITKQGSRLVRWAAIESVQILPKHTLVGRIRDRVGDRRGRNIGVVAAARRQLEFVFYALRDHRVRALQGTRPVAS

SEQ ID NO: 154016 - protein, 457 aa, unidentified
MSKNSQKRLQSKPKVKKITQFEVIRHNVAGIDVSDNSGMMVAYAINETEVVIEEFECYTCDLRRLSQTLKSHNIVSVAMESTGVYWIPLFLLLQEDGFEVYLVNSRHVKNVTGRKNDESDAEWIQKLHRCGLLSASFQPDNQTRALRSVVRHRVTLVQTRSTYLNRMQKALEQMNLKIHTVLSDIDGVSGLRIINAIIAGERDAELLADLRDGRVKASREELIKSLEGFWSDEHLFELSQCYELYKFHNKMIRECELKIEKNLKETIKSKNGGVIPKIEKLMRKDKYKNDICFDVVNYLYILTDVDIASVDGITGISGVTALSIYAEIGTNFHRFKNEKYFVSWLGLSPNNKVSGGRIISSRVQRKKHYAGQVFRMAAMSLKNNKGPLGDYYRKIRSVAGGPKAIVALARKLAIIYFCMMTNKTKYNPQTLIDYQEKHKERKIKYLEKQLKKLKEAA

SEQ ID NO: 154017 - protein, 409 aa, unidentified
MEAEIERCCGLDVHQKVLVACVLIARAGSKSEKHVRTFSTVLEDLEELRNWLTSFGVTHVGMESTGIFWRPVYAELEGVFTLVVGNAYHIKNVPGRKTDVKDAEWLADLLRHGLIRPSFVPDKPIRELRDLMRYRRKLVESRSNERNRLLKLLETANIKVSSVATDVFGVSGMAMLDALATGQTDGTVMAELARGRMRSKRDALRKALTGRVEEHHRFLLRVQLQRLRDVERDLGVVDGRLDELMAPYASQIQALQDIPGIGKLTARIIIAELGPDLSSFPDEHHLAAWAGLVPGNNESAGKRLGGRLRKGNPSLKGALVEAAVSAIRTKGSYVRSKYYRLKARMGGRKAIVAIAHKLLIAVFHVLGQGATFKDLGETYLDAHRKDRTAKHLVRRLETLGYRVTLAPAA

SEQ ID NO: 154018 - protein, 350 aa, unidentified
MEYIALDVHKNYTWARVENSKGERLYESRLAHAQGSIKNFVSRWSGGSPAAVETVGNWYWVVDEIEAGGGTPQLVNARLAKLMMGNVNKSDKLDCQGMNRLQRTGTLPTVWIPSSVVRDQRELPRTRMVLSSQRTQLKNRVHATLGKYGHTVQGASDAFGKKGRKIIEELIEELLVKLPPHTQQTLRVVLDELDHVTDNLKAIEQQMIEIFSPCPQTDWLKSLPGVGDILAVVIFTEIGTIERFSRAEQLASYCGLVARENSSGGKIRFGAVRRDVNVYLKWAFVEAANSAVLNAGRCDYAHVSRLYGRLKPRRGHGKAKVAVARHLAEACFWMLKKGEPYREPMPSTQR

SEQ ID NO: 154019 - protein, 349 aa, unidentified
MIVIGIDSHKRTHTAVAADGNGRKVGETTVATTSAGHLALVRWATRFPDRRFALEDTRHLSRRLAADLLRAGEAVAWVPTRLRAGARRHGREQGKSDPIDALAVARAALANPDLPVASLEGEERELRLLVDHREDLVAERTRAQNRLRWHLHELDPGSEPGPRSLDRAVVLRALDERLEGVPGTVARIARELVVRIRELTRTIDALEREITRLAREIAPTLLDLPGCGPLSAAKLVGQVARISRFTSAAAFARHNGSAPLPVWSGNDVRHRLSRKGDRQVNVALHRIAITQMRIDERGRAYYEHRRAAGDTKTEAIRALKRRISDEIFRRMRHDERLRATPRAALAAAA

SEQ ID NO: 154020 - protein, 385 aa, unidentified
MPDVTPCLHPGQVRRWIAFDLHKFSIVAGALPPDGGKPEVCRIETTERAIRRFIDKQGGPTGLSVCYEAGPGGFALWRLLTKLGVACDVVAPSLIPVRAGDRVKTDRRDAKKLVSLYRAGMLRFVHPPTPELEGLRDLLRARDDLRGVRLAARNRVLKQLLRHGRIFREGKTAWTKLHRAWLARQRLDDPLAQEALKQLLIHVDGIERQLDTLDARLQEIAGSERWGGQVQILTRFRGIATITALGLIAEIGDFARFSHPRELASWLGIVPSEYSSGDQQHRGHITLSGNKHARRLLIEAAWHYRHAPRLPKNGPPPDERAWQAQVRLHHRHRHLTEHGKRSTVANVAVARELVGFLWAAMTDQPLRSTDTAASSTADQLQEATA

SEQ ID NO: 154021 - protein, 371 aa, unidentified
MTNDTTVFVGLDVHKDSITAACVGSDPADSPVDLGTRGTQQYSIDRLIRKLSGRGPLRFVYEAGPCGFWLQRYLRSVGQECLVAAPSLIPRRPGVRIKTDRLDARNLALALRAGTLTAVHIPAPEEEAFRDVVRAWQQCKRDVTSAKQRLKAFLLRNDIRYQGRATWSAAHRRWLARLVLPSPAQQIVFQELLDAVLERERRRDRLEQQLDTLAPTWPGYPLATALLAFRGIQKTVAYTVVAETASFTRFAHPSRYMAWLGFVPSEHSSGTSRRQGPITRSGNRWARTLLVEAAWAYRYTPKVSPIIEQRAQHIDPDLRALAWKAQLRLCHKYRRLIARGKHANVAVTAVARELAGFIWDAARLVDSSQRV

SEQ ID NO: 154022 - protein, 305 aa, unidentified
MISWVGIDISKSNLVVWVQPQNQGFDVANTSQGFDELIECLSRYQVGRILLEATGGYERKVMAALQSANFNVLRINPRRARAFAVAMGKNAKTDPIDAAVLADFAEVLNAPCDKPICAEREALRELVQLREHFVQQRDDNKRRLQQVQLPAAVATIKEHIRYLQAQIKLLEKSINQSMRDLDAEKADRLISVKGIGTVATASLLVYLPELGELDRREIAALAGIAPYNEDSGNHSGKRQISGGRARVRRALYMSCWVVIRHQADFKARYETLRERGKSAKVALIACMRILLIRLNAMLRDGTEWR

SEQ ID NO: 154023 - protein, 397 aa, unidentified
MKGFCISLDVSKGSSFYQGFKGFDEPITKPKKIEHNLEGFKELLKLKETIRKEYNEDCIVVFESTGVYHRSLQTYLDEHNFKYTIISPLLSAKVRKSDIRGTKTDTKDCASIAKVFYLKELRIYSKIDEIYDDLKEKSRYYDFLMDEMKRWKIEFRRLLDIIYPRFDRVYDDLYGDFIQTFLLEYSHPEIIRKRRLDTIAKFLEKHTCHKEAYCIRQAQTLKEYVENCASGCSSKSYLVRQFDTVIHNLNAQIKHLEIVLEEIVELAKALPNYDSIRSIPGIGNNLAGRILAEIGDVNRFNNASQLVAYAGIDPQIYQSGQISGLHLKISKKGNKKLRCLLYLAVTCMIKTSRNTVIVDFYKKKKADGLASKSALVASMNKLVRIIYSLCKNGCLFK

SEQ ID NO: 154024 - protein, 328 aa, unidentified
MCTLGIDVSKNKIDLCLLTAGPGGKKKHKVLTNEPAVARKVVDWLNAQKCVPESVTVVLEATGIYHENLAYGLHEAGVSVCMANPCRVREFAHGMDILNKNDAVDAFVLACYGELKPPAVWVPPSPEVRKLRALLRQRDALREDVQRTVNRLEKANSTSTPQEVIRSLERTKSWLNEELARIEKLITDHTDNDPGLKADLDLLKSIKGVKDQVGREMLALLKDGMFKSASQVAAYLGLTPVEKTSGSSVRGRPHMSKTGPSGVRAKLYVAALTGSRWNKQAKAIYERLVAKGKAKKAALGAVMRKLVHLCFGVLKTRLPWDENYVATA

SEQ ID NO: 154025 - protein, 340 aa, unidentified
MLTAEADKCKTKVVVNTAAGVQALLAWCAKHGAQPAQLHAILEPTGLYHEQAATALPQVRVSLVNPAQARDFAKALALRSKNDALDSYVLARYGQTLSPALWHPAPLHARQLRALLTRREALSKDLLRELNRKEKSQFSPSAPLVDGSIDKAIAFLREQIKQIERAIDQHIDNHPDLKQDCELLNSIPAIGPQAGNAILAVMHNRHIDSAQSLAAYLGVVPVQRQSGSSLNSCARLSKAGPSQVRATLYMAALVGTRHNPHIRALYQRLLKAGKSKKAALGAAMRKLVHLCFGVLKNRIPSAPPQDGGAQDIERLYAQLSQRYADLPSPQAIAAASGAAA

SEQ ID NO: 154026 - protein, 364 aa, unidentified
MHSINNIELSSLEETRCQFNGGTGAIKLGIDVHQDFYVVVEQVGGSNPKPPQRLAKEAFLHWATRLKQKSSAEVYAVYEACGFGFSLQRKLSALSINCYVVCPQKLDEQNRRVKTDGLDAKALCLKLDRFVQGNRDALAIVRVPTEEHEQLRAIHRQREQLVGARKRLEAQGRSLMVNHGVEPVQNWWKPRTFAALPAPQWMKELLANSQPILVALQQKISALTVELQSAASPDQPRGLGKMTSVVIDREIGDWNRFNNRRQIASYTGLCPGEYSSGNTRLQSCVTKHGNPRLRAALVELAWRLVRFQRDYKAVRKWRQILAKGALATGAARKKAIVAVARQLAVDLWRIKTGRLSAEELGLIN

SEQ ID NO: 154027 - protein, 407 aa, unidentified
MNTRFAVVIGLDVGKTAHHACALDPEGNKLFDKPLPQDEAQLRELFTGLNVHGKALMVVDQPNTIGALPIAVARDVGCTVAYLPGLAMRKAADLYPGRSKTDARDAFIIADTARTMPHTLRQVDRDNEVLSALKVLAGFDEDLAHETTRALNRIRSLLTQIHPALERVFAGGSLSTALVLDLLEKFAGPTGLKTAGRARVLRFARSHSRRDPEALVDQIFAALGEQTVVVPATAAVELVIPRVAGQVKELKEQRATVAKEVEAMLEDFPLASVLMSMPGIGIKTAAQILMAVGDGTGFETPGHLAAYAGIAPVTRRSGTSIRGEFPARSGNKRLKNALFYSAWVASNHDPISKAYYDRKRAEGKRHNAAVICLARRRCNVIFAMLRDGTYYQPPTTAPTPEPTALAA

SEQ ID NO: 154028 - protein, 385 aa, unidentified
MLTQGFQATAAANQDGTIYLAFELSKSRWLVARLLPGSSKISRFRLEGGDTAGLLQLLTEAREKAARLGFAKPRIVSCYEAGYDGFWLHRWLQAHGVDNRVLDPASIEVPRKARRAKTDKIDLAKLMRVQLAHERGEPQVCSIVHVPTVAQEDAKRVSRERASLLQERISHTNRIKGLLFAQGVRDTDPLARNFLARLDELVTPDGRRLSHHLLGELRREHARLSLVVSQIAKLEAEVRTAVQQAQPGTPEAKMALLVQLKSMGPTWATLLVNEVFYRDFHNRRQLGAYLGLTGTPYNSGQSVREQGISKAGNGRARNVALEFAWLWVRNQPKSALTRWFLNRVGEAKGAVRRIAITALARKLMIALWRYLETGLVPTGAVLRTK

SEQ ID NO: 154029 - protein, 340 aa, unidentified
MEHTSKFFIGIDVSKPWFDISLMEVTNHEKLPMLTERFDNTPAGLKTMRAWLKEHHVSFDQDTLVVIENTGVYHRLIWAFCSAHGLPIHIGNAAHIKWSFGIARGKNDKIDSQRLCSYAQKHGDEVKATPALNPVLMKLKDLFSARTKLLSQLNAIKTYLGELRPINDKSVQHVMEQAHKAAREGLKKSIRLIEKEITSIINQDEAMKANYKLLISVPGIGHLTAVYLICCTCNFSGGISGKQLGSYAGVVPFGNTSGTSIKGKPRVHHMANKDLKKLLYMCALAAIQFYPEFRAYYDRKVKEGKHESAVLNAIRNKIALRAVAVVKNRQPYVNNYKQAA

SEQ ID NO: 154030 - protein, 343 aa, unidentified
MNQYIGLDVSLKDTAISIRENGKRIWRGKCPSDPKLLTEMIRKHAPRARRVVFETGPLSTWFYHALTSEGVPAICIEARHAQKVLNETLNKTDTNDADGLAQLAEAGFYKAVRVKSFDAMMARTLVAARAQLLNISTQLGNQIRGLMKTFGLIIPKAKGRVFDGDVRKLLDGNNELAKVILPLLEAWHGIRKRAADLSRQLLMVARESQATKLLMTIPGIGAVTAVSYVTAIEDPGNFRTSRSVGAWLGLTTRRYQSGEVDYDGHISRRGDNRLRGLLYEAATTLLTRTSARTESSLKRWGLKLRERLGFKRAAVAVARKLAVIMHSMLKTGEVFNASAGATV

SEQ ID NO: 154031 - protein, 413 aa, unidentified
MNKKLSMNTAMKYVKAAGIEVHADFILIAYRAYGEIKLAEFPNTTDGIEQATRFMLKRNIKLACMESTGCYHCGIYFALKAARIRVMLLNPAKSRSISPHKTDERDAIWLLRLAETRLIEGSYMPDDKIFELRILTRRRMKIADTIANLKKSLMSVLEAMGVKIRELSKSARSSSIRRFLDDILRGELGKYRKQDVAEKLFNIFQKSSPELIRLVKSYIVAIKSLEKVLESIDKTIRDAVEDYIEEIKILMSVPGVSFKLAASILAEIGDVNRFDSPEKLVSYAGLVPSVYQSGGKTKLRGTVRSCNIYLRRVMFLVAFGAMRSKSRIVQDFVSRLKARGKHFKVIVIALARKLLRIIWYLLRRREKWCERLREKRIPPRARRSRVTIEEAIRILYEAGYIVIKRGESMQATV

SEQ ID NO: 154032 - protein, 430 aa, unidentified
MMEEVDDAELVVERIAALDLGKAGLEACARVPSPHRPGRRMQELRGYGTTTAQLLEMVAWLRHWGVQRAVMESTSTYWKGVYYLLEAEGFECWLVNAREVKNVPGRAKTDRADAIWLAKVAERGMCRPSLVHPAEIRRLRDLTRYRRALVQDRTREQQRIEKLLEDAQIKISSVLSELHGVTARAMMDALIAGQRDPRALAQLAKGRARKKTAQLEEALRGFFTDHHAAILRMMLDNTDRISAQIAALDARIEKEIGPFSGQAARLAEIPGVDAVAAAELIAEIGVDMTRFPSDAHLVSWAKFCPQTHESAGKSKSKGRGRGNPWLAGTLGRIAFANSRADTFLGARYRRLARRRGKQKAIVATGNSVLTVVYYLLSDPMATFCDLGPGYYESRINVHRRARDLVTQLQALTGQHIVIRDGKAVITDAAA

SEQ ID NO: 154033 - protein, 346 aa, unidentified
MKHSVGLDVSVKETAICIVDEAGKVVREGKVATEPQAIIAFLSSAGVEYARIGLEAGPLSQWLVNGLSEAGLPVICVETRHMKAVLKAQQVNKSDRNDARGIAQMMRVGLYKPVHVKTLASQQARMLLTSRKLLRDKLQDMENELRGTLRNFGLKVGVVSSGHFEARIKELVAGQPPLEMIVVPLLAVRRVVREQLAKLDKMVLDQVRDDKLCRRLMTVPGVGPIVALTFRATVDQAQRFARSKTVGAHFGLAPRRFQSGERDYDGRVSKCGDAMMRTALYEAAQVLLTRTRTWSWLKAWGMQVARRRGAKKAIVALARRLAIVMHRMWVDGTEFRWRKEADTAAT

SEQ ID NO: 154034 - protein, 344 aa, unidentified
MKIAVLGIDLGKNVCSVVGLDSSGAVVLRRRVRRDTLIDLVAKLPSCIVGMEACCGAHHLGRLFAAQGHDVRLMSPEYVRPYVKAQKNDDRDAEGIAEAATRPTMRFVEMKTEDQLDMQTLHRSRERLVGERTALINQLRAILLDRGIVVPQGKRKLEQYLVILMNEHNGEGLSARMRMLVADIRAQWQDLDRRIGEFDAEFVRWAKENEDARRLVTIPGVGVTISTALIAAVGKAETFEHGRDLAAWLGLVPRQSTTGGKPRLMGISKRGNKYLRKLLIHGARAALPYVAEKDTALGRWAKSLLSRVHQNVAVVAFANKLARICWAVLRSGQKFAAQEAPLVV

SEQ ID NO: 154035 - protein, 415 aa, unidentified
MNNTISDLDTDLTSVSEAEVNAAQAEAQPAQNESDETYAQAVQEQLALARSNANCRYIGIDLHSNNIWLSVIVNEQRPSGLVGKVIFSRSIGTQRVDGTLPEDLIKPVLERFCKDQPHIACVEATYNWYWLADLFEKNGWNLVLADPSTVSEAKTKAADDRKDAEYLADRLRYNALRYAVIMPKQLREIRDLVRTRGVAVEQRAREKIIVINKLTNLIGRKITGKELKELIKEHAESGTEAPMLLNWGLTEEVRITLDYHLAMATHINQGIQKLEEHINAVGRNLRYTKALQKMPGCGPVISSILASEIGSIRRFATAANFVSYCRLASTSKLSNGKSKGLGNAKNGNAYLSWAFTELATLMVRYSEAAKRHFEKLMRKYGQLRVKAIRVLAAKLARSVYQCLSKNEPFDVLRCF

SEQ ID NO: 154036 - protein, 391 aa, unidentified
MDQYVAIKVHPSVRDSNSPGGILMFTRFHGIDLHKRYATISVRDELGKEIQVILKCIDFTAYVESLSDDDIVVLESLNNAFYWADQIELRGATCVIIDPQKFSIIRESWSKTDRKDAGSLSLALWMSVSRNEFKLPTVDKPSPVIRDLRRLFAEYQMLNEQIRQYKNVIQGHLLETGIALAEKTKERLLKPQHGLEIFGTLDLPHTIQMCVIMNLYLLWNLFEQKEILKREIFKAGISLEPHMKRLITIKGVTPFLALAFLADVGDITRFSSARKLNAYLGVVPTVRASGGKATIGHINKRSRSLSRGLFSQIMFHFANSSPDMLTFYESTKARRGAGRSRIAVLRRLFSIMRRMLLDDIDYRWKDDINVHNKLVDYAAEMKNIEILAGSA

SEQ ID NO: 154037 - protein, 339 aa, unidentified
MKVSTLGIDLAKNVFQLHGVSCNGQTVLKKKLTRDKFLPFLMQLEPCLIGMEACASSHHFARVLRQYGHEVKLIPPQYVKPYVKTNKTDAADAEAICEAVARPNMRFVQIKTAEQQAILVLHTERNILIRERTACANSMRAILAEFGIIMPRTLSQLYKKIPEILEEYDNELSPFVRCSVARQLEHLQGVEDQITLIEQELSRWAKTQPACQRVMKVPGVGLMTATYLVASVGNGQQFHSAKQFAAWLGLVPRKFSSGGKQRLGRISKRGDRYFRYLLVHGARAVAAVIERHKDNMPWLYRLLNKKAYNVAVVAQANKTARILWSMLVHHTEYRTLSAV

SEQ ID NO: 154038 - protein, 339 aa, unidentified
MNKIITIGLDIAKKVFQVHGIDGAGAILVQRSLRRAQVLGWFAAQPACLIGLEACATSHYWARELSKLGHTVKLIPAAYAKAYVRRNKNDPADAAAICEAVSRPSMRFVAVKSEAQQAAAGLHKVRAMLTKQRTMLMNQLRGLMAEFGIVVGEGPQHVAKLVAILDDPADGRIPAPLHEALVALGQGLRGLALRIAALDRQILDWGRDNATYGHLLTIPGYGPILASAMAAMAVDPTAFRSGRGFAASLGLVPRQDGTGGKVKLGPISKRGNGYLRRLLVNGAMSVLGAKRAKQDPWLVKLLATKPRKLAAVALANKMARIGWAIMRRQEDFRALPAAS

SEQ ID NO: 154039 - protein, 373 aa, unidentified
MKEKVRFLGLDVHAETIAVAVAEPNGEVRSLGTIPNRAESIRKMIRKLGTAEKLRACYEAGPTGYVVYWQLAELGVQCEVVARTLVPVKAGDRVKTDRRDAEKLARCYRSGDLTAVWAPDEGSEALRDLVRAREAAKQDQMRARHRLSKFLLRSGQRPPTGVRPWTRLIWVAQLRLTQSAQESTRQDYLHEVEHMRARVTRLEQAIMEAVQLASPSLQQVIYDLQALRGIADISAVTIAAELGQLSRFGSARQLMGYCGAVHSEDSSGKRIRRGSITKTGNAHLRRIVGEAAWSYRRPPCIWYGLRRRQESISEEAKEIAWKAQHRLHKRYMRLGAAGKPQGKIITAVARELLGFIWAIGTKAETTVSQRAAA

SEQ ID NO: 154040 - protein, 312 aa, unidentified
MTSEKFVGIDVSKRGLEVQVHGEAESRKFGNDPDGIRSLLEQMKALQPVLIVFEATGGYERRAAKALSEAGLAVAVVNPTRVRRFAEALGILAKTDKIDAKVIAHFASVVCPAPNGQHSDLEEQLAACVERRRQLLVELAAEKNRLATCPACMRENIEEHIAWLEEHVDRLEAEIQSCIMQKPEWQTRAEIIDSVPGVGPVTATTLIAELPELGQLNRQKIVALAGLAPFNKDSGPKKGKRKIFGGRSGIRRPLFMATLSATKFNPIIRAFYESLLKRGKEKKVALIACMRKLLVIINAMVRKGEAWRVSPD

SEQ ID NO: 154041 - protein, 342 aa, unidentified
MREKRSVGIDLHRRRFTCCVRLEKGRNYLSEWSLEQLPQFIRKLRATDEIAVEVTGNTRLFYEAVAPYVARVVVVDPHQFRVISHSVKKTDPHDARNLALYLAKGLLPEVRMKAKRQAEVASLTQTRDRLVKLRTTLKNKVNNLLSARGIELDKESLSSEKGLAWVLEQKLEELAHLELEVIVEQIRSLNRSIARLERVIEEASQKLPGYRNLTSIKGIGSLGAGILLSVIGEVSDFAHEGKLAAYFGIVPRVQDSNETEHRGRITKRGSKLGRTTLVQCALIAKRYSPYLDRYYERIRARRGTGKAIIALARKFLSIVYYTLKNNWIFEDFPNFVLAEAKT

SEQ ID NO: 154042 - protein, 343 aa, unidentified
MHYIGIDVSVKESALCILDDRGKIVRETKLPTDPEVIARFIADTGLAIERIGLESGCIAAWLFAGLQRHGWPVICIDARHAAAALQAGFRNKNDRNDARGIADLMRVNKYRPVWVKSPQAQRQGRLLTARSTLQSQLVALENTIRGLLRQEGIGLTDRRTAFEAAVREVIADDRLLEAAVLPLLDTRNAVLQHRATLDRQILRIVRVDPVCRLLMTAPGVGAIVSLAFKVGVDDPRRFSRSRDVGAHFGLTPREYSSGEVSYRGRISKMGDREVRRLLYLAAARILRRDAALWCPLKVWAVRLAQRVGLSKARVALARKLAVVLHAMWSDGQVFQWRRSAVSA

SEQ ID NO: 154043 - protein, 342 aa, unidentified
MDEYDVRQFVGIDLHRQRSVIVRQSESGDQLSAVRIVNDPAALRLELERAGTDPEVVLEATYGWYWAVDVLRDCGAQVHLAHPLGVKGFRYRRVKNDVRDAGDLADLLRMGRLPEAWIAPPQTRELRELVRYRAKLVAIRSGLKAQVHAVLAKAGVLITVSDLFGVGGRQRLAKVPLGAAYAERVRSLLELIDVLDGHEARFAGLIAKRLCNHRGYQALQQVPGIGPVLAAVFVAEIGDVHRFTSPAHLCSWAGLTPKHRESDTVVHRGHITKQGSKLVRWAAVEAIQRYPTTSKIALDRTRIESRRGKNIAKIAAARKLLTLVYYGLRDGHIRALDRPRAA

SEQ ID NO: 154044 - protein, 458 aa, unidentified
MRRKSKRTPGMEEAHPFSAMSKINANAAGVDIGAVEIVACVNGDEETQIVKAFGNYTADLQALGAWLKKYEVKTVAMESTGVYWIPLFEELERQGFECLLISSRSLRRVSGRKSDIIDAQWIQTLHTYGLLESSFRPQADLIALRTMLRHRAQLLEHRAPHILHIQKALLQMNIQLSQALSDVMGETGRAMIRAIVSGERDPKTLAGFRDPNCKHSEEEIEKALTGTWREEHLFVLKQSLELYDFYTQQIEACDAEMDRLYALTRPDWAVGELPAIPKKKQNSHSKNAPKNSREIRQHLQRINGVDLSVVDGFGVSLAQTVTMEVGSNVGEKFPTEKHFCSWLGLAPKHEISGGKVLKNKTLKTKNRAGQAFRMAAQSVKQADCPFGVMYRRLRSRLGPAQATVATAHAIAKVVYQMLKYKVEYDPLSVNEYQKQYEAQQVKYMKKKAAKLGFQLIPA

SEQ ID NO: 154045 - protein, 348 aa, unidentified
MEHYAGIDVSLELSSVCIVDAKGKIVREAKVASDPDALVAFFKQLGFPVVRIGLEAGPLSQWLYAGLAQAGFEAVLLETRHVKAALSAMTVKTDRKDARGIAQLIRMGWFRPVHCKSPGSQEVRALLVARKQLLGKLLDVELSIRGILRGFGLKMGVVTRKTFEARARELSSGQTMLETVVGAMLTARAALQSEYAKLHKTMLVIVRDDKICRRLMTLPGVGPVVAITFKTAVDDPTRILKSKAVGPLFGLTPKKYQSGETDVTGGITCVGDTMVRTALYEAANILLSRVTRFSALKRWAVEVAKRRGLKRAKVALARKIGVILHRMWVDGTDFRWTKAELGSGVAAH

SEQ ID NO: 154046 - protein, 337 aa, unidentified
MNFVGVDLHKKVISICVVSEDRKVVCRQRLACDWEEKIEEFFAQWAPFEVVVEATASYEWFVRLVEPLARRVVLAHPKKLRVIAESARKSDKLDAQVLAEFLALDMIPEAHRPTPRVREHRGLVRHRVYVQRRITSVKTKIRRILSNYNADRPNLFSRSGLEYLAEVKVSGADRFVLDQLIGEWQQHHRRLLAAQKQLRAFAKKAPATEREARAVLETIPTVGPVTIDVVLSELGDVRRFRSQKRAVSYAGLAPGHRESAGRAKQLGISKEGSKLLRWILTEAAWRLVGKTRYWGHIYERLRNRCGPKKAIVAVARRLLCVMISMLQRGQPYRLAKS

SEQ ID NO: 154047 - protein, 468 aa, unidentified
MTEVRLGIDVACRADHRASLADERGEFIWSSWKFRTTTADLERLWAKIPAGASVTVILEPTRNAWVPLSAWLQARGATVILVPPEQSADLRDYYNKHTKTDRLDSRVLARLPLLHPEGLRGIDNLGPAQSLRRAVRHRFSLVKQRTAASLRLDALVELLGPGWADALGSATASKTALVVLEKYADPRALKRLGRARLAALLIRSSAGLWREDKADELLAMASETLALWSGGGIDFTELAHDIASEVRMLRQLDDEIAAADKRIAVLYDEADPKGIVASAPGLGPVLSAAILGNAGDFNRFANLAGVRSFTGLVPKIDQSGLVAGHKGITKAGDAGLRRALYMAADHARHIDPTLAQRYYRLVMVEGKHHNSALCSVSTVLITRIAACWRKGELYQLRDEDGEAITEAEGKAACTDRFKIDPKVRAARRRNTPAKLLKNRVAGRGRKESAQKVAPATDPPEEEASENVA

SEQ ID NO: 154048 - protein, 342 aa, unidentified
MHHAAIDLGSKESQICIRQPNGVIVEERKHPTRKLTELVKSWPASRVVMEASAEAFKIADAALAAGHEVRVVPGTLVRLLGVGERGVKNDQRDARQLSKASWQTDVPSVHIPSQTARELRSLCGARDVLVDMQRKLSNNVRGWVRAQLWKLPSGKMATLPERLRTHAQTSHCELPEHIERQLTMLTQTTAQVQAANKQVRKLAAEHAICRRLMTVPGVGPVTALRFVAAIDDPKRFPTAHRVQSYVGLTPGEHSSSERERKTGITKAGPSELRRCLVQAAWSALMVRRTHPMLEWARQIAERRSRPVAAIALARKLAGILFAIWRDGTTYEANRSAQPSSAM

SEQ ID NO: 154049 - protein, 370 aa, unidentified
MRFYQGQHPFYCGIDLHARTMHVCILDQAGQTVFDKGIPCRPEALLRAIQPYRDHLVIGAECMFAWYGVADLCVEQDIAFVLGHALYMKAIHGGKAKNDRSDAGKIARLLRGGTFPLAYAYPKGMRETRDLMRRRTYLVRKRAELLTHLQILNAQYNLAPFPKKLACAANRTEMNVAERFADPSVQKSAAINLALIDRLDELIGDLELYLVRTAKVDDIQTFYRLRSIPGVGKVLALILLYETHDIGRFDTAGQFLSYARLVRCAHESGGKKLGTGGKKIGNAHLRWANACAACLFLRSSERAKKWKQKQAAQRGEGKALAILAARLGRAVYHMLRKGEAFDEDRFWSGARRTRTGSSSLSRKEARDAGH

SEQ ID NO: 154050 - protein, 319 aa, unidentified
MTIVDSRAITGGVDTHADSHVAAALDSIGGLLGVESFATTPDGYRQLLLWLGAFGDVNLVGIEGTGSYGAGLSRHLQAAGIRVVEVDRSNRQDRRRQGKSDPLDAVSAARAAQSGRSTGMSKGRTGAVEAIRALTVAKRSAKSERIQTINQARALILTGPDDLRMQLAGLGASELVAKAAALRPRQGDLVGYATRMAVRELGRRVEFLDDQLKRLDELIVPLVQMQAPVLLTIYGVGPDTAALLLIAAGDQPDRLRSEAAWAHLCGVAPIPASSGQGQPSSLEPRRRPPGQPRPLAHRDNPNEFGPAYTSLRGTASERR

SEQ ID NO: 154051 - protein, 438 aa, unidentified
MNSLSYVERFRQIKNELRKNHDFLLVGIDVSKNSHVACIMDSSKHIYHKKFRFDNSANGINLMLTTTKTILQKEPKKEIIFALEPTGNYHKPLANYLHNLGYMGCYVSSVAAKENRKTINGRWRKNDPDDAYNVADLLNQGKIMFYNSEQQKEFNQLKPLNILRKKLQKRLCSIKAKIRNNIFAQCFPEIDSLYNQIDNPEVIEILKNFPSAEQIRNTSFKEFYSKLIQTGRITTQKKQRIHNVWHKAASSIGCPLNAAMEIETAFILQDIELIKCQIGKIDKKINAICSHSQDYKLLLEIPGFGPIYASIFLSVINNIKNYNHPDQIVKLAGLDLEYSQSGKYHSKSQCSKKGNALLRYALCGVVNGALKHKIFQQLFEEQLQKKGDDKDNRRILKVKLAVKMIRIAYAVLSKNEPFDIEKIKVNSVKEPVFIERKG

SEQ ID NO: 154052 - protein, 424 aa, unidentified
MAKPAKLRPDLKAVPMLQSESVYVGIDIGKTKHVAGFLSKTLLERHERFEACPALLFENSREGFRLLIERLRELAPLEHCFILLERTGHYHRPLQQYLQELDLPVYVIHVQSRLAGMLKTDKRDALMLANTLYNQLELGVQVPNKLQLLRRLLPPTKAAAQLKGLIRHRYELVRESTQRKNKLTAICDELFPELVRVVKDPNAWVALALREQFPTPQALATASFTTLQQIRGGARSLSDLKLLELQRLAAESIGVRDLIRLRGLVLEQGQLIKELRLLREHIDQLESEIVTIVAQAREGQILLSFPGFGPITAATIIAAIGSILNFSSASALKSYFGWAPVVAQSGSTLDASYLTRGGTRTMKQIMFLAVLQIIRLRDNEWARLYERLVKARCPFDERTQSYTGKTRVIGRVAGQMIEAIYAKL

SEQ ID NO: 154053 - protein, 329 aa, unidentified
MSNLLKKVIGVDVGSKFLTLSFLDDEKGEQVLNLPNNERSILSFLSKISPSNYCFVIEATGNYSSRLLHFSIGKGFESSLINCMSVKHFARMKNIITKTDAEDAKLIRNYGEMFRPEFYIPKTQDIEYLDQEIKLLNDLEEEKLRYAVKLKALRFHPVLNPSTEKHYEKRLKQLEKEIKEVEARLPQLQDEEFTETKNLLQSVSGIGEKTSLQLMTATSGFKNFHSSKSLVKYFGLAPRIYQSGKKSYSPGKCRTSKTYIRSILYVCSWTAIKHNQKCKELYSRLLEKGKAKKLALIAVCNKLLRICFSVVKNKTPFQQDFQNKLKIST

SEQ ID NO: 154054 - protein, 365 aa, unidentified
MGLDVHKDSITIGAAEPGRAPARVIGKTAHDVNKLLKVLVKLGRPEQLHIVYEAGPTGYGLQRALQARGYLCEVIAPSQMPRRPGDRVKTDGRDCVQLAECSRAGQLRAVWVPDPADEAIRDLSRAREDAVNSRTKVRQQLKGFLLRHGVRYTGKTSWTKAFYRWLATLSFGAGASQTAFTEYWLAVQAADDRVQRLTQALQPSIAGWRFEPVVAALQALRGIDVISAIGLVAEIGDLNRFDHPRKLMGYLGLVPSERSSGERVSRGSITKTGNTHARRLLTEAAWNYRFKARIGRQAQRRQEPLSEQIRSMGWKAQLRLSRRFAALLERGVQPNKACVAVARELAGFVWAIGTTASREQTATQQ

SEQ ID NO: 154055 - protein, 414 aa, unidentified
MEVVHSRCAGMDVSKRDAKVCVRVAGRGRRKTVETVRTWGSTTNAVLALREHLISEQVSLVVMEATGDYWKPFYYLLEDADFEVVLVNARRVKNLPGRKSDVSDAAWLAQLGAHGLVRGSFVPPAPIRQLRDLTRARTAMTRERGREIQRLEKLLEDAGIKLSSVASDITCVSGRLMLQALIDGQRDPVVLADLAKRRLRAKIPELTGALTGRFSDHHAFLAGMYLEAIDQRSRQIAELTARIEVVIEPFRAFCDLIGTIPGIGQRSAEVIVAETGADMNIFPTAAHLASWAGCCPGSNESAGRVKSTATRPGNPYLKTALGAAALSIANTRDTYLAAKYRRIAARRGAKKALVAIEHAILVAIWNMAHTGAFYDDPGADYYTRRDPERARRNAVHQLQRLGYQVTLIPAAATA

SEQ ID NO: 154056 - protein, 372 aa, unidentified
MKDDSVIFIGLDTSKLKISVAIADGRRNGEVRFFGDISSEPASVASMVNKLSKRGAKLHFCYEAGPTGYGLYRQIVELGHNCVVVAPSLVPRRAGDRVKTNRRDAMSLARLHRAGELTAVWVPDEGHEAIRDLVRAREAASDALKQARQQLQSFLLRHGRIYTGRKPWTRAHTRWLTCQAFDHPAHHILLAEYCQAIEDAGVRLNRLTKLVVETAASWSMAPVVAAYQAMRGVAFMTAVTFVVEIGDVRRFENPRQLMAYLGLVPSESSTGERVKRGRITKAGNTRARRVLIEGAWTYRFPARVSSRIQARLEDLPRAVREIAWKGQVRLCARYRKLMAAGKPKVVAVTAIAREMAAFLWAIGQEVAPTAKI

SEQ ID NO: 154057 - protein, 455 aa, unidentified
MPYNIAGIDVHKRMLHVVVSDVQVDGEYDFTRRVFGSLPEALRSLAAWLVEQQVQEVVMESTAQYWKPVWGALERYWKPSCQTRKGALATSGTLHLAQALSNRGRRGRKKDFRDAERLVKRLVAHELVLSFVPDVEQRLWRTVVRTKYQLTRNRVQLQNRLEALLEEAHIKLSSLVSDLLGASARRMLGAIADGETNRETLAALADRGLRATQEQLQDALGVCQELNPVYRRLIRMVLDEVASIDKRIEQLNQEVANLLRPHEDQVKRLAEVPGLGVDTAQQIISEAGATAATFPSEKHLSSWVGACPGDEESAEVNRSRRSPQGNRHMRRILNQAANAAVKLKGSVFEILYRRYVPRLGHNQTIGIIAHKLCRLVWKILHRGIRLRGARPRGQQSVQTKAHPKNDPSTPQAWLPNRTEPFSISHPSMTAISDSATVFDPASCRFKRSMQHHPML

SEQ ID NO: 154058 - protein, 364 aa, unidentified
MNTQTTATPKLFIGMDIHKKSWSLHFRTDLFDHRGFSMSPNPEQLYDHVQKTFPGHEVSLAYEAGCCGFSVARYFLNLGWQLKVVNAADVPIANKQLYQKTDKVDCRNLCKQLQDDRLRGIHIPTENQEQLRSLLRHRNNIVKQLRKEKQLIKSMLLYVGISLPQQYDNPNWSKDFLQWIRDIKWTYPTGALSIQSKLRILEILNQEYLQTGNELRAYCRLHHKKDYYLLKSIPGIGGYLAAALLAEVGDIRRFNSEKEFSSYIGMVPGLRNSGETEKYMGVTPRCNALLRSYLIEAAWVAIRRDPEMQAYYRTHIGKNIKCIIVKVAHKMVKRILSVIKNEKPYVINYQLNKNNIHTKTIILS

SEQ ID NO: 154059 - protein, 354 aa, unidentified
MNTTPSATPPLATPPLATPSTVAPPLATPSTVAPFAHIGLDVSKDTLDGCLLIEAKRHEKQFTNDAVGHRQLLRWAHALASASTCHFCLEATGPYSQTVALFLVEKEQQVSVINPARIRFFGLAQNQGNKTDKADARLIAQYCRLQSPPPWRIAAAEVRLLQEMVRRLHALSELAAQEKNRAQAPGQSKAVLASNKRVVAALEKELLRLRQEVRAHVKAHEALQRDAKLLQTIPGIGEITAWDILAEMPAVHEFDSAQSVAAYAGLAPREQRSGSSVRKATTLSKRGNSRLRKAFYFPAVSAMQWNPLVKAHYERLRERGKPKMVALAACMRKLLMICYGVLKHQMPFDPAWMS

SEQ ID NO: 154060 - protein, 391 aa, unidentified
MSMYFIGIDISKYKHDCCIISAADQKVVSKVTIKNNKAGFNELLTIIHSLANPADIRIGFESTAHYALNLELFLENSLLTFMEVNPVLISEYKKSKTLRRTKTDSVDCESIARWLMTVEYKPHSKGFYHAYSLKSLTRLRDKLIRQRSFYLVKITNVLDHTFPEFKPFFNERLSKTALYLLENYGSAEKMARMNSASYEKLRSVSRGKFSPQQFLRLKELASNTVGVNNSIFDVELNSLLSLYKSLVKEIDTIEKEINKLIEEVHPHYMSVPGIGPLSAAVIYSEYGDISNFTNPGQMLAFAGIEPGINESGTESHGGKMVKRGSSQLRYTLINCCLPLIRFDMTFATYYAKKRGEGKPHRVAITHVAKKLIRVIYALERQDIDFNAQKLR

SEQ ID NO: 154061 - protein, 343 aa, unidentified
MHIKRIGLDLAKYVFEVHAVDAQDEVVLRKTLRRDSVAQFFAELEPCIVGMEACCGSHYWARVLTDLGHEVRLISPQFVKPYVKYNKNDRNDAEAICEAIGRPSMRFVPPKSAEQLEIQAVHRIRQRVVANRTRLVNQVRGLLGEHGVVVARDITRIRRALGEIADSHESAFGDIFIDMLRDMRDELAELDIRLAGYNRRIKNLFRSNEMCQRIGQIEGVGLITATALVAAIGDKSCFKNGRQFAAWLGLVPKQHSSGGKARLLGISKRGDRYLRTLLIHGARAVLGKAAGKTDARSQWIGRMRERRHPNVVAVAIANKNARIIWSLLSRDQEYRPDHKMSFT

SEQ ID NO: 154062 - protein, 339 aa, unidentified
MDQPITIGLDLAKNVFQVHGVDTEGTIICRRQLRRSQVLVFFTRLSPSLVGIEACAGAHHWARELAALGHEVRLMPPAYVKPYVKRGKTDAVDAEAICEAVTRPTMRFVPVKSAARQAALLDHKAGDFLVRQRTQIVNAIRAHLSEFGIVVAKGVHDVDRLFDAAHDVPDAARPALDVLAGQLRDTQTRIEDVTARIGEMQSEDALARRLATVPGVGTISSSAFAATTPDVAAFRSARDDAAWLGLTPQAHSSGGKERLGRISKAGNRYLRRLLYLGAMAQISARRGRREVPSGQAPDWLDRMLARKPVKVVAIALANRMARTIWALIARGDSYRATLA

SEQ ID NO: 154063 - protein, 404 aa, unidentified
MGKIYVGIDWADDHHDIYVTDDSAAALDSFSIAHSHEGMQKLISRVDKCCADRELVLVAIESHQGLLIYALLEAGYLVYPINPKAMDRYRDRYRMSSSKSDPKDAMVLANILRTDLHLYKPLPKEMAVDARLRQLTRSHKSLGQQKTKLLNQLTIQLKSYYPVALRLFSRLDHKITMAFLERFPTPEKASAASLEELRRFFCEQGYSHRWRITSIYESVQQPSLRVPIELETIHQTIVLSLIPVLRALAVEIEKLAGTIGEEFKHSQAHDVFSSLPTGELTAARINGELGSDGARYPSREYLQTAAGTAPVTRRSGKTVVVLFRWQCNKHLRAALQDLARDSVKRCPWAREYFMGQMRLGHKPSRAYRALANRWAGIIWKMLQTGQRFDQSRLDKHWAKMVATS

SEQ ID NO: 154064 - protein, 410 aa, unidentified
MEVIHARCAGLDVHKKTVVACVRVAEGTGVRQEVRTFGTTTGELETLGAWLRAEGCTHAVLESTGVYWKPVWAVLAGDALTLVLAHAAAVRNIPGRKSDVKDARWLADLLAHGLVRASFVPPAEQQALRELTRTRKQLVREITAHTQRIQKLLESANVKLGSVLTDVLGPSGRAIVEALVAGETDAERLADRLHARSQAKRPAVVAALHGARLQPHQRVLLRQHLTLIGSVEASVAAIEAAIATALESFRGAVERLVTIPGISTTAAAIVVAEIGADMSRFPTAGHLRSWVGLCPRLDESAGKHGSRRIRKGAPWLKPVLVQSAWAAIRVPNSYSRALYHRLARRTGKKPAAVAVAAALLTAIYYMLRTDQPYRDLGPNHLTAADRARKAHRLAAQLKHLGYEVSFHEAA

SEQ ID NO: 154065 - protein, 367 aa, unidentified
MQKVRFVGLDVHKESIAIAVADGDGSAPENVATVPNDVTTLLKRLKKLGTGSTLRCCYEAGPTGFALHRALRAAGIDCIVIAPSLVPQKAGDRVKTDRRDAVKLARFLRSGDLTEVHVPEAATEAMRDLERSRDDAKKAERTARHQLSKFLLRYGRRYAGKTAWTDMHLDWIRKQVFDHEAHNRVLVDYVHAVESATARVDRLTKDIVELVERWNLRPLVKALQALRGVQIISAVVLAAEIADFARFASAPALMAYIGLVPSEHSSGESQKRGRITGTGNKHVRRILVESAWSYRFRPAMSAAIRKRNDGVAPAVQAIAWKAQHRLNARYKKLLGRGKNKQQTVTALARELAGFVWSIARQPQLLAA

SEQ ID NO: 154066 - protein, 338 aa, unidentified
MAIVMGLDQHRAQITAEWIDTDTGEVSRSRISPAHRAGVRKFAERFRGQELEVALEATTGWRFVAEELRRVGAVVHLAEPAETAARRGNKKRAKSDRADARHVRELLMIGRLPESWIAPDHLLDLRSRVRLRHTLSHQRGEWQQHIQAVLYHHGCPQRRNLMTAEGLQWLKAQPLPAGAREQVTVALGMIDALDAQLAPLDKELRAYARRQLGCKALMKHFGVGELTAVTILAELGDVDRFSSSREAVRYAGLDITVHQSDQRRSPGHLSRQGPPALRWALFEAAQSAARQGSPDRDYFAQAAQRLGANRACLSVARKLLKRSYHTLRELGEEALQPA

SEQ ID NO: 154067 - protein, 391 aa, unidentified
MDEEGKEMGYPTFPNTLSGAKALEAHLLQLIKEKGFSTLKIATEATSFLDLHLVDFLASSPILAPYNPSIYQFNPKLVRNFKRAYSDKEKTDKIDAFVTTDRLRFGRLPEPYESHRPYLPLRRLTRYRFHLIKAISREKAYFITHLYLKFSAFSLEKPFASLFGATSLALITEFSPDELVNLPMEDLTQFIIKNGKNRFKDPEKVVEALQRAARESYRLRPALASSIDLILATILQTLRALGEALKEVDKAIEKEFQAFPNTLQSIRGIGPVYSAGIFSEIGDIARFPAEDAIAKMAGLTWKRYQSGNFEAEETHMSKTGNEYLRYYLIEAANALRVHNAEYKAYYETKFQEVTKHQHKRALALTARKLVRLVFALLKRGQLYRANYQQEA

SEQ ID NO: 154068 - protein, 330 aa, unidentified
MNKSEMVWVGIDVSARELVAAVRGPEAEHRFANTGSGHEALVRWLRRQGSRTRVCVEASGNYSLDLALALSRQSQLELQVVNPRLARRFAESLGKRSKTDPVDAHMLAEFAARMPFAVWCAPSTAALQLRSLVRTIAALTRIATQEKNRQHAAAASRVLAPMVARELQRHARYLEQRIAKLRQKAQRMVLRDPQLQRRWQHLLSVPGIGEVSALQILGELAVLPATLDARQWVAQCGLDPKHHESGSSVQATPRISKAGNRYLRAALYMPALVAVRYDAAAAAFYRRLQQRGKAKLAALTAIMRKLLHGIYGMFRRDQDYNGLELFPART

SEQ ID NO: 154069 - protein, 411 aa, unidentified
MKALYERCCGIDVHKRIVVACLKCGKKQEIREFGTTTEELRSLTEWLSDSKCQMIAMESTGSYWKPLYNIFELSSLAAIVVNARDMRNVPGRKTDIKDAEWIADLLQHGLLRASYIPNREQRELRELSRYRKSLIEERARELNRLQKMLEGGNIKLASVVSDINGRSARNLLTHMLKRDTSLTKEEVSFLVRGRLRHKVEAIMKALDGFLTPLQKQLMLKVVDHIDDMTKRIGEMDDLMNQYLTEYHEAIQKLDEIPGIGRQSAETILAETGLDMSRFPTAKHFSNWAGLAPGNNESAGKRRYGRTTKGNITLKTTLIQCAKAAVKKTDSFLSAQYQRLVVRRGANRATVAVAHTMLISIYHMLKNNVPFTDLGADYYNRFNTQSKIQHYLKKLKQLGWELNSATIPTAAI

SEQ ID NO: 154070 - protein, 417 aa, unidentified
MKSAPSTLPEEAPNGLTCGIDWARDDHAVAVVDARGREVHRCVVEHSAAGLRALLGLLAKRGVGEVAIERPDGPVVEALLEAGITVVVISPNQVKNLRGRYGSAGNKDDRFDAFVLADTLRTDRARLRPLVPDQPATIALRRACRARKDLVGHRVGVANQLREHLKRVFPGAVGLFAELDSPVSLAFLARFDCQDRAGWLSPRRMAAWLASVGYCGRVDPAVLHARLAAAPRGATGEHGTAEAHVTRALLAVLVTLNEQIKALSAQISEQLALHADQHVFTSLPRSGRVRAARLLAEIGDCRARFPTPESLACLAGVAPSTRQSGKIRAVGFRWSCDKQLRDAVTDFAGDSRRASPWAAQLYDDAITRGHDHPHAVRILARAWLYVIWHCWQNGVAYDPARHKALQRVLAKQNPAAA

SEQ ID NO: 154071 - protein, 352 aa, unidentified
MKRKHFIGLDVHCKFCELVVVSESGRVVHRQRCATTIPELVKAIEAVRSPRYVALEESALADWLWRNLAGHADEIMVCDPRRNYWISQAGDKDDPLDAEKLAQLLRGGYLKPVHHPESVERTIFKQHVTLYYDRVRQRVRTANRIGAVLRQYGVFVKEADFATAEQRQALLRRLPSSRLLHRNLQLLWHGYEVTAKQVDIMRRRLIKRARQEEVIRRFVAVPGVKWIRAATIFVYLDTPWRFRSKQALWKYMCLGLERRHSGNGPMRVQLIRQANRRLKYVLLGAARSAVAAGSNPFVDQERRWLRQGIPAPESRRNTARSLGAVLWGMWKNGNAYHPEWVGKVNAVRTVWG

SEQ ID NO: 154072 - protein, 308 aa, unidentified
MTTIYAGLDIAKLNLQWHLAGRGQELPNTAAGHRRLLKLLAAQPRAHVVCEASGGYEREVVAVLQAAGVPVSVVNPARVRDYARACGQRAKTDPIDAAILSAFGEAFKPKPTLPRSPLEEQLTELVRRRVQIVETLVAQRLQAQSLTLPFLRRQAKRLVQRLKQEIQEIETQLQRLRAQHLSLDQRAQKLQTIKGVGALTALGVLAELPELGTLNRGQAAALAGLAPHPRDSGKWRGRRTTGGGRAPVRRALYMAALVAARSNDHLKPFYQRLRLAGKPAKVALTAVMRKLVVYMNHLLKQPAHELSF

SEQ ID NO: 154073 - protein, 374 aa, unidentified
MKNFSTFIGMDVHKETIAVAIGEKHGVPRYYGEIANTTEAIMKLVKKVVSKGVRAAFCYEAGPCGYGIYRQITDMGYRCDVVAPSLIPKKVGDRVKTDRRDAVTLTRLHRAGELTAVWVPDQEQEAVRDLTRIREDMKSMERRARQRLGGFMLRNKKVYTGGKWTQAHFRWLEKVSFESPIQQIVFQEYIDAVKHLQGRIASLEEELRKALAGWSLGTMVEALMSLRGVNLITAMTIVAEIGDMSRFESPRQFMAYLGLVPSEHSSGSRQKRGGLTKTGNGHVRRVLVESSWSYRLPARKTAHLQRKAEKTTDAVQAIAWKAQKRLCTRYWHLTFKGKLKVQACAAVARELAGFIWAIAREIMGKNNTAVVVAA

SEQ ID NO: 154074 - protein, 327 aa, unidentified
MSSAMPALGIDIAKASFEVALVVGERMQRHTFENNPSGFGRLQAWLKQHKVVRVHACLEATGGYGDDLAQYLYEQGHTVSIVNPAVIHHYAITQLARNKTDRLDAQVIARYCLKEQPRPWEPPAPELLKLRQMVTFVETLQEERTRQLNRLSAEPDLSEIQQALQDQLALLDKQIAQFQQAIHDHIDSHLDLRQQHDLLRSIKGIGEVTAAKLISINLLAFDSTRAVGAYAGLSPRVGESGTSVHHQTRLCKLGDGSLRQALYMPAMAARRTNPLIKSFCDRLAKRGKCKMAVLGAAMRKLLCLAYGVLKSGKPFDPNYVANLQLAS

SEQ ID NO: 154075 - protein, 343 aa, unidentified
MIIGCDFHPSWQMIFWLDTETGETGERKLMHATGEARQFYSGLAGAVRVGLESTGNSHWFVDLLTELGHEVWIGDAAQIRASQVRKQKTDRRDAEHILHLLVKDNFPRIWTPSRQERDQRQLLIHRYKLVTLRVRVKNELQHLALNQGMQKGRSLWSKTGQKQLLDLPLQFWAGTRRKNLLELLKQMDQQMVVLDQAVKKAAEENEKARLLMTQPGVGPITSLAYVLTLGDVTRFRRGKQVASYLGLIPREYSSAGKQHLGGISKQGNRFMRMLLVEAAQIAVRFDPGFRNEYLHRCHHKPKGVAKVAAARKLAIRLFWMLRTNTPYPEVVRIESSSRVPLAG

SEQ ID NO: 154076 - protein, 337 aa, unidentified
MPALIIGLDIAKNVFQIHGVDRHGNALVQRKLRRGEMLKYFSNLEPSLVGIEACHGSHYWARELTALGHTVRLLPTQYVKPFLVGGKNDANDAAAICAAVTRKDIRCVSIKSAEQQSLQSVHRMRERLVQDRTAKSNQIRSMFAEEGFVFPIGLHQLRKGIVGLLGDPNSRITPVLRKLGAMYLEQLDALQQWIDELSNEIAELFKYSEVCQRLSTVPGIGPVIANALVSCVGDPSQFRNGRQFAAWLGLTPRQRSSGGKTSLGGITKRGDTYLRTLLVQGAHAVIHFVNRRDDRHSRWIKTLLQRRHASVATVALANKTARIAWAILTGKEAFKVA

SEQ ID NO: 154077 - protein, 415 aa, unidentified
MEVIVERAGALDVHNASVVACVRRPAEKGRREEQLAEFATTTQGLLALHDWLAAHGVTRVAMEATGVYWKPVYYLLEDDFELWLVNAQHVKNVPGRKTDVQDAQWLCQLLEHGLVRASFVPPKPFRELRDLTRYRKSLTWERSREANRLQKQLEDANIKLASVATRVLGASGRAMLDELCEGNNDPKALAELAKGKLRKKLPALRQALEGRFSSHHALLVSHLLAHIDYLDETIASLSAEIEERLRPFEHELELLCTIPGVGRITAEVMLAELGPDMSRFPSDRHAASWAAICPGHDESAGKRRSGKTRKGNRWLRTALIEAANSAAGRTRGTYLNAQYLRLKSRRGHAKAIVAVAHSILVSAYHVLERDQTYEELGGDYFISRVDTEHLTRRLVRQLERLGQTVTLTPSTAEAG

SEQ ID NO: 154078 - protein, 454 aa, unidentified
MLRANVVEEVDGDTEQVLTVAAAVDVAKASGMVCVRHPHPSIEGRRTSKVWEVDSTTNSILGLGHDLAALGVERVVLESTSDYWRPFFYLLESAGLVVWLVNARDVKQVTGRPKTDKLDAVWLAKLNERGMLRPSFVPPREIRALRDYTRLRTELVGERSRHKQRLEKLLEDALIKLSSVATDLLGVSSRAMIEALIAGERDPATIADLARGKLTTKRAALLEALNGRFDDHHADLARLLLDQIDACSDKVERLTARIEALVADLGDPEPPPERGAGPTSDVPVTNDGSGPPLSTVERLDEVPGIAERAAQILIAEIGLNMAQFPTPAHLVSWAKLSPQTIQSGPKTRVGHTGKGNRYLKGVLGEVATAAAKTDTFLGERYRRLVRRRGKQRALVAVARSILVIVWHLLNDPDARYIDLGSDYYTTRLDPDRKTRDLVRQLNALGHDVNLTPAA

SEQ ID NO: 154079 - protein, 421 aa, unidentified
MKTNSKCQTKTERAGKARKARGPVQRDAKEVMAELVAKLSQKLEPRAAKAEQVGGPAESVPGPNRERLTVGVDLGDKRSNFCILGLDGEKLTEGELQTSQEGFAEFFQSMAGARVVMEVGTHSAWARDVVASCGHEVLVANPRQMEGPKKRKRKNDRIDAHKLARVGRMDPQSLFPIHHRSVEVRQDLMAVRARDAVVAVRKDLINAARGLVKSVGGRLPKCSSPSFPHKAEEALPEAVREVLLPLVQMVERLSSCIKVYDERIEKLGSEKYPHTKLLRQVKGVGPITALAYVLTLENPERFAKSRDVGAYLGLVPKQEDSGDRQPQLRITKMGDMMVRRLLVGSAHYILGPFGPDTDLRRYGLRLSERGGKNAKKRAVVAVARKLVVLLHCLWVSGEVYEPLNHTPARGDCGGGHAPASS

SEQ ID NO: 154080 - protein, 386 aa, unidentified
MLGAALLGTVGPRPIYKAMGWTPPPKRHRCAKVEVSTSHDIEGGVIMKITTIGIDLAKDAFQVHGIDEHGKICVKRSLKRKEMMEFFTRTEPCLIGMESCSGAHYWARRLRDVGHTVKLMAPQFVKPYVKGNKHDAADAEAICEAVRRPTMRFVPIKTVDQQSILAVHRVRQGMIKARTAQANQIRGLLAEFGLIVPVGISHLFLKVPTMLDEAKDTIPGVFRELIHRLLEHMKELTRQVDQLEIQIHQWHRASEVSRNLEQIPGVGPITASALVASIGDARNFKNGRQLAAWLGLVPKQHSSGGKTRLQGISKRGDSYLRTLLVHGARAVVKSAERKPEQHVWLSKLMDRSHNNIATVAQANKNARVIWALMAHEQKFRSDYVRT

SEQ ID NO: 154081 - protein, 416 aa, unidentified
MEMDREVVCGADIHKQFLLATILSNSGQKIQDRFDMNFEGLTSFRKWLLDHGCQKLAVESTANYWQPIYLIVGKDVEFILANAYQIKHIPGRKTDVLDSEWIAELCLKDLIAPSRIFSEDERDLRAVTRTRENYVKMRSQIKNRIHQELESACIKLSSVLSDIFGKSGIHIIRGILKGLSIEDILDSIPSKKVKARKKEIQDAIRANISPVQVDLIGRLLDSVDFLNREISSIDKQIQALISKRQEDLKIAMSIPGMGITSASTILAEIGNFADFKTGEQLAAYCGLVPSVYQSAGKLITGHITKHGSPHVRRMLIEVAHAISRTKADSRLKRFYFRIKSRHGAKVAIVALARKVICILHHLIVNQEMFEDEIANKSKREKPGRSSSSPVLVIEDAIQILVRAGYLVQKRSEQEGG

SEQ ID NO: 154082 - protein, 337 aa, unidentified
MKVTLIGIDLAKTIFQVCGVNQAGKTVFNRQLRRNKLMAFLMQHPEATIAMEACSGSNYWGRELKQKGATVMLIPPQHVKPFVKGNKNDRNDAFAICEAACRPDIRCVQPRSLAQTDTMLIHRILERRVSERNSLMNQIRGLLNEYGVVVARGKEKLRNELPFILEDAENELTETARYYLHRQLLEWRELDSAITELDTAIAQQVKSSEQSSRLKKIKGVGNKISSAAEAFMGNGSGYRSGRHFAANLGLVPKEHSSGGKQRLGRITKRGNAYLRRLLIQGAWSVIRYADHSEDRLSRWAKQLIERRGKHKAAIAVANKLARIIWAMSYHQTEYRAN

SEQ ID NO: 154083 - protein, 339 aa, unidentified
MKDQDVSDVVRTKKRTAMRYIGIDVSKATFVVAYSSDKGGEIRTFNNTTAGIRQFIGTLPKDGSIHCVMEATGNYSALLLYMLNVAGITVSMENPLKVKNFAKAMLSTIKTDKSDARLITLYGEKMNPRPFKVQGEAILRLRQKRTVIRQLTKQITAMSNLRGSLACLPVPDKGATHTVDETIKFLEKKRDRLQSELTDLVEVEFSRQLALLTTIKGIGITLATALIITTGGFTYFQNAKQVSRYLGICPTYEQSGTSVNIKGHINRNGDAYTRGLLYIAAWPASRFNAQCKETYTRLRQNGKSGKLAMIAVANKLIRQAFAVVAHDKEYVDGFVSNRP

SEQ ID NO: 154084 - protein, 346 aa, unidentified
MDTAQHTATHPTRLWAGVDLAKRTFTGAIWGHQAFQDRRVRSFPRTEEGIAEFLDWLKAEAGPGTPLGVVMEATGAFGLEAGLWLTRLDPDLHVAIANPHRTCAYIASLGLRNKTDDLDARALAGYGQERRPGGWEPMRPERKELQEFVRTRALLVEQQTAIRLSLKDHTRSAGLATQAMERVLATLAEQIAALEEGISRLVKAHPDLNRCVGRMTSIKGIGLITAVTVLAEIGDPSRFLRSRQLAAFAGMSPRRKDSGTSVHGRTRMCKQGSALVRSTLYMAAQSAVRFNPDMARVYAEHIARGNHWRSGIGVVMRKLLVLMRAVVIADHDWVPQVRTAGMAEKA

SEQ ID NO: 154085 - protein, 334 aa, unidentified
MSTRLAYAGIDVSKRKFDLALRIDGRITTQRSFPNTAAGVAQLIDLLPAEPASWRIVLEATDRFHERLSDALAAQPGCEVMLVNPRRAHYYMAAVCHRAKTDRIDARGLALLAEEIKERFILYVTPSPLARELQLLGRHLYQLANQRAKCRNRLSSLDRQQPIHARAIASQQTMVAMLLQQANNLVDMMVELMRTDEIAGRCFDRLIQVDGLAETIASQLLSELVILPWDMTSRQWTAAAGLDPRARKSGQADPPRRISRMGNKYLRRALYIAALSLTRHHDQVRTYYLYLQEQGKPKKLALTIISRKLLHAIWVMLHRNQPFLAEKSFSVPAS

SEQ ID NO: 154086 - protein, 353 aa, unidentified
MEEKYVGIDIHRDYGVACVQDQNGKIVDEFRFGNDIEGINKVKEQLRNHNSHIAIESTGNMWVVFWDMLEDIKSDLHLVHPLKTKAIASNKLKNDKLDAKMLAKLLRGDMLVCSYVPPRNVRDDRETVRLRASLVRIRTQVINKIRSILHKYCIKYKGSLNTNSGIEFINTLDVRPVDRLAVKSYLETLKSLNAEIEAVNRQIANNDSEDVRLLMSIPGIDYYGAVLICSEIGDISRFSSHNKLASWAGLVPSMHQSGTSFYNGSITKEGSKRLRWILIQCAHTSIRTNSKINTFYSNIAKRRGENKAIVAVARKLVKITYAVLTSRNPSFYGDPEKTERKIKRMKKIAEKTA

SEQ ID NO: 154087 - protein, 342 aa, unidentified
MNFIGIDLHKKIMAICVVNEQRKVLARKRLRCDDAAGIVAFFKAWQGFQAALEATASYEWFFELLQPLAERIVLANPKKLRVIAESNRKTDKIDAQVLAEFLALDLIPQAFPPTPRQREHRRLVRHRASIRQRLTALANKIRRILSDYNLDRRDLFSAEGLEFLGKASVSAASRFILNDLVEEWHQQNGRLKQVDRALAEFAKQAPVGEVEARQVLKSIPMVGPVTIDVVISELGDVRRFRSQKKAVAYAGLAPGIRESAGKAKQLHISKDGSGLLRCALVEAAWRLVTKQRRWGSQYERLRARMGAKKAIVALARRLLCMMVSMLKRGEAYRLTASPPASA

SEQ ID NO: 154088 - protein, 372 aa, unidentified
MNYNTVYVGMDVHKESFTLCSCRYEDEKASHYQRTPASYKNVLRYLAFLRTIYGEDTRFVCGYEAGCLGYSLYHQLENFNVECVILAPTTMLEQRSKRRIKTDKRDAEIIARSLAQHNYSPVHIPTKMDNQTKEFIRMRDDHKAELKKIKQQILSFCLRQGYQYDGSGNWTAKHVKWLRSLKPAGLYKEILDEYLLTYTILTDKLNRLDQRIEELASKEEYKESVSKLTCFLGIKIHTALSVIVEVGDFQRFVSARKFAGYLGLVPGQHSSGDDRNGLGITKAGNTHVRRLLVESAQSYTRGKIGYKSRVLRSRQAGNSPQVINYADRANERLRRRYYKMVLKDGKKYNIAKTAVARELACFIWGMMTDDIY

SEQ ID NO: 154089 - protein, 415 aa, unidentified
MKKVYDKCCGIDVHKKIMVACFIHGKEQEIREFGATTRELLALADWLEQGGCEMVAMESTASYWKPLYNILETSNLPAMVVNARHMKAVPGRKTDVKDAEWIADLLQHGLLQASYIPDKAQRELRELVGYRKSLVADRTRELNRLQKMLEGANIKLSGTVAEINGMSARIILNELLDGKTIDKTRLEEMKKQKIIAHNLRASFDQIADDLNGVMSPLQNKMMRELLKHIDELNVHIKNLDEDIDNHMNDEEKKATSAITEIGGIAGASAKAIISVIGTDMSRFPTDAHISSWAGLCPGNNESAKKRYSGKTNKGNRLLRTTLIVCAHAAAKMKNTYFSAQFHRISAHRGKKRAYVAVAHSMLIAIYHILKDGVKYQDLGADYYNQFNKERKINAYLKKLKELGWTEQNAMIVQPA

SEQ ID NO: 154090 - protein, 339 aa, unidentified
MSKVLKNFVGIDISKTWFDAAIISPNNGSEVFHQQFTQTPEGYYKFKQWLCHHAVLINEETLLCMEYTGVYNTGLVQFLVKEKAHLWVEMPLRIKRASGLQRGSDDRSAAHKIAWYALRYADQAKLWKPCDTSIERLRHLITQRERIVNSLKHLTVPLEELKQCGCIADAKLVEQSQKPAIKGLKAAKEKIESLIAKIVQQEEQLCKKVKFAQSVNGIGIVTATALLVYTKGFTAFDNAKQMACYCGVVPFSKTSGSSVRYKPSVSPFANMKLKKLLHLCAMSAIQNDAELKLYYQRKILEGKNKMSVINAVRNKLVHRVFAVVRDERMFEDKYATNCA

SEQ ID NO: 154091 - protein, 447 aa, unidentified
MRGLASTCAERITGMSKPKKHSKKLSQEKTAAGQSKLGGKRKGMCLGDRPILEPNAAGIDIGAREIFVAVPPDRDEHPVRVFSTFTEDLEKMAQWLVDCGVTTVAMESTGVYWIPLYDVVEKHGVKPCLVDARGMKNVPGRRTDWHECQWIQFLHSVGLLRAAFRPEGDVCAVRSLMRHRSDLVQMTNQHIQHMHKALTQMNLQIHHVISDITGVTGLAVLDAIGAGERDPQKLAKLRDPRIQATEETILKSLVGNWRAEHLFTLKQSRQMYGHYQEQINACDTEIEKLLVAFQPRVDPQEKPLPPDRKKKQRARQKKATPKTGFDLRTESYKLFGVDLTQIPGLMAMVLTLFSEVGRDMSRWKTAGQFVSWLALCPDNDITGGRVAWRGMRKVHNRAGELFRMAAYSLHHEQSPLGHYLRRMKSKLDRRGPPPRPPTRSRLSSTPW

SEQ ID NO: 154092 - protein, 359 aa, unidentified
MTILPQTVAKTYSYIIGVDTHARKHVYSIITYTGEHVETRDFPATSSSIKRAIAWVGRRTGADASTLWIIEGTASYGAVVTGAVTDAGYTVAEAPSGYQKAGRGVGKTDPLDAQRMAAAALPIEVQKLRVPRLNDGARAALRVLVTARDMLAVERTKYVNALTALLRVTSLGIDARKPLSSTQFLEVAGWRSREETIELQVARAEAVRLARRVGELDTHIKENTTQMTELVKLSEGKELLELTGIGPVVAAVCVAAWSHQGRLRSEAAFASLAGVNPIPASSGNTVRHRLNRRGDRKLNKALHTAAMVRMTHDEETRAYVAKRTAEGKTLKEIRRCIKRFLARRIYKILESAEVLPLTA

SEQ ID NO: 154093 - protein, 370 aa, unidentified
MKEPITSFVGLDIHKDSVAIAIAHAGRDAPQFVGTTAANLAQVCKVLTRQKCVPKKTLVVYEAGPCGYGYARHLNAHGWRCEVISPAHLARSAAGKAIKTDRRDALLLARESRSGNLVPIVLPDQRDEAIRDLSRAREDAIAARLRARQQLKAMLLRHGRSCHGSSWTLAHERQLATIRFEHPAQQIAFDEYRQTVREAHERCERVTQALREQCTEWRMGPVVEALMCLRGFDFIAAVTVIAELGDLTRFAHPRALMAYLGLVPSEHSSGNTRQQGAITRMGNKHARRILVESAWTYRFPAHVGREQQIRQQGQTKLVRDIAWKAQLRLTHRYRKLNLGRKMKATKVCVAIARELAGFIWDLARHVPVHP

SEQ ID NO: 154094 - protein, 369 aa, unidentified
MGENTTFVGLDVHKETITVALADSGERGEVREHGRIANSPEALKGLLGKLERANRKLRFCYEAGPCGYGVQRQLTAAKHECVVIAPSLIPRKPGERIKTDRRDAISLARLHRAGELTPVWVPDPAHEAMRDLVRARLAAVRALRQARQQLSGFLLRHGRHYGRPAWTLMHRRWLSGLRFEQAVHHVVLEDLIAAVEAATERRDRLTRQIEAVLSEWSLAPVAQALQALRGVALVNAVTLVAELGDITRFASPRQMMAYLGLVPSEQSSGQSRRQGGITKAGNGAARRMLIEAAWSYRFPARVSRELLLRQEGLPQPIRETAWKAQLRLCRRYRRLAHAGKPATVVTTAIARELAGFVWAIVRQTAIQAS

SEQ ID NO: 154095 - protein, 316 aa, unidentified
MKNNAQVVVGIDVSKAVLDVAALPSGEVLQFTNDTAGIEELGKKLKSEAADLVVMEATGGYETAVATALVAMGLRVAVVNPRQIRDFAKATGRLAKSDRIDAQVIAAFGQAIEPEIVRLPDEDAREMEALLVRRRQLVAMRVQEINRLGLTQGAMRKNIKAHIDWLEKQIDRLDIDLTAGLRNSPAWRAKDDLLRSFKGVGPTTSSTLLVSLPELGQLDRRAIAALVGLAPFNRDSGLMRGRRSIYGGRSHVRTMLYMAATTAIRCNPVIRPFYEQLRSRGKPHKVAMVACMRKMLTILNAMVRQSTPWTPERNPV

SEQ ID NO: 154096 - protein, 423 aa, unidentified
MTKLTSTPAGAVLVAIDMSKNRQEVLIERPEGGRRRRMTVMATRQDYDGFAEQLAAIGRPIIVGFEATGNYHRTLAHRLLTAGFELRLISSVALARTREALHNGWDKNDPKDAQVILHMLRIGATQRYVDPLAAGINDLQELSKTHETISRMKTQTWHRILTHYLPMYFPEIARFAGNSRSDWFFALIERFPTPATITALDREAFSAAAWPLIGRKVSKARLINDIYETASASTALPVPEDSAAITMFRMVIAQGRSLIQQRDEIERLAHARLADVVDYQLLRNIPGIGPINALTILAEAGDLRRFNHHRQFLKFCGLDLATCQSGTFRGRTKLSKYGNARLRRTFWMAAQVAARQRDNSFRDKLGRYTAGHADDADRRRKAMTALTAKMARVAHAVVKTGTEYRPFLERSDARWKDPSLQVP

SEQ ID NO: 154097 - protein, 354 aa, unidentified
MIIIGVDFHPEFQQIALLDTDSGEFQEKRLMHREEAEKFYRALAAAGQKVQVGMEASGFARWFERLLAELQIELWIGDASEIQSKRARKQKTDRQDAQHILKLMLKDDFPRIWVPSWENRDLRQLLWHRHRLVQARTRIMNQLQAVALNEGLRCKKRLWRAGGRQQLESFPLAPWARRRRSDLLELLDRLSPTIAELSQAIEQEAEKRPEAQRLRTHPGVGALTALAFVLIVGEVERFQCGKQIASYLGLVPLEKSSGNRRRLGHITKQGSSMVRFLLVEAAQVTVRSVPEWRSQYFRLMMRRGRKTAKVAMARRLAIRLYWMWRQRLDYEELAKFGSHAGKPGNRDGVQPSIE

SEQ ID NO: 154098 - protein, 321 aa, unidentified
MRYIGIDVSKATFMVAYPQQNGGYKTREFKNTAKGVHEFILTLEADDHCVMEATGNYSYLLLYLLNNADITTSMENALKVKNFARTMLSVTKTDKADAQLLSLYGERMRPTPFKLPSDSILLLKQKRAAIRQFQKQLHATNNLKKSLEALPKKDPTTFKSIAKITETLEKQIRKMQEEMIVLTQAEFNQQMDKLTSIKGVGASLAAAIIITTGGFTYFDNAKQVSRYLGICPTYQQSGTSINVKGHINRNGDSALRSQLYVASWCVSQHNAECNKLYTRLKEKGKPGKLIMIAVANKVIRQCFAVIKNDTYYMDGFVSEKP

SEQ ID NO: 154099 - protein, 352 aa, unidentified
MSYDYHIGVDYHKAYSHIVVQDTAGKTLRSGRVRNDSRSLAGFLSPYSDNAHAVLEATRNWTVMFDWLDELCEEVVLAHPLKVKAIADAKIKTDKIDATILAHLLRTDLIPAAHAPSLRAREARSALRERMFYVRLRTMVKNRIVTVFDRYPEERAKLKPLSDLFGAGRKQLAEIAVSELDRIQIDRSLALIGDLNIQIKESEATIKAQSKGNANVRRLKTLPGVGEFFARLIDAEIDDIGRFRSAAKLAAYAGLVPSTYSSGGKTCHGRIIKQGNKWLRWAFVEAVAPAVAGDPDLKAYYERLKATKGANRAKVATARRLLTIAFQLLRDGRSYERRGARPESGSKLSRLS

SEQ ID NO: 154100 - protein, 404 aa, unidentified
MDLAPLYRCVAALDVHQAKLTVCILHEEADGELRVELREFGGFKRDRREMAGWVASFAPESVVMESTGIYWKSPYAALEQVGLRALVVNARHVSQVPGRKTDLADAQWLAILARSGLLRGGFVPPANFRRLRLISRQMQKLTGILAGEKNRAHKVLTDGGIRLGVVVSDLHGKSGRAMVKALVAGEAARALLGYADPRLKASEEELLDALDGDLSEDHRLVLGQLLDHIDYLERQIAALRQALVAGLALQQGLLQALQTIPGLDETGAAMLVVEIGEDMQAFGSPEKLASWAGVCPGNHESAGKRKTGKQRKGNPYVRRILCEAAHAASRTRCALAEKFKGLLVRRGRKRAIFALAHKLWKTVFVLIDRGDYYRDAGVDYQAMSVERNAPRWIKMLRKYGYIPA

SEQ ID NO: 154101 - protein, 342 aa, unidentified
MKELKQVVGIDVAQKELVVTIGRLLEDLSVDLFSYKVFKNNDKGFLSLVEWVTKLVENPQEVHYIMEATGVYHQKIAYFLDTNQLKVSIVLPNKISNYFRTLEVKTITDKTCSQVIARFGLERKLDLWKRPKTVYKNLQQLTRERDQIVAERVIVKNQLHAEKAEAEPNSMTLKRISERIKLLNKQENEIKNDISKILKNNAELKEEIDRMMTIPGIGELTAVIILAETNGFELIRNKKQLTSYAGLDVKEKQSGTSIKGKPKISKKGNRSIRKAMHFPSLVAVKWDENFKELYARLVSKHGIKMKALVSIQRKLLEMSYVLYKNQTIYDKEYKNSVQTQMA

SEQ ID NO: 154102 - protein, 355 aa, unidentified
MESTKYIGMDVHKDAISIAVLNSSGKLVMESIIETKANTILEFVHGLRGSLYLTFEEGTWAAWLYDLLKPHVTKLVVCDPRRNDYLKQGSKSDRIDARKLAELLRSNLLRPVYHGEHGVRPLKELARSYLTITKDQARVMTRVKAVYRSWAIPCAGKQVYGQRHRLEWLGKIQEAGVRRRAEFYYVQLDALRSLRLVVRRELLLESRKHGASKLLSQIPSIGPIRAALLIALLQTPDRFRTKRQLWAYSGLAIETHDSAENQYVNGQLQRSRKQASIRGLNQNHNHDLKNLFKSASAVAAAKAGPFQKFYDAQIGKGLKPEMARLTLARKIAAITLIVWKKGVSFDARYLNPQTA

SEQ ID NO: 154103 - protein, 434 aa, unidentified
MRDEYVLSFDFSLDALDVGLADPQGSWIIPHSAYDNNLPGFQALKKDGLAHLQGLDGVRLTAAGESTALFWWHAFYQISTDPDFAPYDPTLALLNPCHVKNFRRALPEEEKSDPKDTRLNGLYYRTIGVEHHYTFDPRYLPLRQLSRAYSRLTHTLAAEKSFALTLIYLSASEYRRVEPFSDLLGVTSTYVLTEYPDISAIADVPSSQLAEAIDIIAQGHLKDADESASRLHQVAHNSYPLPEFLIPTVSTALRLTLEHVHFLEQQRKSYKRLIENELALLPEANLALAERGLGPILTAGVLGEIQDTRRFTTGRKFDHGKKQWRERNYRDGQAAVAKMAGLWWPRNASGRFEGDDRHLARERNPYLRYWFVQAAYSLKRHRDDYAAYYDRKHGEANKHPHKHALILTARKAVRLVFALLHEGQMARLEEQSMT

SEQ ID NO: 154104 - protein, 347 aa, unidentified
MKFYTKPHKFYCGIDLHARSMYVCILDSKGLVKCHKNLKTSPDALMKAIKPYLDGLVIAVECMFSWYWVANFCEDNNITFILGHALYMKAIHGGKAKNDKIDSHKIASLVRGGTFPMAFVYPRDMRSTRDLLRRRMHLMRKRAELLCHIHNTNTQYNYDRLVKNLRYKNNRKLVDGRFADPSAQKNVDLDIQLINFYDEQLTGVEWYIKKHAKINDYQSYMLLNSVPGIGKIISLVILYEIYDIKRFPRVQDFASYARLVKCKAESAGKSYGTSGAKIGNAHLKWAFSEAAVIFLRGNSTAKSYVNRLARKHNKGKALSILAHKLGRAVYFILKRKQPFNMDQFLPA

SEQ ID NO: 154105 - protein, 385 aa, unidentified
MLYVGVDIAKNKHDLACISDTGQILIKHFKFTNSHHRFSELKVRLNQLSPITTNILIALESTGHYNYNLVAFLRNLGYTIFSYNPLLIKEFAKAQSLRKTKTDVKDALLIARKLRSDDATQHHQIDEKMDELKELTRFQNRLIQARSKNKNLYVRLLDIVFPELHSVVGNLHNNYVYELLSKYPKTAKIKRAHFSSLLKINYLTVDKAKKIQETASLTIGRHSPAFTLELVQLIETIRHYDKQIAQVQEQINDMMVELDSPITSIAGIGNRLGAIILAEIKNIHNFKNPAQLQAFAGLEPAIFQSGKMDNTEGMVKRGSSYLRYALIQAAKLTCIYSPHFKGYLKLKISQGKHYNVAISHAAKKLIRIILYLLKTNQTFDEAKLR

SEQ ID NO: 154106 - protein, 337 aa, unidentified
MKITTVGLDIAKNVFQVHAIDEHERVVIRKKLRRSEVLPFFSKIDRCVVGIEACGTAHYWARAIELLGHDVKLLPASYVKPYVKRSKNDAADAEAICEAVTRPTMRFVPIKTTDQQSVLMLHRTRDLLVRQRTMIVNALRGHLAEYGLVVGKGIENLQRLINLVETENSGLPRIARQALSTLVAQVSELQRRVRALEQEILTWHRDSAASQRLATIPGIGPITATAMVASLGDAAQFRSGRRLAAWLGLVPRQNSSGGKERLGRISKQGDMYIRRLLVLGATSVIRVARGRTTPLSNWINQLLARRPPRLVSVALANKLARVAWVVLSRGQAYAIAA

SEQ ID NO: 154107 - protein, 344 aa, unidentified
MLHAGLDLSRRRLDVCLIDDAGEVVDHTAAPPDADGLRHLAGRLRGQSVRAVIESMTGARFVHDTLEELGWEVLVADAQKVKGLAPLACKTDKIDARVLAELSWRDLVPAIWLPDPSIRRERELARYRLHLVRHRTTLKNRIHATLMTFGHPCPVSDLFGHAGRELLDRLAIPDPWRRNVDVSLELIDDLELQIAQLTVELRRQGADHRYIPLLVTAPGFGWINAFTVASEIGDIERFASPTKLCGYTGLCPRVYQSGASDRRGPISKQGSRYLRWALFEAALHACNHPVYAERYQRTKKRLGRQRGPKVAQIDLSRKLTEAIWHMLTRNQPFAPAGARFRLAA

SEQ ID NO: 154108 - protein, 416 aa, unidentified
MEVVHSRCAGLDVSKRDAKVCVRLVGGGRAGTTSTVTTWGSVTKQVLALREHLMAEQVTLVVMEATGDYWKPFYYLLEDGPFEVMLVNARHVKNLPGRKTDVSDAAWLAQLGAHGLVRGSFVPPEPIRQLRDLTRTRTTMTRARAKEIQRLEKLLEDAGIKLSSVATDISGVSGRAMLEALIDGERDPAVLADLAKRRLRSKIPALTEALTGRFAEHHAFLARLHLDVIDQHSRAVDELTHRIEVMIEPFRGARELMITVPGISTGVADVIIAETGADMSRFPTAGHLASWAGTCPGSNESAGRIKSTKTRPGNPYLKGALGIAAMSAAHSKNTYLAAKYRRVASRRGPVKAIVAVERVMLVAIWNMMTNGVFYEDLGGDYYTQRNPDKAKKRALDQLTAMGYTVTLSPLQTAAAG

SEQ ID NO: 154109 - protein, 371 aa, unidentified
MKKKILYVGLDVHKKSIDVALANGRANGKVRSYGKIDGSLDALDKLIGKLQSKDCVLEFVYEAGPCGYPIYRHLESKGHKCCVVAPSMIPKRSGDRIKTDRRDAINLVRLYRAGELSCIYVPSQEDEAMRDLVRSRDDFKRFERKARQRLLAFLLRHGLEFAGKKNWTKTHMNWLAGLKLSHRSQQIVLQEYVDAVKDCTQRVERTTEQIRQLVPDWSRADLVKAYQALRGVSLIVAVTVVAEIGDMGRFKNPKELMAYLGLVPSEHSSGSRLRRGSITKTGNSHVRRVLTEAAWTYRMRARKTTTILKRQQGLPKSICEISWKAQTRLCTRYQRLFAKGKSKQTIITAIARELSAFIWAIDKELQQKTTT

SEQ ID NO: 154110 - protein, 384 aa, unidentified
MEEQIFKYSVGCDISMDTFNVCILEVSQERSRVKASHKFKNETKGFKEFDAWVKKHKKPDVQTGFYMEATGVYYENLAWYLFEQEYSVYVLLPYKTKHYLKSIGIKSKNDKIDAQGLAQMGAEQKHNPWRPHSKSIYILRALTRQHESVTKLKTSLQNQLHSNEHSAVRNATVKKQLNATLRLLEKQLTELSGEISNIIDADEKLNEKYGHIDQLRGISKLSWATIIAETSGFETFENQRQLVSYAGYDVVENQSGNHVGKTKISKKGNSRIRRILYMPALVSVRIKEPVLYNLYQRVTERTGIKMKGYVAVQKKLLVLIYHIWKNDKAFRSDYSKIFGEEESKDLFPFGFGETIKESSPDKRATQDEHSYELSSKVLFPLAQI

SEQ ID NO: 154111 - protein, 316 aa, unidentified
MTITSAGFVGIDVAKEKLDLAVLGEFRVSQISNDSVGIANLVSQMLERKPELIVVEATGGYQRAVVQGLFEAGLPVAVVNPLRVRQYARACGKMAKTDRIDALVLAEFGKQVQPRRFEAQSEAGRYLEALLVRRKQVEGMLKAEKNRLRTVHQALRTSIEAMIDHLKAEMRQLEAEVRKFMDEQECWKEKREILVSAPGIGVVTTATLLAELPELGKMDRKKIAALVGVAPMNFDSGKKHGYRKTKGGRADVRSVLYMATLVATRYNPLIKAQYEHLVVRGKLKKVALTACMRKFLTILNAMMRDLKPFRAAPVSK

SEQ ID NO: 154112 - protein, 474 aa, unidentified
MGGKSKGQIFSNSNKRKQPDGLPIIGRNRAGGDLGSEQHWVCAPTADGNSREIECFGATTAELHRMAEWLKARKVVSVAIESTGVYWIAPHEVLEAHGLEVLLVDTRQLAKVPGRDNKSDPADCEWIQRLHSCGLLRGCFRPAEAICMLRTLVRDKANLVAESGDWVRRMQKSLDQMNVRVHRAVKDVTGVTGMAILRAIAEGERDTRKLARLRDPHCHKSEAEIAEQLEGHWREDHVFSLQQGLKMYDAIGERIRAYEKEILRKLEELERGDRHGETAPPLKNKSKAGNIRKRGEERLRQAMYRMSGVDITQIDAAGAETVEVVLSEYGADLSRFASEKEFVAHALLAPRVATSGGKPVKKKRKHQSASSRVAAAMRMAALSMRNSQTALGAYYRKIAQRKGGDVAVFATARKILTLIYRLLRWGQPYVDEGAEAYEKRYQQQSIKRLSIKAKQLGYQLAPTADRIAGPGVTG

SEQ ID NO: 154113 - protein, 346 aa, unidentified
MRQITRIGLDIAKHWFQIHAVDSDDCEVLNRKLPRDKVLGFLGALPPCEVALEACSSSHFWGREISRLGHRVRLISPNYVKPFVKRGKSDAHDSRAICEAASRPDMRFVQIKTEDQQAALMQHTSRQLLIDQRTAVANSIRGQLAEFGVIENKGIENVAELVRMLDDEDESLAHIPATALLVVKVLANQLHAVDEHLAMIDQQIEAWQKANASAQALKTIPGIGVLISAALAAHVPNPSAFRSGRDFAAWLGLVPRQNSSGGKERLGRITKQGNPYLRRLLVLGATSSLRWLGKRTDSVAEWTRKLLQRRPARLATVAIADKLARIAWAIMTTGELFRSERAAPAA

SEQ ID NO: 154114 - protein, 344 aa, unidentified
MKRIVKQVCGIDVAQDELVVCFATLDEDYSLNLTASKTFVNKKPGFSQLLSWAQKLADRNVSLLFAMEATGVYHEQLAYFLDNRHQKVSIILPNKISNFMRTLEIKTVTDSTAAQAIARFALERSGLDLWKRPKAIYRQMRNLTRERDQIIHERTMVKNQLHAERTQAFAESGTVKRLEARIALLDKQVNQILAELKALVKSDPEIESAVELLTSIDGIGELTAIIILAETDGFALIKNRRQLASYAGFDVKEKLSGTSVKGKPRISKRGNKYLRKAMYFPAMRSAKAEGSHKATYARIVARTGVRKKAGVAVQRKLLELTYTIFKTQKPYDPEYYKRQQVQLV

SEQ ID NO: 154115 - protein, 403 aa, unidentified
MSYKTLFIGIDVSKLKHDIAIMNEDKKLVRKTFVVKDDYDGYQYLLRIVRQFQENYGTKKFHIGLEATGDYWKNIYYFLKRQSEAFVLTVLNPIRTKAFAKTELRRANTDSVAAKDIARFMVEKQPRPSIDRAPIFDCIKDLDGQVYAVKKQQTMITNKLRIELTKVGPEIEKAVSFIKGQQILALLASFPTAEAIVNASLEELAAVHYGKNHWQLPIKFIQKMKLLAANSIAYKTGAGAGYVVQSLVRRVIETQQETERLKQQALEQYKLVNEHQSLLTSIPGISQQMAIVLEAYIGDVNRFPNAKKIVAYFGMNPTVDNSGTSKKRKGHLQKKGSAMVRHKLFMAILSVVRFKNGPIYGYYARLVKAGKPKLVAMAAAMRKLLVIIYNMLKNQQEFDPNKM

SEQ ID NO: 154116 - protein, 322 aa, unidentified
MSVWVLGIDIAKQKFDAALLVDGKTKHKVCKNSAEGFEILRLWLEKQKTQKVHACMEATGNYGEDLAIYLHEAGHRVSIVNPARIKGFAQSELIRTKTDKMDAALIARFCLAMKPGAWIPPSPEIRSLRALVRRVDSLIDMRSQEKNRVSTAHESVILLIKEHIAYLDQEIERIRQQIAGLIEQDPNLKGRKELLDSIPALGKATIPRILAELDDLGKFNHVRELVAFIGLAPKETLSGSSIKGKPRLCKIGHARLRKALYMPALVSIQCNPVMIAFYNRLKDKGKNGKVIVCAIMRKLVHVIFGVLKSGKKYDPNFQPISA

SEQ ID NO: 154117 - protein, 429 aa, unidentified
MQNESTPGARGPVFCGVDTHADSHWLCVLDWRGRKVLSRQFPADAAGYEALAGAIAAAGEPACVAMEGTSSYGAGLTRHLASLGMPVREALSPARMQRRRPGQGKCDESDAERAARAAMSGSKLGTPKSQDGWVDGVRCMLAARSGAVKARTSAINTARSLLTTAPEGLRSRFRGMAGPRLMEELPSVRAEGALGAALGALADLWAAARDAALDMERAIEASLEENCPALLAMYGCGPVSAAKLAVAAGDNPGRMRSEASFAAICGACPIPASSGKTVRHRLNRGGDRQANSALHEIARQRVMRDPETAEYAERARARGKSDREVMRCLKRYVAREAYRALMRPHEVRRPEDASGLVAARRAARVSQVRAASILGTSEKYISMLERGQRELKPIRRAYEAWVEAGLPLDWDRQAFEAERKMDSKKHLAK

SEQ ID NO: 154118 - protein, 484 aa, unidentified
MAAKKKDARTGPDRTTADAAAEHGGEGAEVAEDRVQVVEYAAAIDVAKGSGMVCTRVPGSRPDRRRQTVWRVEATYAQVTALMDHLRCEGIQRLVLESTSDYWRIWFYLAEAAGLEVWLVNAREVKHLPGRGKSDRLDCVWHCKLNERGMLRRSFVPPEPVRDLRALTRTRARLAQDQARHQNRVEKILEDAQLKISVVISDLFGASGRRFLDALVAGERSPKALAALGDPRLKATRQQLEDALTGRFRDIHAFEISTHLRIIDAINEEITRLDGKIEEQLALVPRTAPACVACGLAGGGHAPGCADEQVPLLGLAARLDEITGIGECNARAIIAELGTDPSQFPTPGHAAAWARLTPRTRQSGETARPGRTGKGNRYIRGALGQAAMTAAKTDTRLGAMYRRIARKRGKQKAIVAVSRIICEIAWILICDPAARYHELGPDYYTPRSPARQTRDKIREIERLNPGKKVILAPIDPGPEAGAAA

SEQ ID NO: 154119 - protein, 398 aa, unidentified
MTRKNTLKSLPTDTEFRVVGLDLAKSDVSVAAIPVDNNTPSLVDQMTYADLLDWAGKISPTLFAMEPCNGYSLLCLQLENLGHEIKVISGWTVSMWINTHLSGQKTDLNDAIALARLAVSDAELTPIRHKSITEIRIQTVQAVRQQLMSQRSKSIVSFKALAQQWGIPCAAGHRNLKKLRESIEAKVDLITRPVANAMLFLLDAVKSLDRQIGQLNQTLQELVMSDERGRLLQSVLGVGTQISARVITVVGNIERFNSPRSLVAYVGVAPRNFITGHKNLTKKKHGNCPDLSHKGQGKISRRGDKLLRSLFIQGAACLYMQFCKDQLPECQLKRWILKQLASQKPYGKLMVSLAAKLIRIVWAVLTYREKFNIQKAGMTRSMWSEMALETPLNKEVPA

SEQ ID NO: 154120 - protein, 332 aa, unidentified
MACICVIDDQGELIAETKLASDVQDIVAYLDALELHIESVGFEAGTLTQYLSYGLQSAGFDVVCMEARQVKGALSAMRNKTDKHDARGIAQILRSGWYSRVHVKSMESHHIRMMLSSRRAVLSKCVDLENEVRGLFKIFGLKLPAKLGHGPFDGTVRDIIEADEALSLALLPLLEARLALYRSFRELDNRTRKMAHADPVCQRLMTVPGVGFITALTFKAGVDDPSRFKHSRTVGAHFGLTPRRSQSGEMDNSGHISRAGDADVRSALYTAANAMLTRSGRWSSLKAWGMKIAKTRGHRRAVIAVARKLAVILHRVWIDDTQFRWGTEGARS

SEQ ID NO: 154121 - protein, 350 aa, unidentified
MIIIGVDFHPEYQEIASVDTDTGEYQEKRLAHPKEAEEFYRSLSCVGQVVRVGMEASGHGRWFERLLEGLGVELWRGDAEVIRAKRGRKQKTDREDARHILKLLLKDDFPRIWVPNWENRDLRQLLWHRHRMVQARTRVMNQLQAVALNEGLRCKKRLFRADGRQQLESFQLAPWASRRRRELLELLDRLNPTIAELSQAVEREAEKCPEAQRLKTHPGVGALTALAFVLIIGETERFQCGKQIAAYLGLVPLEKSSGNRRRLGHITKQGSSIVRFLLVEAAQVTVRSLPEWRSKYVHLMMRRGRKIAKVAMARKLAVRLYWMWRKGWDYEQWKKFGSYVGQPVHRYGVQ

SEQ ID NO: 154122 - protein, 400 aa, unidentified
MSHRYTLFCGIDIGKRKHVGCLLDAQGKPLIKTLAFNNDAEGFARLRQRLQEVAANTPILVGMEATGHYWYALHDQLHRWGYAQQVLNPLQSAQQIKNAIRKCKSDSSDALHIATLVKNGEGKPALVPDDLAMTCRQLTRLWYALGKQRTRIKQLIHAKLECVWPEFETYLSNPFGTTGRTLLRAAPTPEDLLAMNHETLVELLLKASRQRLGPGTAEHIRTSAQTSVGMRRGLEGIRVGIHTLLDQLEATMPVREKLETQIKELSARLPGYLLTLPGSNPIRAVSLFGETDPISTFKSPEQLVAFAGLDVTVYQTGQFEASRRHISKRGSPYLRHTLWTMASVAVKKKGMLRRHYLKRRKRGLHHLAAVTAASLKLTRIVWRICTDQRDSQPKAPAKHS

SEQ ID NO: 154123 - protein, 315 aa, unidentified
MTTSSGKFVGIDVAKDKLDIAVLGEKKASQVGNDERGITKLIKELQMLKPALIVVEATGGYQRAAVLGLYEAGLPVALVNPSRVRQYARASGLLAKTDKLDAFNLAEFGKQMKPRRFEAKSEASRDVSALLVRRRQLEEMLKAEKSRLRTIPPKMRGSVERMIEILKEEIKRLEKDLDQFMKENEDWQTQEQILTSAKGVGRITATTLLAELPELGKLDRKKIAALVGLAPMNADSGKKRGYRKTKGGRIEVRNVLYMSTLVATRYNPLIQVQYQEMLRRGKVKKVALTACMRKFLTILNAMMRDQTPFRQAVNV

SEQ ID NO: 154124 - protein, 317 aa, unidentified
MTYTSRFVGIDISKSSFDVCVLPEERFANFANDAAGIARFVTFLTQWEGVERLVLEPTGGYERGVVEGLLAVGLPVAKVNAKQIRQFARACGRLSKTDRIDAFVLADYARRMDTKVLEPSSPAHAMLIDLVSRYRQLSHMIVQEKNRREKLVNQDNARTRAWIEQTLAFLQQQRQAVVDAMAACLTSDEHLALKAEVLMSLKGIGLRTACFLLAGLPELGQMNKGQIAKLVGVAPINRDSGQMRGKRMISGGRKPIRDALYIAALPAIRFDPNMKAVFQRLKAKGKPGKVALVAVMRKMIVILNARMRDHRATALDC

SEQ ID NO: 154125 - protein, 424 aa, unidentified
MLEEAHDNEELIGRVAAVDIGKAQLVCCVRVPSPDPKQPGKRLQEVRTYQTMTRSLLGLADRLGALGVTRVVMEATSDYWKAPFYLLEAAGFEVWLVNAKDVKHLPGRPKTDRLDAVWLCKVAERQMLRPSFVPPPAIRRLRDLTRYRADLVVGRTGEKQRVEKLLEDAQIKLSVVASDIFGVSGRAMLAALVASERDPKVLAQLARTRLRAKRGLLEEAFCGRFGDHHAFLLATMLGRIDQASADIAALEGHIEAEIAPFAAAVDQLDEICGVGRTAAQVIIAEIGVDMSRFPTPGHLASWARFAPGVKESAGRRKGNATTGHGNPYLARVLGEAAVAAGRTNTFLGERYRRIARRRGAKRAMVAVGRSILVIVWHLLSDPNLRYQDLGAGFYDTRINAERRKRNHVRQLEALGYKVTLEPAA

SEQ ID NO: 154126 - protein, 345 aa, unidentified
MKIIGCDFHPSFQQIAICDLETGELQERKLSHADGQAERFYQELGESALIGIEATGNCQWFLDLVQRLGHEVRVGDAAKIRASYVRKQKTDKRDAGHILKLLLEKRFPQLWTPSAAMRDQRQLLRHRDKLVEIRTKVKNSLQHLAMNRGMQKKSRLWTRLGMEQFQQLAMPGWAGTRREDLLQLLKELNGQIEPLDQAVKQAAEQHPQAQLLMTQPGVGPVTALAFVLTVGDVTRFAGSKQLTSYLGLVPSEHSSGSKRWLGAITKQGNRFLRKLLVEAAQTTVRKDEGFRKEYQHRCRRRPKGVAKVAAARKLAVRLYWMLRSNVGYPEIVHIESNPRVPLGEV

SEQ ID NO: 154127 - protein, 346 aa, unidentified
MDTLTHYVGLDYHQNSLQVCIMDQQANIQCNRRIDNDLVSLLPLLHRAGGVSKIAIEACEGAAQLGEALAQAGSASGASGASGGGGWTVELAHPLYVNKLKGSTDKTDAGDAKLLADLSRVGYLPKVWLPCKSIRALRQLVNHRQRLVNDRKAIKLRVGAILRQQGVKIQGTRWSKAWLNALANESCLDESSHWLIDELLAELTFISQRIDTVCKRLKQQTAEDAVVKKLLQIEGIGPVTAWALRASIGRFDRFKKAKQLCRYCGLSPRNTASGERQTTGSLVGGVDRSLRALLIEAAHRLVRTVPRWRGLCEQLMRRGKRKNVAVAAVANRWLRTVHHRMMVVCD

SEQ ID NO: 154128 - protein, 355 aa, unidentified
MNQEKYIGMDVHDATISAAVKNAQGKLLMECVLETKAATILEFIQGLRGTLALTFEEGTLAAWLHDLLKPHVSRLVVCDPRKNALLRDGNQNDRVDARNLAELLRTNQVKAVYHGKHEIRALRELGRSYLTLTQDSTRVMNRIKSVYRSWAIPCAGTSVYSRRHRAEWLAKLVEPGVRIRAQHLYQELDSLEPLRQAARRELLRESGKHAAVKLLRQIPAIGPIRSALLVALLQTPHRFRTKRQLWAYSGLAVQTYDSGEFRFVRGKLQRNRERITVRGLNHNHNHDLKNLLKGAAISAIQRPGPLQDFYAALVEKGMRPSMARLTLARKIAAITLTMWKKGVSFDPRQLPRPAA

SEQ ID NO: 154129 - protein, 340 aa, unidentified
MLHVGLDIHTKHISICVLNETGQCIHRSRVRSIDQMVTVLEGLQDRFEVCYEASCGYGHYHDLLSPLATRVLVAHPGQLRLIYRSKNKNDRNDAERLAKLLYLGEVPTVHVPSLNVRTWRELITCRSQVIAKRTRAKNSVRALLRGAGTSPPAHPALWTKAGMAWLRKLELPTASQQLRRDLLVEEIDSLTRQVRRIEQQLNRLAQQSPAVVRLRSIPGVGVRTAEAVAAFVDNPDRFRHAKAVGRYFGLVPRQDQSGDKNRLGHITREGAPVVRRLLAEAAWQALRRSPTVRAYFQRAQRDDPQRKKIALVATAHYLVRVMWSMLKRGTFWQENRAMAS

SEQ ID NO: 154130 - protein, 467 aa, unidentified
MSAPRHRPGRKAKARSPFVVLDRHAAGIDVGAAEHWVAVPPDADPNPVRSFGTFTADLQALVAWLLACGVTSVALESTGVYWIPLFELLESRGLQVRLVDARQTRALPGRPKDDVRDCQWIQRLHSCGLLRAAFRPDDHVVILRSYLRQRQMLIGCASDHIRHMQKALEQLNVKLPEVVADITGVTGMSIIQAILAGERDPVQLAKLRNKHCKQDEATIAKALQGNWRAEHLFCLRQALELYGFYQRQLAACDRQLDTQLQTFADRSAQTPVPPRPEGKHKKRRKHKGNVPAFDARTRLYRMSGVDLTQIEGIEEGTALVLLSEIGLDMNRWPTEKHFCSWLGLCPQHRISGGRVLSRKVRPGVNRAAQAFRLAARGLERSQSALGAFFRRLKSRLGAPKAITAAAHKLARLVYRLLKHGQAYVAQGLAEYEQQYQERQLRNLSRKARELGYALVKPEQAAPAPVPG

SEQ ID NO: 154131 - protein, 336 aa, unidentified
MSKSYLGIDVHKKWCVYTEIDSTGKVVRQGRFGNTFEEVSTFASSLNSRVHLVLEPVLNYLWLLDQFEPYVGSVHVATPFKVRVIAESKCKTDKYDSRILAELLRTNFLPESWVPPAEIRLLRGLIRQRYHLIKSMVTNKNRIRHLLFQHGIDLRVFNISSPKARLEIRKLCLPDVARQTIDQCLKIIALLDDQVVEIGKGIWERVKDNPTVELLQTIPGIGKLRSAVVYAEVGDVARFHSAKALASYTGLTPIVRSSGDSVWTGGITHLGSRPLRHVLVEASINAVRKSPELNRMFCRILYRSNVQKARVAIARKLAVIIYVMLNRNEPFRSEAA

SEQ ID NO: 154132 - protein, 453 aa, unidentified
MSRKKTKLQSVTQAPEIRRDAAGIDISPEVIYVAVDPRKDTQPIRHYGTVTAELYRIANWLKACGVRTVAMESTGVYWIPLYQVLDERGFEVYLVNARHYKNVPGRKTDVCDSAWLQYLHAVGLLQGSFRPAQEICAFRTILRHRASLVEAGSKHVQHMQKALDQMNVQIHRVLSDVTGVSGLAIVDAILAGERDTRRLAALRDGRVKASEESIMAALEGDYRLEHLFTLGQSLESYRHYQRLIADCDRQIREQLEALEGQGGDAEPPATRKQMRTSSDEDLRKEFFRIVGVDLTAIPSINVSTVGVLLGEVGPDLKRFRSGGAFANWLGLCPNNSITGGKIQSSKTKKCANRLAGALRMAAESLCRDKSYLGQFYRRMKIQLNGGPQAITAAAHKLARIIYAMVTKRAEYDEAHFAEIEKRSRERARLRLTKQAHKLGFILTPMRTAAETVS

SEQ ID NO: 154133 - protein, 351 aa, unidentified
MYIVGVDYHPSFQQIAFLNQETGECGDRRLNHSDGEAERFYRELRQKGISVRVGLEATGYSRWFERLLGELEIEVWIGSAAEIKAKRVRKQKTDRQDAQLLLKLLEENRFPRIWVPNPENRDLRQLLWHRHRLVQMRTRIMNQLQALAMNEGKRYKHRLWSAEGRALLEKFPLAPWASRRRHDLLELLDRLNPTIDELTAAVEQEARRWPEAVRLMTHPGVGPLTALAFVLIIGTPGRFRRGKQLGSYIGLTPSEDSSGGRQRLGHISKQGNALLRFLLVEAAQAATRCNQDWRQRYWHLAMRREKSIAKVALGRQMAVRLYWMWRKGWDYAQLVEFGSHTGQLAIGHGVH

SEQ ID NO: 154134 - protein, 338 aa, unidentified
MNEITTIGLDLAKNVFHVVGCNIHGKVVRKRMLKRSQVLSYFSNLTACLVGMEACASAHYWARNLNAMGHQVKLIPPQYVKPYVRGNKNDYNDALAISEAVVRPEMRFVPMKTTEQQDTQAIHRLRERRIADRTALCNQLRGLLAEYGLVLAQGVNVVRKRLPELLEDAENGLSDRFRRLLAQSYRELRELDGHIDFYTREMVQESQQSDACQRLQTIPGYGPIVASVFHSAIGNGEAYRRGRDVSASLGLVPQQHSSGGKEVLLGISRRGDRYLRSLLVHGARSVVIQAAKKDDRLSRWINKVRAERGYNKATVALANKMARIGWAVLAHKSVYQPA

SEQ ID NO: 154135 - protein, 371 aa, unidentified
MKQQTKSSNITVGLDLGDRRHRFCALDERGEVVEQDSICNDRVSLRKLAGRYHGALGVMEAGAHSPWISRFLEALGWRVVVSNPRKVRAIYQHERKSDQRDALMLARIGRMDLALLYPVRHGTAEAQQDLLRIKLRDSLVRARVAVINSVRFTLKSLGYTVGNPSSARFHKVVMEEVPESVREMITPSVQALAELTARIKMLELEINTLAQMKYPQSAQLQQIPGVGPITALYFVLKIEDPNRFAHVRDVGAYAGLCPRRDQSGESDPQLRISKRGDAYLRRLLVSAAHYITGPFGPQSALRAYGLMLAADGTARAKKRATVAVARKLAVLLLSLWKSQQPYQPFPGACLNGEQEDRRSGTIALHRMEATD

SEQ ID NO: 154136 - protein, 415 aa, unidentified
MSLGGYIMQVTFGIDVSKSTSTVCELIGESKNELTITNDRPGFIQLLHELAAFSKHPQIIFEATGVYSRRLQAFLEDYGYEYVVLNPLKAKKEMNMGLRYNKTDKTDAYHLALIQRLYHHPINQLQSQTYKQLNALSRFYDQLTADLVMAKNRLHQALQSTFPEIENLFSSAKGKNYWQIVVRYPHCDLVRREDKKQLINWLMSLKGIAFKHALRTADKLIELAYQAYPVVSCSSIEVEQVQYYAHRLLNLSDQRENLIARMVKLAKSLPNHDLENLESIPGFAQTTAVRVLAELGDLRRFSNPNKINAFIGIDPGRYQSGEMDSNLSITKHGNAVARKLLYRAIGQIDNAAKTNPCHIADYYESKKLSSQTKGFKKIAIASIHKLIRTIYALIINDQPYDYNVATHNQKDFSRN

SEQ ID NO: 154137 - protein, 414 aa, unidentified
MLKIVYRICCGMDVHKSFVVACIASTNEQGVTTYKSKRFSTFAGDLRKCAAWLAENNCKDVCMESTGKYWIPIYNILEATCNIVLAHPKYVKAIRGKKTDKRDAKWIADIFKHDLVAGSFIPPADIRQLRDLFRYRWKLTHYTTGEKNRAQNCLTVSNFKLDDVFSDVFGKAASAITSRILENPTERITDVSSFRTKGMRATNEQVLAAVDGEMCAEQAEKLRIIRSHMSSLELCKLHLESLILSTAEKYLPQLNLVMTAPGIQSFAAIGIISEIGVDMSVFPTSKHLCPWAGLTPQNNESAGKKKTTRISRAGAYIKPLLVQCALNAIRAKQFPEVRNRYLALKKRRGHKKAIIAIARMLLTAIYNMLKKNEPYNPELYRKGDRPPAHREVSVEEAIFILQRQGYLVTAPPTT

SEQ ID NO: 154138 - protein, 355 aa, unidentified
MQKYKFSFKGQNIYVGIDVHLKTWHVTTLTESGCKYSFSQHADAKELFDRLNKKFPEAHFMSAYEAGFCGFSAHYALAEQGFENIVVNAADIPTTVKEKVMKTDAVDSEKIAWGLKRGELTGIYVKDKSFMDDTNLIRLRQRFIKDLSRHKSRVKQLLYTQGVTYPERFAKSGTHWSRNFMKWLREEVVLLSEEKLTLTLLCDQVDSVRQAVLRVTREIRRMSKEDKYKENYNLLTTVPGFGLITSMSMLAELDNNPTRFPNERKFVAILGLIPTCHDSGEKKVNGEKSFRGNKHLGPLIVEASWVAIHRDYGLGAYYTNCCQSMKPQKAIIKVARRLACRAYAVMKTKKAYVFQ

SEQ ID NO: 154139 - protein, 376 aa, unidentified
MDHSDYTVACDAHKHFSLFAVLDGAGQLVQQIRVGHVPGAIGDFLSQFPEGTPVALETVGNWYWIVDEIESSGCIPLLAHAARAKIMMGNIHKTDKLDARGLATLLYLGKLPSVWIPPADVRDERELPRTRMTFSQHRTRVKNRIRSTLTKYALSLDTDSDIFAPKWRLDLLSLVDRLPEETGRCVHQQLQILDALQEHIKQLEARIVERIQLTPTLQLIQTVPGPAKVLAIVIDREVGSIDRFPGPKQFTSYCGLVPKLAASAGRARYGRMVKQCNTYLKWAFIEAANVIVRQRHHPNWRRKYVVHLYERTRRRKGHSVAVGAVARYLAEATYWVLKKSEPYREPAHWDPEGKQSLSRSASGRSAPNMGPQRSAS

SEQ ID NO: 154140 - protein, 427 aa, unidentified
MKYSQNSKIMQISEKTLIIGVDIASEVHFARAFDYRGVELAKILRFTNDEPGFKEFAAWVEEIKSKNHKDKVTVGMEPTGHYWFNIAPFLKDHSMKIVLVNPFHVKRSKELDDNNPTKNDRKDPKTIAMLVKDGRYMEPYIPEGVYSELRTAMDTRWHIVKQLNVIRNKVLRWLSIYFPEYRTVFGDWEGKAALIVLKEFPLPKQIIEKGVTGIVARWKQDKIRAVGIKRAVALVEAAKRSVGVKEGIISAMNDITMLLEDYDLKMAQYNRVMELVEQHSKQIPGMEEILKIKGIGLIMAAGFVAEVGDIKRFEHSKQIQKLAGLNLKENSSGKHKGKTTISKRGRSRLRAILFQGMLPLVAQNAAFKELHEYYTTRKGNALGKKQSLVLLCCKLIRIFYALLTKGIEYDSQKMMSDIRRNSTSEAA

SEQ ID NO: 154141 - protein, 341 aa, unidentified
MQITTIGLDIAKNVFQVHGIDAAEKVIVRKQLRRGQIIAFFEALAPCLVGMEACATSHHWARELTKLGHEVRLMPAKDVKAYVKRNKNDAADAEAICEAVRRPTMRFVRIKSAEQQGQLMLHRARDLLMRQRTQLINALRAHLAEFGITAAQGREGIKELLAIIAQDEGSRLPVDAHASLTVLAAQLQAVQTTIGSIEKRIVAQHRSNEASKRLETIPGIGVVGATTITAVVTDPKAFRSGRDFAAWIGIVPRQDSTGGKQKLGPISKQGDQYLRRILIVGAHSVLRRARQQPEKYPWLTQLLARRPFKVVAVALANKMARIAWALLARGGTYRPPQLAAV

SEQ ID NO: 154142 - protein, 344 aa, unidentified
MSKVITIGLDIAKNVFHAHGADERGAMVFSRKLTRGKLLEFFAGQPACTVALEACGGAHHWARQLQALGHDVRLIPPAYVKPFVKRNKNDAVDAEAICEAAQRPGMRFVAVKTEEQQAAGLVFRTRDLVVRQRTQLINAIRGHLAEYGWVAPRGTASMTMLADLLEDGDIASSLPEAARPMFKLMIDLLSELEEQIATLDREIGRRAKEDEAARRLMTIPGIGPIAATAIIALAPPIETFRKGRDFAAWLGLAPRQHSTGGKQRLGSITKMGERTIRRLLIIGASSVVLQASRRGAPGGSWLERMLARKPRMLVSVALANKMARMVWALLTRKEDYRAPAAVSA

SEQ ID NO: 154143 - protein, 440 aa, unidentified
MNPEDRSRLEEFRQFRKGVRGSKEYLLVGIDVAKDKHYAFFGTATGKTLLRRLVFENNLEGFRKLLVQAEAMKVQGGLTKVVFGMEPTGNYHKPLGEHLIRCGRGVVFVSGVAACENRKTLDGRWDTNDTRDAANVADLVSQGKCLFYEFPVGALQDLRNLLSLKRRLKRMEHGHRVRIRNHLVAKYFPELDRYYEQSEATALAIVRWCLDPSEIAGLEYKEFAGMVGSIRGRSSQEKRLEAIWKLAVDSVGCEAGPVVEFEAQVMVEGLKQIRESIRQIDEKIQELCSPFPEYEFLLSIPGFGPDVSAKVLGAIGNPFRFQNRRQVLKLAGFDLSAKRSGKSSESVIPVISKKGKADLRYALYQAAFIASIRNQDFIVYYTNQLRGREREPGIKTKMRVKLAAKLLIIAWTLMKKKEPFHPSYLRAAGPSVSTGDGRER

SEQ ID NO: 154144 - protein, 401 aa, unidentified
MISVGIDVSKGKSTVCILKPYGEVIASPFEVVHTESELKNLCQMIQRFDGEVRVVMEATGIYHLPVLLALQEQGLFVAVINPFEMKEYASRGLRRVKTDKKDSIIISNYGIDNWYRLENHRGRDDVYSELKLLGRQYCHYMELHVKALLELTHMLDYTMPGVKKEFRSWNESNGKDKLSDFVERYWHFDNITVMSKDEFIDDYIVWAAEKKYHQNQSKAAELYDLASDGIPTLSSNTPSTKMLVLEAIRILREIDSTLFKIITRMKELTKSLPEYETVRSMGGVGDVLAPKLIAEIGDIRRFHNGKALIAFAGIDAPPYQSGQFTGTNRKISKRGSKVLRKIGYETMRVLKTHKAPEDDTVYRFILKKESEGKSKRQAKIAGLNKFLRIYYACVNEVYQRV

SEQ ID NO: 154145 - protein, 534 aa, unidentified
MVTKRKTGTTGTKRKRSRSQKFKKAVLGRPQGVIQARVQAVGPEKFGVVAVDCAKARSKWMLVDFYGNVLCPPADVEHNRSAFQMAVLTLKQAVEKHGLKDVIVAVEMTGTYHKPPMRAFRKAGFETRIVHPFASSYYRQPEHGDQKTDENDLDSIFRAAVNGFGLIEKPVDAIYQQLQILARHRRDLVKKRAKLQCQIRHHLELALPGFGALFDRDDLWSQVTPVPLLEAIAQRGGTVDVVKQAGQKGITQWLDASKVRYHKKTVERVTVWAANAAESDPMATFHTRVWMSQLADWKQKTQQIHDIERDSASVMVKTPYVLLLSHPGINVVSAAELAGEMGPIENYATARSISGRAGLFPSRYQSDEVDRGGKLTRFRNARLRAAWMMIADNMVKCNAYWMKQAERWRDEGHKPQDIRARIANRMTRGVFKMVSGRQIYQHASRLDRGYVMDKLLTFHRDHQTSPAVIVRDLKHAADQLPKSSQLEERAKLQEAALKARRSRQKGPQELGTLLVALLAKLGVAAKDDDAVEST

SEQ ID NO: 154146 - protein, 323 aa, unidentified
MTRVICGVDVSSCRLDARVGQNGAEGSFANTTAGIAALGDFCRGHQVELVAMEATGGYEQQAFAGLSQQGLPVAILNPRAVRRFAEAMGLLEKTDRIDAGVIAWFAQTKRSRPAMLPSARQQQQRALVTRLRQLTQIRTAQRNQARLLTDPTVLAMIEELQQVVARQICELEAAIAEHIAEDPLWRQLDPVLRSIKGVAGRTVSRLMAEMPELGTLSNKAISKLAGVAPLARDSGKQQGKRITRGGRAPVREILFIVASVAGRYEPDFVAFHKRLTAAGKPPKVVRIALAHKLLVRLNAKARQVRQCMAQPALTQPSAPMTTT

SEQ ID NO: 154147 - protein, 346 aa, unidentified
MKHFAGLDVSLEETAVCVVAEAGGIVREARLPSEPEALVAFFRGLGLVMDRIGLEACSPAAWLHEGLTAAGLPAVCLETRRAKAAMGAMPNKTDRNDARGIARIVRTGWYRAVRVKSPACRSWRALPAARRLVLNKMRDVENGLRALLREAGLKLGTPARKEFAVRVRELTAADPVLSALAEPLLTIIAAMTRELAQLTKRVLDIARAEPVCRRLTGVPGVGPLTALAFRATIDRPDRFRRSRDVGAHLGLTPKRYQSGETDVQGGISRCGDELARTALYEAAHSLLVRSRKWSTLRAWGMQVARRRGMARARIAVARKLSTILHRMWIDGSDFRWGKEGPAPAAV

SEQ ID NO: 154148 - protein, 415 aa, unidentified
MDVLHPICAGLDVHRDTVVACVRRLDGRTVAHETETFATTTSGLMSLSAWLQERGVPVVAMEATGVYWRPVWHLLEEEFELVLANAMHIRNVPGRKSDVNDARWIADLLAHGLIRGSFVPPDPIEELRMLTRTRKQLVRERAGHAQRLDKVLQDANIKLGAVVTDIMGQSGRRAIEALIEGITDPATIAARMSARLKASRAEIDAALRGRVLQRHRFLLRLHLDQIESLDGVVQRLEQEIERCLCPFDAARRRLTGIPGVGESAAALLLAEIGTDMTRLPSSAHLISWAGLCPRSDESAGKRRSTRLREGDTWLKTTLVQCAWAATRAKGTYLQAQFQRLRPRRGAKKAVIAVAASILGAAYHMLEHGCPYRDLGAQHFAKEPAELAKSLLRRLERLGYEVTASVRPAQATAVSS

SEQ ID NO: 154149 - protein, 466 aa, unidentified
MENNYILYVGMDVSKGKADAAILKVSDRRSVKPKFLRKKLSFKFVKSEVASFLETVRNYSDVNCTSICFALEVTGIYSTNVYDYIKANLYENESIKFLNTDFVNQWRNAHNIAKSDPLDAQTISTIIGTDSDVQYVNDNVFENKNGYQDLKALVHRHYQIKKIYSQEINRLIAQCDCLFPELQYVFEPKSAAFIAVLSSYPTTHDIINASRVEVFDVIYEATKHRCSMDKVDKLFELCQDTLVPDDISSYGKSIILDLVENIKNIKGRLKSIERYIRDVASLNPAYKLLLTITGCGPITAATVIAETGNIRRFKNADCFVSYSGTSPRNKRSGTSVETMGKISKKGSRYLRHAIYMIAEFARRHNPVLKHQFERIKNGNKKRHKLANIAIANKIARYIYSIMKNKSSFVISHDHIMRLPEETRDTFFNSISLDFPKNTRKQIYQYSDINGELHRFVYIKTDEMIPA

SEQ ID NO: 154150 - protein, 408 aa, unidentified
MQVTFGIDVSKSTSTVCELIGESKNELTITNNRPGFIQLLHELTAFSKHPQIIFEATGVYSRRLQAFLEDYGYEYVVINPLKAKKEMNMGLRYNKTDKTDAYHLALIQRLYRHPVNQSESQTYKQLNALSRFYDQLTSDLVIAKNRLHQALQSTFPEIENLFSSAKGKNYWQIVVRYPHCDLVRREDKKQLINWLMSLKGIAFKHALRTADKLIELAYQAYPVVSCSSIEVEQVQYYAHRLLNLSDQRENLIARMVKLAKSLPNHDLENLESIPGFAQTTAVRVLAELGDLRRFSNPNKINAFIGIDPGRYQSGEMDSNLSITKHGNAVARKLLYRAIGQIDNAAKTNPCHIADYYESKKLSSQTKGFKKIAIASIHKLIRTIYALIINDQPYDYNVATHNQKDFSRN

SEQ ID NO: 154151 - protein, 356 aa, unidentified
MPIPTKRHKGMKKIFIGIDFSKEKFDATVIKAEGVEERAERQHGVFDNKVSGFRRLLRWVESVADGQDRGLWLFCGENTGGYSRALCNYLYGSGHDMWLENALSIKRSSALQRTKSDKADSGIIAEYAMRNYDQMRLYKPLEKNLERLREVFLYRHNLVKLKVSMTTRRGEKKLTQEKSDISRFMAQSSRHLISEFNKKIAECDMRIEKIIREDEELRRNFEIITSVPGVGVQNAVCLMVYTDNFCRFDFNSRKIACYYGVAPFGRQSGSSVNTPPHVSPFANKLIKALLTQAALASVNFCPQMAMYYHRLVKAGKRKPVAVNNVKNKLLHIITAMVRKGEKYNPNHDYHAVFEAA

SEQ ID NO: 154152 - protein, 350 aa, unidentified
MIIIGCDYHPGFQQIAFVDTDTGELRERRLQHPEEAEQFYRDLAAPGMKVRVGVEASGHARWFERLLAELNFELWIGDAAEIRAKRVRKQKTDRQDAQHILRLLLEDRFPQIWVPNGENRDLRQLLWHRHRLVQARTRIMNQLQAVALNEGLRCKKRLWRERGREQLESFKLAPWASRRRRDLLALLDRLNPTIAELTEAIEQEAEKCPEAQRLRTHPGVGPLTALAFVLIIGRAERFQCGKQIACYLGLVPLEDSSGDRRRLGHITKQGNSLLRFLLVEAAQVTVRSDQQWRSKYFHLAMRRGRKIAKVAMARRLAIQMYWMMRKEWDYEQVKKFGSHAGQPGNPHGVQ

SEQ ID NO: 154153 - protein, 354 aa, unidentified
MEGYAGRQYVGIDLHRRRTVLVRTDEAGQRLGMARIDNDPVTLALEVAKAGSDAEVVLEACYGWYWAADVLAEQVGAEHVHLAHPLGVKGFSYRRVKNDERDAADLADLLRMNRLPQAWIAPPQVRDLREGVRHRAKLVAIRSNLKSQVHAVLAKAGVPVSMSDVFDVGGTVFLNGLDLPGEFGARVASLRRLITDLDFEIDIAGKRVQARLRDDPGWRAIQALPGVGPVLATVFVAEIGDVSRFAGPHQLTCWAGLTPKHRESDTTVHRGRITKQGNRAVRWAAVEAVQRARTGPAGVVKARLGPRRGKNVAKVAAARKLLTLVYYGLRDGHIRALDRRAPDHTAGASTRAAG

SEQ ID NO: 154154 - protein, 347 aa, unidentified
MRFYTKQHQYYCGIDLHTKKMFICILDAAGQIRVHQNIKTDQETFLNIISPFREDLVVAAECMFTWYWIADLCAEKNIPFVLGHALYMKAIHGGKAKNDKIDSHKIATLLRGGMLPQAYVYPARMRATRDLLRRRNHFMRKRAELYAHIQNTRSQYNLPDFLGRIAKPQNREGIVERFNDPSVQKSIAVNLEMIQAYDHILTQLERDIITSAKEHDLRSYALLQTIPGVGRILALVILYEIETIERFPQVQDFVSYCRLIKSIKESNGKKYGSSGKKIGNAHLKWAFSEAAVLFLKGNEPAKRYLERLSRKHCKAKALSILAHKLGRAVYFMLKNKEAFNQKKFLGL

SEQ ID NO: 154155 - protein, 351 aa, unidentified
MNTQTTAIPKLFIGMDVHKKSWTCHFKTDLFDFKTITMPAQTQQLHDYVSKNFPGHEVTCCYEAGCCGYWIARYFLQLNWKVLVVNPADIPRTHKQDWQKTDKIDARILCHHLSSHSLHSIFIPSEQQEQLRSLFRRRIHLVQQLRIIKSHIKSQLLYFGIQLPAEFDNPNWSLSFKQWINDIPWKFPTAKESLHSKLRQLDFLWYETLNISNELRAYCRKHFKGDYYLLKSVPGIGGITAAALLAELGDIRRFNRPKQLAAAIGIIPGIYQSSDTNINLGLTRRSNKQLRSLLIEASWVAVRTDMALQQYYRKHAALEPNKAIVKVAHRLINRIRAVIISGVPYQCGLIN

SEQ ID NO: 154156 - protein, 343 aa, unidentified
MELYVGMDVSLKETSICVVDSSGEIVSEGTVISEPEAIAKYLMTKAAEADRIGLETGPTTTWLWHELRALGLPVICIDARHAKAALSMQINKSDRNDAAGIARIMQCGWYKEVQVKRLSCHEIQAVLNSRAQLVKIKTDLENLIRGLLKNQGLVIGKARGNTFLRRAEELLSRDGLLWEAVRPLLDIREKIGREIATLHRKLLDLAQNDENSRRSMTVPGIGPITALAFHSTIDNPNRFRRSRSVGAYVGLTSRRHASGEVDWSGRISKCGDRMLRSYLFEAAGVLLTRVPQWCKLKAWGHRLWKRIGFKKAKIAVARKLAVILHRMWCDGTDFQWSNKEVVA

SEQ ID NO: 154157 - protein, 414 aa, unidentified
MESEYRLMVGIDWATEAHQVCVLNRQGRLLEQRRVEHRAEAIAAMIQRLIELAGGDPASIAVAIEVPRGAVVEALVERGLHVFAINPKQLDRFRDRHTVSGAKDDRRDAFVLADSLRTDLSAFHRVHLDDAWTIQIRELTRIEENLNTEITRLANQLRDLLLRFYPQLLSLCPAADQPWLWALLKLAPTPAKAQRLRRSSIQRLLRQYRIRKWTADQVRTELRTAPLSVAPGVTEATCAHIALLLPRMELLMAQYKLCSKAVQTALDERVSAEEQRREHRDVEILLSLPGVGRVVAATMLAEASQLLAQRNYHALRTLGGVAPVTRQSGKRFAVRRRYGCNHRLSNAFYHWARVSSQRDPRAKHHYQTLRQIGHSHGRALRGVADRLLALLVAMLRDQTLYDTTGAHAPNPIAA

SEQ ID NO: 154158 - protein, 350 aa, unidentified
MLIIGCDFHTRYQQIAMMDDATGELLERRLEHENGEAEAFYRGLPKPVRVGIEATGPIHWFERLLTELGHELWIGDAAKIRASEVRKQKTDERDAALILDLLLANRFPKIWVPTPAERDLRQLLWHRHKLVCLRTLLGNQLHALALSQGLCRKRKLFTKKGRAELQSLGLAPWASRRREELLKLLGQVDAPIAELDKAVLEEAQRREEAVLLMTHPGIGPVTSLAFVLAIGPVTRFPRSKKIASYLGLNPSEESSGGRRRLGAISKQGNTMVRWLLIEAVYPAVRQDVALRQDYQRLKFRRGHAVAKVAIARKLAVRMYWMLRRGAEYAQLVRRQGSPGATLVDASSSLG

SEQ ID NO: 154159 - protein, 346 aa, unidentified
MDTGYAGQQVVGLDLHRRRTVMVRMTEAGERLEAVRFVSDPAVLAEQIAKAGPAPRVVVEATYAWYWVADVLDAAGAQLHLAHPLGVKGFAYRRVKNDFRDAADLADLLRMGRLPEAWIAPPPVRAHRELVRHRHKLRQLCSGIKAGAHAVLAKNALFIPRSDMFGLDGRRRLSALNLPEVFRLRLDSQLRLIDTIEQEIDELDKRIRVMFADDLGYRALLRLPGVGPVFAAILRAEIGEITRFPSPGQLSSWAGLTPRHRESDTTIHRGRITKQGSRLVRWACVEAVQRARPGTPMRNRYDQIVARRGGNAKHLAKVAAARELCECVFYALRDGHVRRLGEHGAA

SEQ ID NO: 154160 - protein, 401 aa, unidentified
MATVRDNAIRVQRFRELKATLRTDRTRLLVGIDVAQAEHVVQLRHAHTRVVVPTFTIPNSTRGFTQLWTWIQQAQRTTGCRDVVCGLEPTGTYHQALATFLEAQGADVVRCSSSVAYWNRRTQDRTWDKNDRKDAANCADLLEQGKVLFASQPTGPLAELRHLVKCLRRARTELAACKARWRTTLRPALAPMGDALPQRLWAELPAALQAWERAAPGRPAVPKGRLPLGLATACADLGAQVTAVQGRTATLEAALTPLAERLPAYTLLRTIPGVGPTVGAILLAEIGDIGWFTKFSQLRKLAGLDIVRVQSGKFAGQFRISKCGRGLLRWALYHAAVGLARTAAGQARLAALKTKRRGDRYAGFKAVTELAAKQLRVVWGVWRSGMPYDPTRAGGLRRQPR

SEQ ID NO: 154161 - protein, 372 aa, unidentified
MKEDSVIFIGLDTSKLKISVAIADGSRNGEVRFFGDISSEPASVASMVSKLSKRGAKLHFCYEAGPTGYGLYRQIVELGHDCVVVAPSLVPKRAGDRVKTNRRDAMSLARLHRAGELTAVWVPDEGHEAIRDLVRAREAASDALKQARQQLQSFLLRHGRIYAGREPWTRAHRRWLTCQAFDHPAHQILLAEYCQAVADASVRLDRLTKLVVETAASWSMAPVVAAYQAMRGVAFMTAVTFVVEIGDVRRFDNPRQLMAYLGLVPSESSTGERVKRGGITKAGNTRARRVLIEGAWTYRFPARVSPKIQARLDDLPRTVREIAWKAQVRLCARYRKLIAAGKPKVVAVTAIAREMAAFLWAIGQEVAPTAKG

SEQ ID NO: 154162 - protein, 360 aa, unidentified
MQRNKISFKGQKIFIGIDVHKRNWSVTVLTEAGYQRTYSQNSSARELFDFLDKHFPDGEYKAVYEAGFSGFSTYYALTALGIDCIVIHAADVPTTQYENVMKSDKVDSVKMAKALRAGLLRGIYVRPLDNLDDRSVVRVRKTVQKDLTRYKSRIKHLLLSNGVDIPDEFDPRNGTKWTNAFIDWLKNDVELLSITRYSLDILIAQLERMKVALKEVGQEIKKMSQSERYKNDYELLRSIPGIGEIVAMTLLTEINDIRRFKNERQFASYLGLIPTSHSSGDKISHGENTFRGNKTLGPMLIEASWKSIQHDSGMASAFTHYCRRMKRNEAVVRIARKLSNIIMAVLKTKQRYVPYIQYTP

SEQ ID NO: 154163 - protein, 373 aa, unidentified
MPKYSTAFGMDVHLRSTTVCALDADTGEAVTRRFPGNPWGEIAGWMDGFPGPSLAAYESGYLGFAPQRELAGLGVECVVAAVSKIPRSAADSASKNDRNDAARMAKAILAHDISPVWVPSPEVEGIRDLAGAYDGATARLATARQRLRAFLARRGFVYGGTTPAGNPRKYWTYDFLRWLDKVRPEDDGGVRALAALRNEVEAAAEARADLLSEYRAAVDASPIAAEVAALQSIKGCAFALAAAFSAEVGDFTRFRSGRQVTAYFGLAPSQRSSGGSVRLGGISGAGNALVRKLAVEGSWCYAAARHQPKLMPRDTGVPLEIRMHGRKGSERLLRRREEMLARGVPAAKANAATAAELVRWLWALGMMCREGAE

SEQ ID NO: 154164 - protein, 333 aa, unidentified
MDTHLDVHVAAALDGIGGLLGVEGFEASRAGNHRLLAWLRSFGDVVQVGVEGTGSYGASLARSLRAGGIRVVEVDRPNRQARRRTGKSDPADAVEAARAALSGRAQGAAKSRDGNVEAIRALVVAKRSARSTRITSLNQIRHLGFTGPDELRERLRGVSRDQLGAVAAALRPRAGADPVVTATKTAMRILGRRVLALDAERAAIDRLLAPLVAVTAPSLLNVHGVGVDTAATLLVAAGDNPGRLRSEAAWAHLCGVAPVPASSGKVTRWRLNRGGDRQANGARWVIVITRMSSDPRTRAYVERRLAEGLSKPEVIRVLKRYVAREVYRHLPRG

SEQ ID NO: 154165 - protein, 346 aa, unidentified
MDYFAGLDASLETVNVCIVDGEGSVLLEQKVEAEPQEIVALLRRFGRPLKRVGLEAGPTSSWLFTELRAAGYPALCLECRHVKAGLSAMRNKTDRNDARGIAHLVRLGWFRVVHVKSEEAQQIRMLLVNRNLLLSKLQDIENSMRGSLKVFGLRLGQVTKRSFEARILELVEGHPNLAAITEPLLRVRRALLDEFCLLDRMARKTARNDVVCRRLMTVPGVGVIVALTYRTGVDVPERFTRSRDVGAHFGLTPRRYSSGQIDYDGHISRCGDEMVRTALYQAAHVLMHHGRWSGLRGWAMRIAKRSGAKLAKVALARKLAVVLHRMWIDGTEFRWTTSEQPLAPAA

SEQ ID NO: 154166 - protein, 413 aa, unidentified
MEVLYPRCCGLDVHKSSVSACALLRERRKLRKEHRRFTTMTQDLKNLATWLHELGVTHIALESTGVYWKPVWNMLEGQFTIVLANAQHVKNVPGRKTDTKDSEWIAELLQHGLLRSSYVPPEVVRDLRDLTRGRATLSQEASRIANRIQKVLEDANLKLSSVASNTLGKSGRAMLDAVIAGQTDPEQLADLALGHLRAKIPQLQLALKGKIREHHRFLLKRLMHQLRFVESEIDLLDQRLEELGQRDQNLAAAVARWTTVPGVDRVAAWSLAAEIGIVMEQFPTAAHLGSWAGLCPGNNQSAGKRLSGKTRKGSPWLARMACQCAWAAARTKNTYLSAQFRRLAAKRGKKQAIVAVAHSIVVIAYYLQKKQCDYRDLGSNYFDQLNADGLKRYLVRRLEALGHKVTLAAAEPV

SEQ ID NO: 154167 - protein, 474 aa, unidentified
MEHYYLGIDVSKGYADFVILNDKKQPIEANFQLDDTFDGHCHLYEILYTFCENHPECTIYVAVESTGGYEDNWFNALVKFQGTLNLRTARLNPLGVNANSKADLKRNVTDKISAQNVAEYMIAHPEKVSYQHHDQLASLRKQWGFINMLTKQSSQLFNQLEPLLYTANPEVLTYCKNGMPGWVLKLLMRYPTASDLSRAKVVSVARIPYISSARARELVAAAKRSVASSTDTITAQLIVETVKQILHLKKIIASQIDLMAKHCSVPEVDLLKSFIGIKDYSAIGLILQIQSAERFPSVKKLASFFGLHPVYKISGDGVGRFRMSKKGRKEPRQILFMVTLTAIRSNPLIRGIYLEHIQKGMEKMAAIGLCMHKILRIIYGMLKHNMAFYPEIDWKNRGKMYQSRTRLNKDKTRRYQDFDARAPISRRQNSKRKEQKQSHSDNNTNNGIIAPPLQYNLNRYRSSRTGFTEFSKNS

SEQ ID NO: 154168 - protein, 346 aa, unidentified
MRFYDQQHEFYCGVDLHTRRMYLCILDREGNKQLHRNMRAKPHEFLRAISGFREDLVVGVECMFTWYWLADLCTDENIHFVLGHALYMKAIHGGKKKNDKIDSEKIARLMRGGTFPLSYVYPREMRATRDLLRRRTFLMRRRSELLGHVQQVNQQYNHDPFEKMLQYACNRDVLDRFEQDSARQNVEADLQMIGHYDQLLKQMESNLVRQAKLHDPQACFLLQTIPGVGKLLSLVLLYEIHTIDRFASVGDFLSYARLVTPKHTSDGKVTGHSGAKIGNPHLKWAFSEAVPMMLRHCEDAQQFLARKEKKHGKARAMTTLARKIARTVYQMLKRKEAFDAVKFFAN

SEQ ID NO: 154169 - protein, 351 aa, unidentified
MNILAMDLGKSNTVICYYDSETGNHSYGKVKTTPEHIHDLLAEYSPDRVVFEICSIAGWVYDICSGLKLHTQIANPNTQGWRWKNVKKKNDRTDALKLAQLSAMNQLPMVHMPKRSVRQKRVIIQYRQSLVRQRTRIKNSIRAILDKEGQMMPDGRSGWSMASIKWLMEMSLPLERCGIDNLWRGQLRVELEMLEKVGSCIAEVEKKLDTLGKQDKDIQLLQTTCGVGPRLAEAVVAFIDEPDRFETGKQVGSYAGLTPRQYQSGDMDHQGKISGQGNKVLRSLLVEISWLGLRHNKWMNETYHRILRGSESRKKIAITAVARKLLVRCWAMLRDGQPWRDSEIKADKQAA

SEQ ID NO: 154170 - protein, 322 aa, unidentified
MQGKVLLEQSAPTVYVGVDVCKEWLDVYLHPVGRALRVANDREGLKQLKRELAGHQVKLIVMEATAKYHRQAHRTLSAGGFAVAVVNPLRSRLFAEAAGALAKTDRIDAKILAILGESLAPDAKAPVPVALEELQELFRARAAAVAEMVALTNRLGASEGAFLRAELVRRIKATQAHIERLDGEIHRQVGADLALARRYAILMSIPGVGPVAAMGLVLGLAELGTCSGKAASHLAGLAPFADDSGERTGIRFIQGGRAHVRTAIYMAAVAAVRCNPDLAAFYKRLRDHGKKPKVALTAVMRKLVVLANTLLKEDRLWQPVAP

SEQ ID NO: 154171 - protein, 369 aa, unidentified
MTTEATAVIGGVDTHKHTHYAAAVDDQGRFVDHQEFPATDPGYQALLSWLRDLGEVQAIGVESTGSFGATLTRALTKAGVRVVEVNRPNRVARRMDGKSDRLDAEQIARAVLGRVSTAVPKAKSGAVEVIRTLRVTRASAVKARTQAFNTLWGVMIGAPSPLRDELVVLTKRTLVNRCLRLRPETDDFLSLSDDPDRLLLAAVKTSLRDLARRWKLLDEEIKGLNRKIDAMVRATAPELVELHGVGVEIAGQFLVTAGDNADRIRNEAAFAKLCGVAPQPASSGRTTGRHRLSRGGDRAANSALYIVTIVRMRHHQPTRDYVERRTLEGLSKREIIRCLKRYIAREIYANLPPSAVTTTETVHLDQTAA

SEQ ID NO: 154172 - protein, 349 aa, unidentified
MVIVGIDAHKRTHTAVVIDEAGRRLGEKTTRATTTEANLELVRWVHAFGPDRRFAVEDCRHLSRRLEADLLAAGEVLVRVPPKMMAHARDAARTYGKSDPIDALAVARAALREPNLPVARLDGPSRELRLLVDHREDLVRDRTAQVNRLRWHLHELDPSWDPAPRSLVRFKQLDALAARLHGVEGTLAWVAQDLVGRIRELTVAVNELERRISEVVSRLAPALLELAGVGSLTAAKILAEVADVRRFHSKDAFARHNGTAPLPVWSGNRVRHRLSRTGNRQLNAAIHRIAVTQMRIHDGAKAYLERRIAIGNTKTEAIRALKRKLSDVVYRRLLADAEATPVAPLGEAA

SEQ ID NO: 154173 - protein, 328 aa, unidentified
MIEHYIGVDLHQAFFQACAVTATGARKWEDRFPRTDAGIAALLARCGDRTALAVEASTPTWHFADALREHVEELRIVDPVKTKLKAGYAAKTDRLDARRLADALRRDSVVGIYYPPVEIRELRELCRFRHAVVQVRTALINRLRAVLLRQGVVDRRRLARTASDAWLETLTLSPQAAASVAGLRRLLAATRTEAAAADAEVLRRAAADPIAVALQQLPGLGPVLALLIRAEIGDLRRFPTPGHLASYAGLVPRVDQSARRAHYGRITKRGSPWLRWALVEAAMHGTRRTDRIGRWGRGLAVRKGALKARVALARTLCEEIFRQWPAIA

SEQ ID NO: 154174 - protein, 408 aa, unidentified
MKTLHQRCAGLDVHKQEVVACLRLVTQGRVHREVRRFPTTTRGLLELAAWLEAAQCTIVAMEATGLYWKPVWHILDGSFELVLANAAHIKGVPGRKSDVNDATWIADLLAHGLIRASFVPPQPIQDLRDLTRTRKQLSREIVRHTQRLQAVLEEANVKLASVITDILGASGRRILKAMITGETDPTRLAELASRRLGCTRDTLVEALDGRVRDHHRFLLDQHLKTIEQLEETMAAFDARIEAALAPFRDTVERLTQVPGLSTRAAEVVIAEIGLDMSRFPTAGHLLSWAGLVPALDESAGKRRSTRVTKGAPWLKPVLVQCAWAAARKRGSYFEAQFLRLRGRRGPKKAAIAVAASILTTVYHMLRDGTCYQDLGPNYFARRDPARTARKLADRIRSLGYVVEIRSAA

SEQ ID NO: 154175 - protein, 342 aa, unidentified
MEHYVGLDVSLEETSVCVLDSAGKIVWRGRCSSDPDAIARIVRDRAPFAVRIGLETGQLSTWLVHGLRRLGLPVVCLDARHAKAALSLQLNKTDDNDALGLAQIVRTGWYREVAVKGMNSQAVRVLLMARAQLISQRQATANQVRGLLKTFGLLVGQAGGSRFAVRVRELVADRPVLVAIVEPLLTVWQTLREQVAELDRQVRMRAREDATVRRLMTAPGVGAVVALAYTAVIDDPARFAKSSSVGAYLGLTPRRYQSGEVDYDGHISRCGDGLLRSYLFEAANVVLSRLTKPSWLKEWGEALARRIGARKAKVAVARKLAVVLHRMWMDEQEFRWSPTAAA

SEQ ID NO: 154176 - protein, 352 aa, unidentified
MPATTTQTMIAVVGIDIGKNSFHIIGLDNRGAIVLRQKWSRSQVEARFANMPSCLIGMEACVGAHHFSRKLKALGHDARLMPAKYVRPYSKGQKNDFRDAEAIAEAVQRPTMKFVATKTADQLDLQALHRVRERLVSQRTGIINQIRAFLLERGVAVRQGLRFLRAELPRILAMPTDMLSPRIVRIIEGLVEDWRWLDERIDHVSDEITALARQDAGCERLVSVPGVGPIISSAMVAAIGTGDAFSKGRDFAAWLGLVPKQISTGDRTILGKISKRGNRYLRVLFVQAAWVVLIKPQSWARHGLKAWIEAAKKRLHRNVLAIALANKLARIAWAVLARGRAFEAKLAVDPVA

SEQ ID NO: 154177 - protein, 353 aa, unidentified
MDIGVDTHKKSHVLVAVGAQGQTLGTRTVANTPAGWAAALQWAREQQQQIRWGVENTGSLGKGFAQFLLAQGEAEVREVVPHRTAQYRRRGRTQDKTDAADALAMARLLGAEGDRLPLVQADDASTELRLLSDHRDNLIADRTRLINQLHAQMLQLDPCYEERSGPLARPAGVRYCQEFAPPHADGLMQTRLLIVRQLATRIAALTTEIAELTVCLEQRVVALETPLLQLRGVGPVVAARLLGERGRILRVHSAAALAALAGIAPLAVASGGRHGHRVNFGGNRQRNRAIHIIALTQRRCEPLAQAYYAKKRAEGKTARAAMRCLKRRLVDVLYRLWHARPIESPQPVTAIAA

SEQ ID NO: 154178 - protein, 346 aa, unidentified
MKHSVGLDVSVKETAICIVDEAGKVVREGKVATEPQAIIAFLSSAGVEYARIGLEAGPLSQWLVNGLSEAGLPVICVETRHMKAVLKAQQVNKSDRNDARGIAQMMRVGLYKPVHVKTLASQQARMLLTSRKLLRDKLQDMENELRGTLRNFGLKVGVVSAGHFEARIKELVAGQPPLEMIVVPLLTVRRVVREQLAKLDKMVLDQVRDDKLCRRLMTVPGVGPIVALTFRATVDQAQRFARSKTVGAHFGLAPRRFQSGERDYDGRVSKCGDAMMRTALYEAAQVLLTRTRTWSWLKAWGMQVARRRGAKKAIVALARRLAIVMHRMWVDGTEFRWRKEADTAAT

SEQ ID NO: 154179 - protein, 394 aa, unidentified
MFYLGIDVGKRTHVASVMDDAGKIVLKGFSFPNSSEGGHSLLTRLRAISDDPSHFLTGMEATGHYWLALFSFLDEADYFIHVINPIQTDGWRKGTEIRKRKTDIIDSVLIADLIRYGSFEDTTLANEDMFSLRQLTRYRSYLVGTAGDFKRKIIAVLDQVFPEYDTVFSKVGLFGKASKAALLEHSTPDAFNEITADVLAETLRLASRNRVGLVKAEALKTAALDSFGIRFAQDAFTFQLRSMIEQLNFLETQIKQTEEEINHLMASINSVIETIPGIGPITGATILGEIGDIRKFSNPKKLVAYAGIDASVSQSGQFDATHNVMSKRGSPYLRKALFQAAIVASRSDPVLKAFYEKKRSEGKHHLTAIGAVSRKLCYIIHAILTKNEPYEIRQ

SEQ ID NO: 154180 - protein, 308 aa, unidentified
MQWIGIDVSKEHPDAFARPNSASVRFANDDAGQASLWVWVRELGSCHVVMEPTSGYERAVLKELLSAQVTVSVVNARQIRDFARATGRLAKTDKIDAQVSAHFGEAMGPQARTQKDSQAELLESLLVRRRQLIEMCVMEKNRRALVLPALRDKITAVIQVLVEQIAQLDDELDQLIKASPVWKEHEELLLSVPGVGHVTARTMVPELGKLNRKQIAALVGVAPFNHDSGAYRGKRHIRGGRGAVRHVLYMAALSGTKHNPVLRALYERLCHAGKLHKVALVACMRKLLCILNAMVKHQTRWHLAAQTH

SEQ ID NO: 154181 - protein, 430 aa, unidentified
MKSNTQNKKIEAITEKTLVIGIDVGSETYYARAFDYRGIEYSKKPFKFSNTEAGFVTFKEWILDLKEKHEKDKVVPGMEPTGHYWFNLGKYLQDNEMKPVLVNPHHVKKSKELDDNNPTKNDRKDPKVIAGLVREGRYMIPYLPDGVYADLRTASNIRFQLQSELTRIQNRISRWFNIYFPEYKTVYGKPDAKSGMLIIKAAQLPEDIQTLGIDGVNQIWRDAKLRAVGKARAKTLIEAAEHSVGSKECAVSARMEIRMLLEDYESRNTRLQEVMVLIEELVRKIPMAEKLLEIKGVGIRTVSGFFAEVGDISRFNNPKELQKLAGLALVENSSGKHKGETTISRRGRKRLRYLLFEVAMSLVAKNPEFRELHNYYTTRRQNPLKKMQSLMAIAAKLIRVFFAMLTKGVDYDPKKMVSDIKRPAVYLQAA

SEQ ID NO: 154182 - protein, 349 aa, unidentified
MKKVIKQVVGIDVAQDELVVCLGKMYDDWTPVLVAHKTFVNEEKGFEGLVTWVKKLTETDVAVRYVMEATGVYHEAFAYYLNGKGFEVSIVLPNKISNYARTLETKTVTDKTSSEAIAMFGLEKKIDMWEPPKGIYKTIQQLTRERGQLIDERTVIRNQIHAEEAGAFPNKTSLQRAKKRVALLEKQDSEIMKELNTLIRTDEEVQRIVLLICTIPGIGLLTAVTILGETNGFDLIRNKKQLVSYAGLDVKEKQSGTSVKGKPCISKKGNRWLRKAMHLPALSAKGRDERFKAIFIRLVSKHGIKMKAVVAIQRKLLEMSYTVYRTQKPYDKEYFKRNEQIEDVQNYCI

SEQ ID NO: 154183 - protein, 426 aa, unidentified
MHDNRNQRINQISDTTLVVGIDIAKRNHYACAVDERGRELKKSFVIRQSLQGFETFYATLMKLMETHDKKEVIIGFEPTGHYWMNLAAFLTDQGIPFVLVNPLHVKQSKELDDNLQSKNDLKDARVIAKMMPQGYYSMPREMTQIDSELRRGTAYRARLKEESASIQNRIRRWIDLYFPEFASVIKGLGKQAQAILKYAPLPEDLLIFSHEELIDFLQTKGVRYLSKKKVERLLQVAEYSIGLKDSPEMARMEIRMLLDQLSMYESQIQEITENLVTLARELPDFDYLTSIPGISETTVLELLSETGSLKRYKDPRQLFKLAGLTLVTNSSGESKGRKRISKRGRRRLRALLYKAVFPLLHANSAFRALYEYYSNDREKPVTKKEALVILCRKLLQICHGLSHYGTTFDLERMMRDMPFLAHPKAA

SEQ ID NO: 154184 - protein, 355 aa, unidentified
MSSEKYIGLDVHQATISVAVMDSQGKVVIESILETKASTLLEFFAGLRGSLFVTFEEGTWASWLYDLLKPHVSKVLVCNPRKIPLLKHGNKSDKIDACKLAERLRLNDLKPVYHGETGVRILRELARSYLTVVKDLSRVMNRLKALYRSWAIPCAGRDVYYTRHRSQWLEKIPEAGTRRRAEQLYQQLDLLHHLRQQTRRELLVESRKHTITAKLRQIPSLGPIRSALAVALIQTPHRFRSKRQLWTYSGLGLETRDSGEYHYVRGQLRRRKKQATIRGLNKDYNHDLKSLFKGAATRASVQPGPFQEFYQRSLAKGIKPTMARLTLARKIAAITLTVWKKGEDFDINKLNSQAA

SEQ ID NO: 154185 - protein, 335 aa, unidentified
MSGQYVGIDLHRRRSVVVHKNEAGEVLSVRRIDNDPVNLAAAVSDAGDAPEVILEATYGWYWAADLLDELGCNLHLAAPSSLNWGQRRVKNDERDANDLIDLFRLGRMTEAWIAPPLIRELRELVRYRAKLVQLRSGLKAQLHSVMAKNGVLPTRWDMFGPGGTAQLDALDLPVAYTTRIASLRGLVDVFDNEVSALDRQIHRELKDDPGYRAIQVIEGVGPILAAVFVAEIGDVTRFASAPALCSWAGLTPKHRESDTKVVRGKITKQGSRIVRWAAIEAISKQRGGAKLRADYHALTARRGKHKARVAVARRLLTLVYYGLRDHEIRCLNLAA

SEQ ID NO: 154186 - protein, 577 aa, unidentified
MSTAKPLDRIGVGIDTARYGHRVSFLRPDRLPAAKPLTVLENRQGYQALRERLEQLRQQHPQAHFDLRIDAAGQYAANLEHFLRGLDLPMTLSIGEPKRNKDYQKAHFPKRTTDDTESQAMARFAVVEQPGATPATTPALVLLREVVGRLQAKVKQSTQAINRLHNLLARVFPELATMTEDLAAAWVLKLLDKYPSAERIAQARLESLQKIPYVTPELAVQVQLAAQQSVGSLRGAVAEALIRDLVDQVRHCQHAEHTLRDLLGDAFAALPASAHVQVVTISGIGTATAAILVAKIGDIDRFTTPDQLVGYFGIFPEEDSSGVDKYGNPLPPGTLRMSRQGNDLVRHYLWNAARSAISCNPAVRALYRRLRAKGTRGDVALGHCMRKLLHLVFAVWKTNRPFDAKHFAWEQPSDTPRTTTTLACSDVPSASNDKAVGHKRDEPAKEEVVTTATATVNPAPATPSKRPKVDYALLRQQVTMQQVLEHLGLLGNLCGRGQQRRGPCPIHGQPNDPQRTFSAHLGRNIFQCFHAECGAHGNVLDLWMALRHLPLYEAALDLAATFGLPRSREEEPVPGTR

SEQ ID NO: 154187 - protein, 338 aa, unidentified
MEQQREYVGIDLHRRRSVIVRITESGEVLETVRVDNDPLSVVRAVMHDDPNPEVALEATYGWYWAADLLQAEGATVHLVHPLGLHWDSRRVKNDERDATELAKRLLRGDLPEAWIAPPELRELRELVRYRAKLTALRTSAKAQVHAVMAKEGVLPTYGRMFGPAGQRLLDEMPVQGVYRDRVESLRHLLEIYERELVLVESHLSRRLKGHQGFPAIQAIHGVGPIMAAIFVAEIGDASRFPSARHLCSWAGITPSHRESDVKVHRGHITRQGNNLVRWAAIEAVARYHGGAPIEATFERVAKRRGTMIARVAAARKLLSLVYYGLRDGEIRCLSREAS

SEQ ID NO: 154188 - protein, 351 aa, unidentified
MYTLGIDLHKKSSVWVLIDEHRTELWKETVPCHPEYISIAVKKIPVPPKEIQVAIEPVAGWRWVSKQLEESGMKVHIAHPRKIHLIAKSANKNDVEDSRTLANLLHSGFFPEAHRSSEEMYQLRLLLRERNFIVRQRTSVKNQLHGIATTQGLHLVKSGNPLHKKGKEGIMAGNNFVLKELHHLEEDLGKRIVPFDKKLQEEVFKYPIASILRTIPGVGIITALTVIAEVDDFTRFKSAKHLTSFAGLVPRQRSSGETVRYGAITHAGSAPLRTTLVETAMRIRESNAPELFAFVKRLTPICGAKKARVALARKLLAIMWKLATTNTAYNPKLLFSSCATKVSNLDTASGA

SEQ ID NO: 154189 - protein, 349 aa, unidentified
MKKIIIGIDISKEKIDASAIDVRNNQLGVLKLDYQAFENRPIGFRRMLVWARHLIKGVALDEVMFCCETTGGYDRCLCDYLFAKGLDIWRESSLQIKKSCGLRKGKDDKTDSLIIAEYAMRHMDKAVYYVSPSETVRELKALLLYRRKLEQEKTSKKVRVSELKATAAKSKSISFILRDAQKNIRILEKSIKDCEKQILALYDSDEELKKSYDHLTSIRGIGIVNASAMIAYTNNFKNITTSRKLSSYYGIAPFREQSGTSVNKKAMVKCYSNSMLRAYLTQAAENTIREHGIYHDYYRRLSERGKCHGIALNNVKNKLLHLSLSLIANDMDYEENHEVLRTIRKAKSA

SEQ ID NO: 154190 - protein, 395 aa, unidentified
MKHILSFDIAKGKSVYCFIDEKKNVIRDATMIEHKKDEFDALFNFASKYENLVVIMESTSIYHLPVENYFRSKAIDTIVMNPKLVKQYRDTLNKSKTDKLDCFKIARCYLGTIDNLYQKQDEYFMFNPLARQYWSLVEGQTRLKNRYKQLIEIVFPEFNLLFNDLYSDLALNFIHDFPHPVLFVNRRNDYLMNYLKTKNGTTQAFRFKNKVLKMKELAKNSLCYVSVDSLQVQNLIQVIEMIQYHKQEIKKIKNQLINNLKSTKLFKIINSIPGFGDFSTALFLAEVGDITRFNERKEFISFIGIDSVTSQSGVASYHGPISKSGSKFARTILFNVVTTLIQISAHIDKENPIYLFFRKKQSEGKHHYKCIIACETKLCKIIYKLCTSDCLYQNK

SEQ ID NO: 154191 - protein, 415 aa, unidentified
MASDWSEAVIFVGIDWAEEHHDVHVMNPDGQPLGRARVPEGIDGIARLHALVADHADDPGEVVVGIETDRGLLVTTLVAAGYQVYGINPRAVDRYRDRHAMSGAKSDGADAKVLADLVRTDRHNHRQVAGDSDLAEAIKVIARAHQNLVWARQRQVNQLRSALREYYPGALATFGTDLAHRDVVAVLVKAPTPELGRRLSTAQIAAALRRAGRVRNVDARAAAIRDGLRAPQLAAPDVVADAYGTSAKALISVIATLTAQIDELESALADRFEQHPDADILRSLPGLAVILGARVLGEFGDDPNRYADAKARKNYAGSSPITKQSGSRKLALARYVRNRRLADAITLWAFSSLQSSPGARMLYDRRRAAGDTHHKALRALSNRWVGILHGCLRHRTPYDERIAWGHLTDNLPTAA

SEQ ID NO: 154192 - protein, 348 aa, unidentified
MGKQRSKVCGIDVHKKFLVATITDRTGNKETKKFSNEIEPLLRLREWILEEHCEAIAFESTGEYWYSLHDVLNGYVEIIVANAYHIKWIPGKKTDTIDSEWIAELALNDLITSSRILPKEQREIRALSRLREKLVKERTDHKNRVHKILDSACIRLSVILSDIFGKSGLTILKGILSGVPLDDIIKKLPKRYQSRSDEIKGEIQSELSERQMIQLQTSLVMIEYLNEKIKEIEQVTLNEMRKQRRELQILMSVPGIGYIGATTLLAEIGDVRDFPSPDKLTKWAGITPRVYQSADKLHTGSITKQGSKHLRWILVEIAHACVRVKNTDSGLSLTEYLPDLVTRRQLLP

SEQ ID NO: 154193 - protein, 413 aa, unidentified
MRVHHTVCCGIDVHKKSVTACLMWGPADQEPQCEIRRFGTMTSQLKALGEWLKQAHCEMAAMESTGAYWKPVWNVLEGEVPLILANAKHVRALPGEKSDNKDGKRLASFVRHGLIRASFVPPRDIRELRDLTRYRTKLLANGSAERNRIQKVLEDANIKLGSVLSDVFGVSGQKMLHALVDKPALNVEEVAALAHWRLQPKIEQLKLALEGRITAHHRFMVDLSMGHMQYIEQQILRLDEEIARHIAPYQQQFELLQTIPGIGETASASILSEIGPDMSPFDDDGKLASWSGICPGNNESAGKKFNTNTRKGNRHFVSTMVECAWASTRKKGSHFKARYYRVRARRGSQRAILAVGHGLVRTVFVVLKTGKPYQEPIRPLLTEKQRHRKAERLSRELGQLGFAVTLKPKTAQP

SEQ ID NO: 154194 - protein, 379 aa, unidentified
MNAITLYLGLDVHKDSITIAIAQAGPKGEVRLFGTITNDMQALEKALGRIRKAHPGALLEVAYEAGPCGFVIARRLKQLKVPCLVAAPSLIPKQPGSPFKTDQRDARTIARLLRAGELTGVYVPEPTDEAIRDLCRSRSDAVDDLRRCRLRLKAFLLRHGYRYQGKANWSAPHMRYLRELVLPHPAMKAILEEYLQGIDAAHQRVLRLENSMFDLLQTWRLKPAVQALMALRGFQLVAAMITVSELGDIHRFAHPRQLMTYLGLVPTEDSSGPRQRLGHISRCGNGHQRWLLTECAEHYLLPPKVSKELACRQDGQPPEVRELSWKAQNRLHLRFNRLLARRLQRNKAKVAIARELCGFIWALLRTQKCYLLSTGGAAS

SEQ ID NO: 154195 - protein, 391 aa, unidentified
MFLLGIDIAKLNHVASCINSSTNEVIFSNFKFKNDFKGFSALLDKIKSLDVKNLIIGLESTSHYGENLINFLFKQHFKVALINPLQTSHLRKANIRDAKNDRLDSLNIARSLIFGKLNFVSEKNIDCFSLKKLTRFRSNLIKQRSKAKIQLTSLLDLLFPELQYLFKSKIHSKTIYTLLKKYPSAEEIAALKDDEISNLLYASSKGHFKREKSIELKSLAKTTVGIKDTSVSLHVIQLIELIELFDRQIKDIVTKITDTVNKLDTKLLSVPGINIIACAIILGETNNFDNFSNATKLLAFAGLDPKIRQSGNFSATSCRMSKKGSPYLRYALIFTAWNAVRYSEKFNKYYCLKRSQSKSHYNALGHVAHKLVRVIFTLIKKDISYQEEKLE

SEQ ID NO: 154196 - protein, 349 aa, unidentified
MKDFFVGADISFKSIDICVIGQASVNDNEKKTVFERKIDNKLNGFRKIIKDLEKLNAKHGGDCTFYLAMEATGTYHMKFVKTLFDEASGLVIPYVVNPLQIKATGEAIKAKNKTDKQDALKIASYIRMAYTQGNVYPWKPLPPEMEELKQLAHLYEDTRDLIRAEKNRIHAIEQSPSMSKPTAQIRLDHIKYLEEQLEDIKKRMEEYIQKHDDIKKQAELLRTIPGIGKISSAMILCEIGDIRRYRDKKAFTVSSGLTPSDCQSGTSINKPAHITKKGSKRIRRCTYMPAMVALRWNPIIKEFYTRLRNKGKCGKSALIAAMKKLLEIIYGILTTEQPFNPNYEAERAA

SEQ ID NO: 154197 - protein, 362 aa, unidentified
MPSWSFSNDREGFSHFKALLDSLEGEKKIGLESTGHYGQNLKQFLESNGFTFMEFNPLLVSRFVRSKSLRNTKTDSIDALSIAQYVMTVEYKPYPSSFYHLDKLKSLTRFRNSLVRQRSRQLVELTNVLDKLFPEFKPFFKDKFSVTALYILAHYQTPERIANMNARSYEALRKLSRGRFTLSNFTQLKALAKNTVGTQSDYLLDQMNILLELYSQLDSKVDELDAQIKECVRGIDPPCLSIPGVGELSAAMILSEFGDFSKFQNPSKMLAFAGLEPGFFQSGQSEYTGHMVKHGSSRLRYALMNCCLPLISNEPVFAAYYAKKRSEGKPHRVALTHVAKKLLRVIYTLQTKNIRYDPTMIH

SEQ ID NO: 154198 - protein, 299 aa, unidentified
MVEVYAGLDVSDKSTHVCIVDIQGVVLWAGACATDPEVIARTLKTRAPGLARVILETGALSSFLYHGLTEREVPVTCVCARHAKGVLSARVNKSDPHDAEGLAQMARTGWFKAVRIKDEATHMDRARLKIREQLILSRQAMGGQLRGLLKLFGLRLGKVTTPGKRRERLEALFAQKPELEPILKPLIESLEAIETQVGRSSRQLAAQAAADPVARRLMTAPGVGPVTALVFKSSIEDPARFTRGEDAGAFAGLAPRRNQSGERDIKGRISKAGDPMLRAALYEAANVLLVRVKRSCELR

SEQ ID NO: 154199 - protein, 391 aa, unidentified
MTKPKTKTVNDFSRCLDPLDMDATLIAVIEMSQSSWLVAGIVPGVERQPLKKLAIDEHALLGLLNRWRAEAEKNGHRVTRIAVAFEAGHDGFWLARWLAAQGVEAHVIHASSVAVTREHRRAKTDRLDTELLKRGFLGWLRGERGHCKMVAVPTLSEEDAKRPSRERETLVGEASRIITRIKSAFVRLGIRSFNPKLKAAAARLETLRTPEGEPIPPNTLAALKRDLERHRIVKKQIRELEQTRLENLAQAPATGPNVMVLLLARVIGIGVETADMLVREVLSRTMRDRRAVARYAGLTGSPDESGAKRREKGLARSGNARVRHGMIQLAWRFLLFQKDSALAQWYRQRTANAPSTRKPLIVALARKLLIGLWRFARDGVVPEGVRLRPAA

SEQ ID NO: 154200 - protein, 400 aa, unidentified
MLSIGIDVSKGKSTVCGMKPGGEIVYTPFEIQHTREGMSELVSLLHNSGEEVRAVLESTGSYHCPVVAALLENGIFVSVVNSLRMKRFCSQSIRKVKTDRIDAMQIALYGLAYWQELQPTKLPEDTYRELQLLARQYYQMTSILIKAKVDFNALCDQVLPGMQELMSDHAGRHKLSDFVLRYRHTTHILEMGETRFRKDYCKWAEKKGYRNCERMAVLIFATAQNGIPVLPNAPSTQIVITEAIRVLHTVEASRDAILTQMQALAKTLPEYSLVREMPCIGDTLAPRLIAEIGDVRRFHSKRALIAYAGIDAPPYQSGKFCANNRHISKRGNRYLRKTGYEVMQSYVMHKPANDPIFTFIEKKRGEGKSGKLAMVAGLNKFLRIYYGKVTELYRSLPAIE

SEQ ID NO: 154201 - protein, 419 aa, unidentified
MEMRAHDATLVACVGLDWGDTRHAVQLQRVDGGPIEQLDLEQKPDVLHAWVAQLRQRFPEGRVGIAVEQRRGAVVHALMAYDCLVLYPINPKALARYREAFRTSGAKDDPTDAALLLDLLRKHRDQLRAWQPDTVEARRLQLLCEQRRKLVHQRVALTNRITSLLKQYFPQALDWLGDVASRQGCDFLQQWPTLAAVQRVRPVTLRKFYQRHNCRTATVIDARLAQIAQAVPLTRDPAILEPLSLAVQTYATQLRALILAIQTFDTRIAEAFAAHPDHDIFASFPGAGPVCAPRLAAAFGTDRARWDAATDVQAHAGIAPVTERSGKALWVHHRLACPKFVKQTFHEFADQSIRFSTWARAYYDQQRRRGNDHHAALRALAYKWIRILFRCWKDRKPYDEATYAAALRRHGSALVEKKA

SEQ ID NO: 154202 - protein, 382 aa, unidentified
MKKRIGKAIKEERLTIGVDLGDRNSHFCVLGSDAEIVLEGSIRTTPSSFEKHFGKFASSLIAMEVSTHSRWASQLLVRLGHDVVVANATKIHLITKSSRKNDRVDARTLARLARADRQLLHPIQHRSDEAQQVLALLRARESLIAVRTKMINCVRGLVKPMGARIPRCDAEVFVERVEPSLPAGLHGALLPLVEQIKGITATIQEYDQRIRVLASEQYPESRLLRQVPGVGALTALAFMMTLGDKNRFERSRHVGAYLGLTPKQHQSGQSDPELGVSKEGNKYLRKLLIQCAHSILNRAPDSDLKRWGCALMERGGKRGRKRAVTAVARKLAVLLHRLWITGEVYERVRQQKGPQSIMSPAARPAEQTTAVLVSRALEAVPA

SEQ ID NO: 154203 - protein, 347 aa, unidentified
MTHYIGCDVHKKYSVFAAMDEGGNVGRPRRVEHDLEGFRSFLAELPAGSPIAVETTGNWYWVIDEMERAGHLPELAHAVKSKLMMGQINKTDKLDARGLATMLRNGTLPSVWIPRGELRDQRELPRMRLVLVHMRTALKNRIHATFAKYAINFGSESDLFGSRGLAAISRRLPELPRETRRSVEQELELLDDLARQIDQAEQRIREVIRATPEMELLMSLPGIGPVLGITIALEVGDVGRFPDCQHLASYSGTVPRVNSSGGKTHYGRTRPDVNHYLKRAFVEAANVVVINQARWSSRHVVKLYQRVYASKGHGKAVVAVARHLAESTYWVLKKKEPYREPVSTKQG

SEQ ID NO: 154204 - protein, 375 aa, unidentified
MKEKVRFFGLDVHAETIAVAVAEQDGEVRSLGTIANREESIRKLVKKLGPVEQLRACYEAGPTGYVLYWQLTQLGVECAVVAPTLVPVKAGDRVKTDRRDAEKLARSHRSDDLTAVWVPDEGSEALRDLVRAREAAKQDQLRARHRLSKFLLRTGRRPAMGLKAWTERYLAWVQQIQFSQPAQEFTLLDYLHEVQHMDERVKRLEQAITEAVKLAPLQVQEVIRGLQALRGVAHLSAVTIAAELGNLSRFESARKLMGYSGAVPSEDSSGQRQRRGNITKTGNAHLRRIAIESAWSYRFRPAIGPRLRQRQEGVPEEIKEIAWKAQIRLHKRYLKLTAAGKDKKKIITAVGRELLGFVWAIGIKAETAGKLQMAA

SEQ ID NO: 154205 - protein, 370 aa, unidentified
MLDTTTFVGLDVHARSIKAVSLDVMTGEVRCATFGYDAGAVAGWVRSVDPKAKCVYESGVTGFDLQKRLSGLGVDCVVGAVSKMIKPSADRRRKNDRNDAEFLARMLSVGNVVEVWVPDDECEAARDLTRALEDARDDLSRSKQRLSKFLLRHGLVFDERTPTGRRKGNWTRAHWSWIESIRFAERADEEVLAYYVDAVRRAAEEKARLEGLVEAEARKPRWRRRVDSLRCLKGVDTASAADLVFEAGEFSRFRNARSFAAWVGLTPSEHSSGESDRRGAITKAGNKHLRKTLVEAAWHYLTCSGRPKDLARGQAPDRGARRHAAKGVRRLVERREALLARGVHGNKANVATARELACWAWAVGLMAEEA

SEQ ID NO: 154206 - protein, 422 aa, unidentified
MKVVYNTCCGVDVHKKFLVATIIKTTDGIQPSYQKQRFSTFNSDIRRFKQWLLDNNCLDVCMESTGKYWVPVFNLLEDCINVTIANPKWVKAVKGNKDDTKDSKWIGDLFRLGLVHGSFIPSKEIRILREYTRYRFKLTSCKRSEKNRFQNAFTVCNVALDAVVSDMFGKSASSITDYLIHSDSFDPDTCKSFLQKSLKKKGNQIIESIEGYQMTDSQKERMGIIRDHLDFVNQMIEKLDTKLDELVAPYENAITLLCTNPGIDRHSAITILSEIGTDMKQFNSSKRLCCWAGLTPGNNESAGKKKSVRITRAGVYLKPALVQCAHAAVRSKTNPYYKNKYERIAKRRGKKRAIIAIARMILTAVYHMLSTGETWNPCDLYKVDMPPEMQEKEKQKQKAIKQAYRFLISVGELSADSLVQQT

SEQ ID NO: 154207 - protein, 359 aa, unidentified
MQTQNTKQAIDFAGQNIYVGIDTHYKTWMVSIYSDEFELKTFGQEPDVDRLENYLHKHYPNANLKLAYESGFCGFWIQRCFAKKGIHCDVAHAADVPGSNKELIRKTDKVDSRKIAKGLRKNELNCIFIPDEQLESDRQLLRSRATIVKDTTSVKNRIKAFLKFKGINIPGDYKSNKWSKKFISWLQSIELGSISGKAAFDSYLDELIFLLEKQKQLNKAIEALAKNDNYSADIHLLRTVPAIGLLSGMTVLTELGNIDRFQKQDHLYSYCGLTPDCHSTGDTERIGKVSRRGNIFVKTVLIECAWVAVRKDPALLLYYKQQLPKMDRNKAIIKVARKLLNRIRYVLKNKMEYQIGIVE

SEQ ID NO: 154208 - protein, 360 aa, unidentified
MRRQSNRLDFKGQNIYVGIDVHLKSWSVAVLSESSVLKKFRQNPEPEALYKFLVSNYPGAMYHSVYEAGFCGFWIHKRLMELGINNIVVNPADVPTMLKEKLRKTDAVDCSKLARGLRSGDLRGIYVPNAETLELRSLIRLRNTIVKDSTREKNRIKSLLRFHGINIPEQFIRHSIGNWSKRFLQWLGEVKLSTEYGRKALDLHIEQFTRLREMLLQETRVIRNLSRSESFANPLRLIMSVPGIGITTGISFLVEIDDISRFKNAYHLASFIGLIPMCHSSGEKEGVGDITIRKHAALRCNIVEAAWIAIRKDPAMTMAYEQYRKRMNANKAIIKIARKLVNRIFFVLKRRKEYVPCVVR

SEQ ID NO: 154209 - protein, 403 aa, unidentified
MMKANQHTSAPKKANPVQKIQNGADFSNRQLYVGIDVHKKRWQVAVFYEGLVLSNTSIEGNSEALIIHLRKRYGDARFHCVYESGPFGFALCRSLWSAGMECIVVNPADIPSADKDRRSKTDPVDARKLAQHLAAGLLHPIHVPTEKQQKQRSLIRFRKKLWGDLVRCKNRLKSELHFQGMVIPQKYDNAHWSHNFLHWIEEQAMADEDLKDTLLLMLEEVKALRLLLLKTERKLRELMWSEQFREQSEVLRSIPGVGPLTAMLFLLEVGDMSRFKTFDQLNRFIGFCPDSHSSGASIKHTGISMRKHSQLRSMLVEAAWQLIRRDAAMLDCYKALTRRMKGQDAIIRIARKLLRRMRAVLLSGRMYVLGVDGDCCAVAIDAPLPAEPKRKGRPKLVVAQLQQ

SEQ ID NO: 154210 - protein, 414 aa, unidentified
MNFVGIDVAKSFHIVSVIDENEIRVINKAFRIENTTTGFSKLKSVLESISLDKEMFVVGLEATGIYGENLLEFLKSIGYNIKLLNPFQTSRYREQRTMKKVKNDNIDSLIIAYLLNDGKYSSGYVTDDEYQSLRTLYRNRASIQSDMKEVKKRILTQITVTFPEFEGFINPFSVSGLALLEKYPTAQHYKHSSIDRIMKLFRHIQGNNFNESKALKLLALSRESIYSGKAKDARAITIRSSIRLLKMYLSELDIIEAEVLSLLDDKATTVTVDEIGQKIQKNDTLIANLKTIPGVADKTIAAVLSECGDLTRFPSIPKFIGYLGLFPTENSSGKSKSVGHLSKRGSSLVKHALYMSATSSLIHNPQMKQLYDTKRSQGKSKKEAIVAVSRKLATIIYSIFKYNTPYNPNRVFTN

SEQ ID NO: 154211 - protein, 336 aa, unidentified
MHKIIGIDLAKNIFFLFEINHKGKNLSRKKLQRSKLLNYVENQTPCIIAMEACSGAHYWAREYEKFGHDVLLYPPQHVKNQRRKQKNDYNDAEAIAELALYQRAHPVPHKSIEQQDIQSLIRMRRLCVTERTRLINQVRGLIAEYGIIVPKGKASFRQAIPEILEEVENQLSPILRELLSRQYERSLYIDEQIQWFEEKLSQTVKQFDNAKRLMSIPGFGPLTSQAVAVWLGTGQQFKTGRDASAAMGLIPKQDTTGGNVILLGISKRGYTYIRSLLVHGARAALRRAKFKSDKLSKWMLELQERRGANRAAVALANKLMRIAWAVIAKNEEYQPV

SEQ ID NO: 154212 - protein, 380 aa, unidentified
MASMHDSVRFKTTVYAAIELSKKSWVVAIARPDRDRPSIHRIAGGNLADLIGRLRKAAGEKQRIVVCYEAGYDGFWLARSLAKIGIDCRVLDPASIQVNRRARRVKTDRIDSLALLRALIAIDRGERHVCAVVRVPTVEEEDARRSHRERQRLVRERTGHINRIKGLLFAQGIRGIEPKWRRTRIDFGKLTTAEGRPLGERLRRELEREYQRLELVQSQLRIVEKERDTADAQDPAVERKRELLCALQGVGGASAAILAREVFARPFASRRQLGSYLGLTPSAYDSGSTTRCQGISKAGNSWARRVLIEVAWLWRKYQPGSPLSHWYARKTADQSPRIRRIMLIALARKLAISLWRYVETGLVPDGAVMAKTTPHMAAAT

SEQ ID NO: 154213 - protein, 355 aa, unidentified
MTSVKYIGMDVHTESTSIAVRNSLGKIVMEGVIETRANTILQFLDGLRGDLRVVFEEGTWATWLYDLLKSHVTEVLVCNTRKNAVRKGSKSDRIDARKLAEQLYMNNVKSVYHGERGLRMMKELARSYLTITKDLVRVMNRLKALYRSWGIPCAGTEVYALRYRAEWLAKISEAGVRRRAEHYYQQLDALWPLRQEARRDLLIESRKHKIWKLLRRIPAIGPIRAAILIAVMQTPHRFRTKRHLWTYSGLGLETYDSAEYRSVRGQLERSRKQATVRGLNKDYNHDLKDIFKGAAMRASTAAGPLRDFYDNLLAKGRKPTMARLTLARKIAAITLIVWKKEVRFDANYLKPQQAA

SEQ ID NO: 154214 - protein, 320 aa, unidentified
MNGKSPGTLARFIGIDLHKHYLVVGGVNAGQEVVLPPRRVNLGSWLKWAEANLMPTDAVVLEATTNAWEIYDQVAPLVGRAVVANPVQVKWIASARVKTDRVDVGRLACLLAAGLVPEVWVPPVEVRELRSLLAHRRRLVKMQAMIRNRLHSMVHRHNLTLPKGEAFSREHRGWWLGLEISRTENLRIRQDLATMDHLEPQIAEIDSELHRLSTCAPWADQVPYLLQLPGFGLITTMTLLAAIGDITRFESARKLVGYSGLGATLGTGGSRMGRRDHTCPLETRIRAALSSHEPKESDRRSCAQVAGGCVARAGEAHGGH

SEQ ID NO: 154215 - protein, 342 aa, unidentified
MKIIGCDFHPSFQQIAMVDSDTGEYTERKLTPEEARQFYAELKKPVLVGMEACGNTLWFERWLASLGIELWLGDAGKIRAMEVRKQKTDRRDAQLLLQLLLEDRFPRAWVPSPEQRDTRQLVLHRHKLVQMRRQVKNELQHLALNQGVQQKRKLWSVAGRQRLEALPLAGWTARRRQDEMELLDDLNRRIAELDQAGKQEAERDAVARLLLTHPGVGPITALAFSLTLGEIERFACSRQVVSYLGLNPAEHSSGGRQHLGAISKQGNPMLRSLLVEAGQSAARSVPELKRAYQRLKHRKHSGVGKVMGARKLAVRLYWMWKTQQPYTAARTQGSPSHSLVAG

SEQ ID NO: 154216 - protein, 344 aa, unidentified
MTNYAALDVSLEATAVCVIDEDGRILIEKKIPTCPDAIASWLTKTVPDLVRVGMETGPLAVWLWNELHDKGLPIVCMDARHANAALKVRPNKTDRNDAAGLAQIVRTGWFKQVRIKSRVGYELRSLLAAREVLVRSRVKIENETRGLLRTFGVLFGKSVGGFSRRVDEIIADELDASPAIRDVIIALAKARAALLDRIKDLDRRVLASAKAHSTARLFMSAPGIGPITALSVASAFDDASRFKRSSSAGAYLGLTPRRYESGEVSRNGRISKHGNKMTRKHLYEAATTLLTRNIGFSTLKAWGLRLAKKVGFKKARVAVARKLAVILHAMWKTNTAFRWSANAA

SEQ ID NO: 154217 - protein, 307 aa, unidentified
MTHDIIGVDIAKDWIDIHRLSNGQSKRIAATRSALARFAAQSTGSLVVLEASGGYERPLTEALNAAGCLFSRVNPRQAREFARATGRLAKTDRVDAAMLAEMGRALRLKPSPPRAPERVRLADLMARRDDLSDMRRREANRIKQARDAWIKKDIKTVLRALDRRLVRVEAEINAQIEADETLAGAAARLQSMPGIGPILAASLVARLPELGRLDRRAIASLAGLAPHACDSGVFRGKRRVWGGRAEVRRCLYLAGFIASRYDPRLRAFRTRLEAAGKPPKVAIVAVARKLLTILNAMFRDGNEYKSA

SEQ ID NO: 154218 - protein, 483 aa, unidentified
MKSKPEEQNKRATNHPTQHHWHEMNRKQRREMMRKMQNEDLSLEVIHPDAGGIDIGNESHYVAVPPSRDSQSAREFGCTTAELKAMAVWLKQCRIRTVAMQSTGVYWVAVYDILEQAGLEVYLVNARDTKNLPGRKSDVQESQWLMKLHTYGLLRNSFRPSPEIRVMRTHWRQRNDLVQSAGRHIQRMQKALTQMNLQLANVLTDISGATGQAIIKAILAGERDSHKLAQFRDPRVKASEEQIAQSLEGNWQEDLLFVLKQEHEGYEFCHKQMAECDRQLKQYLQQREDRSQGAPLPEEKRKGRLKKKRANKPQFDLREGLFRMTGTDLTRIDGIDVMTAMTIISEAGWDMSKWPDEDHFVSWLRLCPDNRISGNKVIGKGRLPTNNPISIALKMAASTLRQSKTYLGAQFRRFRTRLGAPIAIKAMAAKLARLVYRMLRYGMKYVDQGAAFYELRHRELQIKRLKAKAEKLGYRVTPIPAAA

SEQ ID NO: 154219 - protein, 369 aa, unidentified
MEKGTTYVALDDSKRKIVAGILRPSDAQPELREIANDPRQIRRLFERLKREGPVAACYEAGVSGYDLHRQITALGVACAVIAPALTPRRSGQRIKTDRRDAAKLVRLFRAGELTAIHVLDESEEAVRDLVRCRDDLRRDVLRWRHRVLKLLTRHGRAYLIGKNWSQAHWRWIREQRFDLPPLQRAFEATVFALEQALARQAELDKELEAVAVTAPYHEPVGWLRCFRGIDTLSAIILLAEVVDFQRFRRPRELMAYLGLVPSEYSSGETQRRGALTKAGNSHARRVLVEAAWHYRHRPTIGRALASRSQGQPDEIVGQAWRAQQRLHRRYRHLVGHGKRTPVAVAAVARELVGFIWAAMTWHESRRAAA

SEQ ID NO: 154220 - protein, 344 aa, unidentified
MKITTIGLDLAKSIFQVHGVDATGQVVVRKSLRRSQMLPFFAKLPPCLVGIEACGTSHHWARELLKLGHEVRLMPPAYVKPYVKRGKTDAADAEAVCEAVTRPTMRFVPVKSPEQQAALSMHRTRDLLVKQRTQLINMIRGLLAEFGIDIPKGLERALLMARQIIDGKAPEVPFEAAKIVSTLSQQVLDTHVRLREIDRDLAIWLRSNDVARRLMTIPGIGPIGASALAASVTDPHQFRSGRQFAAWLGLTPLQKSSGGKERLGRISKMGDKYLRKLLIVGMTSLVRRAKYNPGKIDPRLADLLARKPTRVATVAMANKTARVIWAIMARGETYRAGHRPALSA

SEQ ID NO: 154221 - protein, 332 aa, unidentified
MSQSAAPNHIGIDISKDYFDVALTLDSQPYQGRFENNRSGFRTFRKWLKKRGVKEASICMEATGRYGEELAQFLYQQGYQVSLVNPKRIRAYRESQLLRNKTDEIDARVIEDFCRTQKVRLWQPPAPEVVALRDMERRLDTLKEMRTMELNRLQAGQLTTLVAETIRDHITFIDVEIAQLEEAMQKHIDGHPGLKKDADILTSIQGIGLKTAAVLMGEVKDIHRFEKAKELSAYLGVSPYVVRSGTSVRSRGGISKVGNARLRKALYFPTLTAMRYNPVIKAFSERLLAKGKPKKVVILASMRKLIHIIFGVWKSGQPFDPLYEQSRRQTLT

SEQ ID NO: 154222 - protein, 339 aa, unidentified
MAQTYCGLDVSDKTTHICVVDGEGKVIWRGVCATDPQALATTIAKRFPGVVRVVLETGALSAFLYHGLIERNVPAVCICARHAKGVLSTRVNKSDAHDAEGLAQLARTGWYKAVHIKDSATHMDRTQLKVREQLIKAHHAMANQLRGLLKLFGLRMGKATTPGKRAERLDALFEQRPELRPLLTPLIDGLAGLEVQIRASSREIKARAAADPICSRLMSTPGVGPITALSFKSSIEDPARFGRGEDVGAYAGLVPRRSQSGERDVNGRISKAGDPMLRSALYEAANNLLSRVKRSCALQTWGKALAAAKGGKRARVAVARKLASLLHKLWRTETRFEWA

SEQ ID NO: 154223 - protein, 397 aa, unidentified
MPGCNVGIDVSKDSSTAHGIDGKGKKLFSIEFTMNADGFSKLLSAIRAHCEDLSMVRAAMESTGCYHTNLLCFLSEEAIQCFVINPLLIANFAKLSLRKTKTDKKDAIVIAQFLLLHKDALAKANPSQSLQDLKDLAREKESLTVLITALKNDIKRMLQITFPELESLCNVFSETMRDFLKQFPSARMIRTAKPHAVARALTHADGRKTPSFYPEELIAVARKSVASDSVAKELILAEKLTTLEHLMKQKDRIANALVEACESMMIEDVAIITSIGGIGNTTASAFLAEVGDYRVFPSHKHLIAFAGLDPSIHQSGKFEGKSRISKRGNRYLRHIVYLMTSCVVRQDNAFRAYYRRRRMEGLPYKKAILATAHKLVRVIFTMLSNKTAYQERVIQNS

SEQ ID NO: 154224 - protein, 383 aa, unidentified
MKAVCGLDVHKDSIYLCILHPDGELFEQVFGVLTFQLHEMCKLLKKHHVSEVSMESTSIYWIPIWRVLSPHFTLRLVNPYFIKQLPGHKSDVKDAQWIAECTMKELVNGSFVPPEIILQLRQYDRRIFDLNEEIVRKESKVDAVLQRCNIRLSNYVSNIECKSYRTVVRRLSEGVTDPQELIKEIHGRIINKHGRETKLASMEGVVSQAEIDVLRQLREEIDIAESHKKECQDKMSEICQKYFPEELRRLQTIPGIKERAATSLIAEIGTDMSKFETANHLAAWSGLRPRNDESNKKVKSRKTTHGNSYLRRTIIQCAWAASRQKDCFFSWFSYHQTVVRRKNKMKVIVAVARKMLVAVWHVLHDNVEYFDFKHDCEESANNG

SEQ ID NO: 154225 - protein, 340 aa, unidentified
MIAAGATLELHDAIEAVRRRFGLPSNSAVISCYEAGRDGFWLHRYLDSCGIANVVVDSSSIEVSRRKRRAKTDRLDAGSLVRMLMRFCAGERRLWSVVRVPSVEQEDARHLHRELESLRDERTMHRNRMRSLLKLHGIELGNPSRKDFVTYIERVRLWDGTVVPGELRARLIREHERLRCVEGQIRTVEKEQRERVRRADTDSDRRVAQLMSLCGIGITSGWIFEKEFFGWRSFGNRREVGACAGLTPTPYNSGESRREQGISKAGNKRIRKLIVEISWCWLRYQPNSELSRWFNQRFAHGGKRMRRIGIVAVARKLLIALWRFRTHGLIPEGARLKAIA

SEQ ID NO: 154226 - protein, 341 aa, unidentified
MNYKFIAGIDQSKLTFDVCLIRTADGQKSGEKKFENTKKGLKQMFSWFKSFKIKPCELLLCTEHTGLYSYPLCVFCQENNLALWLESALQIKQSMGMQRGKNDRVDAMRIAQYAAAHLNGVKLFSLPGKALLGLKQLLAYRERLVRAKQSFHTAEKEMREFNADFSGHIGKETKGLLKTIDSKIEKTNAKMLEIIASDEQLKKQYQLVLSVPGVGPITATYLLVYTAAFTRFKTSRQFACFSGIAPFEYSSGTSIRGKTRVSHLANKTLKTVLNLCAVSMLRKGNEYFGYYERRVAEGKNKMSVINVIRNKIVSRVFAVIERGTAYLSQEEYKKITRVEMA

SEQ ID NO: 154227 - protein, 356 aa, unidentified
MSMLADLIDAVVGGDTHRDTHALEIATPAGAVIATSSISNDEDGFAQAVAWIVEHAPGPRIVIGLEGTRSYGIGLARALAAAGLNVVEVVRPRRGQGGERRRGKSDPIDAHLAVLAVLRMDPDRLPVPRADGNREALRILLGARRELTLTKTRQTNRLRALLLAGDDTDRGLARGRLSDTRLAAISRRRARAGESTEQAIRRGEARRLAEGIRHATRDLAANKKQLADLVAVHAPHLLDMTGVGPVSAAQALVSWSHHGRCRNDAAFAALAGVCPIPASSGRTTRHRLNRGGDRQLNRALHDIILTRSRICPRTQAYIAQRRRQGKTDREIRRCLKRHIARELFRTLQTTTPATTT

SEQ ID NO: 154228 - protein, 371 aa, unidentified
MEHTRFVGLDIHKERISIAVAESGRSGAVEYLGEISNDPIAIGKLCDRLGRSGKTLAFCYEAGPCGYGVHRQLTSLGHRCDVVAPSLIPHKPGDRVKTDRRDATMLARLHRAGELTPVWVPDADHEAMRDLIRLRGVVRQIVTRARQHLQGFLLRHGRKHGRGTAWRMAYRRWLSTLAFKHPAQQIAFQDYVDAVMDAERRLKRVEEQISGLLPEWNLRPVVDALQAMRGIALINAVVLVAEVGDFTRFTNPRQLMAYFGLVPGEQSSGETIRRGGITKTGNAHARRALVEGAWAYRMKARIGRHKVDRIEALPKIIRDIGWKAQVRLCTRYRRLRARGKTANVVNVAIAREMVGFIWSIACTIQSAPKTA

SEQ ID NO: 154229 - protein, 362 aa, unidentified
MQIARIGLDLAKYVFEIHGVDAHGKAVLRKTLRRHAVPAFFANLPPCLVGMEASNGAHFWAKALSELGHDVRLISPQFVAPYVKSNKNDRNDAEAICEAVSRPSMRFVPVKSAEQLAVQAVHRIRSRLVADRVRLVNQVRGLLGEHGIVVAKDIGNLRRALARIAGDDEDCALNPLVRSLMRELREELTELDARIAGCDRKIRELYRNSEICQRLGKVEGIGPVTATALVAAVGDRSSFKNGRQFAAWLGLVPKQRSERWPRPIIRHQQARRSLSAHFADPRRSRRTRTGSRQAGSTKPVARQDAAAATPQHCRCRAREQECPDRLEPARQRYRLRSQSFSLCSLKNPKKGKFRPKGSIGLA

SEQ ID NO: 154230 - protein, 303 aa, unidentified
MISCSYIGIDVSKAQLDLADATSSRCLPNTKSGVAALLKTLPPRAHLVLEATGGYERPLVAAAHSAGIAISVLNPARVRHFARASGRLAKTDPIDAALLRDFGQALQPSAEPTPHPARAQLAQLVHARQQLIDLRTQLSNALEHLSLPLLRQSFASQIRSLNTRIARIEAAIEHTIADCSELASRASALCSHRGVGLQTTAVLLAYLPELGQANRAQIAALAGLAPFNRDSGQSQGPRFTNGGRPQVRRALYLAALTTIRSKNSKVGAFYHLLRSKAKPAKVALIAAARKLLCHLNSSLKSLH

SEQ ID NO: 154231 - protein, 367 aa, unidentified
MKKVSIVAAQRSTKISRQKLTVGLDLGDRSSWYCVLDETGQTVLEQKLSTTPKAMQEVFGAMPRSRIALETGMHSPWISRLLTELGHEVIVAHARNVRLIGESRKKDDRMDAQTLARLARIDPQLLSPVKHRSAKAQADLTVIRARAGLVRARTALVNTARGLAKSYGERLRGCNVRNMNPEKAEGLSPELQRALEPLLAALESLSERIREYNERIETLAQQSYPQTALLKQIKGVGTLIAVTYMLTLEDPHRFGKSRDVGCYLGLQPGRRNSGQSQPQMHIRKEGDPYLRTLLVQGAQHILGPFGVDCDLRRWGLKLAERGGKSGKKRAIVATARKLAVLLHHLWVSGEAYEPLYNSHHKSVGIAA

SEQ ID NO: 154232 - protein, 433 aa, unidentified
MTNRLQVGIDFSQKQADFCLLFPDGQLLEAHRAFANSCSGYSAAKQLLLDTLDTYDFTGVDISGEATGYLWLPFFLQLSTDPDLRLRDMDLFLLNPRWVKWFKKCFADDDKCDEKDAYYIAKRTQTNRPDVVWSPPKCLPLRFYTRLRFHLVQNLAREKCYFSAFLFLRASAYRCLKPFSDVFGVTSRLVLTQQPTWDELADLPVTDLAAHLYELSGHHLPEPHRNARCLQRVAAESFPLDDTLTLPVQRILDITLAHVRFLEGQIAQVEDWIADELHAHPVITQLATIPGVGPVFSSGIGAEIGGVERFLQAQKWDKQRKRYRPRNLRDAEDAVAKIAGLWWPRTESGEFAAQDRRLAKSGNRYLRYYLIQAADKMRLHCPEYAAYYARKFKESSKHHHKRALVMTARKSVGLIVGLLHRDEPYRSPEERGT

SEQ ID NO: 154233 - protein, 466 aa, unidentified
MNYRRLVGIDLGIATAHTVRVLDGEGAIVARRRAWPALGSLAAVEAAALAGCPDGTRLEVVIEPAGPAWLPIAVFFSARGHTVFRVSSPRAAGLRRFLSRHAKSNGIDADTLARLPLFDPAGLAPLVLPGAERAALDRRVRATDRRTRHGAEHKKRIKDRARQLLPLSPLSRDLGAADLAVLERYADPRVLTRAGQDELAAVIAQAPNNHLGAERAGQGLEAARASLELYSSHPAVDFAGLAAEIRLLRAISAELSAHAAERESRYRQVDPAGLARSLPGPAEVGGPALVACMGDPARFAAGKKFRSFTGLAPRASETGQTDRKGQPMSKAGSSLLRTTLVRAADTARKQDPQLARTYYQQMTERGKDHPGALCVVAASPAERAWTVMRRGTPYVICDTDGRPVTPAQAKAIITERWTVPPQIRARRRTKKTGKAPQKAPEGQCARGSLPLHATPPRHKRPVKPSP

SEQ ID NO: 154234 - protein, 372 aa, unidentified
MHHATKYVGLDVSKDKIAVAIAEEGREAARYWGAVPHTLEAVRKLVKQLAGAGVTLQMCYEAGPTGYELYRWFLSMEVHCVVVAPSLIPKSSGDRIKTDRRDAVRLAQLFRASELTAIYVPTPEDEALRDLVRAREDAKEDLNRHKQRLGKFLLRHQVTPPQGVKPGSTKYEEWLNALRFEIESLSITFQEYRQSIFEATERIARYEKEIERQVSRDRYAPIVQALQSLRGIALITAATIASEIGTIARFAHPSQFMSYCGLVPRESSSGGSRWQGGITKTGNAHLRRIVVEAAWSYRYVPAVRRAMKKRLEGLSPTIQSISWKAQTRLHKKYKSLLFRGKHKGVITAAIARELLGFIWAVAREVEGVATAK

SEQ ID NO: 154235 - protein, 417 aa, unidentified
MIISKTENGHNVNGQEMLVGIDVAKQTHVARILLTDGRESKAFSFHNTREGFESLMSWLMLNKMRFGCISILAGLESTGHYWEALAFFLDGENDIRLVQVNPKYVKKTKELYDNSPGKTDSKDAGVIAMLIRMGKFQRLVLPKGHFAELRCYSKLREQKVVGLGVQRNILHSLVDPIFPEYGGIFKKLESKTSLHILKNFTTPDGILIAGIKKLTFSLRTASHGRHSHACAERLYSAASTTIGVREGIEAAAYAVRSSIAAIENIQKDISVIEKELLRVLQKIPYAGQLLSIPGIGPVSLAIILGEAGDLHRYKKAEELIKLAGLNLFEISSGKHHGQRHITKRGRPLLRKCLFFAALRTVKTGGTFREDYLRHTKTNQMHKTKALVAISRKLLRVLFALVRDGVQYNQKKMELLAA

SEQ ID NO: 154236 - protein, 343 aa, unidentified
MGEVSTIGLDIAKSVFQVHGADGTGAVVMRKRVSRSKVLEFFAGLSPCLVGIEACPSAHYWSRELQALGHTVKLMPPSYVKAYLKRSKNDANDAAAICEAVTRPSMRFVPIKTQEQQTGLMLHRTRQLLVRQRTMLSNAIRGHMAELGIISAKGRNGTAELLQIVGDVADDRIPPVARFCLDLLARQYLTLNAEVYAVDKRIHAWHRACEESRRLEEIPGVGPIVATALVAEIGDWRAFRSGRSLAAWIGLVPKQHSTGGKERLGSITKQGNRYLRWLLVTGAMAVIRYARAHGTKRPWLTRIMDRRPAKVAAVALANKIARMAWAIMVRAERYKEPKLLLAA

SEQ ID NO: 154237 - protein, 420 aa, unidentified
MEEVTEEPAELVERVAALDIGKASLVCCVRVPHESRPGARRQEVRTYDTVTPALLELRDWLICQGVTRVVMEATSAYWKPPFYLLEDDIECWVVNARDVKNVPGRPKTDKIDSIWLCKLAERGMLRASFIPARPQRQLRDLTRYRRTLTQERSREKQRAEKLLEDAQVKLSSVISDIFGVSGRDMLAALIAGQRDPYALAGLARKQMRAKTGVLRQAVTGHFTEHHAFLLAMMLDRVDALTAQIDTLTARIEEAIAPLAAQVAQLDEIPGIGVTTAQEIIAEIGTDMTRFPTPGHLVSWAKFAPKARQSAGRSKAATTGKGNPWLGGTIGEAAAAAARTSTFLAGRYKRIVKRRGKKRALVAVGNSILTICWHLLSDPGAHFTDLGPDWHDRLAPQRRKHQLIAELERLSGKKVTLHDAA

SEQ ID NO: 154238 - protein, 343 aa, unidentified
MNETTTIAVDLAKNVFEVLSADANRRILERRRLTRGKFLEFLARHEPVEVVMEACGSAHFWGRTARSFGHQPILLPPAQVKPYVLRNKTDRTDTTGLLEARHRPDIREIPVKTEHQQTLMALHRLRQGWVATRTSRISAVRGILREFGIVVPQGARFLAPRLAYLLGDPPRELGQPLLQVLAEAREEILELERKIRETERQLKALAAQAELVERLLTIPGIGLLTATALVAYVGELSRFPSSRHLASFLGLTPREYSSAGTRRLGRITKRGNRYLRMLLIHGARAALLAGKRVENPDRLRAWALALEARSHHNQATVALANKLARIAWALATHQTVYQPERAA

SEQ ID NO: 154239 - protein, 343 aa, unidentified
MQIVRIGLDLAKYVFEVHGVDQHGKIAVRKRLRRDAVSRFFANLAPSLVGMEASNGAHYWARVLTGLGHEVRLISPQFVTPYVKSNKNDRNDAEAICEAVGRPTMRFVPPKSADQLAVQAVHRIRRRLVTDRVKLANQIRGLLSEHGVVIARDITRLRRSLAVIVGSSDDGLSDLVRALISELQVELTELDRRIASYDRRIRDLFRNSDVCQRLGKIEGIGPVTATALIVAVGDPKCFKNGRQFAAWLGLVPKQRSSGGRARLSGISKRGDRYLRTLLIHGARAALVRAGGKQDPRSLWLSKLRERRHPNVAAVALANKNARIVWAMLSRDKSYEPALSMKVA

SEQ ID NO: 154240 - protein, 330 aa, unidentified
MKSWNVILGVDVSKLTLDICCAERNLYIKIDNCSKGFCAFKKWCKANSIDLGETLIVLEFTGGYEYRFLQFCEALSISYCRIPGLEIKQSIGMTRGKSDEMDAFRIGQYGEDKIKRLQPSKPLDKNILKLKQLLSFRKRLVREKAGLESTVKERKHMYEAGRTDMVLRIAQAKIKANEKYILQVEQEIMEIIKSDQAMWRNYRIITSIKGIGKINGWMTIAYTENFISFTDPRKYAVFVGVIPFGHTSGTSIKGRKRVSHLAHKGLKSELNQAAKTAIVHDPEIRAYAERKLQNKAYPLVLNNVKFKLILRMFSLIKRGEMYVENYRRAA

SEQ ID NO: 154241 - protein, 349 aa, unidentified
MPRSTNLSVATMGIDIGKNSFHVVGLDQRGAIVVRQRWTRSQIRARLSNMPPCLIGMEACVGAHHLSRRLHSLGHDARLMPAKYVKPYRKGQKNDFRDAEAIAEAVQRPTMKFVATKTADQLDLQALHRVRARLVSQRTGIINQIRAFLLERGIAVRQGLRFLRAQLPEVLGKRTDVLSDRMVHVIEDLAADWRRLDERIQGLSGEIQIVASQDPGCKRLMTVPGIGPIISSAMVAAIGSGAVFSNGRDFGAWLGLVPRQLSTGDRTILGKVSKQGNRYLRVLFVQAAWVVLIKPQIWERYGLKQWITAAKRRLHPNVLANKLARIVWAVLSNDCDFRCEKTDETPRCA

SEQ ID NO: 154242 - protein, 431 aa, unidentified
MSTMTVEKKRPPKSVNRICAGIDVHRDFACVTVVERTPKKDIILAYQRFATTKCEMLRLREWLLSLNVCTAGIESTGKYWYAVFNALDEHVQINVYNAWHIKNIPGKKTDKSDSHWIAMVTMNETIKPSFIPNAQIRDARIMARHRKSKVQERTKIRQQAHSLLESCGVKISGVVSDLFGVSGKNLMKLIASGEEYDETKVQKQVRNQLCKKVPQLMIALDGYIHPTHRSTLSDLLDDNTRLTSQIHYLEKELRQFLLDTPEKVATHKLVCKLPGFSDVSSLILLSEIGFDLSSFPSKKHFCSWAGLCPGNHQSAGKSKSGRNPTRQKYLRSLFIEVALASVCRRGTFLQAKYMSLKSRIGANQAVFAIAHRLCRAVYLLIKEHKQYYELTDEYISVSQIARDKKTLARITARLGADAVKVLIDQNDELNN

SEQ ID NO: 154243 - protein, 357 aa, unidentified
MKQDTQLNFSGQKIYVGIDVHKLSWNVTIILNGMKVKRFSMNPKPKELYNYLISHYPQGEYYSVYEAGFSGFWADRELRALGINNIIVNPADVPTKSKERRRKTDRIDSLKLARELSVGHLEGIYIPEEKAEALRVFVRLRRQLVTDQTRQKNRIKSLLLFLGEKVPEDVDEKHWSKRYIRTLRNLPINQEESKRALIELLDNLESIRNQIASVVKQLRTYVAKDEEVSKIINLLITIPGIGFILSIILYSEIIDIKRFGRLDELAAYVGFSPAVYSSGEKEITLGLSKQKNKYIRNYLIEASWIAIRRDSALQMAYGKLCGRMPGNKAIIRISKKLLNRIRYVWNNQQPYLFSVVK

SEQ ID NO: 154244 - protein, 409 aa, unidentified
MNKVDIAPFEVFCGIDVGKSLNHIVALDRYGDKPLINRKVPQEEAEIRAALEEAGDFGLALVIVDQFGAFGRLVVGVAKSMDIPVAHMSPRRFRQVAETYGEDKFDEKDAFILADASRTTPRNIEFVGNRAESMAEIKVLSSRRDDIVEERTRCYNRLHDFIHQVSPPLEELFSKRKLHNDLEIRLIARYGGPIGFRQAGRARASTWAAELKYHCVDGPKKVEQVFDVLDRQTVMLPGAAVIEEQIRSIASRIIELLDEEKRLNLMIEQRAKMIPEVDLLQSIPGVGPVYAALIAVEIGDIGRFRNSNHLASYAGVAPRKEESGTSVHKRRKRKGGNRRLKNALMQSSQRSVQCDPLARAYYERKRAEGKKHLQALRALARHRVTVIFAMLNEGTFYEPPVEVDENGRG

SEQ ID NO: 154245 - protein, 390 aa, unidentified
MEARTVNNLLPAAPHHDAVGCLVAIELSKKSWIVAVNTPLADKISRHTLKPGDGKELLDLCERIRTRVARETKRRVEIVSCYEAGYDGFWLHRLLEAHGIRNYVIDPASLQVDRRARRTKTDHVDVERLLRSLMAYLRGEPKVWSVVCVPSVAEEDDRRLNRERGRLINERIQHVNRIKGLLAIHGIYDYQPLRRDRMLRLERLRTAADGQTLPPRLKAEILRELQRLELILAMIKTIEAERDAIASPKTETEHTNAKKIQDLAKIKSIGPEFATTLIGEVLYRSFDNRKQLASYVGLTPAHFQSGAMCRDQGISKAGNGKARTVMIELAWLWLRHQPDSPLSVWFRERVGKLKGRIRRITIVAVARKLLIALWLYLETGLVPKGAILKA

SEQ ID NO: 154246 - protein, 400 aa, unidentified
MLSIGIDVSKGKSTVCGMKPGGEIVYTPFEIQHTREGMSELVSLLHNSGEEVRAVLESTGSYHCPVVAALLENGIFVSVVNSLRMKRFCSQSIRKVKTDRIDAMQIALYGLAYWQELQPTRLPEDTYRELQLLARQYYQMTSMLIKAKVDFNAICDQVLPGMQELMSDHAGRHKLSDFVLRYRHTTHILEMGETRFRKDYCKWAEKKGYRNCERMAALIFATAQNGIPVLPNAPSTQIVITEAIRVLHTVEASRDAILTQMQALAKTLPEYSLVREMPCIGDTLAPRLIAEIGDVRRFHSKRALIAYAGIDAPPYQSGKFCANNRHISKRGNRYLRKTGYEVMQSYVMHKPANDPIFTFIEKKRGEGKSGKLAMVAGLNKFLRIYYGKVTELYRSLPAIE

SEQ ID NO: 154247 - protein, 360 aa, unidentified
MENLDVLKFHVGIDISKTKFDAALGFVNYEQKTKLIASHVFTNSKEGFLDLVNWVSKKTFAETPISYSMEATGVYYENLAFYLNENGFQVHVLVPSIAKKYIQSIGVKTKTDKIDSKSLMQLGLERNLKKWTAPDKYFYQLRILTRESLIKERTQLLNQKHASESGYSQNEKTSQRLKKRIELLNEYVTEVELDIKKVITQNKELNAKVNQLLTIPGVGIITVATILAETYGFNLIQNVRQLTSYAGYDVVLKDSGQFKSKGKISKKGNSHIRKIMHLPAISARKNNPNYQAFYDKIYNKRNIKMVGCVALQRKLLCLIFTLWEKNEEFKHTINSGNQELETSFGERVTKKSSATKVALH

SEQ ID NO: 154248 - protein, 345 aa, unidentified
MKLYGGIDLHSNNSVIAIINEQGETLSCKRLNNDISVILSFLAPYKDKLSGLVVESTFNWYWLVDALMDAEFKLHLANPAAIQQYSGLKYADDHSDARWLAEMLRLNILPEGYIYPRELRAVRDLMRKRMDIVQQSTKNLLSVQSCYMRHLGYKLGSNKIKQMAAIRKGVDTEQVHADFSSMNTALSVISNLSLIRCAQQQINAIEGAILKQTSLSPEFINLSSIDGIGNTLALTIMLETGTIKRFDSPGSFSSYCRCVKGARYSNGKKKGATNQKNGNRYLAWAFTEAANFAIRYNPTVKKYYQRKLAKTNKVVAIKTVAHKLARACYHVLKDNVPFDEHKAFA

SEQ ID NO: 154249 - protein, 337 aa, unidentified
MEDSIYDHYIAIDWAATNMAIARMTKKSNKITAIDVPSDIVELQFYLKNLKGTKILAIEETTTSQWLYTELKDYVDKVLICDPYRNSLLQEGPKTDKIDATKLVQLLRANLMKEVFHSTDKFIYLRRIVSGYEDLVKSGVRLKNQRYSMLRVCGKSGYEKKGIKLASRDEQYVLECLDRQTQNYEEEKKGYEKEFARLARKHPEIRHQKSIPGIGLINAVKIVARVVTPYRFSGKGHYLSYSGLIKHEKMSGGRSYGKKNPRYCRMMKCVYKSGVIAAIGGNNPINDYYEYLISEKGYPAYNARNKACRRLAILSFGVFKSGKKYKPYRRDHVKKGK

SEQ ID NO: 154250 - protein, 400 aa, unidentified
MLSIGIDVSKGKSTVCGMKPGGEIVYAPFEVQHTREGMSELVLLLHNSGEEVRAVLESTGSYHCPVVAALLENGIFVSVVNSLRMKRFCSQSIRKVKTDRIDAMQIALYGLAYWQELQPTRLPEDTYRELQLLARQYYQMTSLLIKAKVDFNAICDQVLPGMQELMNDHAGRHKLSDFVLRYRHTTHILEMGETRFRKDYCKWAEKKGYRNCERMAALIFATAQNGIPVLPNAPSTQIVITEAIRVLHTVEASRDAILTQMQALAKTLPEYSLVREMPCIGDTLAPRLIAEIGDVRRFHSKRALIAYAGIDAPPYQSGKFCANNRHISKRGNRYLRKTGYEVMQSYVMHKPANDPIFTFIEKKRGEGKSGKLAMVAGLNKFLRVYYGKVTELYRSLPAIE

SEQ ID NO: 154251 - protein, 315 aa, unidentified
MSEPDAVVVGIDVAKMALDVAVRPRREQRQRSHDAAGMAELVAWLQVVHPAVIVREATGGNEAPVVAAVGLAGWPVAVVNPRPVRDLARARGQLAKTDRLDAPVWAHFAAALHPVPRPLPDAQAPELAALVERRRPLVAMRTAEQRRLAVTHSARVRAHMQVHLAWRDGEVADVDVELPCLVRASPLWRAQEDLLRRVPGIGPIIARALLADLPEVGQLAHAQIAALVGVAPLTRESGMWRGRRSVWGGRAAVRTALSMGTLRATRCNPMIRHFYDRLLAAGKAKKVALVACMHKLLTILNAMVKHQTPWQAQAA

SEQ ID NO: 154252 - protein, 347 aa, unidentified
MNFYKLSHKYYCGVDLHSRTLYLCIVGQDGVVLLHRSLPCDPARFLLAIAPFREDLVVAVECVYSWYWLADLCAREGIAFVLGHALYMKAIHGAKAKSDRIDSEKIAVLVRGGLMPVAYAYPADMRATRDLMRRRLLFVRQRGSLLAHVQITHHQYNVDPPGKRITYRSNREGLGAGFEDSSVRHSIAADLALADHYEVTIGELELAVLRQARIHDPNALALLTSVPGIGKVLALTILYEIHDISRFPSVRDFASYSRLVKCERSSAGKSLGSGGNKIGNAYLKWAFSEAAVLFIAKSEQGRTVLTRLERKYGKPKALSVLAHKLGRAVYYMLARKQAFDPQRFATS

SEQ ID NO: 154253 - protein, 344 aa, unidentified
MSKLATDLSTVTSVGLDLAKHVFFVHAVDAAGKVVVARALRRRELLSFFASLPPCLVGMEACGSAHHWGRELSALGHDVKLIPPAYVKPFVKRQKNDANDAAAIHETLSRPGLRFVKVRSIANQAVLMRHKAREMLVQQRTQLLNGLRGHMAEIGVIAAQGTGNMRALGGLIHAGHAEIPEAVRASLMPLVTQIAHLDKAIREIDADLAAQAKADPVSNRLMTIPGIGPITASALAATVDDPASFSGPREFAAFLGLVPRQNSSGGKARLGRITKMGNAYLRKLLVVGAHAVLHHQARHDDPLRLWARKLLATKPFKLVAVALANKLARLAFALMSRNTRYAAV

SEQ ID NO: 154254 - protein, 310 aa, unidentified
MENVIVGIDISKEQLDIHIIPSQDSFSVSRDSEGLGQLITQLSSLQPKLVVMEATGGFETIVAAALAAARLPLAVVNPRRIRAFAQALGYLAKTDRLDARIIALFGEAAKIEPQTVPDEAALALGELVARRRQIVETIGVERNRKRSLTQRRLLKGVDRILALLQKELSDLERDIDQAVRGTPAWREKDELLQSVPGVGSKVSSMLIAELPELGTLTRRKIAALAGVAPMADDSGKHHGRRHIQGGRAQVRSGLYMAALVAARHNPILAAFYQRLRAKGKTPKQALTACMRKLLVILNAIIRDNRPWQSA

SEQ ID NO: 154255 - protein, 344 aa, unidentified
MTSMNFIGLDIHKKTISYCVKGAAGEVLAEGTILSTRQSLDVWMRTLCEPWTVAMEATMFTGWIYDYLLPHAAAVKVAHPLMLRAIAAAKKKNDRIDACKIADCLRCNFLPECYMASTEIRERRRTLRYRKLLVRQNVQLRNKVSQMLMESGVVYNKQKLHKVGYFKELMTTNPDIGEGLRPLLTICRETIVRIGKTEGALVRSLARDPLLSDRVQRLMTIPAVGPITALTWVLEVDDVARFGSVKQAISYCGLCGAERSSADMVKRMPISKQRNKHLQSVLVEAAKLGPRLSPDLALVYETEKQKGHANRATIAVARKLVAYLLAVDRSGREFVVAGERREAA

SEQ ID NO: 154256 - protein, 367 aa, unidentified
MEKSSKVFVGMDVHKESIDITLAEVGGEVSRLGQIGGDRGSLLKMVRKQQSKGQELVFVYEAGPCGFWIYREITALGERCMVVSPALVPKRAGDHVKTDRRDSERLASLARAGELEAIHVPDIRDEGIRDLVRSRDDAVIAQRRVRQQLKALLLRNDIGYVGKTSWTGAHRRWLAELKLPEPAQQIAFEEYVDAITVATGRIERLTRAIQTEVLTWRFAPVVAALQAMRGIQFVHAVTLIAELGDLTRFPSARQLMGYLGLVPRENSSGEHRRQGSITKAGNSYARRALIEAAWAYRHPARVTRIIATRQTGLPKVARDIAWRAQLRLSAKYRRLNARHLNHNKIVVALARELSGFVWAIGQSVKPL

SEQ ID NO: 154257 - protein, 350 aa, unidentified
MKIIGCDYHPGFQQIAFVDSETGELQERRLEHPEEAEKFYRDLGAQGACVRVGMEASGHGRWFERLLSELKFELWIGDAAEIRAKRVRKQKTDRQDAELILQLLVENRFPQIWVPSWENRDLRQLLWHRHRMVQGRTRIMNQLQAVALNEGLLCKKRLWRETGRKQLESFPLAPWASRRRQDLLELLDRLTPTIAELTQAIEREVENSPEARRLQTHPGVGPLTALAFVLVIGKADRFQCGKQIASYLGLIPLEDSSGKRRRLGHITKQGNSLLRFLLVEAAQVTVRSDPEWRSKYFHLAMRRGRKIAKVAMARRLAVRMYWMMRKGWDYERLNKFGSHAGQPGHRHGVQ

SEQ ID NO: 154258 - protein, 339 aa, unidentified
MQGGAKSDLCTTCLCFINLSGIGRVTTSYYVGIDVSKDMLDVCVLPTGEFFRLSNDAAGIGKLRKKLHPLSPERVVMEATGGYEAEAALTLRLAGMKVCVVNPLWVRNFAKADGQFAKTDKIDAGVIAKYGERMLPEVRELASEEVRDLDALVTRRRQLVQMITSEKNRIGISARALRPGIQTHIDWMNEEMSRIETELDEAIKTTEGWQEKVELYTSAPGIGPKTAYSLIAEVPELDRISAKQISALVGVAPYPRDSGMFKGTRRIRGGRISIRCMLYMATLSAIRCNPVIKAHYTQLRARGKLFKVAMVACMRKLLVILSAMARSKTPWDPGFAAAA

SEQ ID NO: 154259 - protein, 358 aa, unidentified
MIHPSARPNPVVIGIDVGDKKSCVCVMANAETTVRLTEIPTTPAAFMDFFHSLPSCSVFLETGSHALWIHQLLGETGHVPRVVDPRDPRLWSKRRKKNDRIDARKLAELGFLPPSFVSHLENRPPEYHRDLASVRARDELVKARTMLINTLRGLVKPFGHRIPKLDSTAVHKKALQAVPRSLWPTVIPILKSLREITRQIATIERHLGRLVERRYPTTRLLTQVYGVGPITALTYFLTLWNPKRFAKSRQVGAYVGLVPEISDSGDSTPQLGITKTGDPRLRRLLIQCAHTILRKGAPDSDLKRFGEALSTRGGKNARKRAVVAIARRLAGILHRLWLTGEVYDPFHVSKLNATPSPN

SEQ ID NO: 154260 - protein, 377 aa, unidentified
MATKRKKRVQDLPVLHPDAAGIDVGASEIFVAVAADRDAEPVRSFATFTRDLNSLADWLQACGIRSAAMESTSVYWIPLHQILEARGIEVCLVNAQHVKNVPGRKTDVSDCQWIQYLHSVGLLRASFRPPAVICAIRSLWRHRDSLIQMAAEHVMHMQKALDQMNLQVHRVLSDITGFSGLRIVDAILAGERDPIKLAQLCHSRVKSSQDTVAKSLEGDYRIEHVFALRQSLAGYRYYQGLIAEVDQEIQRQLANLKTDDGDSKPPKRTKKTPYQRYRYEPAGFDLRGELYRILGVDLTDVPGISSVTAHTILCEVGTDVSRFRNASAFASWLGLCPERQISGGKVPLYKESSRPKPRRSGTALGSQFSAPRQQLSR

SEQ ID NO: 154261 - protein, 350 aa, unidentified
MNYVGVDLHKERSWFYVMDEHGKRLDSQSIANLPGTLRSHFQTIPRPFTVAVESTYNWYYFVDIAEQFADKVYLANSYELKAFAKRNKKTDKIDALLIADVLRKGYLPSVAIPAKPVRAVKELLHCRMSLVAERNRSISRLKSLLDRHGQLSNGNFTSLKRLKSIPVNELPAVCQIAADNWIEQIAELNKRIYRIECGIDTVALADSDAVNLSTIPGIGNFSALLIKSEIGDIARFPTFNRLCAYAGLAPRTFQSADKEYHGALNKNRRKHLQWILVEAVYHFTNGCAARTAKYEAVAKRKAPNVARVVLARDLLKIVYRILKDKRPYYSDEAEQLPNTRTKAPLALYSD

SEQ ID NO: 154262 - protein, 472 aa, unidentified
MQFIGGGSQQEYVERTRGLDPSHCLAAGVDVGKYEALCLIADHRGEVVGEALTFSLTEPGVRSLEAMLAAATQSRGAVSVRIGVETAGHYHRTVVARLVAAGHDVVELNPAHVKAARTQQGSRRLKTDLRDAAAIVDLVISGSGRAPQQRSDALIEQLVWAGVRRRRVRSRTALSNQLLGTLDLIFPGLDGCFDDLLGSKVGPVLLHDIADPGRLHRLGVEGLQAFTARRGVRLQRRKAEQLHRAAADALRLPVVERACRAAVLTADLAVLDMLNNQIDQAEEHLTRVLLNTPAGVLTSLPGVGVVRASNYGAALGDPARFANADRAYRASGLVPASYESAGRARGGQGISREGNAELRAAIIELGRGLAQRDPNFAAYRASVSERMKPLMAAIAVGHRAHRLAFALMRSGESYDPARLAESVATNGERRTKEAGRPVKKNSREAVCRHDVTHPPVTTVPRTTATSKTLART

SEQ ID NO: 154263 - protein, 342 aa, unidentified
MSEITTIGLDLAKNVFQAHGADALGRLVLRRKLRRDQVLAFFSQLPPCVVAMEACGGAHFWGREIGKLGHEVRLIPPAYVKPFVKRQKNDVADAEAICEAALRPTMRFVPVKSEETQGAAMVFRVRELLIRQRTQAINALRGHLAEFGQIVPQGAANAARLIAIVENQDSDLPADAIATLKVLVAALAHLESEIGQLDAEIARRAKENEVARRLMTVPGIGPLIATALAVLAPPPGTFRKSRDFAAWLGLTPRQHSTGGKQRLGATTKMGERSLRRLLILGANSVIIKRHVHATARPGTWLAGMLMRKPPLLVRVALANKMARIVWALMARGGVYQSPAMAA

SEQ ID NO: 154264 - protein, 388 aa, unidentified
MPQSNDLSRSFTALNQDNTLIVVIEMGQSSWLVAGMVPGVERQPLKKLDPEEDQLLKLINRWRHEALQAAHAIERVVVAYEAGRDGFWLARWLRERGVEAYVMHSSSIAVSREHRRAKTDRLDTELLMRAFLGWLRGERRHCSMAAIPTIEEEDAKRPNREHEKLVGDRTRIVNRMKSTLSRFGIRGFKPTLRKADEELGELRTAEGTLLPENTRAELRRDMTRLRIVREQLKEIEQQRLRKLEAAAPAKKGPHAMVGLIARVTGIGIETADMLVNEILSRHLRDSKAVARYAGLTGSPDESGKRRREKGLARAGNARVRRGMIQLAWRFLRFQKDSVLAQWFRARAADGRSGTRKTMIVALARKLLIALWRMTTTGEIPEGVILRVA

SEQ ID NO: 154265 - protein, 419 aa, unidentified
MLADEVDFVVGVDTHRDQHVLSVVAAPTGAVVAQRSVAASGHGYAQALRFANEQAQGARVWAIEGAGHYGSGLARYLSGRRETVLEAGRGPRGERRLQGKDDGLDATRAARAALGNDELAVPRAGQRREALRLLLVARRGAVEVRRRALVQLRSVIVTAPNRLREELQALPERRLLERCSHFRRSSSLPVDELAAKLVLRTLARRIEAATAEATELEREILAHIRALAPQLLEEAGVGPIVAADVIVAWSHPGRVRSEAAFARLAGVAPVPASSGRTIRHRLSRGGDRQLNRALHTIVLQRRQHDATTQAYIARRVAEGKTRRDATPRVRRWSIASREQAIVDGGMLSTPPPSGCWLADGCLIRREWSTLGRVDEDRKFSTRHLTGEVRSSHRTRASRPKPHDCESLDVTDLDLMEARR

SEQ ID NO: 154266 - protein, 331 aa, unidentified
MEEVKRFVGIDVAKVALEVFIGSAGGAFSVANDEVGIRELLRQMKSADFVIVEATGGLETPVASALAAAGIAVAIVNPRQVRDFARATGKLAKTDRLDAEVLARFGEAIRPEARPLADEQAQALEALVTRRRQLVEMLTAEKNRRARAPKVLHRSIDEHIRWLEKRLSEFDDELGELIRHTPLWRERDQLLRSVPGVGKVLSSTLLAQLPELGMLSRKQIAALAGLAPFNRDSGNMRGSRCIWGGRAQVRRVLYMATVAGVRSNPTIRTFYLRLRTNGKHAKPALTACMRKFLVILNAMLHNKTHWQTPAPTFLTSSLSPLLGAVSEHGCC

SEQ ID NO: 154267 - protein, 341 aa, unidentified
MREFIRIGVDLAKNVFQLHGVEQVGGSPFQRKLTRAKFRAFFAQLRPCRVGMEACGSAHYWARVLRAMGHEVVLIAPAYAKPYVKRGKNDAADAAAICEAMSRPEMRFVPIKSVDQQAVLMLHKTRDLLVKQRTMTVNALRGHLQEFGLIAAKGIHRVQELVALALADEGLPEEAKQAAALLAWQSEQLNMKIDGLEKTIAAASAKHPMSRLLQEIPAIGPLIASAMAASLPDPSVFKSGRDFAASLGLTPSQHSSGGKEKLGAITKRGNRYLRKMLVVGCTSVLRVAHKRKGALAEWIVALKAKKPERVAAVALANKLARICWAVLSTGEAFREELYARA

SEQ ID NO: 154268 - protein, 346 aa, unidentified
MKITTIGIDLAKEVFQIHGIDSHGKAVLRKQIRRGEMTKFFVNLPPCLIGMEACGSAHYWARKLSEYGHTVKLMAPQFVKPYVKTNKHDMADAEAVCEAVARPNMRFVPIKNMEQQAILSIHRGRQSFVKARTAQANQMRGLLAEFGIIIPKGIHSISERMPLILEDAENGLPGMMRNLLARLNDHFKVLDQQVDELEAQIKHWHKESELSRKLEAIPGIGPITASAIVATVGNATEFKNGRQLAAWLGLVPKQHSSGGKQNLLGISKRGDVYLRTLLIHGARSVLRFSEAKAAPDSWLRKLMARRNNNVAAVALANKNARVIWALLAKGAIFHPNHAEAAYAATA

SEQ ID NO: 154269 - protein, 356 aa, unidentified
MAEGTWVGLDVHARKVVAGVLDAGSGELRSLRAPALPVETVEWLRQLSAPVRVAYEAGPTGYGLARACAAAGIACTVAAPSKIQRAPADRVKTDRRDAERLARLLRLGELVAVRVPEPQEEAARDLVRAREDARGELMRARHRISKLLLRHGLMYETSAWTLAHDGWLRRQRFDSRPLQLAFEESYAAAVQAKTRRDALDHAIAELAAEPPFAEIVGRLCCLRGVATLTALALTVELGDWSRFRPQSLGPFLGLTPSEDSSGERRRLGAITKTGNTHARRLLVEAAWQQRRPLRESATLARRRQGQPAAVRAQADRSARRLHQRWHALERRGKRRTVVAVAVARELAGHCWAIATM

SEQ ID NO: 154270 - protein, 354 aa, unidentified
MSETPNTALAVIGIDIGKNSFHVVGHDARGAIALRQKWSRGQVEARLANIPPCLVGMEACVGAHHLSRKLASLGHDARLMPAKYVRPYSKGQKNDFNDAEAIAEAVQRPTMKFVAIKTAEQLDLQALHRVRERLVSQRTGIINQIRAFMLERGIAVRQGIGFLRTELPTILATRTDALSPRMLRVIEELAGDWRRLDQRIEGLTGEIEALARQDQACSRLMTVPGIGPIISSAMVAAIGTGDVFSKGRDFGAWLGLVPKQISTGDRTILGKISRRGNRYLRVLFVQAAWVVLVRIKDWERYGLKSWIEAAKRRLHHNVLAIALANKLARIAWAVLAKGRAFELTRTDETSVRPA

SEQ ID NO: 154271 - protein, 358 aa, unidentified
MADKVTVAAVVGGVDTHKDLHVAAVVDQNNKVLGTQYFATTRQGYRLMLAWMTSFGALKRIGVECTGTYGSGLLRYLQNAGLEVLEVTAPDRMERRKRGKSDTIDAECAAHAAFSGIRTVTPKTRNGMIESLRVLKTCRKTAISARRVALQIIHSNIISAPDDLREQLRNMTRMQLIRTLGSWRPDASEYRNVTNVYRISLKSLARRYLELHDEIADLDVMIAAIVDELAPKLIKRNAIGYESASQLLITAGDNPQRLRSESGFAALCGVSPVPVSSGKMNRYRLNRGGDRAANSALHIIAIGRLRTDDKTKEYVARRVAEGHTKMEAIRCLKRYISREVYTLLRNQNRQVNSIPIMA

SEQ ID NO: 154272 - protein, 413 aa, unidentified
MESVYRSTAGIDVHKKMLAVVIRRESEPVQYVQRKFGTNRLDIQHLGAWLQAHGVSEVVMESTAQYWRPVWMGLEPLFGLHLTHPLKTRAPRGRKFDFRDARRLADRWAAGDLEESFIPGFEQRAWRQLTRTRVQLKKKVGVVYCHVEGLLEQGGIKLSAVVSDLFGVSGWAMLEHIAAGVTDVEVLAGEARGALRKKAAVLKPALEGKLEPVYRLLLGQCLEQVRMFRRQVEEINQALAQAMQEHLAALHRLTQIPGVDLYAAQELLAEIGPKAATFASADQFASWVGVCPGSQQSAGVNYSHRSAKGNRYLRRLLCQVAWAAIHTKDTFFASLFARLKPKVEGKGAVWAVAHRVARIIWLVLHREVEYQEKGAAPPNERTLVRKFKRMLKEFGVLGLDVRALIDQQLPETS

SEQ ID NO: 154273 - protein, 347 aa, unidentified
MRFYNQQHQFYCGVDLHAKTMHLCVLDQAGEIQRHRGIRARPQDFLRSIEPYRNGLVVGAECMFAWYWLSDLCIEQEIPFVLGHALYMRAIHGGKTKNDRIDSQKIARLLRGGNFPMSYVYPRQMRSTRDLLRRRCFLVRRRGELLAHLNNTFSQYNVTPPPGKFSYAANRVDLTKCFDDASVRRMVETDVTLAGDFDRQLTSVELYLKRNAKIHDPDSFHRLKTVPGIGDILALVLLYEIHDIRRFADVGDFVSYARLVRGSHESAGKAKGSPHKKIGNAHLKWAFSEATTLLMRECEDAKRFVARKTKKHNKPKAMSVLAAKLGRAVYWMLRRKTAFDVHKFFAC

SEQ ID NO: 154274 - protein, 408 aa, unidentified
MKVVGLDVRRTFAEVVFLEDGVCRPEGRIGLTIDDLAAFGRQLSSKHDVVLEATGNTAAIARALKPYVRRVVIANPLQVRAIAHERVKTDKIDAAVLAQLYASDFLPEVWVPDEETEALRRQVSRRRQLVRQRTRVKNEIHSVLHAHLIPRCPAADLFGKKGRTWLAQQPLPCDERCAVEQRLRELDRLSEDLTVIGRALAEITLHNAQVHRLLPITGVNVTVAISLIAAIGDICRFPSPHKLVSYFGLNPSVRQSGLAPARHGRITKIGRAHARGMMVEAAWAAAHSLGPLRALFQRIRARRGMHIAAVAAACKLTIIAWHVLAKDEDYDWVRPALTQKKLRSLELQAGCPSARGGRRGRAYEHNLASIRAHELAASERAERAYERFVAQWKTKPTRPSSLRTRRNE

SEQ ID NO: 154275 - protein, 382 aa, unidentified
MRDQSRTREEPVMADVITYVGLDVHQASIAVARLTGRDRAPEIWEIANDRPAVRRLARKLRREAPGALECCYEAGPCGYAVQRQLIAEDVPCQVIAPALMPRKPGDRVKTDRRDARKLAELLRAGLLTAVHPPTPAEEAARDLVRARDDARVDRQRCRHRLGKLLLRRGLRPPGRAWTHAHTRWIDGLTWEHDAERRVVEDYRLALAQIEARLQALDAALTELAATPPYREAVGWLRCFRGIDTLTAITILAELHDVRRFPSARALMAYLGVVPGEHSSGETTRRGRITKTGNALVRRVLIEAAWQYQHRPGIGKGLAQRRVGQPARAIAIADKAQQRLCGRFRRLGLTRMAPPKIAVAVARELAGFVWAVLQPPVGVANRV

SEQ ID NO: 154276 - protein, 376 aa, unidentified
MGDYSEAFVGLDTSKLRNAVAIADASRGGEVRFFGEIENTPAATAKLVRKLALKYKRLTFCYEAGPTGYGLHRQIKDLGFECVVVAPSLIPKRPGDKVKTNRRDALSLAKLLRADELTPVWVPDGRHEAMRDLTRARGTAMLDLRTKRQHVSAFLLRLARHYPESKNTWTKAHVSWIASQKLEHPQQRLVLEEMMLAIRQAQERLARLEQAIAAAVPEWSLAPVVTALMAMRGMDLVSATTLLAEIGDLSRFQTPTELMAYLGLVPSENSTGDTVKRGPITKAGNRRARRMLVECSWSYQHPPRVGQAKQPKVDAAPPAVREIAWKAQCRLYRRYRTLIRNGKLKTVAIVAIARELAGFIWAVARAVTTAGVAATA

SEQ ID NO: 154277 - protein, 360 aa, unidentified
MKRSYFIGIDVHCQFCEIAVVDVVGNVMFRDRCTTTIPTLLAVLEKVPRPRSLVVEEGSLAGWLWRGLAGAVERMVVSEPRRNRLIAKEGDKDDDLDAEKLAQLLRGGYVKEVHQVQSLERAVFKQQVAVYHFRVRQRLRESLRLTWLFRQHGVMIRERDYANAKNRPALLARLPENAALRHMVTTLWSSYDALVEQEETWRKCLLQLAPQEKVVRRFQALPGLGWIRAATLYAYLDTPWRFRSKSALWKYLGIGLERHRSGNGPEHLGVPKLAHRLLKSTILGAALSAVAQGDNPFAELYRRWISKGLSSKLARRNVARALATTLWGLWKNGSAYHPKWVGVPAAASAAARSRLGAAGC

SEQ ID NO: 154278 - protein, 298 aa, unidentified
MKEQLVYCGVDIAKSYLDAVIGKEKRRLANDAMGHREFIKWIKQIEGQAQVICEPSGGYERRFIQALVGAEIKVSLVPANRVRAFARAAGILAKTDTIDARVLCAFGEAMQPPMVTTSKLEQEQLRELESQRRHLSRLLVMEQNRGARLADCSVRVLNRSLIKQIQKQIEKIDLLIKEHIEESQELSSKAAKLTAISGVGPRTAALLLAQMPELGQLNRREVAALVGVAPFNRDSGKLRGKRTIFGGRRCVRHGLYMAALGAARHNPTPARFLSTIACCWQTSQTCPHRYHAKTPDRA

SEQ ID NO: 154279 - protein, 333 aa, unidentified
MNDHRVYVIGIDLGKNWFHLVANDERGTELFRKKLNRGQLAEFAVTAPRCLIAMEACPGSQFWGRRFQQAGHELRIIPAQFVKPYLKSNKNDFNDAQAIAEAASRGSMRCVPLKTTDQIELQALHRVRQRFIVERTAVVNQMRALLLEHGIVIPVGRALFARRLPAVLADPQSGLSPRLSQIISRLRQRWLALDEEIDTASAEITQIARESELCRRACTVPGVGPVVSTALIAAVGNGAAFKRARDMSAWLGLVPKQYSTGGKSNLGGISKRGNAYLRMMVIQGARALMIHMKRDQSRMGLWLREVEQRSHPHVALIALANKIVRICCGLAPA

SEQ ID NO: 154280 - protein, 387 aa, unidentified
MARKRTLSTLDTSIAYEAVGLDLAKEDAAIAAFGPDHEGPYLIDRIPYDKLYELLADMAPTLVAMEPCSGAHQIAEQIQELGHEVMMISGRHVQAWVKDHCNGQKTDLNDAFAILNLAYDRWLTPIRGKTREECRLLALQSSYRQLKGQRTKTMVHVKATLHAWGFPIRTGSFNQKALHELIDANREAFGDEVVETLHLMINRVHDLDHDIATVLKLLTEATQRDPRASLLRSIPGFGVLTTSRWCAVVGDIARFDTPKQTMAFIGLVPNNRITGHHTETSSGREARGQGKMSKRGDKMLRSLCILGAGALCLMVRNDRLPDCPFVASIKERLASPRPWFKVLVYVAAKLVRIATALLKYGETFSFEKTGISKAVLKQWELEQAKAA

SEQ ID NO: 154281 - protein, 450 aa, unidentified
MARRTNRFDEVQRYVAGIDLAGHADHYVCGPRKDDGTHDIEHFGTTTNEILRMVAWLKERKVVSVAMESTSVYWIYVYDMLEKAGIRCLLVDTRTVKMVPGRKSDVKDCQWLQKLHSCGLLRGAFRPPEEFNAVRSVIRESENVRQMRTQSIQSIQKSLDQMNVRVHHAVSDIDGVTGMRILAAIVGGERDPRVLAKLRDKRCRKSEAEIAEELTGNWREEHLFNLKQAYDTLCFLDERIADYDRQVRDMYAKIAAKFPPVEPPPGGTGPKKPKDKDDAKAKADLARICGGFDMTKIDGIGYDNAAAILSELGPCLDAFPTESHFVSYVGVAPALGKSAGKNVSSRKKHKNTSRVGLVLKLAASTLTRSESSLGARLRCTRSRTCSRTAIKDVAREMAKRIYRGLRFGQAYVDEGEQAYLERTRERTIKSMKKKILKLGISAKELGIFAA

SEQ ID NO: 154282 - protein, 366 aa, unidentified
MHVQGREPVNSLLYFNAFLQTTMTKIQPKETALEAKPDLFAGIDVGAEELILVIRKNGKPFDPQKFANTPADRTRLVKKLVKLPGIIVCLEATGVYHFDLSLALHDAGVLLMVVNPKASHNFAKVLMKNSKTDAVDANTLAEYAARMDFVAWTRPSDEQIALRSFARRINALTGQKAAAKNHLHALTSTSETPKAVLKDAKLAITQLEKRIDRLTAEALVLIGKHPELKRILALLIGIKGVGETSAIALMGELLLLPPDLSHREWVKFAGLDPRAFDSGKSVHKKTRISKAGNRHIRAALYFPALSAKQHDKHVKAYFQHLVANGKKPLQAICAIMRKLLHAIHGMLKHNEPFDNTRFYAIPASAE

SEQ ID NO: 154283 - protein, 341 aa, unidentified
MEYCGIDLHAEYSQICILDEDGEVMETSRIRTSRKALERFFSRDRLRVVMEAGGSSPWVSRLLESLGHEVVVCSPRRVRLIAESKLKNDRVDAEVLARLVRLDPEFLRPIQHRSEEAQLLRANLKVRSAMVEARTKWINTIRGLLRSFGYRVSGKAPQTFVDRLDLMELPAELRRVIEPLLEQLDLLTGEIQRRNEQLEEMVKDLPEVGHLREIPGVGPVVATYFVLTIDDPDRFRNSRDVASFFGLRPSMRESASVTHFGRITKEGDPEMRRLLVQAAHACLLTRADSQLKSWALALAERKGKGKAVVALARKLAVLMHHLWITGEVYQAFPNKGASQAA

SEQ ID NO: 154284 - protein, 411 aa, unidentified
MITINTLYVGIDVSSKSNVVYLMLPNGDKHSNFSVANSHEGSTLLVKKIYSALTSHSLDTVLIGLEATSVYGDNLVYFLREDATLAPFNRKIHVLNPKQVKKFHDTYNDLPKNDYVDSFVIADCLRFGRINKEVYMGEYRYKALQNLTRARFFAVQNLVKEKQRFMNVLFKKYSTMTQEKVFSDAFSTTALAVYDEFESAEALANMDLHELTDFIIEKGKNRFPDPDAVAKAIQKAARSSYRLPKTVNDSVNQVLSISITSMKALESQIKEFDKAIKALMELLPNVLISIPGIGPVYSAGIMAEIGDINRFDNQASLAKYAGLAWKQHQSGGFEAEVTRLIPSGNRFLKYYLCEAAFSLVRCDKEYSDFYHLKYKEVNRCQHKRALALTARKFVRLVFRLLKDNRLYCPAK

SEQ ID NO: 154285 - protein, 383 aa, unidentified
MRIVCGLDVHKDSIFLCIMSSTGEIFEKKYGVLTNQLEEMRDLMLTYHVQEVGMESTSVYWIPVWRILEPHFKLKLINPYFIKQLPGHKSDVKDAQWIAECMMKELVRGSFVPPERIQQLRLYDRRIYDLDDEIIRKLAKLDAAVQRCNIRLSNYVSNTDSVSYKSVIDKICEGVTSPEELVKEVHGRIINRHGRETIIASLKGCVTEADIDIMAQLKAEIDMAEAHKQKCMDKMQEICEKEYSEQLRNLQTVPGVKMRAATSLIAEIGTDMSHFETANHLSSWAGLKPRNDQSNKTIKSRRITHGNRYLRRTIIQCAWGASRTKGCFFSRFSYHQTQVRKKNKMKVVVAISRKMLVCAWHILKEGVGYKDFDNMILTPCTKG

SEQ ID NO: 154286 - protein, 335 aa, unidentified
MDFKVFIGIDVSKETLDFIPTSEGKRLFHEHVSNDNKGIVRLYKRLAKTVDSSPEQWLFCMEHTGVYCNPMLEFAVEKDLAIWLESAAKIKAHHALERGKNDTLDALRIAEYAFAKKDKIKLWEAPREVIIRLKSLIKLRERLITSKKRLLDPLREEKQFCNKEWVKEHEKLLKPVIAKIEKQTKEVEQEIQQLINEDDDLKRLYGLITSVRGVGQIVAINTLVVTNEFKQITNPKEMACNCGVVPFKYDSGKTIRSRAKVSHRANKTMKVLFHLAAMSAISTKGELRDYYLRKVEEGKNKMAVINAVRNKIIHRIFACVRDQRKYEENYIHSLA

SEQ ID NO: 154287 - protein, 344 aa, unidentified
MKPTTIGIDLAKQFFQVHGVDEAGRALFNKQLRRKQMAEFFVNLPPCLIGMEACSSAHYWARKLQGFGHTVKLMAPQFVKPYVKTNKNDAADAEAICEAVARPNMRFVPIKNVEQQGVLALHRARQGFVKARTAQANQIRGLLAEFGIAIAQGIGRINREVPDLIEDASNELPGMFRRLVQRLLDHLKALDKQVDEIEAQIVAWHHQSAQSKKLEKIPGIGPLTASALVASLGDARSFESGRQVAAWLGLVPRQHSSGGKQNLLGISKRGDCYLRTLLIHGARVVIYHASKRVDSGSWINQVVARRNKNVAAVALANKNTRTVWAMLAHDRQFQSDYTPALAAA

SEQ ID NO: 154288 - protein, 424 aa, unidentified
MSKKKSSLAGLQALYARVCGLDVHKKLVVACVRILDSKDGTVQSTLRKFGTMTADLLELRQWLAELKVTHVAMESTGVYWQPVFNLLEGHFKLWVVNAQHIKKVPGRKTDMKDAEWIAQLLQCGLLKPSFVPERQQRELRDLTRQQTKLVQQRNAVDNRIQKVLETANIKLGSVASDVLGVSGRKMIEALMAGEKDVVVFAELAQRKLRDMIPELQRALEGELTEHHRFLLRQLLGQYDFLQKEIQSVSERLGAVAPPWFGAAVEQLDAIAGVGERGAKALLAETGTDMSRFQTHKHFASWAGRCPGNHESAGKRRSGKTPAANRHLDAVLTEMAHAAVRTKNSYFKAQYHRLAGRRGKKRAIGAVKHSLLVTVYFMLRDNRPYNDLGVDYFDKLNPQQRIRYHVRRLQQLGQEVELSPMTDAA

SEQ ID NO: 154289 - protein, 461 aa, unidentified
MSRQKSAGKQKKSAQKKVDWKALGIVHPDAAGIDVGGSEHWVAVSPDRDPEPVRRFGCFTADLREMGRWLVEKGVRSVALQSTGVYWMPVFEVLEQQGLEVYLVNAQHTKNVPGRKSDIQECQWLLKLHAFGLLNNSFQPTDEIRIARTLWRQRSNLVAEAASVIQRMQKVLTEMNVQLSNVLSDISGMSGMKIIGAILEGERDPWELAALVQPGVKASPEDIAKSLEGNWREELLFVLRQHVELYRIYQEKITDCDLQLRKHLESLGSKVDLKMQPIGARPRGKKSSRNAPEFDLRTELYRITGIDWSQINGIDVLTAQTVIAEAGADLSAFPTEKQFASWLGLSPTNEQSGAKILNRRTRKVVNRATVAFRNAAATLLRSQSYLGAQYRRLRTRLGAPKAITAMARKLACLFYRLIKHGQPYADKGTEYYEAKYREQQIRSLAKRAQKLGLQLVIPKTA

SEQ ID NO: 154290 - protein, 327 aa, unidentified
MKKPYPVGIDVSAKELVVTSDRSRDARFDNDPAGHKKLVRFLTKGGRSAQVVIEATGVYSLDLALALHRAPRIEVMVANPRAVANFAKAYLQRSKTDPLDAEVLLEFARRMPFSAWVPPESEHLDLRGISRRIAALVKTLQQEKNRLHAASQSTELTSLVRRDVEVNIRHLERRIEHLRGQALALIGQHEALLQAFELLVSIKGIAEASAISILGELVVLPADMTVRQWVAHAGLDPRHVQSGSSIHKPARISKAGNKYLRAALYMPALVAIQHEPNVAAFYDKLVESGKTKMQANIAVMRKLLHAIFGMLKHKANFDGEKFYAINP

SEQ ID NO: 154291 - protein, 334 aa, unidentified
MKSDTVHIGVDVSKEKLDVFVPAQKEGMRPATKEVDNSVAGFREIRDLARKDKATVCVEPTGGYELELIAFLHKFEVAVAYADALRVRQFARAEGCLSKNDTIDAALISRFADKIGVRVLEPQDVEAVELKRRVRFRQTMSESRTVMINRLETEMDPGMRALLKEQIRHMDKVIAKAERLCLEAAGKDERMNALRERFTKVGGVGDLTAMSILAGLPEIGKLPDAKLNRLVGIAPEEKQSGTKERRRCIWGGRKDVRNALYMAATASIQWNAILGGYYRRKRAEGHPHKWAMVPTMRKMLSLLNRIARDPNFIPRPEPESTRKNAKAGRKKKAA

SEQ ID NO: 154292 - protein, 312 aa, unidentified
MADLFHGGIDVASDRLDVMLLPHGQCFWVGNNAVGWAELVERLRGLCIAAIGIEASGGYERGVLRALLAAGISVRQINPFKLRQFAKARGVLAKNDRLDARMIALFVATMPTRPAQRNEAAERMAEIVTARRQLSDEKVAAENASRLFEDAILRRLYRRRLMRLALDIALLDKRLAAMVSANVALAQRYRLLTSMPGVGPVLAFTLIALLPELGQMSRRQVAAIVGVAPYDFDSGKLKGMRCIWGGRAPVRRVLYMAAVTACRYNPSLKAFHERLSAAGKKSKVAIVAVMRKIITTLNAMIRDNAAWNARFA

SEQ ID NO: 154293 - protein, 419 aa, unidentified
MSFKILKNNCCGLDVHKTWIYACIGITDSLKRTEYKEACFSSFTKGLQELCDWLSKYNCTDVCMESTGKYWIPVFNVLEKNNIWVTLSHPKYTKPQKGNKTDRKDARWICDLYMCGMVKPSFIPPSDIRELRDLVRYRFKLTCMITGEKNRAHNCLTVSNLKLDDVFSDIFGKSSRSITEQILQHPGETFDVTPFVDGRCKTPIEEIQAAVDGAISEEQAVKLRQCLNHIDELETHKTEVEREIFRLSEKYERVLNLIRTIPGFDKNPMTAIQVLSEIGGDMSVFPTAKNLVSWAGCCPRNDQSNRKIKSTRISRAGSYFKPVLVQIANALIKSKKHSEFTTRYRRIKARRGHKKAIIAICRMILTAIWHILTNLKTYTPEGFLESRPVNESKILTTSQALNLMKQRGYIIKDDVVPVT

SEQ ID NO: 154294 - protein, 425 aa, unidentified
MNYKQNEKINQVKESTLVVGIDIGSTTQYARAFDWRGIELGKVFTFSNSREGFEAFKAWMQHLQDKYRKSDVIVGIEPTGHYWFDLGAYLEDEGILLVMVNPYAVKQTKELDDNSQSKNDRKDPKVIAKLVTEGRYSAPYTPDGVYADLRIMVANRKRLIREMTQIKNRFARWFAIYFPEYTDVFGDYEAQSSMLLLKKVCTPEAIVELGAEKINQIWRDAKLRAVGMKRATTLCETAKRSIGLKKGSSAARYEMKLLLEDYEYKKAQLDAVIEEIEKLCRKIPESEQMLAIKGIGVITVAGFLAEVGDVRRFESPRQIQKLAGLSLRENSSGKHKGQTTISKRGRSKLRAVLFNAAIPLIAKNPEFKSLHEYYTTRANNPLKKKQSVIAISCKLIRVFYAILAKGVTYDAQKLISDIHRQPQVA

SEQ ID NO: 154295 - protein, 468 aa, unidentified
MRTTSTQTMNPRKRKKARPAKTASAPSPLGHACHPDAAGIDIGAEELVAAVPHGRGEGPAVRTFSAFTAGLHALRDWLLACKIKTVAMESTGNYWLCACAVLEDAGIEVCLVNARHVKGVPGKKTDVIDAAWLQQLHAAGLLRASFRPRREILPLRYLMRHRSDLVAQAGQQVQLMQKVLTEMNLHIQHVFSDVDGVSAQAIITAILGGERDVEKLAALRDRRCRSPLVKIKAALVGDYREEYLFVLRQCQTRWQQLCASLTECDTELARLTAAIAGVTAGPLPAAGFAQRRVQKNMPAVMPVYEEAHRLLGVDLSAVPGISGGVLCVLISELGTAQHIREKFRSAEAFASWLGLCPDNRISGGRILKAGTRKVANRIATILRLAANSLGRAQGRMGEFVRRFKGRLGKAEGIVAGAHKLARIIWAMVVSGQPYDEAKAFDTTPAATARRLKNLQNQALALNMKLVPA

SEQ ID NO: 154296 - protein, 364 aa, unidentified
MDPAHPGGSNFGRGLQRGGIIMQVVRIGLDLAKYVFEVHGVDGQGNVVIRKTLRRGSVSTFFANLPPCLVGVEASNGAHYWARVLTELGHKVRLISPQFVAPYVKSNKNDRNDAEAICEAVGRPTMRFVPPKSPEQLAVQALHRIRQRLVRSRTKLVNQIRGILAEHGIVIARDIWRLRRALAEITENSTDSLNTLVRVLIIEGQAELLDLDRRIASCDRRIRELYRTSELCQRLGEIEGIGPVTATALVAAVGDRSCFKNGRQFAAWLGLVPKQRSSGGRNRLFGISKRGDRYLRTLMIHGARASLGKARGKQDPRSRWLASLRQRRHPNVAAVALANKNARIVWAMLVGNVSYEPARSVQAA

SEQ ID NO: 154297 - protein, 418 aa, unidentified
MQVETDEPEIIERVAALDIGKAEVVCCARVPGPGGRRMQEVRSVSTMTAALLALGDWLAELGVSRVVMEATSDYWRAPFYLLEDRFETWLVNAHDVKHLPGRPKTDRLDAVWLCKVAERQMLRPSFVPPPAIRQLRDLTRYRVDLLAERTAEKQRVEKLLEDALIKLSVVVSDPFGVSGRAIMAALIAGERDPAVLANLARGSLRSKTARLTEALTGRFTEHHAFLLTQMLRRVDAITADVATVQARIDAQLGELAPAVDRLDAIPGVGPIAAQLILAEIGVDMSRFPTPAHLASWARFAPGVSESAGRKKGNAGTGHGNRYLARVLGEAAIGAARTDTFLGERYRRIARRRGKNRAIVAIGRSILVIVWALLADADAEFVDLGADYYASRTNAERKVRQHVKELQDLGYSVTLNPAA

SEQ ID NO: 154298 - protein, 380 aa, unidentified
MNDVRAFIGLDVHKETIAVAVAEAQRGGEVRFWGNIPNTPSDLQRVSAGLIERHGRVEFIYEAGPCGYHIYRQLTSRGHDCQVIAPSHILRRPGDRVKNDHRDAETLARLGRAGELTRVWVPDPLHEAIRDLVRARHAANRDVKQARQRIQSFLLKYQLIYDSKPWTKRHRLWLANRQFAHAASQIAFQGYVNALEQAESRQAELEREIGDLVPTWSLGRLVTALQALRGVALNVAVTVVAEIGDFSRFENPKQLMAYVGMIPGEFSSGAKIRPRGITKAGNYSVRRVLYEAAWNYRHTAKIGAYKLSHMPADIPQVAKDIAWKAQLRLCKRYRTLLAKGKKTQVAITAVARELLGFMWAIAHELAREPINHRAACPAAG

SEQ ID NO: 154299 - protein, 435 aa, unidentified
MNNEGSRNQEALVNQVVAWVGLDWADSEHRICLYDVATGNCEASALKHTAEELQQWLAGLQERYEKAKVAIVLEQGRGPVLYALMNYDFVVLYPVNPQSLANYRKTFATSGAKDDPSDARLLMEMVRKHPERFRPWVADDADTRALRLLVEGRRQMVDQVTALTNQLTSHLKNYFPQAVEWAGELDSRQACDFLERWPTLEAVQGARPAQLRKFYQQHGRPRAETLDRRIQQIKQAVPLTRDPAVILAGSVMAQGIASQLRSLIAVVENFDDQIKRLFHRHPDRLVFESLPGAGEVLAPRLLAAFGADRERWQSAAEIQEFSGIAPVTEKSGKSHWVHWRLSCPKFVRQTFHEFAGSSIKWSTWAKAYYLELRSRGKRHHSALRSLASNGFASFSPVGETARRTTNNVFSRPCNVEDPPFLRKLRASLKLASRQR

SEQ ID NO: 154300 - protein, 423 aa, unidentified
MRIVGMDIHRVAAEIVVLCEGELSKLGRVPMLRDKLEAFARQELNYDDHVVIEATGNATSVAELLAPFVDRVIIANPKQVRMIAHAKIKTDAIDAAVLAKLYATGFLPEVWVPDARTLALRRQVTRRTQLVRQRVRLKNMIQSILHAHLIPPCPHGNLVGASGRKWIAKQHVPDDERLAIERHLGQIDLIEISLGVIEAEIAKAVLSDPVIRRLMTLPGVDMTVATGVAAAIGDIRRFPDPQRLVGYLGLNPSVRQSGEGPAYHGRITKQGRRQARGMLVEAAWAAARSPGPLRAVYQRIAARRGKHIAAVATARKLTMILWHMLTKEADYIWARPALLARKFRNLELKAGLPAEHSKRGSAFDYNIPEKRAAEREQVEEAERHYARSTSRWRSRPRKGMQIAQGAFQLHPYPLVFLVWRSPV

SEQ ID NO: 154301 - protein, 312 aa, unidentified
MTQACAAGVDVGRDYLDVGLAPSGRTFRASNSAAGVQAVVAGLRKAGARRVVLESIGGLGRPLVRALAEAGFEVGVVDPKRVKALRTAEGKSAKTDDLDARLIARFALLMQDAARPVPGAEVYEIRALSTRRRQLVEMIAAEKVRLKQALDAPVAESCRQMIALLGQERLRIEDQLQTRLLKADGGAERSRLLQSIPGVGPAVSMTLMADLPELGQLDRKAVASLAGLAPHPNESGTRTGAARISGGRPCVRVALYMAAVSASRTDKGFRREYLALRQAGKPPKVAFVAIARRIAMAANSIIKSGRPWEVRA

SEQ ID NO: 154302 - protein, 410 aa, unidentified
MGLYCGIDWASDHHDVAVVDDDGHVVARGRVSNDAAGFVQLLTLLAEAGDSAKDPVPVGIETDRGLWVAALRETGRVIYPINPLAASRYRARYAVSGAKSDATDAVLLANIVRTDADAHRPLPADTELAQAIRVLARAQQDAVWARQQIGNQIRDLLKDFYPAALVAFAELPSGGLARSDARTILAAAPTPAQAARLTPARLRRLLVKAGRRRELDRDVERLRAIFTGTYLHQPPMVENAMGIQLTALLRQFEAACAAADELAEAAIAHFEQHPDAAIITSFPGLGNLAGARVLAEIGDDRSRFADARGLKAFAGSAPITRASGRKSVVTHRHIKNRRLSAVGQIWALGSLRASPGARRHFDIRRAAGDWNRQAQRHLFNKFLGQLHHCLQTGQHYNEHRAFPPPLQRAA

SEQ ID NO: 154303 - protein, 359 aa, unidentified
MCQSGVVEAPLREASVSEVTTIGLDIAKNVFHAHGADERGGVVFSKRISREKLLDFFAAQPSCTVALEACGGAHHWARQLIHLGHQVRLIPPAYVKPFVKRHKNDAVDAEAICEAAQRPSMRFVAVKGEEQQAAGLVFRTRDLLVRQRTQLINAIRGHLSEYGWVAPKGPSHVAMLADLLEEEEMASTLPEAARSMLRVMLDLLGNLDDRIKELDKEITRQAREDEVSRRLMTIPGIGPIGATAIAALAPPAETFTKGRDFAAWLGLTPLQKSTGGKQKLGATSKMGERTLRRLLIIGSSAVVLQASRRGAPRGSWLERMLARKPRMLVTVALANKTARIVWALLVKQEDYKAPVAALA

SEQ ID NO: 154304 - protein, 356 aa, unidentified
MISPAKCRHLNSPPTVQLRPAYAQPPSIPIPQVFATEPLYGIDTDGVILSQKVSRTKLAEVVGNIAPKAIAMEACASSHYWARCWLAAGHEVRLINPRFVKPFVKGSKNDAIDAEAIFEAGMRPTMRFVPVKSTDQQDLQSLHRARDRLIGQRTALINHTRGLLAEYGIVLPQGSWRFMAQAPVTIASANLSDLARAIFGELLDQLDDLDRRIKKLDAMMVSLCRTNETCRRLAKLPGVGPVVATAIVAAVNQGRQFRSGREMAAWIGLVPRQYTTGGKPRLGGIGRRANHYLRRQLIHGARAVVGRLSKHDDRRANWLKALVARRGFNRTVVALANKTARIAWALLNRPEAYAAP

SEQ ID NO: 154305 - protein, 351 aa, unidentified
MKTEPTAQPKLYIGIDIHKRSWKVHCATDLFGGKSFTMPPRPEVLLEYVTKHFPDHEVTTAYEAGCCGYYAHRSFEQYGWTSLVVNPADIHRKGKERFTKTDKIDAQLISRELKDGRLESIHIPDIEREQLRSLFRRRNDLVKDFRRIKSHIKMQLLYFGVAVPDEFDNDHWSHKFRGWIDDLSFVYPSARETLDSRMRSFRFIDQELRDVSSEIRAYCRKHYKKDYYLLKSIPGIGGIVACAIICELGDLRRFKSIKHLAGYVGLAPGIHQSGNNQKSTGITVRAHRLMRSYFIEAAWQAIRTDPIMQAYYRKHLGKDVKSIIIKVARKLLSRTLAVIKTETPYAIGVIE

SEQ ID NO: 154306 - protein, 462 aa, unidentified
MKVLYERVAGIDVHKDMIKVAIRSPGEKRWARTTEILEFRTFYGVLQEMARELRRRGVTHVVMEASGVYTEPVYHALCEQDFEQVAVINPAHAKALKGHKTDAKDCARLAELFECGLLHGSYVPSAEQKEVRDLTRYRMKTVQARTSEIQRLAKALESAGIKLGSVVSEITGVSATAMIDALIDGERRGAVLADLARGRMRTAGKLADLSMALAGRFTEHHALLCRLHRDRIAGFDTAAADLDERIAGKAARWHREAGLLTTVPGFGDVVASAWLAEIGPAPHLWFASHEKLACWVTLCPGNNISAKKRKHSRTGDAGTYIKPMLVQAAWAAIRVRGRLQARYHRLVRRFGGDKNPGAKKKAITAIAHTLLKIAYQVLKSGMPYQEPGADFYTRRESPEQRRKYHERQIQKIYPGCAVTIIIGPPPDSPPLGSDRPPRPPGLPPAAQPCALTRAPDRHAPDR

SEQ ID NO: 154307 - protein, 336 aa, unidentified
METVRAIVGIDVSKKKLDIALLVNGKIKAKVVDNSTDGYELLLMWLSKSKVEKDALHVCMEATGIYYEPVALALHDAGVAVSVVNPACIKGFGHSENIRNKNDTADAGLIARYCAAMQPALWSPPPLEQRQLRAWSLRVQALKDIRQQEENRLEANTFTGMTDVAEHVKQHIAWLSAEIEKLEGDIDDHIDRHPGLKRDAELITSIPGIGATTVARILGQLGDIRRFDNAKAFAAFLGVTPKQRGSSTSIKGRTMMSRAGSMSMRAALYMPSLVACRHNPILRRFAQRLSATGMAKKAVIGAVMHKMTHLIYGVLHTGKPFDPNYLTSGLAIQDGI

SEQ ID NO: 154308 - protein, 340 aa, unidentified
MDEYDGRQYVGIDLHRRRSVIVRMTPEGERLGPAVRIDNDPFELAQLVASWGVDPEVVLEATYGWYWAADVLVDAGANVHLAHPLGIKGFANRRVKNDEIDAADLADLLRMGRLPEAWIAPPQVRGLREQVRHRCKLVALRSGLKAQVHAVLAKQGVHVPMSDLFGVAGTKLLDELGLDAPFQARLLSLRRLIDAFTFEIDIVAKRLTAELKSHRGFQAIQAIHGVGPTLAAVFVAEIGDVTRFPGPQQLCSWAGMTPRHRESDTKVHRGRITKQGNRLVRWAATEAVQKLYGGAIGATRARLTVKRGHNIAKVAAARKLLTLVYYGLRDGHIRCLARPA

SEQ ID NO: 154309 - protein, 305 aa, unidentified
MTGSRSQDVGYAVGASKPRRATCERSRSLPSNLRYLRLDVHAETIAVAVAEPSGEVRSLGVIPNRPETVAQLIRKLGSREHLRACYEAGPCGYVLYWQLTKLGVACDVVAPTLVPTKPGDRVKTDRRDAENLARCHRAGDLTPVWVPDVAHEALRDLVRAREAAKQDQLRARHRLGKFDRLEQALDTAITAAPGALRSIIAALRCLRGIRQLTAATLVSEVGPLSRFTHPRQLMGYSGTVPATRICAGSWSKPPGPTAARPNAPRRCARASAGNRTRSRPSPGRRSTASVRGIAVSSGAGNQRPM

SEQ ID NO: 154310 - protein, 338 aa, unidentified
MELKRVGLDLAKNVFQVHGVDGYEVVRCRRQLRRSEVLKFFAGRPPCLIGMEACAGAHYWARELAKLGHTVKLMAPQLVKPYVTSQKNDANDADGICEAVGRPKMRFVAVKTVAQQEVQAAHRIRSELIRHRTAKVNQIRGLLAEFGLVVGRRIEVLRRALPELLEDGDNGLSGGVRRLVDGLRRDLVQLDERVAEMEAVIVAEARANEACARLQTIPGIGPLTASALVSAVGDGRQFKNGRQLAAWVGLVPGQDSSGGKPRLLGISKHGDTYLRTLLIHGGRAVERTCGAKTDPRSRWLRAVGERRHRNIAAVAQANRNARIAWALLTRGESYRAPA

SEQ ID NO: 154311 - protein, 421 aa, unidentified
MKRESQEEFAAFVGLDWADAKHDVCLQATGTERREFLILEHRPEAIDAWVHTLRTRFNGQPVAVCLELNKGPIVSALRQYDFLVLFPVNPLTVAKYREAFTPSRAKDDPTDAELQGELLLKHRDKRTPLAPQSAMMRTLAPLVEHRRRLVGDKVRLTHRLTSALKNYFPHVLQWFPDTDTVLFCDFLSRWPTLKAAQLARRTTLEAFFRAHHVRAAEVIASRIQAIKSALALTTDDGVITPNALLVQALIAQLRVTLQAIADCDTAIAQRAQEHPDFPLFDALPGAGAVFAPRLLVAFGEQRERFTSAEDLQKYAGIAPVTERSGKKSWGHWRLQCPTFLRQTFVEWAAASTRHSFWAQVYYQQQREKGKAHQAAVRALAFKWIRILSRCWQDRTPYDESVYLQALKRRSAPFLHNLASGS

SEQ ID NO: 154312 - protein, 335 aa, unidentified
MKALSKPERLAGSKSRIEHKEGSNNMEQFVGIDVSKAWLDGEAVPQSRPMRHGNDSAGIAALVSTLVAEQPALVVLEATGGFETEVASALAAAGVPTVVVNPKQVRDFAKAMGILAKSDRLDARVLALFGQRIRPQVRPLPSPEQRDLAELLDRRAQLVSMRAQERTRLATALAVAKPSLREHIQWLDARIGEFEIELTARLRSSAAWKVKVDLLKPVPGVGKVLLFTLLARLPELGHLNRCDIAALAGLAPFADDSGKRRGQRFIRGGRAEVRKALYMATLSATQHNPAIKPFFARLTAAGKPFKVAMTACMRKLLTILNAMLKTNQPWQPRVA

SEQ ID NO: 154313 - protein, 349 aa, unidentified
MEKRRIKQCVGIDCGLEELVTSFGVLDKTFRQDFLSNTAFDNQVSGFKKLLSWAGKLAEADVELTYVIEATGVYSEKVCLFLHQHNQRVVLLLPNKAKAFSRTLSVKTSTDKVSAKMLAQFGLEKQLAAWQPAQEIFRNLRRLSRERDQLIQQQTVIKNQVHAESHGAWPSQPSLKRMKQRLVLLKKQILQIEAEIKELVDSDDSLKERVEKICTVKGLRLLTVATVLGETNGFNLFRNKKQLTSYAGIDPVERQSGISVRGKSRISKKGNKYLRKCLFLPALAAQRHNPTMLPLYTRLVDKHGIKMKASVAVQRKLLELIYILWVKNEAFDPDYKKNEGQPREAALAN

SEQ ID NO: 154314 - protein, 432 aa, unidentified
MNNETKSLPLTPIYAAFIGLDWGDQKHALSLCVAGSKVIEQSSLEQTPEALAQWANALRTRFPEGQIAIALEQSRGALLGGLLQYEHLVAYPVNPKTLARFREALHPSRAKDDPVDADLLLDLLVKHRDHLRPWQPDTVATRQLALLSEQRRHFVDQRTALTNELLSHLKAIFPQAPELVGADLASPLATDFLRKWPTLQTVQSVKPAVMRKFYYGHNSRAEELIGRRLQLLQEAVPLTKDVALLAAHSLAIQTLAAQLATLRTFIDQHEEQIQQLFAAHPDAPLFDSLPGAGPALAPRLLVALGTDRNRFPDALSLSCYSGIAPVVEKSGKTQYWVHLRWQCPKFLRQTWHEFAKCSLKSSLWARACYDELRKRMGHHEAIRKLAYKWQRIVWRLWQERQPYDEARYLRSLQKKGLAIYASLPLPTTLDGQ

SEQ ID NO: 154315 - protein, 387 aa, unidentified
MQVVTGQAAAPTAIQTNLRAIFVSLELSRSTWLITSLSPGAAEKMSKHSVQAGDIAGLLRRLAQIKEKARARTGRDFPIITIQEAGLDGFWIHRVLQSEGIESHVVDPASIATSRRRRRAKTDKIDGETLVRTLLAYKRGEPRVCAMIKVPTPEEDSRRLCRERKVLTAERVLHVNRIKGLLFCQGISGYEPLRRDRHERLEELQTGDGRPLPPHLKAQVNRELDRLELLLKQIKAVEAERDALLVAAHTPAAVPASMLLNIRGIGPEFAAVLWSEGLFRHFDNRRQIAAYAGLAPTPWQSGAVDREQGVSKAGNPRLRTTLIQLAWLWLRNQPHSALTLWFHERVSRNGGRLRKTTIVALARKLLVALWKYVTAGVVIEGAAMTAA

SEQ ID NO: 154316 - protein, 419 aa, unidentified
MKGGDYMKNNFLSTLFVGIDVSSKTNVLCALDFQGNKLLNLKSLNNQPGAESILHSVLSCLNSNSIKYVVIALESTSFYSTHIDNFLSSNEALLAYTPMVYCLNPKTIANYRKSFVDMDKTDPLDAFIIVDFARCGRITSQPWRGAQFLSLQRLTRHRLHLIESISREKAYMVSNIYLKFSQLAVVDKEDKPFSNTYGATSEAVLTEFLSLDDIAYSSLEDLVDFIRTAKLLQKAARDSYRLDKVLYEPLNVSIASSFNVINAFETDIKTIDKAFEKAIKGINTAEYQSLIFIPGIGPVLASGILAEIGSITSFDSNDALAKYAGLTWRTNQSGNYTSDETNMTKTGNKYLRYYLIEAANSVRNNVPVFNAFYYKKYDEVTTHQHKRALALTSRKLVRLIFGLLTKNQIYSSNKAGEIQ

SEQ ID NO: 154317 - protein, 403 aa, unidentified
MVLLQVGIDPAKKSCVASVVDDSGHLCRKRLDFVPNRSGVARLVERVQALGPGVPCHFFVEASGYLWYAPAALLRELGQPVSLINPSYTKAQRRLHSPHAKSDARDAQALARVAFNMGDKALHPADIPEGARLNLRLLVRQRARTQEQATAIKLRLLSWLGLTAPGLTELWGTELSASRREFLGHFPTLAKLRRLGPERVRRFLERRAPGESQQETVQALFALVQEAYCPRDLDDRLVAEQFAMEFEHLALLAKHLQQLDRRIGALLAQCDPQGLARSLPGFGPLVAGILVAEAGCDLSRFPSAKHFASWTGVVSRASGTAGQQVEGLPITKAGRGIVKWALYMAARSAVNHDPEMHALYDRLRAKEKHHNVALLAVAHQLARVYWAVMTEQRPYQKRPPRTP

SEQ ID NO: 154318 - protein, 373 aa, unidentified
MRKTIMIGCDLHDKTMLLKIAEGCEAPETRSVKNTTAGRTKMIEGLGQRAAAAGGARVLFAYEASGQGFGLYDELTAAGIECHVLAPTRIARSQRQASQKTDEKDAQQLLELLRAHVLAGNELPSVWVPDPTTRDDRELVRMRLELAEKMTMVKSQIQSLLKRNHIRRDAGSGKGWTRLFRSWLKCTLVESPSSPLGPAARLALASLVRQLDFLEEEQARLDEGVNALASTPRYAAAVEEMTSLCGVGVLTAIVFLTELGDLSRFANRRQLAAYLGLAPRSFESGNATVRKGHITHQGSSRVRKMLCQATWARVRWDRQEQQAYERIVARNPKKKKIAVVASMRRLAIRMWHRGQAPPGTLSRGRVLAMAAHP

SEQ ID NO: 154319 - protein, 419 aa, unidentified
MSFKIFKFNCCGLDVHKTWIYACIGITDSNNRTEYKQARFSSFTKGLNELCDWLAKYNCKDVCMESTGKYWIPVFNILEQHSFWVTLSHPKYTKPMKGNKTDRKDAKWICDLYMCGMVKPSFIPPADIRELRDLVRYRFKLTCMITGEKNRAQNCLTVSNLKLDDVFSDVFGKSSRSITEHILQHPGEKFDIAPFVDSRCKTPITEIQAAVDGAISKEQVVKLRQCLDHIDELNKHISEVEQEILRLSDKYEIALNLIRTVPGFNKNPLTAIQVLSEIGGDMSVFPTAKHLVSWAGCCPRNDQSNQKIKSTRISRAGSYFKPVLVQVANALIKSKKHSEFTSRYKRIKARRGHKKAIIAICRMILTAIWHILSDLKPYTPEGFLESRPVKEGKVLSTSQALNLLKQRGYIIKGEPLAVS

SEQ ID NO: 154320 - protein, 443 aa, unidentified
MEVIYDRCAGMDVHKKTVVACCITTGTKGEKLVAVRTFGTMTADLLALSDWLASKGITHVAMESTGELWKPVYNLLEGSFEILVVNARHVKNVPGRKTDVQDAEWIAQLLRHGLLRSRFIPPQAQRDLRDLTRRRTNLVQDRATVVNRLQKVLEWANLKLTLVASDVTGVSARAMLEAILAGQEDAQALAELARGKLRHKQKELEQALAGRVRDHHRFLIASHLAQIDFLEEQVALFDAQIAQHMEGQARGDGSPKPDVREVNRDGAAPCGAPEPLAWEAAVALLDTIPGVGRRTAELLVAEIGTDMGRFPSARHLASWAKLAPGNNESAGKRYSGKTGLGNRWLRSGLVQAAHAAVRVKNSYLSSVYHRLVGRRGVKRAIIAVAHRIVVAAYHMLLRHEPFRDLGASWLDECNKVKVVKRMSRRIERLGYRVVVEPIVASAS

SEQ ID NO: 154321 - protein, 314 aa, unidentified
MMKITFIGGDVAKSQILFAQHGKDRVEQVANSKTDLRRFFKRLPTGSALAMEATNTYHELAAQLAYDLGIDVYVLNPRDVSHYANSIGMRAKTDPCDARMIARYLAREHTDLHRWKPATQAQEALKALINRRSTLVSSRVAMQQSMGTESELKPVLNGLKKAFAKAVAAIDKAILRRLKEEPELARHADMLKDIPGIGPVVSAALATLLSRHPFASADAAVAFVGLDPRPRESGTWRGQRKLSKRGPTEIRRLLYVAAMTTARNVAMRGEIDRHKAKGLSATAIYNIIARKLLRTAWSMLKHQTPFAMNRFSAA

SEQ ID NO: 154322 - protein, 392 aa, unidentified
MIENYDSVDVFVGVDVGKGEHHAVALNRAGKVVFDKPLPNDEAKMRAVLQKLKQHGIVLVVVDQPATIGALPIAVAQAEGVLVGYLPGLAMRRIADLHAGEAKTDARDAAIIAQAARTLPHALRSIQLADESVAELSMLCGFDDDILGQMTATSNRIRGLLTQIHPALERVVGPHLDHPAMLDLLQHYPSPAAMKSAGTSRLATRLGRRLAAEITQALSEQTVVVVGTNAAATVLPRLSEQLSALRQQRAEIAIVVEKLVEDHPLSPVLTSMPGVGVRTAARLLTEVAGKHFETAGHLAAYAGLAPVTRRSGSSIRGEHPSRRGNKILKRALFLSAFAALRDPTSRTYYDRKIAQGKRHNQALIALARRRCDVLFAMLRDGTLYQTDHTLAA

SEQ ID NO: 154323 - protein, 336 aa, unidentified
MNGNTGWWVGIDVAKSKLDVAVLDERGKIKSHVFDNSAKGFEALIAWLRQRGCDLASTRVCMEATGPYSEAVSTSLSDEGWYVSVVNPSRIKGFAQSEMARNKTDKADAALLARFAQAMKPEAWTPPALEVRQLRALVDRLQALKEMQQQEANRLESAQNQPGMQASINSHIQWLRENILELERQIDDHIDRHPGLRADVELITSIPGLGNTTAAKVLAYLGDVRRFKNAKALAAFIGVTPRLKESGSSVRGRSMISRSGHAYIRHSLYMPAMVALKYNPLIKAFGLRLKGEGLAPKAVISASMHKLVRFIYGVLKTRVMFNAQLLGNRLDFQDGI

SEQ ID NO: 154324 - protein, 371 aa, unidentified
MKQYSTFVGMDVHKNSIEIALADRGRNGEVRNYGKIDGTLEALDKVIRKLISKGGHLHFVYEAGPCGYEIYRHLTAKGYDCAVVAPSRIPKKCGDRIKNDRRDACTLARLDRAGELTPVYVPFAEDEAIRDLTRAREDAKIDEKKSKQRLLSFLLRSGLRYTGRKTWSKAHMRWLSDIKMAHPSQQIVLQEYIDTITECSLRVHRLTEQIRQLLPQWRMFPVVEALQALRGVSLIVSATTVAEVGDLKRFKNPTELMSYLGLVPSEHSSGEKTRRGSITKSGNGHVRRVLVEAAWAYRLPARVSRVLLKRQEGLLKEVCDISWEAQVRLCARYRRLWAKGKPKQVVVTAIARELCAFMWAIANRIQVPATQ

SEQ ID NO: 154325 - protein, 430 aa, unidentified
MSRPQVIDDQEHERVYGRVAAVDVAKDTGVVCTRLPHPSRPGARRATVWTVQARTGAVRALGRQLRGDGIEMVTLESTSDYWRIWFFVLEAAGLAVQLVSPAQARQLSGRPKTDKLDAMWLARLTEWGMLRPSFVPPKAIRDLRDYTRARTRLVRERTRCWQRLEKLLEGALVKVSSVASKLTTVSAQDMIKAMIAGQRDPQVLVGLARTRMRAKHDDLVAALDGMFDDHHGELAGMLLDQIAFLDGRIAQLSARAAELTAAMPEAWGINADGTTGPDAGAAPGAPVLPAVARLAEIPGISDDLARAIIAETGLDMSRFPTAAHLVSWAGLCPSARQSGPRIRGREEGPGQRLPARQPRPGRHRRRPHRHLPRRALPPDRPPPRQGQGPGRRGPLHPGDHLAPARRPRRPVHRPRRELLPDPYRHRPQAP

SEQ ID NO: 154326 - protein, 372 aa, unidentified
MKKLNYIGLDVHTKNIVMGESHSSGEAKITGEFLNTDSGVKKLITRLSKLSEEFELKICYEAGPCGYALKRILDVKGYDCEIIAPSLIPVTTGNRIKTDKRDSIKLARLFRAGELTYIQVPDEQKESVRDLVRCRDDVMSDLKRAKQRMNHFLIRHGYHFPRTNWTQEHLKWISNLEFSDRNLQNVLSIYNNEIEFLEMQLEELDKEIHVIAETEEYNEKVKALCAYRGIGVLTAMIIIAEVIDFSRFSNPRELMAYLGMVPSEYSSGQSVRKGSITKCGNKRVRRALVEAAHHYRHHPTISKIMRKDLEKTQPQFRIAPVKALKRLNKKYYSLIYRGKKVQTAAVAVGRELIGFIWHSMILIENEIAEISN

SEQ ID NO: 154327 - protein, 372 aa, unidentified
MFIVGIDIAKRSHMVRVIDDQGRTVYKPFSIRNSCSGCSAMLERLRKLTNRKGEFLFAMESTAHYWLALYTRLRKEGYQVVVLNPIQTDAMREMLMEENKTDEIDTLVIAETIRFSRYKASSVPQEKLSRAQTGKLTEVLQNASNGRFGEWKARQLKELARDSFGIPDCEGAYSALLLLYLDQFQSLQDAAAALEKRIAELFSQFDSTLTSITAIGPVLGAVILSEIRDISCFASAHKLAAYAGLNPKVNQSGDKKSSAVHMSKRGSPYLRRAVWMAGAVAVQYDPMFRAYYEKKAAEGLRYMNIIGHVSKKMTSVIFRSCGTPRYTSLFCPLRNGGMAYFLTAHCGGLSSLHPLSSPVHSTLSEFLYLTNP

SEQ ID NO: 154328 - protein, 367 aa, unidentified
MKKISTVMANQRRNVSQQKLTIGLDLGDRNSWYCVVDEAGQIQLEQRVRTTAKALQEVFGTMPRSRIALEIGTHSPWISRMLSDLGHEVIVANARKVRLIGESRKKDDRLDAQTLARLARIDPELLYPVKHRSAQAQADLMMIRARAGLVRARTGLVNTARGLAKSYGERLRGCNVRNMNPEKAEGLSPELQRALEPLLAGIEAVSERICEYNERIEQLAQQSYPQTALLKQVKGVGTLIALTYMLTLEDPHRFQKSRDVGCYLGLQPGRRNSGRSEPQLHISKEGDPYLRTLLVQGAQHILGPFGVDCDLRRWGLKLAERGGKSGKKRAIVATARKLAVLLHHLWVSGEVYEPLHNSSRTTVAAAA

SEQ ID NO: 154329 - protein, 372 aa, unidentified
MENGITFVGLDAHKERISVAMLVPGQTVVPVQWDVPNEAAAVKRMVRRIEREAPEEVRFCYEAGALGYALQRQITEAGSEKVSCMVVAPSLIPRKPGERIKTDRRDARKLGELFRAGLLTEVQPPTPEDEAVRDLCRAREDAREDLTRCRHRLGKMLLRKGVVYNQGNAWTARHRLWLRGLRFEHASEAEVLDDYLLAIEQLEERLRGLEEKLERVSQKPPYLEPVGWLRCFRGIDTVTAMTIVSELYGFERFHSPRGLMAFLGLVPSEQTSGYDPKRGRITRMGNGHVRRIMIEAAWHYRHRPGVTSLRKRRQGQPAEIIALADKAQQRLYRRYRRMTEKGIPAPKAVTAVARELTGFVWAALHPKTRATA

SEQ ID NO: 154330 - protein, 397 aa, unidentified
MIAVGIDVSKSKSTIAILNGDGTIRVKPFDVHHVADELQALVDYIKRISEPPTILMEPTSHYHYPLLKAFQEADLPVCLINPYQMKKYGDTELRKAKTDKRDSLRIAQYALEKSYSLVPYTPADQKYDDLRFLSRQYGQRISTLTVAKVQLLSLLDETMPGITTILPFKSRDPDNCVLLRFIKRFKSFDVIRKMGKTRFLDSYQVLVKKTNDRFAGAKGLKIYELAFNSITTRGENPLSAMTQDQCVDLVSTSQKAADEINLQMRIIAETIPEYKVLRSMAGVGDRLGPIILGEIGDIRRFHSGKALNAYAGNDAPPYQSGQFESRNRHISKRGNPALRKACFEVMQALKLTKPQDDPVYLFMLKKEQEGKPYNVAKMAAVNKFLRIYYARAMELYK

SEQ ID NO: 154331 - protein, 350 aa, unidentified
MKRVAQHFIGVDLHKTVLQYCVVDGRGEIVHEQRVAIAPDAAGLEVFDEFAPWRRNCRVAVEAVGMNRWFVNGLIERGFPVVVADPIKLNLKVLGKKTDKRDAREIARRLWLGDIDRDAKTWYPDDEVYGDRKLARTRQDLMVQRQHLSNQIKAMLRAYNVSPPAKTLYSKSGIKGLLAMRLVNDQLTRSLHELTNAMAAMAACVDALKEGIEARVAADPRMHAAKAQLPSMGAVSVLTLLSELGDAGRFRDAKAVASSGGMVPRVYQSADTSHHGRLTKRGNRGLRFILGQWAVRLMGTSATVAVWARQKRKRLHVNKVRMALARKLLIGVWVMLTRGEVFNLKLCLGN

SEQ ID NO: 154332 - protein, 398 aa, unidentified
MPNMIRVGIDAHKRNCTTCVFDNDGAEQQALDLPTSSFVFNTTREGVQEFMEKVPENSIVVIETSTTGKVLTKMLSSKYDIHLVAPSERRPQIKTDRRDAVRIVREDMLGYLRRCYIPSPYIEEMRTLVGQQMDLGAKISRVKNQVHALVERNMVQSEFSGVSDVFGVEGLRKLSKIEFSSKQDMIELGMYLSELKLYASLHRQIETGIARIADSDKDCQLLMSHPGISSFTAVAIKARVGDGSRFPTKKHLCSYAGVVPKARNSGEYVSEHAHVKHGDDVLKYALTCAVRGAVRANADSTVKKFYNKQIERGMDPKKAEVAAARKLACIVWKILASKQRYADEDEYLTKKKARENTSKARRVLRDPVEAQKIPQLIESLSTFAEVLERYPEDRKELG

SEQ ID NO: 154333 - protein, 330 aa, unidentified
MQKVQHIIGADLSKKTIDLFYWSTKSHLDIKNNSEGFKTLLGSIKQQRIDRSELMIVMEHTGLYSFCFEEFLHKHQIPFCKVSALMIKRSLGLVRGKSDKIDARRIASYGFEKRDTLLPEPATSKELKRLQLLYSTRERLVKQRAGLINAVKEYRSIGLSTNDPILQSQQRLIKHFEKEIAKLEAEMDIIFSSDACLQKNQQLLQSIKGVGKVVSTATIIKTKNFTRFTDPRKFACFCGTAPFEHTSGSSIRGRTRVSHLADKQMKTLMDLSAKSAIQYDKELREYYLKRIGNGKSKMSTINIVRNKILYRMFAVIKRQTPFIENYLQTA

SEQ ID NO: 154334 - protein, 312 aa, unidentified
MDILALCAGIDVSLDALVVSVGGAKAFEVPNTQEGALELARLLPKGCTVHMESSGAYHRLAERVLAGQGFKVRVHNAYRLRRLSDGLASKAKTDPLDAKALSLHAGLLPSYEPKTPERQDLADLGRAIDSVKETMASFKKKLAAPNLDEDAKQAYRELVGVLAGQAKRLEAKFAKRVMASSSKEDYMLARSVRCIGPVAARVCICELPQNVRSATPAQASSYSGLAPMDDSSGKRHGAKHVGRGNVRLKRTLYMCALTAIATQPWARDHYARLRAKGKTHQEAIVPIMRKLLLRVVCVLKRRSPWQDEPPGA

SEQ ID NO: 154335 - protein, 346 aa, unidentified
MKAATHILGIDIAKRNFEVNLRTLDPQDPAQARQATSFSNNRKGFQALQRWLEQRGIKQAALLHACLESTSRYGDALGQWLYSQGHQLSMVNPRRTHHYAQQRLARTINDRIDAALIADFCAEHRANLILWEPLPGPHRQLQDLTRARQALVEHRDALGNCLETATGLARTAFVRQRANLDREIQRLERAIKELLEQPQSLQLKSQIALADSVPGVGLVTAATVVAELPPLDKLSHSNQAAALLGLDPKSKTSGETVKTASRLSKMGSKRGRRALYMPALVALRCNPVVRSLGQRLSQRGRSGKYIVVAAMRRLLRLIFGVIKSAQPFDPNWSQRHAQRLKQPLGK

SEQ ID NO: 154336 - protein, 582 aa, unidentified
MKTRYFLGIDIGKNSFHAALTVEGQNFYDQEVSNNTTAIKKYFQELKTKFGFKSDQLIVCMEHTGIYCYPLIDHLTKQRVKVCIEPALRIKQSQGMQRGKNDKIDSIRIAKYGYKNADELRFWQPKREVLQKLRALLVVRERLIRAKTQFEVPIKESREFIEESIRFLAIKNCKATISAIKKDIKKVDAEISKVIKEDNQLQAQVKIATSVTGIGTIIAANMILTTNEFNDISNHKKFACYAGIAPFDNTSGTSPRRSHVSHMANKRIKTLLHMGARSAIQYSPELKQYYQRKLAEGKKPFSVLNAVCNKLISRVFVCIKNQRMYQKNYQLALAWTIEITKVEMSLGKADWIKELKSSKIAVTLSNTVGIPFVPSNSNIMTHFIRILFSCLVISLVSIPGFSQEAKPKKESAKPIKEAAESDEDDESDRSEGLRKIASGRSDRDINVQIDEEALESDIEVAVESAMETVEAVLENLVIDVEGVEVNIPNIDINIEPVEVILDDMDMDMDVDVDMDMDRDDFRWDEEDDDEDDSSVISGDDKDKNKQKDKDKQKDKVKDKSEKEKDKSDKNDEDKSKGLKKLN

SEQ ID NO: 154337 - protein, 341 aa, unidentified
MTIIAVVGLDIAKHVFQVHAVDEAGAVVDRRQLRRGKLMAYFGKLEPCLIGIEACASAHYWGRELAALGHDVRLLPPQYVKPYVKRNKTDAADAEAICEAVTRPSMRFVGIKSVDQQAILVLHRSRDLLVRQRTMLANAIRAHMAEFGIIEKQGMAGITLLAEIIGDDADDRIPALARRVLTLMVEQLRDVVATINSLKRDMLAWHKQNEISQLLESIPGIGPVIATAIAATVPDASVFSSGRQFSAWLGLVPGQHATGGKQRLGRISKRGDGYLRRLLVTGATAAIERSTSTRAHPWVQGMLKRHPKKLVAVALANKMARIAWALMNTGEVYRTARPAVS

SEQ ID NO: 154338 - protein, 362 aa, unidentified
MEFFSGLDVSMERTAICVVDDKGEVQMQTEVVTDPDAIAAALKPFLPRLRRAGHEAGSLSPWLQPELVKRGLRAVCLETKHVRAAMSAQRNKTDATDALALAHIVRTGWFRQAHIKTESCYRLRLLLTQRRNLKRKVLDLENTIRHSLKAFGIRVKGTGRGGFDTAVRAAVADDALSSELMDAMLAARAMLWKQYCRLHDLVVKFVARHEVCRRFMAIPGVGPVTALSFVTAIDDPSRFRRSRDVAAYFGLTSRRWQSGTSIDVQGRISKAGDGDVRRALYEAASALMTRFKGRDKVRTWGLALARRSCHRKATVAVARKLAVIMHAMWTDGTCYVGDAAASTSENQARAARKDGKLLGAQA

SEQ ID NO: 154339 - protein, 415 aa, unidentified
MNDQALCFAGVDWASASHHVVLTDGDGRKIGERIFPHGGEGLAEMATWLIATSDAADANHVLVAIEVPHGPVVETLLERGFPVHAINPKQMDRFRDRFALAGAKDDSRDAEVMASALRTDRGCFRLLAVAEPVVIELREWSRITDDLVAERTRLTNRMREQLWRYFPAMLELGGHLEAEWLLDLWELAPTPARAARLRATTIEKLLKRHRIRRLDAAEVLAVLRQPPLTVAPGTTEAACDHIATLMMRIRLVNRQIKNAHQRLDTLTARLVPDAETKPGQEEQHDVAILASVPGIGRIVLAALLAEAFDPLQRRDYAALRSLAGVAPVTKRSGKSCIVLRRYACNRRLANAVYHWARTATQHDSRSRAKYAALRARGHTHARALRSVGDRLLAVACSMLKSGSVFAPSRETAIAA

SEQ ID NO: 154340 - protein, 282 aa, unidentified
MKKQAIHYLAFDVHQATVVATARDEHGSIRMRATIPTEASAIVGLVRSLGRVHVAFEEGTQAQWMHDLLEPEAERVVVCNVRGRSETSNKSDRIDSDRLSEMLRIGAVKSVYHGARSVLTLKELVRCYTNLVDDTTRVMLRIKALFRGRAIPTPGTSVYRASNRAAWLAKIESRGARMRAASLLEQLDCLLELRPKAKAAMIAEGRRQPGWKVLGSMPFFGPVRVALVLAIMGTPWRFRTKRQLWPYIGLAVVTRSSADQEFVGGKVRRRRRAPLTRGLNRT

SEQ ID NO: 154341 - protein, 339 aa, unidentified
MDKLFGGIDLHANNSVVVVLNDQDQVMFQKRIPNELVTLLAHLGPFQSQLQGIVVESTYNWYWLVDGLQEAGYRVHLANPAAMKQYDGLKHTNDHSDARWLAHVLRLGLLPTGYIYPKEERAVRDLLRKRSQLVRQKTANLLSIQNLLTRNTGQGMRGNQIKQLTPARISELVTLPEHALALQVTVAVMQHLAEQITQVERAVHARVKLRPTFQSLLTVPGIGQTLALTIMLETGEIGRFPTVGQFASYCRCVGSTKLSNGKRKGQGNTKNGNKYLAWAFVEAAHFAMRHEPQIRQFYQRKQAKTNVFVALKAVAHKLARACYYIMRDAVPFDVTRAFV

SEQ ID NO: 154342 - protein, 385 aa, unidentified
MVKGSTDDQEAPLLKYGLSTISISSQRSAHVNSIKYIGLDVHTATISVAVLDAAGKFIMESVVETKASTILQFMQGLRGDLHVTLEEGTWAGWLYDLLKPHVTNIVVCDPHRNALLKEGSKSDRIDARKLAELLRAGLLRPVYHGNQGLRMLQELARAYVTIGKDLNRVMNRVKAIYRSWAIPCHGQSVYAPRYREEWLNKIAHHGVRCRAELYYQQLDGLVLLRKQVRKELLVEGKRHKAWKLLRSIPTLGPMRVAVLMAIIQTPHRFRTKRMLWKYSGFGVVTHTSADHRYVQGRMERSNKPVFVRGLDTNHNHQLKDLFKSAATQASTSTGPFREFYEALLAQGMREEMARLTLARKIAVITLTIWKKGVAFDANYLKSQTA

SEQ ID NO: 154343 - protein, 354 aa, unidentified
MWIIGCDFHARYQQIAALDLETGEMVERRLNHEEGGKETEGFYAALPRGARIRMEATGPALWFERLLQRNGHQLWVGNAAAIRASVVRKQKTDTRDARHLLDLLLSNRFPRIWVPSAAERDLRPLLLHRHKLVAWRTPVRNQLSALARSQGVLPRTRFWTRAGRAQLEAVPLDRWASRRRQDLFGMVDQLDPQIQELTRQIEDQAQGRPAAVALMAEPGVGPVVSLAFLLTLGTAQRFRRGKQVVSYLGLNPTEHSSGGVQRFGPISKQGNRMMRWLLVEAAWVAARRDPELGRVYRRLAFRHGRKVAQVAVARKLAVKLYWRLRESEKQSSAPPAPMQGSSDTPLVNAVGSRS

SEQ ID NO: 154344 - protein, 432 aa, unidentified
MSEGSQEELMSQNQPEIQYAAFLAIDWADQKHVWSLQDANSGTCERGEVDHMPEAVEAWVAQMSQRFAGRPIAVAVEQSRGALVFMLSKYEQLHIFPVPPAMTANLRKAFYSSGAKSDPTDADLLLDLVQRHREKLRRLSPDTEATRLIQNLVEERRRLVDEKTAQSNRLEAHLKIYFPQIPRWFGDLGSPLVCALLERWPTLEALQKARPDTLRSFFRKHHSRKEELIESRIKAIGEAMPALKDRAVVEAKVAVVKVSVQLIQDLHEGIEGLNRQIQEAAEAHPDFFIFDSLPGAGAVMAPRLLAAFGSQRERYQNATEMQTFSGIAPVTESSGKSSWVHFRFACSKFLRQSFHEWAALSIPQSKWARAYYELQCRRGKKHHAAVRALAFKWIRIIYRCWKERVAYDENVYLAALAKHNSPLVTATGAEAL

SEQ ID NO: 154345 - protein, 355 aa, unidentified
MNQEKYIGMDVHAATISAAVINAQGKVLTQFVMETKASTILEFIQAQRGTLAVTFEEGTMAAWLHDLLKPHVSRLVVCDPRKNALMRDGNQNDRADARNLAELLRTNQVHAVYHGKHGIRALRELGRSYSTLTQDSTRVMNRIKSVYRSWAIPCAGTSVYSRRHRAEWLAKLVEPGVRIRAEHLYQQLDSLEPVRQAARRELLRESRKHAAVKLLRQIPTIGPIRSALLVAILQTPHRFRTKRQLWAYSGFAVQTYDSGEFRFERGKLKRNRERITVRGLNRNHNHDLKNLLKGAAISAIERPGPLQDFYAALVGKGMRPSMARLTLARKIAAIILITWKKGVSFDPKQLQRQTA

SEQ ID NO: 154346 - protein, 386 aa, unidentified
MQKLNDLSRSLTALQPDGTLIAVVEMSLSSWLVAGIVPGVERQPVKKLAVDEFALLKLLHRWREEAEKAGRRIERIVVAFEAGRDGFWLARWLKARSVDAYVIHAASVAVSREHRRAKTDRLDSELLKRAFLGWLRGERDHCKMVAIPTAKDEDAKRPNRERESLVGEQNRIINRMKAAMIRLGIRGFNPKLKKAAGRLKDLRTPEGEPIPPNTLAELHRDMERRRLVSTQIRQIEEARLERLVQTPSDGPHAMVCLLARVIGVGTETADMLVQEVLSRNMRDRRAVARYAGLTGSPDESGRKCREKGLARSGNARVRRGMIQLAWRLLMFQKNSALAQWFRARTENARGTRKTMIVALARKLLIALWRLVREGVVPDGVVLRPAQ

SEQ ID NO: 154347 - protein, 419 aa, unidentified
MNRIETKKQRIVNAKMLIVSIDIGKTINTGYCRCPDGKDVKPFEFSNHAEGFRKLWDRICWAKTANHLEEVVVGFESTGAYGEPLVHYLKEKPVKLVQVNPMHTKRMKDLQGNSPGKTDRKDPKVIADIIGLGHALSVVIPEGAAAELRRLTLARERSIQRRTALYNQLQDLVFILFPEFLQVMKDVKTKTAQYLLRHYPTPQDIAKCGVETLSSVLKRVSRGKLGRARAQPLYDAAGGSVGLKEGTKGILLEIDEMVTSLEACNRFIEKVEEEMLPYLQQIPYSNSLLSVKGIGEVTVAGLIGEVGDFRQFHTLREVMKLAGLDLFEISSGKHKGNRHISKRGRPLLRKLLYFAAINTVRKGGVMHVSYQRYLERGMPKTKALIAIARKLLGILFALVRDHSQYVETYSQKEVLKLAA

SEQ ID NO: 154348 - protein, 377 aa, unidentified
MIVIGADTHKGTHALAAVDEGTGRVRGSRQIKADDAGHLAAVRWARELDPERVWAIEDCRHVSGRLEQALIAAGERVVRVPPRMMGATRRGEREPGKSDQIDALAVARAVVKDGIDRFPAAYLDERAMEIRLLSDHRQDLVAERTRAQNRLRWHLVALCPELERSLKRGSLEQTRALDKVDRRLRRTPACARVRVAREQVAQIRTLTRQVKTLEGDLLVLVTAQRPQLLAEPGCGSLTAAILIGRTAGAERFRTDASFARQAGVAPIPASSGQRSQLRLDRGGDRQLNRALHTIAITRASHDPATKTYLARKQAEGKTKKAALRCLKRHLARRFHHILSLPATATSEHQPPVIPNHPDRRQDIDRTITAAAPTICIT

SEQ ID NO: 154349 - protein, 424 aa, unidentified
MKYTQNERILQITEKTLIVGIDVGSEKHYARAFNFRGVEFGKLLIFENNAQGFVKLMEWAGKIANTSGFTDVTLGMEPTGHYWFNLAENTMKSGARIVLVNPHHVKKSKELDDNNPSKTDRKDPKTIAMLVKDGRYMEPYIPEGIYKELRTAMDSRWHLLKELSAIKNRISRWIYVYYPEFTTVFKDWEGKAALLILNECPTPKRIIEKGIDGIIAIWKKHKIRAVGRKRAVKLLETAKNSIGTSEGLVSGENDLMILLEDYERKMQQYERTMALIESLAMQIPGFEKMLGIKGIGLITAAGFVAEIGDISRFNHPKQIQKLAGLSLKENSSGKHKGETTICKRGRKRLRYYLTFGIMPLLSKNEEFRELHKYYTTRKNRPLKKMQSLVALSNKLIRIFYAILTKNIAYDSQKMMNDIKRPEAA

SEQ ID NO: 154350 - protein, 355 aa, unidentified
MAVTIVGEARPVTCRTAITGGVDTHADTHVAAALDSIGGLLGVREFPATAAGYVGLLGWLGGFGTVALVGIEGTGSYGAGLARHVAAAGIRVVEVDRSDRQDRRRQGKSDPLDAVSAARAAQSGRARGAPKGRDGAVEAIRALMVARRSATGERTRTINQARALILTGPDDLRARFTRHTPAALVTGLASLRPRPGDVTGYAVRVALRELGRRARFLDGQLQRLDELIVPLVTARAPGLLTVYGLGPRTAALLLITAGDHPGRLRSEAAWAHLCGVAPIPASSGKVTRHRLNPGGDRQANHALWRIVFTRLGSDPATRAYAERRTAEGKSKAEIIRCLKRYVAREVYRHLRPAGG

SEQ ID NO: 154351 - protein, 370 aa, unidentified
MEQDIKFFVGLDVHKDSIAVAVAEAGREPARLIGSLAHDVGKLMKLLARYGESAAVQVVYEAGPTGYGLQRELARRGYQAQVIAPSLIPKRAGDRVKTDRRDGLRLAELARAGELRAVWVPDPADEAIRDLARVREDAVNARTQARHQLKGFLLRHQVRYGGRTSWSKAYYRWLATLNFGPRGAQTAFTDYWQAVSAADERVARLTAALVPAITGWRFEAVVLALQALRGIDTLSAIGLVAEIGDIGRFAHPRQLMGYLGLVPSEHSSGERVARGSITKTGNAHARRLLTEAAWNYRFPPRIGSRAQRRAEDLPQAIRDIAWKAQLRLSGRFSRLRARGVQINKVCTAVARELAGFVWAIAWTRAKLPQS

SEQ ID NO: 154352 - protein, 354 aa, unidentified
MSEVTMIGIDLAKRVFQLHGACANGAVIFRKKLTRVQLLAFMSQQPECTVAMEACATAHCWGREIEKLGHTVRLIAPNYVKPFVKRQKNDVADAEAIVEAASRPTMRFVALKSEAQQARAMLFRTRQMFIGQCTQTINALRGHLAEHGVVAPKGAIHVKRLADAVADETIGLPEGVRELAQVYFAQIEGLNVQITALDQRMKGAAKEAEAARRAQTMPGVGPITALAIETFAPDLNCFRRGRDFAAWLGLVPKQNSTGGKPRLGKTSKMGQREIRRLLISGAMAVLQAVERFGKPHNSWLVGMLERKPRMLVAVALANKMARGLWAMVTKQEDYRTPAATMPMSAMRRVSRSGT

SEQ ID NO: 154353 - protein, 356 aa, unidentified
MLAELVDAVVGVDTHRDTHEVEIALPTGSPIASCTISNDAAGYVELLAWVGDHAPGPRLVVAIEGTRSYGVGLARAVAAVGLPVIECERPHRTARRGKGKSDPIDAHLAVLTALRLDADRLPTPRADGDREALRILLGARQDLTTTGTAQTNRLRALLLAGEDTDRRLARGVLTDDVLTGLTRRRPPRDATREQAIRQGEIRRLALALRENGRALKINRSQLQAVVNDVAPGLTDRRGVGPVTAAQTIVSFSHPGRCRSDAAFAALAGTSPLEASSGRTVRHRLNRGGDRALNNAVHTNAMTRMRSCPRTQAYIARRTAEGKTSREIRRCLKRYITRELYRALTASMQTKPAPTMA

SEQ ID NO: 154354 - protein, 312 aa, unidentified
MTTIICGVDVSGATLDARIRRDGPHLRVERSCQGIAELAAFCRRHQASLVVMEASGGYEKLAFALLWQAGLACAIVNPRAVRRFAQAMGYLEKTDRIDAGVIAHYGAAMELEPQTPDTPAQARLEALALRLRQLTAMRAAQDNQRRLVEDATALVSIEQTVAFLSGQIRTLEEAIDACLGEDPLWTRLASAFRAIKGVADRTVATVLALMPEIGTLSNKAVAKLAGLAPIANDSGARSGRRPVRGGRAPLRALLVFIVGGVARHNQDFRAAHERLTRAGKPKLVIRVALARKLLVRLNAKAKEQRRLCQQTA

SEQ ID NO: 154355 - protein, 355 aa, unidentified
MNQEKYIGMDVHAATISAAVINAQGKVLTQCVMETKASTILEFIQAQRGTLAVTFEEGTMAAWLHDLLKPHVSRLVVCDPRKNALMRDGNQNDRADARNLAELLRTNQVHAVYHGKHGIRALRELGRSYSTLTQDSTRVMNRIKSVYRSWAIPCAGTSVYSRRHRAEWLAKLVEPGVRIRAEHLYQQLDSLEPVRQAARRELLRESRKHAAVKLLRQIPTIGPIRSALLVAILQTPHRFRTKRQLWAYSGFAVQTYDSGEFRFERGKLKRNRERITVRGLNRNHNHDLKNLLKGAAISAIERPGPLQDFYAALVGKGMRPSMARLTLARKIAAIILITWKKGVSFDPKQLQRQTA

SEQ ID NO: 154356 - protein, 347 aa, unidentified
MAVTIVETPITGGAVTHADVHVAAALDPVGGLLGVAEFRATPAGYARLLSWLGEFGTVCLVGIEGTGSYGAGLARHVATAGIRVVEVDRSDRQDRRRQGKSDALEAVSAARAAQSGRAAGAPKGRDGSVEAIRALMVAKRSARAERTQTINQARSLIVTGPDDLRTWFARHTVAALVAETAALRPRPGSTVGYATRIALRELGRRATFPGGQPGRLDELIVPLVTARAPGLLALYGVGPDTAALLLIAAGDHPARLRSEAAWAHLCAAAPIPASSGKRTRHRPGPGGDRQANHALWRIVITRDEPCPPTRAYVERRTAEWLSKTETIRCLKRYVAREIYPRLRAAGD

SEQ ID NO: 154357 - protein, 327 aa, unidentified
MFYLGIDVSKAKLDCSLLLNPQHSKRKSKSVANNAAGIAELLTWLSKQGAHPSDVHAVMEGTGVYHELAALGLHDAGVTVSIANPAQVRDFGRGLAIRTKTDGIDSLVLARYAAMLQPAAWSPPPAEARQLQALLSRRDAIAQDLQRERNRLEKAEIADTPELVHASIRASIAFLEQQLQTLQRQIDDHIDRHPGLKQDLLLLQTIPAIGPQTGRMLLAVMHSKSFASAEQLAAYLGLVPVERQSGTSLLGRAKLSKAGPARVRAVLYMAAIVATKYNPHVKALYERLLQRGKTKMSALGASMRKLVHLCFGVLKTRQAYQSDYLTA

SEQ ID NO: 154358 - protein, 345 aa, unidentified
MSITMIGLDTAKSVFQIHAVDQAGKAESKRKLRRSELISFFEKQEACTVVMEACGAAHHWARMLTGLGHTVKLIAPEAVRPFVKQGKKNDAADAAAICEAASRPDVKFVPAKSLEQQGILALHSARSLLVKQQTMLANAMRGLAAEFGLTVPLGTDKLGELMALMEADEAVPKGARQAVRGLLDHRQALAESTKGFEAAIVAHARQDETARRLATIPGIGPITASLIAATVADIGVFQSARHFAAWLGLVPRQHSTGGKTRLGRITKTGNREIRRLLVLGATSMVHRAAQWNSAAGVWARGLLGRRPVRLVTVALANKMARIAWAVMTRKEVYHAKGRVAAAAVA

SEQ ID NO: 154359 - protein, 450 aa, unidentified
MSRKGIYRSVKIKDVSFESLASMAKEKGGEKGMTVGLDIAKKEIVVVLRWPDGSFERPISVANPLGIGELTELFCRLREGCEDLTIGLESTGTYGEAVRFAMTKASLEVHRVSGKGVSDYREVFDRVPSQHDGKDAAMIAELTAFGKGTPWPYRAPTEAEQERKRHVARLTSFQKQGQQWLGRLEALLARHWPELTSLLALDSATLLNICLHYGSPAKLASEEQSRAKAQLRKWGRSKLSYSKIQEVLTSARFNVGVPLGPGEEAWLKEVVGEIQKALVEVRVSRRALTKSEPTMKNYVEKVGGPTLCVIWTTVGDPRKYSSSGAFLKALGLNLKELSSGNHKGVLAITKRGPGPARKALYFWALRAIQQPEIKAWYNRFTKVGRGKSDANGYRKMKGLVAVMRKLARSLWYVCQHDLPFSYANVFPEKPLQKRKKRRTRRRTQVPVPTR

SEQ ID NO: 154360 - protein, 427 aa, unidentified
MVYRIAAVDVHKKMPAVVVADVAGEGEYQFERQKFGATPDQLHLLAQWLVEQEVEEVVMESTAQYWKPVWGALERFWKPARQQREGATKISGTLHLCQAKSNRGARGRKNDFVDSERMVKRLVAQELVLSFVPDPEQRLWRTVTRRKYQLTSHKIRLQNQLEALLEQAHIKLSSFVSDLLGLSARRMLRALADGETDPDALAAMADRRLRATPEQLRDALGACRQLNGVYRRLLKMALEELKLMEDQMEQLEREASGLLQEHQDTVQRVAEVPGFGVDSAVQMIAEVGAKAETFPSAGEMSSWVGAIPGDNVSAGESQSTRSPKGNTTMRRLLNQAAQSAVKVKGSIFDITFRKLLPRLGYKQAIWAIAHRLCRLLWMILHKGIRYEERGPAVTAKSQRTRTARMIKELTKQGYLIAGGPLPAGAQA

SEQ ID NO: 154361 - protein, 410 aa, unidentified
MRVVYERCCGLDVHKKTVVACVLITEPSGELQRHIRTFSTMTAGLLALADWLESMHIPVVAMESTGVYWRPVFNLIEEGRTIILVNAQHMKAVPGRKTDVKDAEWLADLLRHGLLTASFIPPAPIREIRDLVRYRKTLVQERAQEVNRIQKVLETANVKLSSVATDVLGKSGRDMLHAIIEGTTDAEVLANLARGLLRKKLPQLQEALDGRVQPHHRILLKHILAHVAFLEQELEQLQQEIEQRLPPFEEEMGLLLSIPGIQALSAAAILAEIGADMSRFPSAKHLASWAGVCPGNKQSGGKRLRGKTRKGNATLRAAEASVVWVISHTKDNYLAAQYHRLARRIGKNKAAMAVAHSVLVIIYHVLDTRKPYSDLGADYFQKQDANRVAQRSLRQLEALGYEVTLTPKVA

SEQ ID NO: 154362 - protein, 352 aa, unidentified
MIVLGADTHKRSHTIAAVAAGTGELLGDQTVQVGRRGSGVLLQWARALDSERVWALEDCRHVSGSLERFLIERGERVLRIPTHLTAKARRSARQRGKSDHIDALAVARAALQERLGSFPAAHLDGPELDLRLLVDHRERLVRHRVELNNTLQWHLHDLWPELQLPGGALFSTKWSTRIGRRLARAEQTMRVRIARDELRRLRELTQAINQFERDITELVGQIAPQLLAEPGFGPLIAAKLVGEIAGAGRFATPAKLARAAGVAPIPASSGSTQRHRLDSGGNRQINAALHRVIVTRARCHAETRDYIARRRSEGKSTREAIRCLKRYLARHVWRLLQPPHPEQRKLPLSSNS

SEQ ID NO: 154363 - protein, 319 aa, unidentified
MPESVNVVVCATAMRAAEQHRARMILLSTEGLPGRLIAERVGVSAETVSKWRKRFEQFRVAGAVFRDDLVVGVECMHCWYWISDLCEEYGIQFFLGHALYMKAIHCGKTKNDRIDSFKIAMVMRGGNFSLAYVYPKEMRATRDLLRRRTRMVRRGAMLKAHAVNTLGQYNLPPSKVYLNNPGGRSQLAAAFTDPDVQRNIDLDLAIVDCYQHELKKLEWHLEQQAKLHDPASLNVLKTIPGVGRILALTILYEVGDIQRFESVQKFASYARLVKCKAESAGKVYGTQGNKIGNAQLKRLCENSLLSWQNNRDMARGYFL

SEQ ID NO: 154364 - protein, 334 aa, unidentified
MESVRKHIGVDVGKEWLDICHPDGTKEHVRNSRKFRRRLIEKAKHQDAIVSFEATGPYEEALAEECTQAGVKAVRLDAWATRKYAESQGRIEKTDEIDSEMIRDFAASLKAEKLHLVKPVSLARRHLKRLVAVRDNLLKAVAILRNQLEALADDTGLRRDVNAAIRAIERKIEKVEAECDEVIASDDEMRSLSERFLRVKGVGPCLVRTVLASCADIGAFNSKSIAKMSGNAPIDHRSCTIVRKSKPRRGRSDLKKAFYMAAVSASRSNQVLHGIYQRLVSRGKPKKVALVAVARHLAIVLNYIAKYPDFEPEPDQRRGERKPSASRQKPKMAN

SEQ ID NO: 154365 - protein, 345 aa, unidentified
MTMVKTRAVTGGVDTHADTHVAAALDPIGGLLGVQEFPATAAGYASLLGWLGGFGTVALVGIEGTGSYGAGLARHVTAAGIRVVEVDRSDRQDRRRQGKSDPLDAVSAARAAQSGRAAGGPKGRDGAVEAIRALMVAKRSARSERVQTINQARALVLTGPEDLRARFAAHTAASLVSGLASLRPRPGDVVGYATRTALRELGRRAEFLDAQLERLDELIAPLVAARAPGLLALHGVGPDTAALLLVAAGDHPERLRSEAAWAHLCAAAPLQASSGKVTRYRLNPGGDRQANHALWRIVLTRMSAHPPTLIYVERRTKEGLSKKQIIRCLKRYVAREVYRHLRAAG

SEQ ID NO: 154366 - protein, 342 aa, unidentified
MLETMIGVDLAKSVFQVHGASMTGVVKFRKRLTRSQFRRFLATEPRSVFVMEACGSAHYWAREMVKTGHEVKLIAPQYVRPFVRRQKNDAADAEAIVIAAQRPEMTFVGTKDEDQQASAVLFRSRERLIRQRTVAVNALRSILYEFGHVVPSGIRNLRRIEEILADENSDLPSLVRSECLDIIAQIREQTVRIEAKTKTAKELASKDGVARRLQTMPGIGPLTALAVETFAPEMSTFKGGRNFAAWLGLVPRQFSSGGREKLGRISKAGQADIRRLLIVGAMSRLNWMGRKTVPEGSWLARMIAKKPRMLVAIALANKMARTIWAMLTKQEDYREPPTGLAT

SEQ ID NO: 154367 - protein, 356 aa, unidentified
MKTHKVQNFVVKGKEVFVGLEDSKKTWKIAVRCDRMLIHQVSMPAEHEILIQYPRNKFPECKIRPMYEAGFKGFNLFDRLTEEGIDCIVIPPHLVTEPKVNRVKTDKRDANRLAATLENHDFKDPCFVPDKERREDRQISRTLWAMQKNIICTRNQIRKLLDFHGIEVPFPDRWGEEEFQALKELPLGNSLKKSLMTLIALLEQLWAHKESLQEALRALCSKERYKKAYQIAMSLPGIGWYTAIRLVLELGEDLSRFTSGKKIAGFVGLGCSEHSTGETERKGRITGMGSGFIRATLIESSWTAIRKDPVLLAKFTRIWKGRGSKKKAIVAVARMLIVRLRACLILRQPYAIGTVK

SEQ ID NO: 154368 - protein, 368 aa, unidentified
MKNITTYVGVDAHKKDLFIAMLVGDHTTPVTWQLANEPNAVRRLVRKLEREAPGPVRMCYEAGPCGYALQRQVATPRVSCQVIAPALIPRKPGDRIKTNRRDARKLAELLRAGLLTEVRPPTSAEEAVRDLCRARDDAREDLQRSRHRLGKLLLRRGLHYSGRNWTRAHRRWVDSLAWTEPAERVVVDDYLLAIDQLETRLLEFDARLGEIAVTEPYRAPVGWLRCFRGIDTLTAILILAELHDFRRFHTPRALMAYLGLVPGEDSTGEKHRRGRITRTGNALVRRLLVETAWHYQHRPGVGVALTRRRKGQPGRVIAIADKAQQRLCRRFRRLAEQHKPAPKIAVAIARELAGFLWAALQPVPVPVK

SEQ ID NO: 154369 - protein, 324 aa, unidentified
MTLPPLGLDVSKLKFNACLLRESGKLRHKVFPNTAAGFSHLADWLAGQGVERVHACLEATGAYGDSLAAHLHEAGHMVSVINPAAVKAYTQSRLSRTKTDRVDAALIAGFCAERRPPEWHPPAPELRELQALVRRLDSLVEMRTMEENRLSSGIAVAAVRESVEELISHLSEQIRKTEALIRSHINHHPGLRRQRELLDSIPGVGEATAAVLLAEVPDIKQYKSAREVAAFAGLVPRERQSGSSIRGRVRLSKIGNARLRKALYFPAITALRCSPFFQSWAEGLRHRGKSKMAVIGAAMRKLVHLAYGVLKTGRPFDPEWAKRA

SEQ ID NO: 154370 - protein, 453 aa, unidentified
MSRKKTKLQSVNEPPKIRADAAGIDISPEVIYVAVDPRRDPQPIRNYGTVTAELYRMANWLKACGVQTVAMESTGVYWIPLCQVLEERGFEVYLVNARHYKNVPGRKTDVCDSAWLQYLHAVGLLQGSFRPADEICAFRTVMRHRASLVEAASKHVQHMQKALDQMNVQIHRVLSDITGVSGLAMLDAILKGERDPQRLAELRDGRVQASEPSLIAALEGNYRIEHLFTLKQSLESYRHYQKLIAECDQQMREQLEALEGRSGGDEPPIPRKNMRTRSDEELRKEFFRIVSVDLTAIPGINVGTVQVLLAEVGPDLSRFRSAGAFSNWLGLCPNNSITGAKIKSSKTKKVQHRLAAALRMAAESLCRDKSYLGQFYRRMKMHLSGGAEAVTAAAHKLARIIYAMVTKRLEYDETRFAEIEGRNSQRARLRFIKQAEKFGFRLTPIQVAAESVS

SEQ ID NO: 154371 - protein, 405 aa, unidentified
MDVINPIACGLDVHKNSITACIIVKRTKHLRTFGTMTEDLFELLDWIKDMNCPIVAMESTGVYWKPVYNLLELSDIQGLVVNAQHIKNVPGRKSDVKDAQWIAELLQHGLVKGSYIPNREQRELRELVRYRRSLVEEVSRESNRIQKVLEGANIKLGSVASSILGVSGRKMLRSLIDGENNPTTIAELSIGKLRDKIPALKKALQGLVGSHQKFLLKKQLNHIEYLESQLVEIDNEISNRLHYCKEDLELIQTIPGIGIRTAEQILAEVGNDMTRFKDEKHLASWAGLVPGENESAGKKKSQQTRKGNKYLRSALVEAAKACGKSKTFLGAKYQRLKARRGANKASVAIAHNMITIVYHLLTKRQPYQDLGLNYHLEKKKEYETKRAVVRLQKLGYQVQLIEGSA

SEQ ID NO: 154372 - protein, 418 aa, unidentified
MKSNKPEKIKTINEKTLVVALDIGKKVHYGYFRTPKNQDVKPFQFYNSGRSFNKFWEKLCRFKEKHMLDEVVIGFESTGPYAEPVANYLRKKPVKLVQVNPMHTKRVKELTGNSPNKTDRKDPRVIADVISLGHSLTVVVPEGAAAQLRRLTHARERAMERRTAMNNQLQDLVFVIFPELGNIIKPSTKTGMYLIKNYPDPKGVVSIGIEMLCNIVRKISRGKLGIDRAEDLYNSAKESVGITEGKEGILLEISHLVSNIEAENRYIESLKEQMIVYLDQIPYSHSILSVKGIGNITVAGLIGEVGDFRKFTTISEVMKLAGLDLFEVSSGMHKGKHRISKRGRALMRKLLFFAAINSVKSHGIMHTRYQKMLNNGTPKIKALIAVSRKLLRIIFALARDNAQYEENYNKKHDFKLAA

SEQ ID NO: 154373 - protein, 327 aa, unidentified
MRYTISLDVHKRETQACIANEDGEVVAEKRFRTSEKSYRRALKKYDGGDVVFEAVGFYRPVAGWLDRLGYDVHLAHVGRVPKSRLKTDRKDARRLLTLWRGDALPEAYLPPAEVQRLRDIARHRQFLGQESRRLKTKLKHDLYKHGHFVDENPIETERGRAWLRTLDAPEVRSTLHLWERLDEEIRAFQERIEAETTDLPEALLLTSVPGIGAYTALLVLAEVGDFSRFPTGDRLAAYAGLVPSQHQSGDADRRGSITKEGNPTLRWALVEAARNHVRLCPDSSVSQRYVRLAQSKGHGKAITATARQLCTVLWSMMARREPFQVNP

SEQ ID NO: 154374 - protein, 408 aa, unidentified
MKTLHQRCAGLDVHKQEVVACLRLVTQGRVHREVRRFPTTTRGLLELAAWLEAARCTIVALEATGVYWKPVWHILDGSFELVLANAAHIKGVPGRKSDVNDATWIADLLAHGLIRASFVPPQPIQELRDLTRTRKQLSREIVRHTQRLQAVLEEANVKLASVITDILGASGRRILKAMITGETDPSHLAELGSRRLGCSRDTLVEALDGRVRDHHRFLLDQHLKTIEQLEETMAAFDARIEAALAPFRDTVERLTQAPGLSTRAAEVVIAEIGLDMSRFPTAGHLLSWAGLVPALDESAGKRRSTRVTKGAPWLKPVLVQCAWAAANKKNSYFEAQFLRLKGRRGPKKAAVAVAASILTTVYHMLRDGTCYQDLGPNYFARRNPARTARKLADRIRSLGYIVEIRSAA

SEQ ID NO: 154375 - protein, 339 aa, unidentified
MQVTTIGVDLAKNVFQVHGITTREEVVFNKPLRRAQFLPFFAKLEPCLIGMESCSSAHHWARELTALGHEVRLIPPMYVKPYVKRGKSDAIDAEAICEAVTRPTMRFVAIKTVEQQALLSLHRARDLLVRQRTQLINGLRGLVAEFGIYIPRGVARVIAFAEDITLGEVLDLPDIANEVIRNLAEQLMALHRRVRWYEERLKQVAKEDARVRLLRTIPGVGAVTASAIIASIGDGHQFRNGREFAAWLGLTPANKSSGGKEKLGRITKMGDQYLRSLLVVGMTSLVRQTRSHPERASKWLTSLLDRKPARVATVAMANKTARIVWAVLTRNEPYNPRTA

SEQ ID NO: 154376 - protein, 317 aa, unidentified
MRASAAFFVGIDVSKQQLDIAVRPSGESWTVAHEEASLSALVARLRDLAPTLIVLEATGGWEVTVTGALAAAALPVAVVNPRQVRDFARSTGLLAKTDRLDAQLLAQFAEVLRPAPRPLPDAQAQELTALLQRRRQLVEMLTAEKNRLPLAARRIRPQLQAHIAWLHQQIAQFDEDLRQLIRSSPLWREKDDLLRSTPGVGPVLATTLVAALPELGTLSRRQIAALVGVAPLNRDSGTLRGRRTVWGGRAQVRAVLYMSTVVAVRHNPVLIAFYQRLRAAGKAPKLALTACMRKLLTMLNAMLKHHRRWAPVRAQHA

SEQ ID NO: 154377 - protein, 356 aa, unidentified
MSTITIGVDLAKVLFSACEVDGIGRVLRRQDMHREPFGLWLAQLPVGTVVAMEACSGAHHWARRCLECGLQPRIIAAQFVTPFRKSSRSKNDRNDAEAIATAARQGNMRFVPVKDVDQQVRLSWHRVREGYKAESLAIGNRIRGLLAEFGVIVAQSDLALRRLLGDLDAQIGLPAEFKELLRDLADHWSQLRPHLDACDARIEAHARQDERCVRLRAIVGIGPITADAAVATVGNACEFKHGRQMAAWLGLVPTQHSSGGHARLGEISCRGDAYLRTLLIQGARSSLQRAKAVATEKATPEQLWIRTLDGRMPFGKVIVAIANKHARQIWAMLAHDVNYDPHACLQYPMHRHTHAA

SEQ ID NO: 154378 - protein, 409 aa, unidentified
MNVVNPRCCGIDVHNAVVVACLRAVQEDGKVRKETREFSTMYRDLLALGDWLRNEGCKVVAMESTGVYWKPVYHVLSGDCEVIVGNPQDMKRRAGKKTDRVDADWISELLAHGLVPPSFIPPPEIRALRDLTRLRVQLVNQRAQAKNRVHKLLQDCNVKLSCVASDIFGKSGRAMLDALVAGERDPAVLAQLALKRLRRKIPELELALQGAFTEHHAFIVRISLEEIDSLSRQIEEIERHIGDLIKPYGTHIEQMSSIPGVDTTAAAAIIAEIGADASRFGSDKRLASWACVSPGNDISAGKRRSGRTNHGNPWLRRILVQCAWAARRTDTYFGRTFCRLQARIGGKKAALAVAHKILVIIYHLLVEGTFYEEQRYDRPNPRQEVAAKQRAIKALERLGYKVALEAVAS

SEQ ID NO: 154379 - protein, 347 aa, unidentified
MKHYAGIDVSLNSSSVCVVDESGKIVREVKVPSEPVALIHCIKSLGVRVERIGLEAGPLSQWLYGALRESTLPVELLETRHVKAALSAMPVKTDRNDARGLAQLMRLGWFRPVHCKSMAAQEVRALLTARKLVQSKLYDIEMSLRGILRGFGLKVGPTTSRSFAARINHLAAGHPSLEIVAEALLSTHAAALCAFANLEKNVRQISRADARVRLLMSTPGVGPVVALTYVSAIDDPKRFTSSKRVGAHFGLTPKKYQSGETDISGRISKTGDSSVRAVLYEAAHIILTRPIHGGALKSWAMRLAKRAGMKKAKVALARKLAVVLHRMWVSASTFDFEKANGCMRAAA

SEQ ID NO: 154380 - protein, 346 aa, unidentified
MNQIIRIGMDTSKHIFQLHGVDAAEQAVLRKRLRRKEVLAFFAKLPPTVIGMEACGAAHYWGRELRKLGHEVKLMAPQHVKAYVKRNKNDGRDAEALCEAMSRPTMQFVPVKTEEQQAALMLAGVRQQLIARRTQLSNAIRGYAAEFGVTAAKGLDKIEPLLARIAQDESLPALARELFAIEGREYTQVQAELKAIEAKLMAWHRANAASRRLAQIPGVGPIGATALVMKTPDPRAFPSGRHFAAWLGLTPKDHSTAGKTRLGKITRAGDERLRSVLVAGATAVIQQAKHGRGHPSPWLLALLKRKPPKLAAVALANKNARIAWKLMVTGQSYDGARMLGASASAA

SEQ ID NO: 154381 - protein, 320 aa, unidentified
MTKKKSKSFIGIDVSKQHLEVAVHESDCQFRCANNVNAFGKLIVELIDWRPALVVLEATGGLEIPVVNALHAAGLPVVVVNPRQVRDFAKALGQLAKTDRLDARVLAHFAAAIKPPLRPLKSKEEQELAALTGRRDQLIEMLIDEKNRRAAAASDTVRDQIKAHIDWLEECIAELDEQLKALLQSSAPWQAKDDILQSVPGIGPVVSFSIIADLPELGTLNRQQISKLVGVAPLNRDSGQQRGTRHIYGGRAELRRVLYMAALSASRHNLVIKEFYERLCAKQKPFKVAITACMRKLLSIINVMVRDNSCWKSPQQTVSA

SEQ ID NO: 154382 - protein, 410 aa, unidentified
MDMLHRRCAGLDVHKKTVVAAMRVAVENKLVSEVRTFATTTAGLLALSDWLTENSCTHAAMEATGVYWRPVWHVLCDGELELIVANAAHVRNVPGRKTDVSDAAWLAELLAHGLIRGSFVPDAATQELRTLLRTRKQLVRERSRHVQRIHKALEDANIKLEAELSDVLGKSGRAMLDAMVAGETDPVRLAALAHPGVKSSQARLQEALHGRLTRHHRFLLQLHLGQIDGLDAAVTTLDREVDVNLAPFRTAVELVSTIPGVSKLSAEVIVSEIGLDMSRFPTVGHLLSWAGLCPRNDQSAGKRRSTRLRKGAPWLKTALVQCAWAAKNKKASYLQAQFRRLLGRRGPQKAICAVAASILTAAYHMLKDGTVDQDLGPDHFNRRSNTTQSQRLVKRLQQLGYAVDIKPLAV

SEQ ID NO: 154383 - protein, 372 aa, unidentified
MNEASMPTMFVGLDVHKKTIAVATVEARASADVRFYGTIANTPVAIQSLLKKLRKGGQRLHLAYEAGPMGYTLYRLSTGLGHRCDVVAPSLIPRRVGDKVKTDRRDAMTLAQTLRAGQLTEVWVPDEAHEAMRDLVRMRALAMKDQRKARQQLHSFLLRHGRSFPGKHWTKAHRRWLGEQTFAQPAQHLVLEELLARIERAEELCDRLKQAIVDLVPRWTLAPVVAAVQALRGVSILVAATVVAEVGNFSRFQNPRQLMAYLGLNPSEHSSGATIKRGPITKTGNSLARTCLVEAAWTYRHPARVTQIIRERMKGLPEPIRAIAWKAQVRLAGRYRKLTAGGKSAPKAIVAVARELVGFIWAIARLVEPKVA

SEQ ID NO: 154384 - protein, 350 aa, unidentified
MEHHAGLDVSLKETSVCIVDGAGKIIRETRVASEPEALVGYFASLEIKVVRIGLEAGPLSQWLYAALTQAGFEVVLLETRHVKAALSAMTVKTDRRDARGIAQLLRMGWYRPVHCKTLPAQEVRAIITARKTLLGKLIDIELSMRGILRGFGLKVGSVTRKSFEIRVRELMAGQVTLTTIMEGLLNARATLVAEVTKLHRELLAIARADEVCRRLMTVPGVGALTALTFKTAIDDPTRIAKSRDVGPLFGLTPGRYQSGETDIIGKITKVGDVMVRTALFEAATVMLTRTTKTSRLKAWALDLVKRRGTKRAIVALARKLGVILHRIWVDGSTFRCAKEGAAMPALITAK

SEQ ID NO: 154385 - protein, 443 aa, unidentified
MNTSPPYDLVIGLDRSDQKADLHLITTATGQRRSVVIDTAPEALWEWLRQLRQQQPQARVGLCLEQPAVHLIAFLEAYEWITLYPINPITLQKYREAFVTSRAKDDTQDAFYLAELLLNHHHQLKVWAPEDSGTRAVQQLVFHRRAVVDERTGLTNRLIALLKSYFPQALVLCGDDLWRPLATRFLLKWSSLQAVQKTKPATLKTFYYLNGSRSAKLLEGRLALVAKAVPVTDETALIESFALRVQLICRQLQLVVGTIADYDRQIASAYAAHPDHTLFASLPGAGPVLGPRLLASLGSQRDRFAAAADLQHYTGIAPVTKRSGGSCYIHRRYLCPKFHKQSFHEYAKESILWSRWAAAYYLQQRTKGNPHHTAVRALAFKWQRIIWRCWQDRKPYDEPTYEAALHRNGSDLVNLFDRVELGKSPFKKPVNNLKKSVDGLPQR

SEQ ID NO: 154386 - protein, 337 aa, unidentified
MEYFAGLDVSMAETHVCVVTGSGAVIHNAKVPSTPADIAAELAQVPTCRRVVFETGRMAPMLYHGLSQLGLPVVCVESRQAYQALKLLATHKTDRNDARGLAHLARTGFFKPVHVKSLSAHAVRSLIIARKKLVGQRVTLENQIRGLAVVFGVRLPRALSPAFIRQALQASEGIPGLSAAMRGLVAARAAVLAAVVAIDADIRRMVRASDACRRLMSIPGVGQLTALAFTAAVDDPGRFRRSRDIGAYLGLVPRRYQSGEIDYTGSISKCGDRRVRTLLYEAANVMLTRYKGPLKLKDWAIAIAKRSTMRKARIALARRLAIIMHAMLRHGTEFKPA

SEQ ID NO: 154387 - protein, 410 aa, unidentified
MDAVLERCAGLDVHQEEIVACVMYGPLEKRPKKETQTFLTTTKGLLALHDWLESFKCTHVAMESTGVYWKPVWNILEGSFELILANAKRIKNVPGRKTDVSDAAWITQLLRCGLITPSFVPPENFRDLRDYTRYRRKLVGNASSEKNRIHKILQDANVKLTTFVSDLFGVSGRALLESIINGEVLTEEQVRSLVKTSLKRKVPQLVDALNGRVRQHHRKIIRMHYDHLIYLEKQISELEGEIDRLITPYNEYVELLDTIPGVSFNAIAVIIAEIGVDMSCFPCDKHLASWGGLCPGNNESAGKKKSSRTQKGNRSLKGVLCQAAWSASKSKGTRLSSFFYRVQKRRGQYKASMATAHLILRIIYHIIKDKIPYEELGWDYAEKDTERKINYWIKNIESKGFKVTVEQPTA

SEQ ID NO: 154388 - protein, 381 aa, unidentified
MTTAVTHHEQRNTTEATLFVAFELSEKTWKLGFTTGHGQKPRERTVTARQHEHVLNEIAQAKRRFGLPETAPVVSCYEAGREGFWLHRFLQAQGITNHVVDSSAIEVNRRRRRAKSDGLDVRKLLSMLLRYAQGERQVWQVVKVPSVEAEDHRHLHRDLETLKQERASTTTRIKGLLSSQGLRVTSLTKLPEQLDALRLWDGSPVPPGLRCRVLRVYAHHTFLSEQIAAVEAERRAQLQASTDAKIDKVRQLMLLKGIGINGAWLLVMEFFGWRAFKNRREVGGLAGFTPTPYQSGESAREQGITKSGNRHVRWMTTELAWSWLRFQPESALSCWFRQRFGSGGKRLRRIGIVAVARKLLIALWRFLETGVVPDGAVFKEG

SEQ ID NO: 154389 - protein, 344 aa, unidentified
MDYYAGIDVSLECSSVCVVDASGKIVREAKVASEPEALISWFSSLGLGLARVGLEAGTLSQWLYAAMKQAGLAVELLETRHVYEAFKSMPVKSDRNDARKIAQLMRLGWFRPVHCKSIPAQEIRAMLTARKLLQSKLLDVENSLRGILRGFGLKVGKTTRANFAGRIEELVKGHPSLQTIGQALLRARAVLLAEFNGFEKRVRAMSRLHEKARLLMSTPAVGPIVSLTFACAIDDPFRFTSSKQAGPHFGLTPKKYQSGETDYTGRISRHGDASVREALYEAAHIMLTKPIKGCSELKSWAMRIARRAGTNKAKVALARKLAVIMLRMLKDNVPFNPAAKAATA

SEQ ID NO: 154390 - protein, 409 aa, unidentified
MIFVGDDWSEEHHDIEVLDEDGATLERRRLPEGLNGVGQLHELLAGFASDPGEVVIGIETDRGLWVQSLVAAGYQVHAPNPRMVARYRERHVTSGAKSDPGDAKVLADLVRTDRHLHRQIAGDSELAEAIKVIARAHQRQIWARQRQVNALRASLREFYPSALVAFGNDLAHPDALGVLGKAPTPAAGRGLSHSTITACLRRGGRRRFVEDTAKKIQEALRAPQMEPTTTLADAFGATVRSSVAIIGELNRQISTLETELRSHFEQHPDAEILHSLPGLGSILGARALAEFGDDPNRYQDARSRRCYAGTAPITITSGKRKTVLARFKRNHHLADLCYWWAFCALTHSPGVRAFYDARRVGGNTHDQALRAVGNRLVGILDGCLRHRTLYDEAKAWGLRTDLSGEGAAA

SEQ ID NO: 154391 - protein, 346 aa, unidentified
MEHYVGLDVSLKLTSICIVDRTGKVEREGVVASDPEAIATFIKLHAPHVVRIGLETGATSTWLWTELNKIGLPVICIDARHAKAVLKMQINKSDRNDAAGIARIMQCGWYKEVCVKDLDSHATKALLGSRALLVKIKRDIENQIRGLLKNRGLVIGRAKMNMFAVRAAQLAEDRSELLAAVDPLLKARKAVEQQIVDLDRKVLRLARNNAQVRRFMTAPGVGPVTALCFLATIDDPARFKKSRSVGAYAGLTTRRYASGEIDWTGRISKCGDKMLRNYLYEAANVLLTRVAKWSALKAWGIRLAKRSGLRKAKIAVARKLAVILHRMWIDGTEFKWSSKDAADQPA

SEQ ID NO: 154392 - protein, 323 aa, unidentified
MLPVLGIDLAKAKYDVALQCRDGKNRHKAFPNTPEGHTGLLAWIGRQVDGPVHACLEATGPYGEAVALALADAGHTVSIVNPLAIKAYGQSELSRAKTDRIDAGLLLRYGVAQRPSAWVPLPPDVRALQALVRRVVALQEMREQERNRLEAYPTADVVRQSIQDVLATLTDEIARLRAQIQHHVSQHPGLRAQRDLLTTIPGIGKTTAETLLAELFGPLSCASVKQLVALAGLAPRVHESGASVRGRGSLSPLGTRRLRKALYFPAVAALRCNPVIQAMAERLANRGKCNMVIITAAMRRLVHLAFGVLKSQRPFDPSIALSD

SEQ ID NO: 154393 - protein, 427 aa, unidentified
MSERKSLELRVSVDVGSRRHSVAIGMSDGQVLEEFEITHRPEGFQEFFSRIEKHQKAQGCGVAVAMEGYNGYARPLDSLVRQRGYRLYNINNLKLARFKEIFPGAAKKDRIDARKGLELFQLRDHLPLAKQVLQEVTGTPKENEILKRLTRRRRRLVNERVRVLNNLQADLQAVCPGLLEITTEASNQWFLNFLVSADTLPQLARLRKSTLLKIAGVGRKYASVIQEWQKRAHFSEEAQWVGEMIHEDAQRCVELEEKIKTLASKIEQVAKGSKIAKVLLSIPGFGPVCTSELAGEIGTVDRFGKEGGLALYLGMSTLDNSSGNYHGTKQPKHVNTRAKAAMMTALDRHRKYVLESQTYYEKKRSEGKKHNQAIRSLGRHLCRIIYKMLKDQREYEIRLHQGNTKTKVGSRSCVKTKIRRPKIFPNS

SEQ ID NO: 154394 - protein, 360 aa, unidentified
MKEEKRRFVGIDLGKREYTMAIIGKNGKMSIHPGKTSVQGRQGLYRLLEKSDKIALEAGNLAFIMASEIQQRVGSEVRVLNSAKLPFIWDAPTKTDKEDAMKLAHLVEERRDEKLPLVPLPSVKEMERRELASSYGRTVNDRTRMINRLHSLFVKQGITTMVKKNLATFVRRQEAVQVLKGHLREEAEYIMEQIELMEKRIKKLKGDIKKDAKTDEDMRLLKKIPGVGAIVAYAYVAYVGDGSRFRKGAQVSNYLGFVPRLDYSGTIERHGHITKRGNAYLRGLLVQAAWVAVRCRQKNPLKERYTYLTTIQGKSKKKTVVSIGRRMSELMYSVLRNKTEYEERPWKGSGKTYAKQAMSA

SEQ ID NO: 154395 - protein, 326 aa, unidentified
MTASQSSDNSFIGIDVGGASFDVAWHRGDCAHYANRPDGVAALLAKLKAGPAISRIVVEPTGGYEKPLVKTLRRAGLPVEIVHTSRFSAYRVMVGARAKSDSSDARLLAAYAAAPDDVRGRKPHHVEVPEDAIREELAELASRRDQLKHMIHGETCRLTTVRSVKLRQAIIAHLDVLKAEDAQTHQTMLALVRARVDLKKAQGLLKTIKGLGDKSALACIALVPELGHVDNRAASALVGVAPFTRKSGTMTAPARIHGGRAAVRNILYMAAVSASRHNPVLRPFYQRLLAQGKKVKVALIAVLRRLVVFANAVLRSAEPWKGATAS

SEQ ID NO: 154396 - protein, 355 aa, unidentified
MGSAKYVGLDVHKDTISIAVMNSAGKLIMESIIETKAITILQFFQGLHGDVYVTLEEGTWAAWLYDLLKPHVTQVVVCNPRKNALLLKQGSKSDQIDARKLAELLRLGALSAVYHGEHGLRMLKELSRSYLTISKDLGRVMNRLKALYRSWAIPCAGAQVYAPRHRAEWLAKITEAGVRRRAELYYEQLDALRSLHKQAKKELLSEGRKHSATKLLRQIPGIGPLRATQLVALMQTPHRFRTKRQLWNYSGLGLETHDSAQYCMVEGQLQRSKKPQQLRGLNDNHNHDLKNIFKGAAMRASTAAGPMRDFYEALLAKGRRPTMARLTLARKIAAITLIVWKKGASFDAKHLKQAA

SEQ ID NO: 154397 - protein, 319 aa, unidentified
MSEQNETKVFIGVDVSKNSLDVCVHHSGEKKSFDNNEKGIILFTEFIRPLNSALVVFEATGGLELLATTTLAADKQPVAVVNPRQVRDFAKATGKLAKTDAIDSAIIAHFGAALQPEVRPLKNPEAQKLDALNSRRRQIVEMLTMEKNRLASAPKWTKIDVQAHINWLEKRLDKTNNDIGTYIRNSPIWKEKDEIFQSVKGVGSVLSLSLIVDLPELGTLNRKKIAVLAGVAPLNRDSGKFKGKRIVWGGRAHLRSVLYMGTLVATKHNTIIKAFYQRLLLAGKPKKVAITACMRKLLTILNTMVKNKTKWQEPALKAA

SEQ ID NO: 154398 - protein, 386 aa, unidentified
MEGETFTPRDYDVFAGLDVDKKSIAATFSSQQGFIRSLHMPYSIDYLLNHVRKHFGDQKVAFVYEAGPTGYGLYDGLVAQGYRCLVAAPSMIPRAPGQRVKTNRLDSRGLSESLRGGQLKSIHVPSPIYRELRHLTQLRDTVVREAAANKQRIKALLLLEGIGFPPATAGRQWTLRVKAQLRKLRCSRTVRFKLDQLLDSLEFCEKQVVSSTKEIRRFCKEDVELFQSIEYLMSIPGIGWIVASQLLARMGDWREIDNVRQLGSFLGLVPTENSTGDSVDRGSITRAGDGRLRSKMIQAAWSAIRQDGELREFYRSVCQRNPRGKGARIAIVAVARKLSTRIYAVLKKQRPYIVRKQVHSAPLTQEETSPQGTTRRCAEPGETDNS

SEQ ID NO: 154399 - protein, 352 aa, unidentified
MRQAKHTDFSGQNIYTGLDVHRKSWKVTIYTEAFEHKTFTQPPDPKKLVSYLKRVFPNANYHAVYEAGFSGFWTYDRLIQMGVNCTVVHPGDVPTTDKERRRKTDARDSRKLAKQLRSGVLEPIHVPTIKERDNRGLIRQRKTVSRDAARAKVRIKHFLHFHGIDIPLRYCNTYWSANFLKWIRQCKLDNDTGQSTLLSLLRQYEYQRNEITLVNREIRRLSRLPEYAEDVHNLRSVPGIARLSAMIWLTELGSIQRFKSFDKLCSYVGLVPLQHSSGETEYTGGLEHRGNKILRTLLIENAWVAVRSDPELMSAYHQYIGHMKGQMAIIRIARKLLARIRFVLVNKCELEK

SEQ ID NO: 154400 - protein, 315 aa, unidentified
MFVGIDVSKDWFDAAWEVDGQLRTQQFAYTDEGIEQLMEQVPSQAVCVMEATGTYHARLALKLFEAGRGVSVVNPLVIKRYGQMKLLRVKSDRADAQLILGYAQQERPALWQPASEQVQELQQAHGWLNDLIGQRVRLLNRQHAVSHRAKPSAFVVGQMAAQLQQLNERIDECERHLEVLVKKSFAELYERLLTIPSIGAKTALELIIVTDGFTRFEDVKQLGAYIGVSPTTLRSGSSVKGKGSIAKLGQGRMRQLLYLCTWTAKNCNPACKKLHQRLKAQGKPAKVINIALAHKLLRQAHAVATKNVSFSAEMA

SEQ ID NO: 154401 - protein, 344 aa, unidentified
MITIGIDPHKRSVTAVALDAHSQPLGSLRVAMTDQAVAQLLAWVGPWSARRWAVEGATGLGHTLAQQLVGAGEVVVDVPAKLAARARLLGTGSARKTDRTDAASVAAVALAHRRLRQVAVEDHTMALRLLTDRRDDLVAERTRTLSRLHVLLRDLHPGGAERNLTAQRAAALLGRLRPVAGVDRERKRIARELLADVRRLDQRITAATKAIGEAVTSSGTTLTEVFGLGPVLAAKILGHAGDLTRFPDRDHFASYTGTAPIEASSGDVRRHRLNRGGNRQLNTALHIIAVCQIRDPSPGQVYYQRKLRQAKTPEEARRALKRKLSNVVYRHLVADHRRHYVPPS

SEQ ID NO: 154402 - protein, 386 aa, unidentified
MSVIVGVDIAKSKFDYRIITEGNDRLSRGSCQMTHEGFHELLADPNITKDTMFIMESTGPYHIPLFRFLNDGGYDVHCVNPLLIKKQVMADSLRKTKTDSADALSIAKYGRLHYDMLREQKSRMDDEVKAIARRRQQIAEDISRTKTQLKADLAVAWPEFLSLYVFTDSLLNFLSCYGCPEDVLSATDEDISAALFSKDRGRGLSFGVEDIRKLACGSIGVSYRSDMVKDSAEKLIQLNAREKKLSQALYAHEREVHSKEIEILTSVPGIGRTTACQFMAEIEDIRKFSSYQKLIAFAGTDPGIYQSGQQLTTGHITKHGNASLRRVVYIMATRCTQYNAVIGSYYSKKRTEGFSHRKAMVATANKMLKILYVLLSRGEKFQTQTT

SEQ ID NO: 154403 - protein, 396 aa, unidentified
MPTTTRHARTPALPQSMPVPPRVLYLALDLGQRHWTLAFTVGRGQRPRVRTIPGGDLARLTTELAAARRRFGLPPESPVVSCYEAGRDGFWVHRALLAHGVTNVVVDAASIEVPRRTRRAKTDRLDARKLVTMLVRHAEGEREVWHVVHVPSEADEDRRHLERERQTLVAEHTGLVNRIQGLLATQGVVLTLRGDVPAQLAAVRRWDGTPLPPELRARLEREWARVTAVRAALRTLTARRHQRVTAATPAAADVPAVHLTRRLAALGAIGETTAWLLATEMFSWRAFRNRRQVGGFVGLTATPDQSGERVRELGLTRNGSVELRARVIELAWSWLRFQPGSALSQWYRRRYGSGTARLRRIGIVALARRLLIALWRYAIGGPLPAGAHQKGDAVAA

SEQ ID NO: 154404 - protein, 348 aa, unidentified
MVADSLDVVIGVDTHRDAHALALAAAPSGALLLEAVVEASTVGYRDALALAQAHAPGRRAWAIEGSGCYGAGLACFLLARGERVLEVDRPRRERRPGRGKSDALDALRAARSLLASEPLASPRRAGRREALRVLLATRESAVGARRCALNQLRALLVTCPEPLRAELRPLTRARLLGRLRGTRPRRHADSQLRGSLLAMRLLAVRIEALTLEERTLKREIRALVRELAPRLLAEPGVGPIAAAHVLLAWSHKGRLRSEAAFARLAGAPPIPASSGKVVRHRLDRGGDRKLNRALHAIILTRRRTDPETIAYIQRRVSEGKSDREAVRCLKRYLARSLFRQLEAMPQAA

SEQ ID NO: 154405 - protein, 390 aa, unidentified
MYYIGIDASKFKHDCSIIEDNNLIELKRFTFSCTHEGFQFFLRELNTLDSKQEYKIGLEATGHYHQTLMNLLINNEYHFAEFNPLIISRLAEAFSLRRTKTDSVDAKFITSILKVVDYKTYQVNYDMYQLKKLTRMRSQLIKNRSKYLVQITNILDIIFPEYKGFFSDTNDFTKTSLYILEKYPTVEKMKTIDLECFETIRKLSRGSFNLSKYYKFMHLVNNTIGYSDSYSELELITFIALYNFLNGKIDIIKNEIISLITIIDPPTLSIPGVGPLSAAVILAEYNNISKFDNPGQMLAFAGIEPSISESGTQSHTGHMVKHGSGYLRQTLMNLVNPLNLHNPVISAYYYKKRNEGKVHRVASTHVVRKLLRYIFYLETHNIRYDPSLAK

SEQ ID NO: 154406 - protein, 319 aa, unidentified
MKKIELTQTQNPFIGIDVSKDNLEVINDLSLHRTVCPNKMRDLDRLAKDLKKASPELIVMEATGGYETLAATAFTKAGLPFAIVFPRRVRQLAHGLGIVAKNDEIDARVIAYYGRVANIKPKPLESNELRELQALTTRRTQLVEMRLMEENRLDTAHPSIRKAIKEHIAWLCRQIQKMDAEINSRIERSETWNEKRKLLMSVPGVGSVLASTLITELPELGLLSNRKIAALVGVAPFDRDTGKSRGTRFCKGGRNSVRRVLYMATLSAARFNPVIKTFYDRLCEKGKRKKVAHIACARKMLVILNAMSRDNLSFEPSTA

SEQ ID NO: 154407 - protein, 352 aa, unidentified
MWIIGCDFHPSYQQAAYVNTEGGEFGNIPLRHTTEAEEFYRQLQGQEVRVGMEASGHSRWFERLLAELGHQLWIGDPARIRATQPRRQKNDVRDAADMLELLLSGRFEKLRIWIPPAGDRDVRQLVAHRHRLVQMRTRVKNQLKAVALNEGMVVRRPGLWSKKGQEQFRAYRLPEWTARRREDNLELLADLVKRTGPLDAAVEQQARQRPEAVRLMTHPGVGPVTALAFVLTLGDPERFSCGRKVASYLGLIPSEKSSGGHQRLGHITKQGNALLRGLLVEAAHSAVETDPELKRCYRRLAMKKNRSIAAVAVARKLAVRMWWMWRRGLDYMQMYAPPVRMQGKPGLAPGVK

SEQ ID NO: 154408 - protein, 419 aa, unidentified
MKSMEITAVGIDVSKRKSTVAIRRPGGVIVACPFDISHSSHDLEKLVSILKTTGGDIRVVMEHTSNYWKPIALTLKNAGFYVSVVNAMLIHDFSDNSIRKLKTDRADSLKIANYALTFWNQLPPFNDEDETRLVLKEQSRMYERLASTATSLRNGLIALADQTFPSIDQAFGHAIKNADGHEKWVDFFSIYWHRDCVLRLSIEKFTESYRKWCLRRNYKFRTNTAHKLYALAQDAVPTLPKNNGTKALVLQACKSLNAVCEAKQSTQEEMNRLASLLPEYEVVMQMEGTGPTITGPALMAEIGDVRRFKNKKALVAFAGIDAPPFQSGNFESKSRHVSKRGSPHLRRTVFLVANIILTLSHKDNSVFCFMDKKRAEGKHYYVYTIAGSAKFLRIYYARVSEYLRTQEPPAAAICLDCKD

SEQ ID NO: 154409 - protein, 325 aa, unidentified
MNNYAALDLHERTVQCVLKNQDGRIVKESKTVKDEGRILAFLEGTDASVVMESGRNHQHIYDVLKERGYDVTVAHPLMVKAIAYAKVKTDRVDARVLADLLRADMIPESYVPGRDIREIRDLVRRRHYMVKLRTMQKNKVHAELATRWLKYEGDPFTEDGKVYLRSLAIDAVNDYLETIEFLNRKIHQLDEKVRRVVESDRYAKLLMTVPGISYYSALLISSEIADIKRFPDHEHLCSYAKLSPGVRQSGETQHTSKSVGNSLMNWIMIQCTRVHVRKYDSAITRFYQQVSKRRGEKVAIVAAARKLMRAIYIMLKEEQAFRLDG

SEQ ID NO: 154410 - protein, 345 aa, unidentified
MMNNAKQTKDTKQTKTNVANKPNEPIYCGIDVGKKVFVVSLSCKDKTKTFSNTGGDIKQAITYLNTNAGTNLALVVLESTGGLEIPLAKALHQSGFNVVIANPNKTSQFAKSYSNAKTDNQDAKMLALYAKFLSLDESKLTHLLYVPPSEEQEHLEALVVRRHQLVAMRVQEKNRLGQIHQSQLESVKQVIAYLDEQIAKLEQDIDTLSKHFDDTTKKFKDIKGIGGVTVATLMSMLPELGTLSNKEIASLVGVAPHPKESGTLKYKSHCKGGRQSVRNVLYNATNVARQYEPKFKQFYERLIGKGKPFKVAINACMRKLLTVINAIVRNDSVWQADYHLNLSVK

SEQ ID NO: 154411 - protein, 409 aa, unidentified
MIFVGDDWSEEHHDIEVLDGDGATLERRRLPEGLNGVGQLHELLAGYANEPGEVVIGIETDRGLWVQSLVAAGYQVHAPNPRMVARYRERHVTSGAKSDPGDAKVLADLVRTDRHLHRQIAGDSELAEAIKVIARAHQRQIWARQRQVNALRASLREFYPSALVAFGNDLAHPDALGVLGKAPTPAAGRGLSHSTITACLRRGGRRRFVEDTAKKIQEALRAPQMEPTTTLADAFGATVRSSVAIIGELSRQISTLETELRSHFEQHPDAEILHSLPGLGSILGARALAEFGDDPNRYQDARSRRCYAGTAPITITSGKRKTVLARFKRNHHLADLCYWWAFCALTHSPGVRAFYDARRAGGNTHDQALRAVGNRLVGILDGCLRHRTLYDEAKAWGLRTDLSGEGAAA

SEQ ID NO: 154412 - protein, 397 aa, unidentified
MAAAVQVVGGVDPHAETIHVAALTAVGKVVGDAEFTTTAAGYVQAVQFLTAKGVVERVGVEGAACYGAGITRALTAAGIPVVEVERPTRSARRRAGKSDRLDAYHAARSVLAERTSPVKDPALEGLRALHLARRSAIKAQTAAANQMKAILVMAPDPVRARFAILAGDRLADALLRCRGFFADPVAADTVTALRVLADRYRGLGQQIETLTARIDSLVTAANPGLRAAFGVGPTVAAQLLITAGHNLDWLTSEPSFAALCGVAPVPASSGKTRHMRLSRGGDRQANHALHRIALVRMSHHASTRAFVARQRAKGRATKAILRLLKRAIAREIYRYLTRHVEVPDYADLRPARQAKNITLTTVADHFGVWPAVISCLERGQRRDDQLAQHYRTWLAAA

SEQ ID NO: 154413 - protein, 349 aa, unidentified
MRFYSQQHRFYCGVDLHARTLALHVLDAQGHSALATTIAADPAAFLRAVAPFRDGLVVACECMFAWYWLADLCQQEQLPFVLGHALYMKAIHGGKAKTDKIDAHKIAVLLRGGMLPQAYVYPKGMRETRDLLRRRSYLVRRRAEALTHLVNTNSQYNRPPLAKKLAYAANRAELDLPARFDDPSVKKNVATDLALIDAYDGQIGALELYLTRAAKVDDPQAYARLRSVPGVGPVLALVLLYEIHDIRRFAGEGQFLSYARLVRCAHESAGKKQGTGGNKIGNAHLKWAFAEATCLLLRASARAKAWLARREKKHGKKRALGALAARLGRAVYHLLRKGEAFDEGRFFAS

SEQ ID NO: 154414 - protein, 359 aa, unidentified
MLNDSTTFLGLDLGDKHSHLAILDQEGELIEETRMPTSKASFQRKFSGLPPARVAMEVGTHSRWASHLLKELGHEVLVANARKLRAIYSNPRKTDRSDAETLARLARLDPSLLFPIHHRSPQAQADLAVLRSRDALVRSRTLLINHVRSLVKSSGSRLPSCSAASFSKKVTASIPEPLRPALLPLLETIAALTQQVRDYDRQIEALCETKYPKTRSLQQIPGVGALTALAFVLTLEDPARFAKSREVGPALGLVPRRDQSGDRDPQLSITKTGNAFLRRLLVGSAHYVLGPFGPDCDLRRWGLQLAERGGKNAKKRAVVAVARKLAVLLHRLWKNGELYEPLYRSRQHPSATVVVSAVI

SEQ ID NO: 154415 - protein, 341 aa, unidentified
MEGPIYVGLDIHKNTIVATALDSQGRRVDQAKLSSSDQELRQYLQALPGEKRVVMEACTFWEHTFDAAASVASSVLLSHPYKTRIIAEASVKTDKVDSEALATLLRLDAIPEAFAPPPALRQMRDTVKERVFYLAKEKSVKNHLYAYLMRKGIPYDGGVLGLKRKREALRDLHNPVVDRALDLLTHFDEGAKELDRAIHEEFVRSKEAQLLETIPGVGEITAVTLAAYLTPIERFSNIDQVSAFCGLAPTTHQSGDHEFHGHLRSDSHHILRWVLIEAGWMTRRNEKRGDVAKAGNRSARRHGKGTGAVAAAHKLLKICYAVLRRGTAYQPHAPEPGAARF

SEQ ID NO: 154416 - protein, 355 aa, unidentified
MNDEKYIGLDVHQATISVAVMDATGKVVMESILETKAATIVEFFAGLRGTLSVTFEEGTWSVWLYDLLNPRVDKLVVCNPRKNALLKDGSKSDRIDARKLAELLRGNQLKPVYHGETGVRMLRELSRSYLTIVKDLSRVMNRLKAVYRSWAIPCAGRDVYYRRHRAQWLAKIREAGVRRRAERLYEQLDMLQHLRQQARRELLVEGRKHAITARLRQIPYLGPIRSVLAVALMQTPHRFRTKRQLWAYSALALETRTSADYRYVEGQLRRSKKLVSIRGLNKDHNHDLKGLFKGAATMASVRPGPFQDFYQAALAKGIKPTMARLTLARKMAAITLTLWKKGENFDVEKLKSQAA

SEQ ID NO: 154417 - protein, 332 aa, unidentified
MSAYIGLNVHKDSTFVTVLDQDGRVAVQRKLPNEHVPSFLKQFNVEKIGLEASTHVVPLYRALVSRGFRVEVSHPKKTRYIAEARIKSDKVDSKAIAELVRLEALPQSYMPPPEIACLREKVRRRAFLVRERAKLKTKIRGVLAYEGVKPSEGLGLFTRKGVDWLRSLCLEPIDCYLRVIVVLNGEIRRLSRELKQLAGLDEDVRLLMTIPGLGYYLALLVKAEIGDVNRFKSGDHLCSYAGLVPSTYNSGGVTRHGGITREGSRWLRWAMVEAAMTHVKYDTSITRSYHRIAEKRGRKTAIVATARRLLLSCYSVLKNRRAFKPFPSRSGV

SEQ ID NO: 154418 - protein, 426 aa, unidentified
MEVIYKKACGVDVHKSFIVAVICDSTSVKPQYLRKRFSTFNNSLIEFRKWLLANDCQNVCMESTGKYYVPVYNALEGYISNVVVANPKWVRCIKGEKDDNKDAKWIADLFKLGIVRSSFIPTKDIRVLRELTRYLYKLTNMRTSEKNRFTNSLTVGNCKLDMVFSDIFGKSSSAIINTILSQNEYEDKDILENVCKNCKSSSEDILNAVNGISWNDAQKERMTVIQEHIDYLNESIKSLRKTIDVLVKPYESYINFLCTIPGIDRRSAIIIISEIGTDMSQFSSHHRLVSWAGLAPGCNESAGKKKSVKISRAGVYLKPALVEIAHAAVIDKHCDYYSVKYKQISKRRGKKRAIIAIARKILVAIYHMLLTGEVFNPSDMANVETSDKDRIKYTKNNFVQSTKQLFSLGLTQEEIVILINSQNSNT

SEQ ID NO: 154419 - protein, 365 aa, unidentified
MWEAPVKVQRTSVGLDVHARSVVACGLDGDTGEVFQRRLCPDHREILEWIGGLPGPVAVTYEAGPTGFGLARFLAAEGVVCRVAAPSKLQRPAGDRVKTDSRDAAHLARLLHLGQITDVAVPSVAQEAARDLVRAREDCRGDLMSARHRISKLLLRQGIVYYGGQAWTGKHEMWLRGQQFGSPALMLAYEAALDAMVACVHRRDRLDEAIVALAADSEFTALTRRLGCLRGISTLTGFGLAVEIGDWSRLTGRSIGAYLGLVPCEYSSGATRSQGGVTKTGNGHARRLLVEAAWHHRAPYRPGRDLRRRWDAAPVAARERGHAANHRLHDRWAGFDRRKKRAVVANAAIARELAGWCWSLAVMAD

SEQ ID NO: 154420 - protein, 402 aa, unidentified
MERIYDKCCGIDVHKKLIVACLRSGNQKKGEIREFGATTRELLELADWLKESGCEMVAMESTASYWKPLYNILESSELNAIVVNAQHMKAVPGRKTDQNDAEWIADLLQHGLLRPSFIPDKDQRELRELVRYRKSLIGERTRELNRLQKMLEGANIKLSGTVSQINGKSARNILEYLISGQTIDSDKYDEMYANRTIAHNLKATKEQIIDDLNGVMSPLQRKMMHILLLHLDELNAHIEELDHDIDDFMKPEEKTAAKIIQDIPGIGNTSAQAIIAVIGADMSRFPDAAHLASWAGLCPGSNESAGKRKSGKTRKGNALLRSTMIVCAQTAVKNKKSYFHAQFMRISPHRGKKRAYVAVAHSMLIAIFNVLRYGVEFKDLGAEYYNQFNKERKINAYLKKLK

SEQ ID NO: 154421 - protein, 345 aa, unidentified
MKITTVGIDLAKNVFQIHAVNEHGKTVLKKQIKRDQVAEFFVNLPQCLIGMEACGSAHHWARKLTAFGHTVKLMAPQFVKPYVKSNKNDAADAEAICEAVARPNMRFVPIKNIEQQSVLALHRARQGFVKARTAQANQIRGLLGEFGLIVPKGIANIAKRVPELIEDASIELTGAFRVLIDRLMEHLKELDQQVDALDANIKEWHRASDVSRKLTVIPGIGPVTASALIATIGDAKNFDNGRQLAAWLGLVPKQHSSGGKNVLLGISKRGDTYLRTLLIHGARSVISAAKRKKDKVEGWLSRLIERRNVNVAAVALANKNARIIWALLARDREFRADYTSAAAAA

SEQ ID NO: 154422 - protein, 321 aa, unidentified
MTYIGIDVSKDSFVVAYSPVKSSRTRTFKNTTKGIHEFIQTISKDDHHCVMEATGNYSALLVYLLSEAGITTSLENPLKVKNFARALLSTVKTDEIDARLIALYGEKMQPAPYKLRSDAILTLKQKRTVIRQLKKQLIATRNLKGSMEVLPFFDAKCKKSIEKTIAFLEKQVKDLEEDLASLAKSEYKKQMDLLTSVKGIGITLAAALIMATGGFTYFDNAKQLTRHLGLSPTYQQSGTSVNFKGHINRNGDSSLRSQLYIAACSSLRCNAECRACYDRLRSNGKPGKVAIIAVANKLIRQAFAVVTQEKPYVDGYVSSKK

SEQ ID NO: 154423 - protein, 348 aa, unidentified
MDVTTVAVDLAKDSFEVVMATATRRIVSRRRLTRAQFERFLTELAPGTELVMEACGTAHHWARYGQARGLRPRLLPSQYVRPYVRRNKTDRCDAEALLEAASCGGIQSVPVKTPEQQSIQALHRVRTQWQGARTARINVVRSLLAEHGIAIRRGAAAALHAIPALLDETDRIPSYLREVLGRVYEEIRSLEERIREVERLLRAIAAQHPIAPRLQQVPGIGVLTATACVGSVGHIHAFRRSRQFASWVGLTPREFSSGRRRHLGRISKCGDAYLRCLLVHGARSVIVAAQRTARTRPERLTRLQQWAIALVQRRGHNTATVALANKLARILWAVWHHDVDFTSTAAVT

SEQ ID NO: 154424 - protein, 348 aa, unidentified
MTLVGCDLHSRKQQVAVLDTRTGELVEQELVHEGDAVERFYCALPPPVTIGIETTGYTQWFHALMHQLGHTVVVGEAAKIRAMVVRKTKTDRRDARHLLDLLQHDRFPAVWIPDPDTRDRRALIAHRVRLVRMRTVVKNGLQAIALNQRLALHSALWTQRGLTQLKALALPPHTTRRRDDSLALLAWLTTRIDQLDAHIATVASADPRVQLLLTHPGVGPLTALTTVLVLGPLARFPDSKHVVSYVGLAPAVNASADKQRLGKITKQGNALLRWVLGQAAPLAARADDELRRRYFSILHRRGRPKAKVALARRLLVRLYIMLRDQIGYEEFRRRGRATRPHQLPVAVM

SEQ ID NO: 154425 - protein, 403 aa, unidentified
MNNVAGIDVSKGKSMVSVLRPFGEVVAKPFSIGHTGSELKELADYLKSLDGETRVVMEHTGRYYEPVARFLHDEGVFVSAVNPKLIKDYGNNTLRKVKTDKADSRKIARYGIDNWAELRQHTPMDTIRMQLKTLNRQQSLYTKTKTMMKNNLIALLDQTYPGVNALFDSPVREDGSQKWVDFATTFWHVDCVRNMSLTAFAERYRKWCKRHGYNFSQSKAVEVHAGAQDLIAMLPRDALTKTMIRQAIDALNAVSKSLEQLKAEMRTLAAQLPEYPVVMAMRGVGNSLGPQLMAEIGDVTRFAHRGSITAFAGVDPGADQSGTHEAKSNRTSKSGPPELRRALFLVMDCLLKTMPQNDPVYRFMDKKRAEGKPYLVYMTAGTNKFLRIYYGRIKEYLASLEGN

SEQ ID NO: 154426 - protein, 433 aa, unidentified
MSKFFNSPTVGIDVSADFSFVAILAPNGDVFKKPFRIKHDISGFTHLLKEIKKVEEEFNMKTAIFMESTGVYHLSLFHFLNKNFDNTFVINPLVTKCNKNVDIRKVKNDKKDALSIAQIGKFQNIKLSQSVSMDIFQLKSLVREYYKLTDNCSTYKKKLSTDLRVIFPGYKNVFSNVTSNSSIAILNEFPTPQAILSAPKDLIINILMEKSKKGLIWSEKVYSNLINYANEATIIGLPLHGFSVKITSTINIIKALESEIKNLLEQIESLINSPDFSEQIRKNIEFIDSIPGIGRLTAVTLIAEIGDINGFLRPKHLVAFFGIDSSVNESGKFKGNQNKISKRGTRIGRRALYAAALACIRTNRNGVPINKVLLHYYQINLNGKKPKVALVAIMHKIINYIFAVLRNQTPFEVRDPRIHKQMYLENKNKNTAA

SEQ ID NO: 154427 - protein, 350 aa, unidentified
MIILGVDAHKRTHTFVVVDEGGRKLAERTVSATEEGHVEALAWARRWDDRRFAVEDCRPVTRRLEADLLAAGETVVRVPTKLMAGARRSGRTPGKSDPIDALAVARAAIREPDLPIAHLDCATRELRLLVDHREDLVAERTRIQSRLRWHVHELFPGLEIAPASLGRHRHIAALEARLVDATGTVAEIARELLKRCRELTLRANELESQIGRLVRVLAPTLLGLPGCGGLSAAKIVGEVAGVLRFRSKATFARWNATAPIPVWSGNADRHRVNRGGNRQVNAALHRIAITQQRGVGSGRDYVQRRLRAGNTKTEALRVLRRRISDEVFRRLSVDEQRRATTTPNAIPLAA

SEQ ID NO: 154428 - protein, 380 aa, unidentified
MTEIQMTPRPDTIKNNQLYIALELSNTKWKIAFGNGFKIRLKSIAARDREQFELEVQRSRKHFGMAEDVPVYCCYEAGRDGFWIHRYLCNLGIGNLVVDSSSIEVNRRYRRAKTDRLDAGKLVTMLIRYMNGETRVWSVVHVPEEDDEDARRLHREIQRLKKERTGHTNRIKSLLALHGISMEIRKSFAEDVGKIVMWDGKPLPSRVKEEMVRQYRRYELIQQQVQILEQEKKEALKQERESSKKVLVLQSLKGIGPVSSWDLVHEFFGWRRFKNMKEVGASAGLAPTPYGSGELQSEQGISKSGNRRVRALMIEVGWYWLWHQPQSKLSRWFMERYGQGGKRMRRIGIVALARKLLIALWKYLEQGVIPEGATVKAYYN

SEQ ID NO: 154429 - protein, 346 aa, unidentified
MNITQIGIDLAKLVFQVHGVDARGKVLLRKQLKRSQMNAFFNQLAPCLIGMEACGSAHFWARKLTEFGHTVKLIAPQFVKPYVKSNKNDAADAEAICEAVGRPNMRFVPIKNTEQQALLGLHRARQGFVSERTAQANQIRGLLSEFGLIMPVGIRSIKGKVPGILEDAENGLSGVSRALIARLFEHLRLLDRQVRELEREISAWHHEDTASQRLQAIPGIGPLTASALVASVGDAKVFHNGRQFAAWLGLVPRQSSTGGKTNLLGISKRGDTYLRTLLIHGARSVLFSLKRHPDRAEGWLAQVAARRNPNIAAVALANKNARTVWALLAHGCDYRAGFRSVNSMAA

SEQ ID NO: 154430 - protein, 344 aa, unidentified
MKITTIGLDLAKSIFQVHGVDATGQVVVRKSLRRSQMLPFFAKLPPCLVGIEACGTSHHWARELIKLGHEVRLMPPAYVKPYVKRGKTDAADAEAVCEAVTRPTMRFVPVKSPEQQAALSMHRTRDLLVKQRTQLINMIRGLLAEFGIDIPKGLERALLMARQIVDGKPPEVPFEAAKIVSTLSQQVLDTHVRLREIDRDLAIWLRSNDVARRLMTIPGIGPIGASALAASVTDPHQFRSGRQFAAWLGLTPLQKSSGGKERLGRISKMGDKYLRKLLIVGMTSLVRRAKYSPGKVDRRLADLLARKPTRVATVAMANKTARVIWAIMSRGETYRAGHRPTLAA

SEQ ID NO: 154431 - protein, 322 aa, unidentified
MSQPNPLCVGIDVSKATLDIAASSDVAQFTVSNDSDGFNAIITGLRRHSVALVLMEATGGLEVAVACSLQAEGFEVAVVNPRQARDFARAMGYLAKTDRIDARVLTQMAEVINRHPERKRFIRALPDAERQALAAMVVRRRQLIAMLVAERNRLYPSHPQNKKSINTIIKALEDELVRLEKEMDSHIRNHFKEIAERLSSIKGVGTMTVSAMLAEIPELGTLSRREISALIGVAPVNRDSGTMRGRRTIFGGRAGVRSALYIAALVATRFNPVIKTFYVRLLAAGKAKKVALVACMRKLLTILNAMLRKNEEWDESYHHVAP

SEQ ID NO: 154432 - protein, 433 aa, unidentified
MMYPDSAGIDIGSAAHFVAVPADRDDEPVREFASFTADLNALADWLERCEIKIVAMESTGVYWIALYELLQRRGFEVLLVNARHVKNVSGRKSDVLDCQWLQQLLSFGLLRGAFRPDDKVCELRSITRQRAMLLKSQGRHVQHMQKALTQMNIQLANVISDIAGVTGQKIVREIVGGERDPQELAGYRDVRIKASEQEIAKSLQGNWRAEHLFALKQALAGFDFCVSQLLECDTETQRVLQELHAFEGLPAKGKKRSRSRNAPKFDVREHLFKVCGVDLTRIDGIDVSTALVVISEIGPDLGRFPTVKHFTSWLGLCPGTKISGGRVLGSRSKRTANRATQALKLAAAALRSSKSALGAYYRRMCARMDKPKAVTAAAHKLARLIYMMLTRGEEYTDQGQQYFEERYRDRVVRQLTKRARELGLELVPSAQTA

SEQ ID NO: 154433 - protein, 317 aa, unidentified
MSALPVFVGVDVAKTELVTGLRPTGEVWTVSNDETGIQELLQRLRPHGPVLVVIEATGGYERGVVAALAAAGIPLVVANPRQVRDFARSTGQLAKTDRIDVQILALFAERVRPEPRPLPDEATRTLSALLARRRQILEMLTAERNRLEHTVPAVRRDLVQHIRWLERRLRDVDHDLDRTVQSSPVWRAKENLLRSLPGVGPVTSRTLIGSLPELGSLNRKQIAALVGVAPLARDSGTLKGKRLVWGGRAPVRAALYMAALVASRRNLALRAFDARLVAAGKPKKLALTACMRKLLTILNAMVKTNSVWQRIDHPKTA

SEQ ID NO: 154434 - protein, 340 aa, unidentified
MNYIGVDLHKRSSYIYILDKNGNKVLNKRISNNMIQLKEFFNEVEKPFKLAVETTYNWYFFVDLAQEYSDEVYLANSYELKAFAKRNKKNDKIDAKLIAQLLYQGYLPVVYIPDKATRKVRELLRYRMRTVRDRSRVIVRMKSLLDRLGYDSNGNYTTHKKLKEITAGSFEKPYDIIISNYLDRIKYLNNHVHSLEKQLKEVIIKDKRIDYLLSIPGLGHFGSALILYEIIDIERFKTFNRLCSYAGLAPRVSSSDKKLYYGKLSKNRAKNLQWILLETVYHFIRMVPGQQERYEQIKKRKNANIAKVALAREMLKIIYKVLKEKRYFYYKKENKIQSAA

SEQ ID NO: 154435 - protein, 337 aa, unidentified
MLFCGIDLHSNNCFVVISDDDDRVLYSRRLPNNLDQICAALDPYRTNLFGVVVESTYNWYWLVDGLIDAGYPLHLANTTAIKQYDGLKHRGDESDARHLAHILRLGLLPEGHIMPQATRAVRDLARKRMQLVQQRTAHIVSIETCLAQQTGGRLSTNDVKQLTDAQVDAMSFGAAESMGLKANLAVMQALQTQIDAIEKALSTHCRGNPGYRLLKTVSGIGPILATVILLETGSIERFADVGNYASYCRCVGSVHVSNGKKKGEGNTKNGNRYLAWAYVEAANFAIRYCEPARKFYQRKKAKRNSIVAIKAVAHKLARACFHMLKTGEQFSIKRCFT

SEQ ID NO: 154436 - protein, 397 aa, unidentified
MIAVGIDISKAKSTVAVIDSDGTVLASPFTMAHTQPEMEAFVTYLKGLGEPTTILMEYTGHYHYPVLKKLQDEGFPVCIVNPYQMKKYGDVEIHKAKTDKKDALRIAAYALEKSYKLVPYSSMEQKYEDLKFLSRQYSQRITYVAKLKVQLIALLDQTMPGITRILPLNSRNPEKCALLLFIKRFKSFDEIQRIGKARFLASYDVLAKKASERSASSKGLSIYELAVDSITTRGEDPYIWLSQNQCVDLLSTTQNAADEIISQMRNIAETIPEYKVLRAMHGVGDRLGPIILAEIGDVHRFHSGKALNSYAGNDAPPYQSGQFESRNRHISKRGSSALRKACYEVMQALKLTKPQDDPVYLFMLKKEQEGKPFNVAKMAGVNKFLRIYYARAMELYK

SEQ ID NO: 154437 - protein, 325 aa, unidentified
MHIIGVDVSKKKLHCAYLKDPVSEKLKIKAAANTREGVEALLSWARRHTQAEPEAMHFVMEATGVYHEATAEALVAAGATVSVVNPKHVRHFAESHGIVSKTDAHDRRVLALFGHERRPEAWQPPPAHAKQLRALLDRLDALDDDIQRENNRREKAEIQGNDDVLRSHQAVIGALERERERLRQEIDEHIDRHPDLRDKRRLLASIPGIGEQLSRHLAALFAGGRFRSASQAAAYLGLTPKQRESGTSVRSRPRLSKTGPARLRAKLYLPAASARRWNHHIDLLAQRLERAGKSPMAIIGAVMRKLIHIAFGVIKHQRPYDPAMA

SEQ ID NO: 154438 - protein, 438 aa, unidentified
MGIRYAGIDWATEKHDVRVADETGAKLLAATFAHDEAGLSALCRTLVKMEVGLVAIERPDGVLVERLLDAGLKVLALHPNKVAAARDRFRVSGGKSDRFDAFVLCELARTDNHRFRVLEPDSDQTKALRAMTRAREDLVHTRTAVVNQLRAELDRCWPGPLRLFSHMDSEILLAFLERYPSPVDAHGLGIVRMQAFLKREGYSGGQKPEALLAKLRSAPEGRVGELELAARRQLVLTYVAMVRTLNGQIKSLEREIRTAVRAHPDGRVFLSLFKQAHSFITAAELLAEIGDCRARYPSRDALAADAGQSAVAKESGKRKTAQFRWGCNKRLRVAFSRLADSTRHWHPWAQAVYAQARQRGLEHPRAIRTLGRAWCRIVWQCWQSRTAYDPTRHRSLQRHVTVTIPSPSGPIADLAATARMAADLTPAAGALEPSAQHR

SEQ ID NO: 154439 - protein, 340 aa, unidentified
MEKRYIGIDLHRNRFTCCIRLENERTYLTDWELEDLGKFVKKLRPADEVAVEITGNTRLFFDAVAAHVARVVVVNTNQFRVIRQSVKKTDPNDARTLALYLSKNMLPEVRMKDKEHGQLASLTQTRDTLVKLRTALKNKINNILSARGLNLAKEALSSEKKLAEVLELPFDEIVRIELRVIVGQIRSLNQSIAELEKTIGEEGSKLDGHKGLSSIKGIGKITGAILLSVIGDVNDFADEGHLASYFGIVPRVSNSNETERSGRIHKRGTKLGRTALVQSALIAANYSPYLKRFYEQVKGRRGAGKAIIALARQFLGIIYRTLKNKWIFEDFPNFVLAEES

SEQ ID NO: 154440 - protein, 311 aa, unidentified
MQEVFVGVDVAKDWLDVHHPRRGARRIENTPSAVRSFATSSAKAGVWIVFEASGGYDRLLREALEAAAVRFSRINPRQARDFARAMGVIGKTDRVDARMLAELGARLRPPTTEPLEAARRALQAQATRRRQLVELRKQEATRLQQTADAEARADIQSLIVVLDRRIATADDRMRKIAEGDPELANIDRRLRTVPGVGPIVAATLIAELPELGRLTRRKIAALAGLAPIARDSGKRAGRRIIGGGRPIVRTLLFIAALHASRRDARFQAFRQRLEQAGKSVKAAITATARKLLTVLNAMLAADADYRPAEPG

SEQ ID NO: 154441 - protein, 427 aa, unidentified
MNCTQNHKIDQVTDETLVVGMDIAKRKHYACFVDARGRVLQKSFPVIQSKQGFEQLDQRIRQAMNEFGKTKVIVAIEPTGHYWLNLAYFLEEKGIPLVMVNPAHVRRSKELDDNLPTKHDAKDALVIARLAKDGRFSFPRLLRDIEANLRVGSTLREKFMKEHTAVRNAMIRWTDRYFPEFSAVFSSFGKMALAVLELTPFLEEITGRTVEELVEIYRQSEGLKAPQKPKIRKLLEVASHSIGVTEGQQMARLEIAALVHRYRQLEEEIAALDAELTALAQTTVEYQWLKTVDGLGDATIVDLLAEIGSFAHYRDPRQLIKLAGLTLKENSPGQHKGQKRISKRGRKQLRSVLFRTVIPLIRHNEAFRELHKYYTTRAANPLSKKPSIVVLCGKLLKVLLTICTKKQAFDGERMRQDVFAHVQVRAA

SEQ ID NO: 154442 - protein, 342 aa, unidentified
MQRVYVGLDLGSSYFHQVAINQGGATTLNREFVTSGANLVKAFSGLRGEIHVHLEAGELAPWAIEIIRPLVHRVVCSHPQSNAWIARDSDKCDRIDAFKLADLLRVNRFKEVRYPAAPARRDFKALVQHYDELTQQQARLKTKIKARLRMQGVIVRGSEVFSARGRPAVLREVQSPLVRTAITQLYAVLDQSLESQAAAEQLMRRAAQALPEIKIMRTAPGMGPIGACRFSAYIHTPQRFSSTRQLWKYCRLSVSHRSSNGKPLRRPRLDRSGCGRLKDVSRKAFEAALRTTADNGFKRAYYRALAQTHDATHARLTVQRKIVSTLRAMWINQTPYRDQLMP

SEQ ID NO: 154443 - protein, 427 aa, unidentified
MSEKKSLELRVSVDVGYRRHSVAIGLSNGEVLEEFEIVHRPEGFGEFFSRIEKHQRERGCAVAVAMEGYNGYARPLDSLVRQRGYRLYNINSLKLARFKEIFPGAAKKDQTDARKGLELFQLSDHLPLAKEVLQEVTGTPVENEVLKRLTRRRRRLVNERVRVINNLQADLQAVCPGLLEITSEAGNQWFLNFLVSADTLPQLVRLRKPRLLKIPAVGRKYASLILDWQKRAQFSGEVEWVNEMIHEDAQRCLELDDKIKALEAKIKEVARNSRIAKILLSIPGFGTICTSELAGEIGTVERFSKEESLALYLGMSTLDNSSGKYQGTKAPKHVNTRAKAAMMIALDRHRKYIPESQKYYEKKRTEGKAHNQAIRALGRHLCRIIYKMLKEEREYQVRPKKGDTQGRVRSRSCVKTKIRRPKISANS

SEQ ID NO: 154444 - protein, 344 aa, unidentified
MDHFAGLDVSVKQTSICIVDDTGRIVREVKVASEPEALLKVLGKEAYRFKRIGLEAGPLSQWLYSALAEAGLPGICVETRQMRAVLKAQINKTDRNDARGIAQMMRVGLYRPVHVKTLRSQKLRMLLTHRKLLQSKAIAIDNDLRGTLRNFGLKVGMVGTVRFEARIRELVENFPDLAALIEPLLIVRRTLREQFCILHRRLLAIVRDDEVCRRLMTTPGVGPVVSLTYRATVDVPARFRKSKSVGAVFGLTSSKYQSGEVDWSGRISRCGDEMMRVMLYEAAQSMLRSKKWSWLKAWAMQIARRRGMKKAIVALARRLAVIMHRMWVDGTEFRWTREQAAAAA

SEQ ID NO: 154445 - protein, 405 aa, unidentified
MKTNGTVSQVGLDSHRKFSTVTARDAGGKIVWRQRLEHGNRKVVRRALGEWPQGVPVILEATFGWGWLSDELKRAGLDPHLASSRKIAAWRDARGIAKSNRTDADLLSELWSQKDRWWEVWLAPPEVRDQRERMRFRMTLVRLQTGMKNRIHAILHRHGIVHELADLFGTAGRRMLQRLALSGDERLSPTGQSTLKGYLQLLDSVRRQIAKVTREVRTQVERTPRGKRWCTLPGVGSILAHTILAEIGPIERFRSFRHMASYALLAPRAYDSGEERDEAPQGRHVGHIGRRTLKWAFIEGAHGAVRSGGRFRKIFDAYTDGGKKNRNRGYIVVGHELCRIGYAMERHETEYREEPPPRPGSSKTRGAHPHAPSETRSAKTNRTRRISGNSRPGTGQPDVAMVVVG

SEQ ID NO: 154446 - protein, 315 aa, unidentified
MKREEIYVGIDVAKDRVDVAIRPGGDTWSADYDERGVSELVSSLRTAEPAAVLLEATGGLEVPLVSALAAAALPVIVVNPRQVRDFAKATGKLAKTDALDAQVLAHFAEAVRPPVRPLRDEDTQELNSLTTRRSQLMTMLVAEKNRLRRASHAVHPSIRSHIRWLEQELSDLDKDLQKALRRSPVWREKDDLLRSVPGVGEQLSLSLLAYLPELGTLNRKRIAALVGVAPFNSDSGPRRGKRSVWGGRSRLRAALYMGALVASRYNPVLRVFYQRLLAAGKPKKLALTACMRKLLTILNAMVKTGQHWNHQDNPA

SEQ ID NO: 154447 - protein, 341 aa, unidentified
MNRIVVGVDIAKRVFQLHWVEPQTGEIVVLQLQREKFLEHFANRSSCVIGMEACGGSQHWARSLQRLGHEVKLLSARMVKPFVSGNKNDAADARGIWTAVQQPGIKAVAVKSEEQQAVLALHRMREQLVKFRSAQINGLRGLLGEYGEVMPQGRAGMRRDIPGALGRLVDRLPAVVIETLREQYARLGELDEQISQIERRLRQWQREDAATRRIAAIPGVGLLSATAAVATMGDARAFKSGREFAAWLGLVPRQTGTGGRVRLLGISKRGDTYLRTLLIHGARSVLTHSKEPPKWLSELLKRRPKNVAVVALANKMARTIWALTAHERAYKQGYVSRPALS

SEQ ID NO: 154448 - protein, 333 aa, unidentified
MYEVIMNLLGIDVSKNKLDSALILVNKPTKFLDKKTPNHAKGFDTLLQWCCKKASCSPQELHIILEATGPYHEKVALWMYKAGCKVSVLNPARIKNFAQSQGFRSKNDQLDAKIIARFGQKMEPKLWEPTVEKYQELHNILNRIQTVSKEIQSEKNRLEKQVATASPSKSVIQSISRTIVFLEEEKKQLKCLVKEHIDQDPELKMDQTFLESIPGVGPELGQWMNNLLKHGTSFQNAKQVVAYLGLNPTEHTSGISVSKRPRISKAGPAVYRAKLFMPAIVAFRYNPDVKALYERLLAKGKSKMAAVVAAMRKLVHICFGVIKHQTKYQSQIT

SEQ ID NO: 154449 - protein, 378 aa, unidentified
MVVIGVDTHKATHTLVGVDAGGRKLGELTVQATPVGHIKALGWARGEFGSDLVWGIEDCRHLSSRLERDLLDAGQQVVRVPTQLMARTRASARTRGKSDPIDALAVARAVLREPDLPVASHDEVSREFKLLVDRRAALVAYRTAVSNRLLWRIHELDPSHAPRAGSLGIFKTQAALQIWLSTQPGLVAELARDELADITTLTTQINALERRIAARVRATASSLLTIVGCAELTAAKLIGETAGVSRFRSEAAFARHAGVTPIPHWSGPKRVRLMTARLGNRQLNAALYRIAVTQIRHNGPAEAYYRKRREVGDSHAEAMRRIERRIARIVYGRLRADRAHRSATSDTAGPIRMPTQVETPQSRESSSAPTPSNRMPVR

SEQ ID NO: 154450 - protein, 326 aa, unidentified
MKKLVIGFDISKDTLDYCILQGVDRSIESRGVLGNDKKSILKWIKKLGDNDCTVSMEHTGNYGALLASLLTQEGICFYMVNPLDVKMSMGVQRGKTDAVDAYRIAMFTISNAHRLKPYRLPTEKLRKLKVLITSRERYVKISVQLKNSLRADLILAKTLNMKDLVKEGKKHINNINKTINILEKQMLEIIRSSQELKESYDKIKRVIGVGPITATKCIIETDNFLSFTNARQFSCYCGLAPFPYQSGSSVKGRTRTHHLRNKALKSILFNAAGSAIQHDPQLKRYYARKVDEGKHKLTVLNAVANKLVLRIFAVVNREEPFVKLSA

SEQ ID NO: 154451 - protein, 393 aa, unidentified
MRYLGLDVHRDFCEVAICERGRARSIGRIDTTRDALELFASSLAPDDRVVLESTGNALAIANILRGHVADVVLANPMQVRAISHAKVKNDRVDARTLAELLAADLLPQVWIADEQTRVLRRLTSRRTQLVRQRTRTKNEISAVLVRNLIARPQVSDLFGRAGRRWMATLVLPVDERHTLDGCLRQVDFLADELAVIDRAIAERVLASKDMRRLITIPGVDATTAATMMATIGRIQRFPTPRQLVGYIGLDARVRQSGNRPARHGRISKQGASAARHVLVQAAWAAIKTPGPLHAFYLRLKARRGAQIAIVAVARKLTILAWHLLTKQQDYAHQRPVLVARKLRRLELQTGAPRRPHRRITGPNTDKHDLHRARVAETISPELTTDWTPRPLRS

SEQ ID NO: 154452 - protein, 342 aa, unidentified
MDNIGLDLHKRESQLCILTEDGEVIERRIVTSRERFTAVLGNRAPARILLEAATESEWVARHLESLGHEVMVADPNFAPMYATRRRGVKTDRRDARTLAEALRLGAYRAIHRASAAQRHVRAQLAVRDALIRTRTRYVNVVRALTRRDGLRLPSGGPIHTEAKLAALPLPALLAAEVAPLRVLLGPLNDEIVAADARLTSVVAGDPVVTQLCTAPGIGPVTAVAFVATLDDVTRFKSAHQVEAYLGLTPCEYSSGEQQRRGRISKTGNARMRYLLVEAAWRLLRTKDPAAAALRAWAEGIAQRRGRSIAAVALARRLAGILYAMWRDGKDYRAPLAAAAAVA

SEQ ID NO: 154453 - protein, 373 aa, unidentified
MKRILRIGMDVHSTNYTLCAIEPRFDGDDIIYANVKVTPDPDNIVQFIEKLKSKIKDDCDILCGYEAGCLGFSLYHELAKKGIRCEILAPTTMLTQQGKRIKTDKRDALMIAQCLSYGGYHAVHIPTDKDDDVKVYLRMRDDHKSDLKKTKQRISAFCLSQGFHYTGGKWTQAHLKWLKSIELGTMDRETLNEYLITYEYLENRIETFDKRIEELASETEYVEKIKKLVCFLGVKTHTALSCLVETGDFQRFAKGNIYAAYLGLAPGENSSGGDVNRLSVTKAGNSHLRRLLIESSKGICRGHIGHKSKDLKARQCGNPPEVIAYADKANERLRRKYYRMIRHGKKKNVAVTAVARELACFIWGMMTDNISIA

SEQ ID NO: 154454 - protein, 399 aa, unidentified
MFHGLDLHQRFIQVCRIDATGQERSDFRIDATHDAITAFAETLGPDDAVVLEATFHTWAVWALLVPHAGRVVVANPLQVKAIAHARIKTDKIDAYTLAQLLRLDFIPAVEMPDERTWELRQLVTHRQLLARQRTAVRNAIYGILHRKLLRCPYCEPFGRLGRLWLRAQDFTDAERFMVENDLALLDTLTHGIEAVDERLRVTASLERDARLLMTIPGVGVTVAVGLLAAIGDVRRFASPNQLAAYFGLVPRVSQSADRCYHGPITKQGRSSARWLAVEAAQSLSQMSTPLAASYHRVKRKRGHNVAVTALARKLVVLVWYLLRKQEPYRYGPVAHTRRKLRRLTPGLAPAKPGQVPHTLEAVYREHGLPLPAAPTAAEKRAAARNLRVVTLAKKHECTA

SEQ ID NO: 154455 - protein, 347 aa, unidentified
MSGTLNHHWCVGIDLHKDTLTACVFCRCCGEISFQKLPCKCRKQIAEYFAALPRPHTVAIETVGFYRWLWEMLEPIVEKLVLADATQARALAGRRLKTDREDAFNIAELLAAGRLPTAYAPPLEVQFLRDLTRHRHGFSRQHARVLCRVKSIMNANNRPGPARLESDGLIRYLKAQGEKLPTRHVAMLWQCVDQLALTERQIAEAERAIGEVVQRDSFQEVYPILTSFPGVALVTAATVMAEVGDFRRFTHRKAIGRFAGLNPRVFASGGKQRIGHIAKTGSPQLRWILQQAAWTAIRTDEHVRRVFLRIAKRSGRKAAAVAVARKMLTWMWSAVLKGEPYRTRVAA

SEQ ID NO: 154456 - protein, 347 aa, unidentified
MRFYTNQHKYYCGIDLHTRKMYVCILDEKGEIREHRNMKTDRDAFLKAVAPYREDIVVAVECIFTWYWVADLCHKEGIPFVLGHALYMKAIHGGKAKNDKIDSQKIAVLLRGGMMPMAYVYPAKMRATRDLMRRRNHLMRKRSALYAHIQNTNSQYNLPDPFGPISRHQNRDGMAECFEQPAVQKSIAMDIEMIRTYDGILLQLERSIIKLANNHDPVSYALLQTIHGVGKIIALILLYEIENIRRFASVQDFASYSRLVKCAKESNGKKCGSGGSKIGNAHLKWAFSEAAVFFLNGNDPAKKYLDRLTKKHGKSKALSILAHKLGRAVYFMLKNKEAFDQKKFLNL

SEQ ID NO: 154457 - protein, 374 aa, unidentified
MKHYSTLYVGMDVHRDSFTLAHYALDMKQPTGIVKTDNDYRRIVAYVHRLREKYGQETRIVCGYEAGCLGYTLYHQLTKAKIECIILAPTTLPSPRGGKRVKTDGRDAANIAQCLAYGTYSPVHVPSAEDEQVKEFIRMRNDHCQMLKKLKQQILSFCLRHGYQYSGTRSNWTQAHMKWLDALQPEGLLGDTLEEYLTSFRYHQNKLERLDRRIEEISREERYREPVGRLCCLLGVKPLTALSVVSEVSDMHRFSTAEKFASYLGLVPCEHSSGNSVRRGGITKAGNVHVRALLTEAAQSYTRGKVGYKSSALKKRQSGQSETVIAYADRANERLRRRYYQMTLQNGKRGNVAKTAIARELACFMWGLLTDHVV

SEQ ID NO: 154458 - protein, 369 aa, unidentified
MYDPTRIRSVGLDVHKETIAIAVADGTLPAKVLATIPNDFTTLLKSLRRLGPPETIVCCYEAGPTGYGLYRRLKAAGYTCHVVAPSMVPVKSGCRIKTDRRDAAKLAHYLRSGDLTFIYVPDEATEAIRDLERTRDDAKIAERVTRHQLSKFLLRHGRIYPKKTAWNPAHMAWIAEQVFEQPAQRQVLADYREAVELGGARVARLTAQMVTASEAWEKAPLVKALQALRGVDMVTAVTVVAEVGDFRRFATAGELMAFVGLVPSEHTTGETRRQGRITRTGNTHVRRVVVEAAWHYRRQPRMSKAIRSRNDFVSAGVRAIAWKAQKRLHERLKRLLGRNKPACQAVVAVARELVGFLWAISREEVLLAE

SEQ ID NO: 154459 - protein, 315 aa, unidentified
MSDKRFIGIDVSAAWIDIAFHGGGTVERIVNEAEAIGGWLGRLKPDEVALVAFEPTGGYERTLRRELVAARLAFARVHPNELAAFRGRRGVKAKTDPIDARLLADFAALELSGRGLAPLVEGDEALREMSARRRQLADLLHAERCRADRAEAEVVRQGLDQVIAALNEALASLEQAIEAHIDARPALAATAGHLRSLIGVGPVTVHTLMGELPELGRLSGKEIAALVGLAPRTNKSGKLTRRATIGHGRPGVRRVLFNAARSAIRWNPVMRDFYATLVHTNRRPGKVALTAVMRKMLVTLNAIAREQQPWRSAKA

SEQ ID NO: 154460 - protein, 400 aa, unidentified
MNHNMLLYIGIDVSKDKHDICIKNNDGNILKRFQLRNNKSDLNKLYTTVNKLKSGTGDSMRVFFGMEASGVYSFPLYSALKRDGYLVKLYNPIQTNGYRKMEIRKTKTDPIDAAIIADMLRYQEPPVSTAIDNLKLYQLRELCRVRQRNVEKRTKCKIQLVRDLDTIWPGYQSVMKSVYGKTSIALLKEYSVPSNVAAKPFEEVYGFIKKFSRSQMTRARAEEIYNHAENTLAVPEIDSIVTIEMKTLISEIELYNKQILAIEKKMTQMMKQIDSKITTIPGIASILGAIILGEIGGVSRFSSAKKLVAFAGLDPIVNKSGKFENKTGHISKRGSPQLRSALFMAANVARQNDENIGDYYNDKITKGKHHFSALNATASKLLKIVYWVLKNDQEYKVQLN

SEQ ID NO: 154461 - protein, 339 aa, unidentified
MNTSVIGLDIAKHIFHMATLGADGKMIKKKLKRSELLAFFANYPASTIGIEACGGAHHWARELTKLGHEVVLLNARYVKSFVVGNKNDFNDAVAIYDAVSRPNKRVVAIKTIEQQDIQLIHSLRQELIDKRTALVNQLRGLLNERGIIINQGIKQVRQQLPLILEDAENGLTALSRELFAEQYERLKSLDDEIKAQDQRVNRLCNANELSKRFLDIPGIGPLTATIVAADMGDNGKGYQSSRDYAASLGVVPKQHSSGDKPVYLGISKRGNRYIRTLLIHGARAVLKSCTQKTDKLSLWLQALVARRGFNKAAVALANKNARILWAMATSGKDYQVLAA

SEQ ID NO: 154462 - protein, 347 aa, unidentified
MSITMIGLDTAKSVFQIHAVDETGKALIRRKLSRTQLIPFFEKQKACTVVMEACGASHHWARLLTSLGHHVKLIAPEAVRPFVKKGKKNDAADAAALCEAALRPDMKFVPMKTAEQQAILALHSARSLLVKQQTMLVNAMRGLATEFGLTVPKGINRLDELTALVDADEAFPETALHVFRELRERCDSLSESIEKIETKIVAHARGDETARRLATIPGIGPITASLIAATVADISMFKSARHFAAWLGLVPRQYSTGGKTRLGGITKAGNREIRKLLVLGATSMVYRAGPWNSAVWAWTRGVLERRPVRLVTVALANKMARIAWALMTRKEVYQAKGRIAAAAEVAA

SEQ ID NO: 154463 - protein, 344 aa, unidentified
MSNRDTCGIEVSAKELVVSLRRGEDLEPLRSFTNTPEGHKIILRYLRRAGRVVRVCMESTGLYGLDLALALSGQEGIEVMVANPRAVRNFAKALMQRSKNDPLDAGVLEEFAARMPFQPWRRPSPSALALHALARRLRELVEMQTAEKNRQHAAGLSQAIPAVVRRDLARSLRAQDRAIQRLTQQARKLIAQDPQLTERFALLDSVPGIGETSAVQLLGELGVLAPDLAARQWVACAGLDPREHNSGSSVHKKPRISKAGNAHLRHSLYMPALVAVRHDPYLGGFYQHLLAEGKLKMQALVAVMRKLLHALHAMFKTHQPYDGSKLFRLPVTPAQEVANAPFTS

SEQ ID NO: 154464 - protein, 370 aa, unidentified
MNDIIFVGLDVHKATVAIAVAEGVRGGEVLQLGIIPNRADHIAKLAAKLGKSGRRVSFCYEAGPCGYGLHRQLTRLGHDCVVAAPSLIPMKAGDRVKTDRRDAAMLAKLHRAGELTAVWVPDSAHEAMRDLIRSRATAVRVLAKARQHLQGFLLRHGRVYAGKKGWTQAYRRWLTTVRFDHSAQQVVLQDYIHAVTDAEARVSRLTQQIDGLAPQWSMAPVVEALQAMRGVAFIVAVTVVAEVGDFSRFDNPRQLMAYLGLVPSEHSSGNTVRRGGITKAGNALARRALIEGAWTYRMQARVSRKLHDRIENLPQVIRDIAWKAQVRLCARYRRLAAVGKAKVVVTTAIAREMVGFLWAIARQAQVSLAA

SEQ ID NO: 154465 - protein, 460 aa, unidentified
MRNTSQKTKKRKQKVSIHQDWPLINPDAAGVDLGSREHWVSVPQDRHAQPVRCFGTFTPDLEALAQWLKECRITSVAMEATGVYWIPLFQLLEGRGFRVLLVNARQIRNVSGRKSDVLDCQWIQRLHTYGLLGGSFRPADAYCVLRSYLRYRDELVTARSTQTQHMQKALAQMNVQLNQVLSDVNGQSGLAIIEAILKGERNPLKLAGLANRRVKATRDTIAKALIGDYRAEHLFQLQSAFDLYYIYETKILSCDQALAAELERLPDRVDPHHKPLPAKTDPKKKIGEAVRATLYRKLGVDVTSVEGIGVLVGLTVLTEVGPDLSAFKTEKHFTSWLGLCPDNRISGGKVLSCRSRRVVNRLSDALRLAATTLERSPTALGAYYRRMKAKLGAAEGITATAHKLARILYRLLKHGEAYVQEGLAEYEKKHQARKLQTLQRTAESMGLQLVQKETTAQRVS

SEQ ID NO: 154466 - protein, 323 aa, unidentified
MAKRITVCAGIDTGKHKLDVAIDGHSEQLQVENTPQGHQALVDWLRQHRVRRVGIEASGGYEQPVVVELRRRRFVVVVFQPAQVRAYAKFHLQRAKNDKIDAALIAACTAAVRTIHAAPDPRLSPFAEQLTLIDQIGEDIARLKNRIESCRNPRIKALWKQEIRRLTTCKRAELKALVAAIRKHPDLAKRLDLINSVDGIGLPTAVAVLVRMPEIGQITREQAAALAGLAPYDDDSGEQTGVRHIAGGRERLRRALYGAALPASFRWNQQIICLYQRLIAKGKQHKRALIACARKLLVFANTVVARGTPWQNIAPPATAQAAT

SEQ ID NO: 154467 - protein, 469 aa, unidentified
MKTDKMLWRNRKGKKELARRLQSENPGLEVVHPQAAGIDVGNSAHYVAVRPDRDSQPVRRFECFTADLYRLADWLQNCGVKTVALQSTGVYWIPLYNILEERGFEVYLVNARHTKNLPGRKSDVQESQWLLKLHTYGLLNNSFQPPSRIRMLRTYWRQRLQHVTGAATCVQRMQKALTQMNIQLANVISDLSGVTGQLIVRAIVAGERDPWKLADLSHPRVQASRAEIAKSLEGHWRQELIFVLQQEIEMYDTYQRRVAECDQELQKHLSAFADTASPPVKEALPPKKKKKQNKNNPHFRLADELERITGVDLTRIDGVDVMVAQTVISEVGLDMSPWKTEAHFASWLGLCPDNRISGDKVLARGTRHVLNRAATALRLGASTLLRSQTYLGAQYRRLRSKLGAPKAITAMAHRLARLVYRMLKYGQHYVDKGAEYYEQRNRQQQIEFLRKRAARLGLQLTPAHAQNHP

SEQ ID NO: 154468 - protein, 345 aa, unidentified
MNGMYYIGLDVHKKTISYCVKDASGQVHREGKIGATRRELDDWIKTLPQPWSVAMEATIFTGWIYDHLLPHAAQVKVAHPLMLRAIAAAKKKNDRVDAGKIADCLRCDFLPECHLAPTAIRDRRRTLRYRHLLVRQMVQMKNRISGLLMETGVEYNKRRLHKVGYFRELLSTNEEVNESIRPLLKLSRETIVRLQKTEYALLSSLQRDPLLAERIKRLRTVPGVGPITALTWALEMGDASRFRSIRQAISYCGLCGDEKSSADKVIRTPLSKQRNKHIQRVLVEAAKLAPREDHKLALVYATEKQKGNANRATLAVARKMVAYLLAVDRGRRNFVPAEEHRQTAA

SEQ ID NO: 154469 - protein, 439 aa, unidentified
MPDVPWGRRKKGGVSMSKKKSSLAGLQALYARVCGLDVHKKLVVACVRILESRDGTVQSTLRKFGTMTADLLELRQWLAELRVTHVAMESTGVYWQPVFNLLEGHFQVWVVNAQHIKKVPGRKTDMKDAEWIAQLLQCGLLRPSFIPERQQRELRDLTRQQTKLVQQRNAVDNRIQKVLETANIKLGSVASDVLGVSGRKMIEALIAGERDVSVLADLAQRQLRGKIPELQRALEGELTDHHRFLLRQLLGQYDFLEKEITSVSERLEAVAPPWFRAAVEQLDAMAGVGERGARALLAETGTDMSRFPSHKHFASWAGRCPGNHESAGKRRSGKTPAANRHLDAVLTEIAHAAARTKNSYFKAQYHRLAGRRGKKRAIGAVKHSLLVTVYVMLRDNKPYKDLGVDYFDKLNPQQRIRYHVRRLQELGQEVELSPMADAA

SEQ ID NO: 154470 - protein, 313 aa, unidentified
MKALQSNVFIGVDVSKERLDVAVAPSGETIGFANNEDGIALLADFIKPQAPALVLFEATGGWEMNAVNHLATQRLPLVVLNPRQVRDFAKATGQLAKTDAIDARILARFGEAVRPEVRPLKPVELRKLEALNTRRRQIVEMITAEQNRLVSAPEWVRPDIEELIAILKKRLAAINRDLNKLIRKSPLGREKDKILQSFPGVGPVMASTMIAELPELGNLNRREIAALVGVAPLNCDSGTHKGKRKIWGGRAALRSVLYMCALTATRCNPVIREFYQRLRRAGKPFKVAITSCMRKILVILNAMMRSRTCWQTP

SEQ ID NO: 154471 - protein, 345 aa, unidentified
MKLSRVGVDLAKNVYQLHGVDWHGKSVWKRRLRRGQWLQALLNKVEPGCEIGMEACTGAHHWARELQARGYTVRLIAPQFVKPFVKSNKNDANDAEAICEAMSRPHMRFVSVKSIEQQDMQATHRVREELKAHRNAKANQIRGLVAEYGLVAPKTLLALRRAIPEWLEDAENGVTDNFRSLLHGLWNDLLTLEDRLKELDKEIEKLARSNEVTKRLQQLRGVGPLVATALVATVGDGSQYRKGRQMASALGLTPRQNSSGDKYRLFGISKRGDVYLRTQMIHGARAVVSQAKHRDDPLSRWVTDIAKRRHPNVAAVALANKTARMAWAMLQNDTNYDSSLAVGQV

SEQ ID NO: 154472 - protein, 369 aa, unidentified
MLQDVAGFQTFVGVDLHKCTVTLKAVSAAGEAAGHLTISTKSVEKIERWLRDLPQPVWLAVEACPFVEWFIDRYRDWVARIDIADATELACRRGKRRKNDPNDALDIARRLARGECPLGFIADPTLMQLRKLGRHWRQLSRLISRSKHAMKSMLNAANLRGPKFDGAGAQRWLLAQGHLLKPVQHQAFSDYLDHVLLVERQREKLRRQMQWAARSEVFAQTELLLESVPGIGDIWGLIIAAEIGPFDRFPNTDALEFWAGLTADLKESAGRTQSGNITKAGSAVLRWALCQAAVTLCHCDARQEAIRQRLIKRIGKAKANVAMGRRLLRTLYAMVRDQKPYRCEQPIDRTTRLNKARAARKPKVADKAA

SEQ ID NO: 154473 - protein, 324 aa, unidentified
MNKNKQFSGIDISKDVFDVFDYTDKHYQFRNDLSGFKEFGKILTEHSHCVMEVTGSYYQNLATWLFSKSIAVSVVNPLSVKRFIQMRLKTSKTDKSDARMIRIYGEYEDPKLWQPPSEYIIEANELHKLIDLLLRQRTALKNKLHGLKSKGILRSSVVASVRRQIKSLDKEVSSLELKLEDLVKEYQAELLTRLCSIPGIGKRTAIFLIVLTQGFEKFENSRQLISYFGLNPTIHESGSSIRGRSRISKTGNNQIRNLLFMCSFTACKQNKSCMEIYQRIIAKGKSKKLALIAVANKLLKQSLAIAKSGLYYDEDFKSVYINIA

SEQ ID NO: 154474 - protein, 359 aa, unidentified
MDIQGTSVGLDVHALSVVAHAVDEETGKVSKARLCPDHGEVLGWLHQLRAPVRMTYEAGPTGFGLARAINEAGMECVVAAPSTLQRPAGDRVKTDARDAAHLARLLRLGEITAVTVPEREIEAVRDLVRAREDARVDLMRVRHRLSNCFCGRGSSIFGGTPCTCAHEKWLRRQRFDDAHLKAAFDHGFDAVLAATAARDRLDEQITEVAASPRFADPVNRLGCLRGISALTGLALTVEIGDWSRFTGSSIGAYVGLVPCEYSTGTSRVQGSITKAGNTHVRRLLIEAAWHHRKSYSTSGPTLRARWAVVEPALRARGHAGNRRLYKRWRHFTERGKNPLVANVAIARELAGWCWSLATM

SEQ ID NO: 154475 - protein, 409 aa, unidentified
MNPVVERGAGLDVHQATVVATVRIPDDTGGRTAITETFPTTTAGLLTLRDWLQAHGVTHVAMESTGVYWKPVYYILEDSFTLLLVNAHHLKQVPGRKSDVRDSEWIAQLLEWGLLRSSLVPPAPIRDLRDLTRYRKHQSRDRAREVNRLHRVLEDAGIKLSTVATDVMGVSGRAMLDALLAGTTDPEVLANLARGKLRKKLPALRQALRGRFRAHHGFLIGQILTKIDFLDEAIDQLTEAIDRLVVPFEPMLTQLDTIPGVDRKGAITIVAETGGDMTHFPTSGHLCSWAAACPGQNESAGKRRSGKTRRGNPYLRTLLIESGLAASRAKDTALQSRYYRVKRNRGHKKAVLAVGHQILEIAFYVMRDGVAYHELGADYFDRRHRDRALRRHVRQLEALGYRVTLEPAA

SEQ ID NO: 154476 - protein, 434 aa, unidentified
MTMVGGLDVHRQQITVDYVDDDGLVHWGQIRPATRKTLRNWLAEHCPDRDGEFALEGCTGWRYVAEELAAAGVGVHLGDPAETAAARGPKKRAKTDRADARLLRTLLVEGRFPESWIPPAHVLEIRTLGRLYCTLMDERRAWQQRIHAQLFHQGCPPVKALLSQAGREALAQAELSAAGRQYVDTALRRIDELTAEIEPLRTQLVNFARRQIGCRALQRLYGIGWLCAAIMWAEIGDARRFHSSDRLVRFAGVDVTVYSSDSKRSPGRLSRQGSPELRWAAFEAAKCAAGAVPRITPTTTSWRPSATATTARTPPWRWSAKSCAAAITRCVSSATPRWRCPTPNRRRRLPEMRCVRALPILQLMPAASSLAVPVATALLGGLPGKIERPHLFGGPHVGHPIDHHVAGPLSVDPDKAGRRHAQHVSRTAFAHGRP

SEQ ID NO: 154477 - protein, 400 aa, unidentified
MLSIGIDVSKGKSTVCGMKPGGEIVYTPFEVQHTREGMSELVLLLHNSGEEVRAVLESTGSYHCPVVAALLENGIFVSVVNSLRMKRFCSQSIRKVKTDRIDAMQIALYGLAYWQELQPTRLPEDTYRELQLLARQYYQMTSLLIKAKVDFNAICDQVLPGMQELMNDHAGRHKLSDFVLRYRHTTHILEMGETRFRKDYCKWAEKKGYRNCERMAVLIFATAQNGIPVLPNAPSTQIVITEAIRVLHTVEASRDAILTQMQALAKTLPEYSLVREMPCIGDTLAPRLIAEIGDVRRFHSKRALIAYAGIDAPPYQSGKFCANNRHISKRGNRYLRKTGYEVMQSYVMHKPANDPIFTFIEKKRGEGKSGKLAMVAGLNKFLRVYYGKVTELYRSLPAIE

SEQ ID NO: 154478 - protein, 404 aa, unidentified
MWFTGIDWADTHHDIFIIEESGQKLTSFRVAHTSEGLAELTSRLEAVCGPDKKAKMACIIETNHGLLITTLLEAGFAVYPVNPKTVDRKRSAAGAKTDKIDAYLLAKHGRSELEDLRRLSPNSPVIAELKALTRDQDNLIRSQTRLVNQLTACLKAYYPIVLSLFCKVQQRSTLQFLQAFPTPQEAMAATSQQITDVLKTARHPSAEKTGRSIIEQLRQPVLLADAITTRTKARLMLALVRQLLPVMEEIAAYDKEIERLFLTHADSHIFGHLPRAGKRLAPRLLAEIGDDRQRYQDAASLQALAGTSPVPYESGNYAKPHRRYACIKPLRNVLQQFAWQSAQTEQWAMDYYERKRREGKSHSVAVRALANVWVRVLFAMWLKEEQYQPAIFEQARREHAHRAA

SEQ ID NO: 154479 - protein, 346 aa, unidentified
MLYAGLDLSRKRLDVHVLDEEGTTVEVMAVRPDADALRTLAVHVFRYGQEVSGVIESMTGARFVHDQLELRGWDVAIGDAVKVKGLAPLAAKTDKIDAWVLAELARRDLVPEIWLPTPGVRAERERARFRLHLVRHRTALKNRIHATLLTFGHPVPVADLFGVAGRELLARMDVPEPWRSSLSTSLAMVDDLDERIDACAKDLRALGADHPMIPLLLTVPGIGHILAYTIASEIGDIRRFASPKKLTGYTGLCPKVYQSGDRDVRGPLAKNGPKYLRWALIEAATHAARDARYRERYERNKKRLGRQRGAKVARVDIARKLAEAIWHVLTKNEPFAPAGPTMPLVA

SEQ ID NO: 154480 - protein, 340 aa, unidentified
MNATTYGLDVAKRVFQMYWVDAQTGEIVNRRFGRDELIRFLAQRPAGRVALEACGSGHWWARKIKAVGHEVVLLHAKFIRPFVQTNKTDAADARAIWTAVQQPEMRTVAAKTEDQQAMLALHRMRSLLVKFRTMQVNQLRGLLYEFGATFRAGRVAGLAEVRARMAELAEALPGTMVCGLQDQLQRIDALEQDINRLERQIGSWQKQEAACRAIAEVPGIGKLTATALVATMGDAKAFKSGREFASFLGLVPRQSGTGGKIRLGSISKRGDPYLRTLLIHGARSVLCHAKVPTTWQRAIQARRPANVAAVAMAHKMARTAWAILAHGQAYQKDYVSVKPA

SEQ ID NO: 154481 - protein, 389 aa, unidentified
MITQNPPSTPPATATAATATPPSATATPSPKPHRVIKLGVDVHWREHVVVRQIDGTSPQPAQRFAPEAFVAWVAKQAQQADVVHCCYEAGPFGFVLHRRLVGLGVKSLVVRPRNWDEYGKKVKTDRRDALALVSCLDRYVAGNTEALTSIRVPTENEERARSVSRQREQLLEHRKRLAAQGLSCARYYGHDLPDEWWRAKKFELLQAELPEFLVGLLASVQRIALLVHAELEAHSAEVESAQTQELPTGLGALTAQILDREIGDWGRFKNRRQVASYTGLVPSEHSSGERRQRGAITKHGNPRVRHILIEASWRLQQFQPGYRPLKSRQGALDTAKRKGDKPARKKLCVALARQFIVDWWRIRTGRTTPAKLGLQMSWPAAYVLRGKAP

SEQ ID NO: 154482 - protein, 387 aa, unidentified
MIYVGVDIAKTNHYATIIDSNGEILVEPFLVKNNQDGFNILYQKIKNYDKDKLLIGLESTAHYGNNLIYFFFKKGFKVGVINPIQTATLRKTNIRKVKNDKVDSILIVKTLIMNCYSLLTDYDVEMIELKSLCRYRHNLMTMRTKSKIQLATYVDQLFPELNSYFKGNLHINTSYQLLKQYSNPIDITNINLTKLVNILINSSKGKYNKNKAIELKTLAKNSVGIDNPALSTQIRLTIEQIELYSKQIDEIEDKINNYIEKSDNVITSIPGISNTTAAIIISEIGNINRFKDSSKVIAYAGLDSTIKQSGNFNAKTTRMSKRGSSLLRYALILAANNVRLNTKTFDEYYNKKCTQGKSHYNSLGHCASKLVRILFKMLSDNKPFIIE

SEQ ID NO: 154483 - protein, 420 aa, unidentified
MPFGPALRYLRARAKISALSIPLWITLEQALPLSKRVGKNKGKSQRFGYNFVGDKIQPKERRLAMNKGSKLDFSGQPIYIGLDVHKKSWSVSIFTQYGEYKTFSQPPEAETLSQYLQHHFPGAQYRSVYEAGYCGFWIHDQLKDKGIENIVANPADIPTRDKERRTKRDRVDCRKLARALRGNEIEGIYTPPRWKLEDRSLVRTRLSMGRKQARCKNQIKSMLLFYGVGIPERREMGHWSRRFIRWIEGIRMERVSGDMALQSHLEELCHLRQLIAKLNRAIVALARTEQYCLWISLLKTVPGISTLTAMIVLTELHEVTRFGSIDELCSYVGLIPDTQGSGEKEHVGGVTQRHHSQLRWLLIEASWIAVRKDPVMMETFQQYCKRMRKTKAIIKIARKLLNRIRFVLKNQAEYVTGVIE

SEQ ID NO: 154484 - protein, 405 aa, unidentified
MRYYLGVDWADQTHAVWVVDESGTKIAARAVSHTAEGLGEWGRELDEWRAQGIDLWAAIERPDGRVVDVLLDHGVVVYPVNPKALDRARDRFRQSGAKSDPFDARVLADFLRTDQAHLRALQPSSEAAQELKLLTEDCQRHIRQQTRLVNQLTATLKAYYPRALEVAEVTSALAREFLPAYPTPEALTALTERQWQRWARAHRLPEARAGELWAALRQPQLPVPAHVVRAKARLMQTLMEQLRPVVAAVAQYRKAIDDFFARMPAAQWARTLPIGKHGITAPTLWARLGDAPGRWESFRHLQAHAGTVPVTKRSGKQQRVVQFRFACDKALRSVVDQVAYLSLLSSAWARPYYDQQRARGHSHRQALRALGAKWLKIIFIMWQRQVPYDEQYHLATMTRQQLGRR

SEQ ID NO: 154485 - protein, 363 aa, unidentified
MDKYIGFDIDSKKTVACVVQKGKKDQFATLKTDIEQMKKFLQSQRRPGEKLHLTFEISGEAGYRHDQLADTVDTITVSNPTKMTWVYKTAKKTDRIDARKQAVLLSIGEVPKVYIPSKEIRQWRVTIQHRRKIVNRITAVKNRIRAFLKANGFVQPAQRGSWWKLTNRAWMRQLAEESEVASERLWRMSLADMLDELELLDGQLARVTRYLDSYLKSKPGGRLLMSIPGVGPRTAEAVLAYTDEVRRFSRSKQYGAYFGLTPKLDESGSTRRLGHISKQGPSVVRWLIVESAWRAIKKSKVLKEFYERVRAGQNARKKIAIVAAARKMLSVMRAMLLTGELFNEQLVGKECWLGGTVEVKRSA

SEQ ID NO: 154486 - protein, 424 aa, unidentified
MNLTQNDRLNQVTADTLVVGVDIGSETHFARGFDWRGYEFSKRAFRFSNTQVGFLTFIRWVEEMMRKTEMKKVIVGCEPTGCYWLTFQKFLTDKGILLVTVNPYSVKKCKELDDNSPEKSDLKDPKTIAGLVREGRYSTSYLPEGVYAEIREAQVCRDQIMKQHVRLSNQIRGWLQKYFPEYLECYKDFDTASGMMVLEHAPLPEDIIKLGAEGINELWRKAKLRAAGIKRAKTLVEAAQGSVGLSGGEAARLEIWFLINDYQTKTKQLARLDEFLAEEVMKVPHVEKLLAIKGVGLSTVIGFVADVGDIGRFTDPKQVQKLAGLEITKNSSGKKKGQPCISKRGRRRLRRTMYESARSLINWNEAFSEVFMYYRYRTRNPLCGMQAKIAVACKAIRVFYTILRTGCEFDAEKLRRDIIRPEAA

SEQ ID NO: 154487 - protein, 274 aa, unidentified
MKLAQELNMIGIDVAKNKLDIALDDARTTTVSNDEKGFNALLKAVENPCQTCFVMEATGVYEQPLAHFLLAKNLSVSVVNPKRVRDYANAMGAYAKNDRIDAQMIRHYSQSAHAKNRLTLRKPSTRTAQKLEALLRRRNQLVDQRAAEKQHLEAAYDKSAVCSIKRMIKWLDKEIERIESQIKADIEQDADLKELKAQLIKVEGIGEITALTLLTQLPELSLFSSKEITALVGIAPYCRDSGQKTGRRQIFGGRQLVRSVLYMATLSAVRFNKP

SEQ ID NO: 154488 - protein, 347 aa, unidentified
MVTLGTDSHKQSHTLVAVDRNGRQLAEMRVAATPSGHMEAVGWARQWPERRWAMENCRQLSRGLERDLLVAGEQVLQVSPKLMGASRRGGRVLGKSDPIDALAVARVALREPNLPAARLEGKSRELKLLVDHREDLIGERTRIQNRLLWHLHELEPGLVVGCSGLTRRGVLAEVLRRLEAHHDLVAEIARELVARLADLTKAVNRLQRRIESLAAELTPSLMVLPGCAGLTAAKLMAETADVRRFHSSAAFAMYNGTAPIPVWSGNQQRHRLNRGGNRQLNVALHRIAITQLRLGGEARAYVTRRISSGNTKTEAIRALRRQLSNEVYRLLRKDTLLLPSAAQATAA

SEQ ID NO: 154489 - protein, 526 aa, unidentified
MAPTSCGWVLGGSCSGLVVLSRKRELAAGRLDPVGESVNLTRTSAEPTTVALITIKAIMKPKSRGAKKQKVSPFDGELKLIEPDCAAIDIGSRSHWVAVNPQRDREAVREFGAFTTDLMRLADWLKQCEVKSVVMEATGVYWVPLYELLENRGFKAYVVDAHTVRHLPGRSKSDVKDCQWLRRLHSYGLLRGSFRPPAQIRQLRNYQRSSAKIVDAAAQQQLRMQKALTLMNIQLHHVISDISGLTGLGIVRAIVGGERDPKQLAKLRDPRIRASKETIQKSLEGNWQEELLFDLKIALESYDHFQGQIAAYNEQICRELREVPSKVDVVREPLPAGRPKVCHKRPGMSQQDQLDLRQELYRISGVDLTRIDGINLQTAQKVFFEIGTDVSAWNDEKQFSSWLGLSPNHRISGGKVLKRSSRKVVNPLSVGLRLAARPLRNSHSALGANFRRLIAKIGMPKAITAMARKLAVLIYRMLKYGTQYVDKGMEHYEAKYRETKLQYLRSQAAKLGMALVPNLEAVSAAL

SEQ ID NO: 154490 - protein, 397 aa, unidentified
MPQPNDLSRSLTALDQDSTLIVIIEMSQASWLVGAIVPGIERHPLKKLAPDAEELLQVLQRWGREAAKAGRTVKRIAVAFEAGRDGFWLARWLRAHGVEPHVIHASSVAVSREHRRAKTDRLDVELLKRAFLGWLRGEGDHCKMAAIPTLELEDARRPSRERETLVGERTRIINRMKSTLARLGIRNFRPNLRNAPERLAALRTPEGVALPTNTRAELQRDMARLRLVKEQIREIEQTRLRRFAQPPADAPHAMLVLLARVIGVGIETADMLVNEVFVRNLRDRRAVARYAGLTGAPDESGARRREKGLARAGSARVPHGSSPWAEGPRGMLQLAWRLLMFQKDSALAQWFQARTADRRSGTRKTMIVALARKLLIALWRLATTGEVPQGVALRAAV

SEQ ID NO: 154491 - protein, 492 aa, unidentified
MTQRVFVGIDLGGKFHEVQVTAAGGERLGKSFRIGRGRAGLVELEQGLQRVAGTEAEPVYTIEATQNYWLELVHPLKRCGAAVYLVSPSKSAAPRTFYRRHTKNDAIDAESMSRLPLVDVDLRPAHVSEPRWDMLRRLVRQSWLVKGQMANRKRRIMTRVLMVYPGYEEVFRDRYCGASLLFCRRYLDPSKARRVGRRRLFTLLCKRAWGKFDQTRADRLWQVIGNAPELAVSYDDLQLLVNQDLELLEAEKRSQQALKERIAELYGELDPETRLMTVPGLGDFLAAAITAFIGEPERFQSANEVVALSGLCPRLKSSAGTDTANQPITQHGDPVLRGCAYLAAEVARHYDPELQAFHRRLTARGKHYKQASCALGAKILRRCFALLREGRAYEVAHREQMTHHQKEEGKTVRESVHEVAERLNDGSGPSSPEFAAYAPARVPASTDRASQPTTGRNALPRNPVQPRSPSAMSSESWENGDQPTPARRTISA

SEQ ID NO: 154492 - protein, 324 aa, unidentified
MLFVGIDISKLTFDAAYILDSRYIHKQFANNPQGFSEFSSWMNKSKKEIYTCLEATGIYSFALAQYLSQQRTNVMVVNPIITHAFFKMELNRNKTDKADAQLIARYCEHVVLIGDYKKKLYQPKGANYEAIQRLVTRCDQLEKSKTQENNRLEASEDKQASRSIKRLQKAIDNEIVKVKKNIADIVNHDPNLCQQVDLLTSISGIGERTAWSILAYIGDINFFSNSKQIASYAGLTPKIKKSGTSIDKTSLSKLGHKRLRKSLYMPALVAIRHNPLLSAVYERLVNNGKPKKVAIVAVMRKLLILSYGVLKSEKPFDINYQIRS

SEQ ID NO: 154493 - protein, 344 aa, unidentified
MRSVTPQTVFVGLDYHAESVQVCVLDANQRQLVNRACPNDWGAVVAAVRKGCGEKVNVQAAIEACCGAADLADELIAQAQWSVNLAHPGYVARIKQSPDKTDFSDARLLADLERVGYLPRVWLAPEEVRELRRLVRYRQSLTKERKNLKLQIGATLREARQQPPADLNAWTKTWLAWLQETAVLSPNARLVTRCRLARLAALAQEIRAVERLLAKQTAHDPLVQKLLTLPGIGLVTAVTIRAEIGRFDRFRTGKQLARFCGLTPRNASSGQRQADAGLIKAGNPQLRTVLVEAAHRLIRYDQRWTKLAGQLRLRGKPMSVVTAAIANRWVRWLFHQMQPGQLAA

SEQ ID NO: 154494 - protein, 453 aa, unidentified
MSYEKKKVSLEVVNPYAAGIDIGSRSHFVAIGQDADEVREFGVYAEDLQELAAWLLENGIKTAAMESTGTYWQNLFSTLQAYGIEVFLVNGKFTKNMRGKKSDVMDCQWIQKLHTMGLLSSSFLPDSTTETIRTYTRHRLSLIQLAADTSKKMQKYLRLMGFRLDVVVNDICGLTGIAIINDICNGNLNPKLLSVHRHYNCRKSIEEIEKALHGNGRKDYMFALIDEFEMYQILKTKIEKCDKEIESLLKEIIEKNENKKYHIAEAKPHKRITKNTNKQLDLNQVAFQYFEGIDLMKIEGVSHATVMTIISEIGLEGFSKFHTSKQFVSWLRLSPNNKISGGKVLSNQIARGSNRLKIALRQAANCIGNLKETHLSDFFRRICIKRGRASAVSATARKLGVIIWTMITKKIQYAPPKEYLMLDQKRKLGLVSRIRKSIAKFDLKPDDLGFATV

SEQ ID NO: 154495 - protein, 355 aa, unidentified
MKQQAIQYVALDVHQATLVVSVRDEQGTIVMRATVATEARAIVGLVRGLGSRVHVVFEEGTQAQWLHDVLKPHVERVIVCNIRGRAETGNKSDRLDADRLSELLRLGSLKAVYHGASSLLTLKELVRSYTNLVEDATRVMQRIKALFRARGIRTPGTSVYRQTKRKEWLARLEERGARMRAAGLLAELDVIEELRPKAKAAMIVEARRQPGWKVLRSVPFLGPIRVAEILAIMATPWRFRTKRQAWPYVGLAVVTRSSADQEFADGKLRRRKRAPLTRGLNRNHNPRLKSVFKGAANAAASQDGPLKDLYDACVAHGVREEMAKLTLARKIVAITLRLWKTGELWDATKLRMQAT

SEQ ID NO: 154496 - protein, 366 aa, unidentified
MKKIGTVQTFSNEILKEQKLTVGLDLGDRWSFYCVLDEAGKILLEQKVATTPEAMKQTFGKIPRSLIALETGTHSPWVSRLLTELGHEVIVAHAQKVELITQSNRKDDRHDARTLARRARIDPELWGPVRHRSAQVQIHLTVIRARAELVSARTALVNAARGLVKSFGPRLPKCGTYQVNQKLAEGVSAELRDVLVPLLREVESRSERIKEYEERMEKIATEVYPEVSLLKQVKGVGTQIALTSILTIEDPYRFEKSREVGCFLGLKPGRRNSGKSQPQKKISKEGDRYLRTMMVQGAHYILGPLGEDSDLRRWGWKLAERGGKNAKKRAVVAVARKLAVLLHRLWVSGEVYEPLRNSQKAMRAAA

SEQ ID NO: 154497 - protein, 423 aa, unidentified
MEHTTIAVDLAKSVFQVAISHHAGRVDEERRLSRDRFLTFFAQQPPATLVFEACGSAHYWGRQLQPFGHTVRLLPAHDVRRYVRRNKTDRTDTKGMLEANRNEEIHPVPVKTIEQQAIASLHRLRSTWLATRTARLNTLRGLLREFGVFIPVGAHHVVPRLHELLGEPTDTVPLAVRGTLAAACAELDGLEANMHDVERQLAALARQLPDVTLLQTIPGVGVLTATALVALVGDIRRFRSGRHFASFLGLTPKEDSSAGRRRLGAISKQGDVSVRMLLTHGARSVVWHAKAAAQATALQRWAVHTERRRGRNVAAVAVANKLARIVWAVWAQQRPFAADHRSGQLRIRLSLTWRTAPSASHHGAPVGPARGHADNSAGREGPCKRLAPRARISMMARSRDGSTDEAEDTTAVRLFGQPSGYGE

SEQ ID NO: 154498 - protein, 508 aa, unidentified
MSLNDKETAVIVPPKDVVRNKLCGKAREKALARAQGRKRKKSAAPENKPGGRVRKSHRGGQAIPTRRSLNQLEQVNRNAAGIDLAATVHYVAVPPGRDAETDVRCFETFTADLEAIADWLTSCGVDTVAMESTGIYWIPLYELLEQRGFEVLLINPADLKKFRRKTDVSDCQWLQTLHTFGLLRGSFRPEEKIVTLRAYLRHRDTLVKCATDEVRRMQKALEQMNVKLTQVISDITGMTGMAIIRAILAGERDPQRLAALRHVGCKNDVKTIALALEGNWRQEHLFALRQALELYEVYLEKLKDVDGQIGAYLQTFEDRSEGQQLQPSRRKRALDPCLNSRDLMCKMTGIDLTEVDGIAGNAAVQIVAEIGMDMSKWDTDKHFVSWLCLCPELHLSGGRRKSTKSHTQPSKNRAAAIFRMCAQSLLNANCALGAFGRRMRAKKGGAHAVTAMARKLAIIVYHMLKERRPYKDQGATYYEDKYRERVVANLRRRAKELGLELVPLALSE

SEQ ID NO: 154499 - protein, 408 aa, unidentified
MELLHPKCAGLDVHKDIVVACVRIQQGPQAAFHVETFGTTTLALLQLSDWLSEYEVTHVAMEATGVYWKPIWHVLDGTFELVLANAMHIKNVPGRKTDVNDATWISDILAHGLIRSSFVPPTAIQDMRTMMRTRKQLVRERAQHVQRIQKTLEDANLKIASVVSDITGVSGRAILQALIDGKTNPDELLAVTKGRLHAQRSTLIEALRGRIRPPHRFLLKLHLGQINTLEHSISDIDKEVGALLEPFRAKVQRLITIPGISDVAAQVIISEIGVDMSRFATAGHLISWAGLCPRNDESAGKRRSTRLRHGAPWLKTTLVQAAWAAARSKGGYLPALFLRIKSRRGPKKAIMAVTASMLTAAYYILRDDVDYRDLGGDYFARTDRKKTAARLVKRLSDLGFAVEIKEAA

SEQ ID NO: 154500 - protein, 340 aa, unidentified
MEVATIGLDIAKNVFQVHGIDGEGRAVLRRKVRRDRLLALFANLKPCLVGMEACATAHHWARELAALGHEVRLMPPAYVKAYVKRNKNDAADAEAICEAVTRPTMRFVPVKSANAQSVLLLHRARHLLVRQRTAQVSAMRAHLAEYGIVVAKGRSHTRDLVGILDRGEGMLPDLARQTLLLIAHMIAGLSEQIRKIEIQLMAWHRASPACQRLETIPGVGFITATALVASVGDARAFRSGRHFAAWLGIVPKQNSSGGKERLGGISKMGDRYLRHLLVVGATAIVRYSRRKATTVSVWANQLLERKPARLVTVAVANKMARIAWAVMAREENYRATPAVA

SEQ ID NO: 154501 - protein, 330 aa, unidentified
MTHYIGIDVSKAKLDLAWIRDIEKGRCKTKVFKNNPSDYPAIVTWLKSNVTDDLSDVHVTVEATGVYHENVAYYLYDQGLNVSIVNPAFVKSYGDSLGSRHKTDKQDSILLARFTHSTKPDLWTPPPAEARHLKSLLSRLDALQEDLQREENRQEKADATDTAAIVKASIEQMIVALKEAIAKINDDIDHHITSHPNLKQDQDLLKTIKGVGTVTSRQMLSLMHNKSFTKASQAAAFLGLIPKQVQSGTFKGRTRLAKNGSSHIRAKLYMAAVVSTKWNPDIKAQYERLLKNGKCKMQAICAAMRKLVHICFGVLKHQMPYQPQPVNIAA

SEQ ID NO: 154502 - protein, 389 aa, unidentified
MLCIGIDVAKRKHDCCIIDSDALKTVESFTFPNSREGFDMLLSKISELGIPKDKIRVGLEATGHYSSNLAHFISEHDLPLLTFNPLLTNRYKQGFSLRKTKTDKVDACAIAQMIVSGKGSQTYSSSLYHNEEMKSLSRYRSQTMQKCSKLKISVSRLVTILFPELEGLTSSIHLASIYALLKAYPGHEQIAHCSMKRLTRLLSDASQGRFDKSKALEIHQAACRSIGKVSLSASMELVHTITDIEVLKQHIVEIDEKLKEMVDQEESSIIDIPGIGYTLCASILGEVGDFKRFPDVDKLLAYAGMSPSKHDSGDYHSKHNKMEKRGSPYLRKTLYLAARLVAQNVPKFKEYLEKKLSEHKPYKIALSHVAKKLIRLIYRLGISGCPYLA

SEQ ID NO: 154503 - protein, 338 aa, unidentified
MPLYGGIDLHANNSVVVLLNEQDHVVYYQRLNNHLPTILEQLTPYRDALEGVVVESTYNWYWLVDGLMEADYRVHLANPSAIQQYSGLKYTNDQSDARWLAHLLRLGLLPEGHIYPKAERALRDILRKRSHLVRQQTANILSVQNILMRNTGVRFTAQRIRALSPPDLMRLLPEPAQVLAVRSGLAVLHTLGEQITTLEKTVSTSLQHTPAYEQLLTVDGIGTILAQTIVLETGDIGRFATVGHYASYCRCVPSTKVSNGKRKGQGNVKNGNKYLRWAYMEAAQFAMRYNPQVQQFYQRKQAKTQGVLARSAVAHKLARACFYIMRDLVPFEITKAFG

SEQ ID NO: 154504 - protein, 342 aa, unidentified
MTAIKYFVDVDIASATFTACVGTTPWKVILKPDTFENTGNGYQTFLAWLAKQQIGAKESVVCMEATGVYSEGLAYFLFATGYAVAVQSPLEVKRTFKPYGPKTDAVDSLQIAEYACRHIDKLSFWQPRNEILEQVKALLATREQFVSQNVAHKNALQAMQRKPVRTLFAEQAHAQMIEQFKKHIQAIDQEIRRLIESDPTFREMLLLLLSVPGVGLLLASHMILLTQNSLDHKELASYLGIAPNEHSSGSSVFKHATSRHFGPAAVRKLLYLASCSVRTHQAQFTSYFARKTREGKPAKLVLNNIANKLIKIICVVLTTKKAFIKNYHSVQPLVFQNTLTGS

SEQ ID NO: 154505 - protein, 422 aa, unidentified
MLHDSEDIEEIIERVAALDIGKAEVVACIRVPNPDRPGRRAQEITTYSTMTRSLLGLAERLLELGVTRVVMEATSDYWKPVFYILEAQGLDPWLVNAKDVKHLPGRPKTDKLDAVWLAKVAERQMLRPSFVPPAEIRLLRDLTRYRVDVVKTRTAEKQRVEKLLEDAQIKLSVVASDIFGVSGREMMAALISGERDPRALAQLARTAMRAKIPILEEAFVGHFTRHHAFLLATMLNRIDQGSADIAAVETQIEDLIAPFAATVERLDEITGVGFTAAHVMIAEIGLDMSRFPTAAHLCSWARFAPGVKESAGKSKGRGATGHGNPYLARVLGEAAVAASRTDTFLGERYRRIARRRGKKKAIVAVGRSVLVIVWHLLADPEARFHDLGSDFYDNRTGPERQRRNHVRQLEALGYKVTLEPAA

SEQ ID NO: 154506 - protein, 313 aa, unidentified
MSDGGMVIGIDVAKAWLDVAVLDTGEVFRVDNDEAGWAELIERLKGEKVKAIGLEPSGGYERRAARALRKAGLPVRMVNAYRARQYARALGRLAKNDKIDACMIARFTAQLPTREVRHDPLIEQMAELVVARRQLTQDKVRLGNQLEQVRDPILRRMTGQRIKRIEAEILMIGKRLAQIVAGDANLAARDRLIQSFRGAGPVLSHTLLALVPELDDADRREIAALIGVAPFDDDSGKRAGKRAIWGGRAEVRHVVYMAAMAAARSNPALKTFRQRLIASGKTPKVAIIAVARRMLGILIAMLRKGEEWSPAYA

SEQ ID NO: 154507 - protein, 401 aa, unidentified
MAELWAGIDAGKTHHHCVLIDQEGARLLSRRLANTEEEILTLIADVLDLAAGREVHWATDLNQGGAALLISALLAHTQTVFYIPGRVVHHAARTYSGEGKTDAKDAAIIADQARMRHGLQQVRAMDETIVELRLLTARRTDLVHDRTRSFNRLRATLLEYFPALEAAFDFSQRKGAVILLTKYQTAERIRRAGRARIEAWLRKQGCSRPDKIAEAAVAAAEQQSTTVVGHTAAAALVARIAGDVLSQIEQITEVETEIKTRLQGHAHFEILTSVPGFGPQLAAEFIAAIGGSMDRFASADHLAGIAGVAPVPRDSGKVSGNLRRPKRYDRRLLRVCFLAAQSAARYCPESRTYYERKRAEGKNHKQAVLALARRRINVIWALLRDGTTFHHRKPEAVPLAA

SEQ ID NO: 154508 - protein, 347 aa, unidentified
MRNYVGLDVSLKSTAICILDEKGKRIQEGEVESTPEAIHEFLLKAGLEVEQIGLESGNLTHYLKKGLLKMKYRVAVMESRKMAAILATIINKTDKNDARGIAEALRVGHFQECVHRSDAAVEVRSLLHLRQTAVEERTHVINSLRGHLKVYGIKFGKKAGKTFKEKVEAAINDLRPRIQRAIQSLLNILDVLDREIKALTREVEALAAADEDVKLLQTVDGVGPITALAFKAEIDNPERFKNSKDAAAYVGLTPSQYSSGETHRQGGISKKGSKRTRYLLVEAASALLTRCKIWSKLKAWGMKLQKKKGNRKAIVAIARKLAVIMHKMLITKKPFERSPGKKEKLAA

SEQ ID NO: 154509 - protein, 339 aa, unidentified
MFMIGIDPHKGSHTAAAVDRNETVIDTLRVDADRHQRKRLLAWAARFEPRTWAVEGATGMGALLAQQLVAAGEHVVDVPPKLSSRVRLLERGRIDKTDPNDARSAAIVGWRTPALNVVGGLDEHRVVLRLLADRDHQVTAQRTRSICRLHALLCLLIEGGTGRALTAMKANELLATVHIDGPVTLERVAAARQLLDEIQTFDTARVEVRKRTKDIVGALAMTVTEIHGIGPLTAAIIIGRVGDVSRFPTAGHFARHNGTAPIEASSGPTKRHRLNPRGDRQLNHAIHMAAVTQVGHDTPGRVYYLRKQAEGKTRKEAMRALKRHISDAVYQRLVADTRN

SEQ ID NO: 154510 - protein, 350 aa, unidentified
MIIGVDYHPSFQTIAFLIEETGECGEQELNHSDGEAERFYRDLQKRGIRVRVGMEATGYSRWFERLLAELGFEVWMGDPAEIKAKRVKKRKTDREDARLLLRLMRENNFPQIWVPGPENRDLRQLLWHRHRLVQMRTRVINQLQALAMNEGYRWKKKLFSEQGRALLEKLSLAPWASRRRQELLELLDRMNPTIEELTTAAEQEVKKRPEALRLMTHPGVGPLTALAYVLIIGTPERFHCGKQIGTYVGMIPCEDSSARKQRLGHISKQGNSLLRFLLVEAAQAAARCNPQWRRRYIHLAMRRHKSIAKVAMGRKLGVRLYWMWRNGCEYSPSFDFGSYAGQLGTGHGVN

SEQ ID NO: 154511 - protein, 412 aa, unidentified
MKLMYKRCCGLDVHKKTVVACVQIREEDTVHKEIQTFPTMTSDLLILHDWLVAHGVTHVAMESTGVYWKPIYNLLEASFEILLVNAAHVKAVPGRKTDVKDCEWLADLLAHGLLKASFIPPEPIRDLRDLTRYRKSLIDERVRQINRLQKFLESANIKLSSVATDVMGVSGRAMLEALVTGRNTSPEVLAELAKGRLRKKLPDLRKALEGRFRPHHRFMVAEILVHLDFLDEAIERVSQEVMTCVVPFSRVMEALDQIPGIDRRVAEGVVSEIGTDMDWFPSDRHISSWAGVSPGNHESAGKRKSGRVCKGNTWLRRHLIEAAWAAVRKKGSYLSALYHRLVTRRGKKKAIVAVAHSILVIIYHVLKDQVPYHELGPDYFDKLNTAHIKRHYVRRLESLGFKVILEPLSQAA

SEQ ID NO: 154512 - protein, 347 aa, unidentified
MRNYVGLDVSLKTTSICVLDEKGKRLIEGEVDSTPEAVNDFLQKTGLEIEQIGLESGNLTHYLKKGLLKMKYRVVVMESRKMAAILATIINKTDKNDARGIAEALRVGHFQECVHRSDEAVEIRTLLHMRQTAIEEKTHIINSLRGHLKVYGIKFSKKAGKGFRGMVEKAIVNLTPRVQRAVLSLLNIFDTLNKEIQALSKEVEGVASANEDVQLLQTIDGVGPITALAFKAEVDDPKRFVDSKDVAAYIGLTPSQYSSGEVHRQGGISKKGSKRTRYLLVEAASALLTRCKTWSKLKAWGMKLQKKKGTRKATVAIARKLAVIMHKMLVTRKPFERSSAKKETVAA

SEQ ID NO: 154513 - protein, 369 aa, unidentified
MTDLTLFVGLDVHKKTISVAMVEATAGAEVRFYGTIANTPDAIRGLCKKLTKDGQQLHFCYEAGPCGYGVQRQLSRLGHRCDVVAPALIPRKVGDKVKTDRRDAMMLAQTLRAGQLTAVWVPDEAHEAMRDLVRLRAQATRDLRKTRQQLLSFLLRHSLVSPYGHWTKMHRRWLGELIFAHPAQHLAHEEMLQRIERAEALCDRLKRAILELVPQWSLAPVVQAIQALRGVSLIVASVIVAEVGCFSRFDSPRQLMAYLGLNPSEHSSGAMIRRGAITKTGNALARTCLVEAAWTYRFPARVTQIIRDRLNGLPEPIRNVAWKAQVRLSARYRKLIAAGKPAPKVVVAIARELVGFIWAIARMVEPKFA

SEQ ID NO: 154514 - protein, 285 aa, unidentified
MTSVATIGLDIAKSVFQVHGVDTAGQVVIRQRLARRRVLVFFEKLAPCLVGIEACSSSHYWARELIARGHEVRLMPAQYVKPYVKRGKNDAADAEAICEAVMRPTMRFVPVKTPEQQSVMMLHRVRLMLNRQRTQLSNAIRAHLSEFGIVAPIGRRGLDQLLAIIADAEDTRVPADARLCLRMLAAQLAVVKEQILENDRRVRANARATELGRRLMEVPGVGPLLASALTATISDPAAFKTGRDLPPGLAWSPNRTPAGEKNGLAVSQRLETAISGRCLWWGPWR

SEQ ID NO: 154515 - protein, 345 aa, unidentified
MFYVGVDLHKNFTQVYGFNDATGEVVERRVSNDKSSIREVMSQFGDNAKVVLEATRNWYWFVDLLQEMGIDVVLSNPLQTKAIAYAKVKTDKVDARMLSHLLRADLIPFAWIPSMEEREIREMLRTRLTLVRIRARFKNLVRSILAKLNIVLSHGDIWRGKRRKELEQLNLPSPYTEILPHYLSLIDNLDKYIEEWNRKIERIAKETPEVFLLKSVPGIGTISALTILYETGPIDRFPSAKRYSSYAGLVPRVKGSGGKFKTGHLSRQANMYLKWIYVEIATGIVRIGKGYLYEYYKKQMYKKGKNVAKIALARKISRMVYHLLKQHITYDTFVERNVNKMRRTG

SEQ ID NO: 154516 - protein, 346 aa, unidentified
MKINRVGVDLAKNVFQLHGADHKGKMVWKRRLSRGKWLAVLCNTVEPGTEIGMEACAGAHHWARQLMQRGYPVKIIPPQFVKPFIKSNKNDANDAEAICESMGRPNMYPVKVKTVAQQDLQAMHRIRDEIKSHRIAKANQIRGLVTEYGLVAPQQLHALRRAIPDWLEDAENGLSFLFRQLLQGLWGDLYALDQRMTELDKQIAVIAQEDPTARRLQQLRGVGPLIATALVATIGDARQYRKGRDMAAALGLTPRQHSSGGKERLLGISKRGDAYLRCLLVHGARSAVRTAKDKDDRLSRWIIDLQSRRHSNVVAVAMANKMARMAWVMMTKGVDYDPDLAAASVS

SEQ ID NO: 154517 - protein, 369 aa, unidentified
MGEYSEAFVAFDVAKMKHAVAIAEGGRTGEVRFLGEIENTPARIERIIKKLASRYDRLQVCYEAGPTGYGLYRQIAALGHACLVVAPALIPKRPGERVKTNRRDAVTLARLHRAGELTGVWVPDATHEAVRDLARAREAAAGDRRRKRQQLLSFLLRYGRIYSGGGHWTLVHRRWLAKQAFEHPAQQIVFQEAVDAIADADQRLRRLEQQLALIVPSWSMAPVVEAYQAMRGASSLVAVTFAAEIGDVRRFDTPRQLMSFLGLVPAESSTGDRVRRQGLTLAGNRRARRVLVEAAWTYRYPARVSETLRARLDGLPKAVRDIAWKAQVRLCARYRRLSATGKKLPVVVAAIAREMAAFLWAIGREVAPV

SEQ ID NO: 154518 - protein, 391 aa, unidentified
MICVGIDVAKDKHDCFILSSEGEVLADVFTIPNNAEGFEALLQAIRSCAKPSEKMKVGLEATGHYSYNLLGFLLDCGLPTYVINPLHTNLYRKSLSLRKTKTDRVDARTIAAMLMSDVDLKSYTDTSYHNQELKSLTRYRFDKVKERAKLKQSVSRLVTILFPELEKIVPTLHMASVYALLSELPSAQQIAGVHLTHLSSLLSEASKGRYGKDKAIEIRNAARKSIGSRMPAKSLELQHTIRLIRELDAEINEIEAEIDAMMTKIQSPITSIPGIGLRMGAMILAEVGDFSNFDSPDKILAYAGLSPSTYQSGQLTNAYSHMEKRGSKYLRYALFNATKYVCLWDPSFAAYLSKKRAEGKHYYVAISHAAKKLVRLIYALEKSGKPYRQLA

SEQ ID NO: 154519 - protein, 317 aa, unidentified
MTYDELLLFVVKQQKLTGNVVTCYEAGAFGFHLHRRLEELGIKNYVVQPQDWDERGKGVKNDRLDAAALCQRLDRYERGNKKAFSTVRIPTVDEERERAITRQRQQLVRERQRLAAMGRSLLATHNIHVTGKWWKGKAWTALKILAPAWVIERLEVFIVILGPLEVEEAKLTNAIQEAAQEQKIPRGVGPLTFEILRREVGDWNRFNNRRQVSSYTGLCPREHSSGGKRRAGSVSKSGNPRVRAMLVEMVWRMIRWQPGYTALLKWAPVLNSPTPNPAARKKAVVAIARQLAVDLWRVFTGQVEAEKFGLVYLPEAA

SEQ ID NO: 154520 - protein, 375 aa, unidentified
MKEKVRFLGLDVHAETIAVAIAEPDGEVRSLGTIANRAESIRKLVKKLGPVEKLKACYEAGPTGYVLYWQLAELGVRCEVIAPTLVPMKAGDRVKTDRRDAERLARSYRSGDLTPVWVPNEGSEALRDLVRAREAAKQDQLRARHRLSKFLLRTGQRPAAGVKAWTQAYGNWVKQIHFTQAARESTLLDYLHEVEHMAERVKRLEQAIAEAVQVASPQMQEVVRGLQALRGIAQISAVTLVAELGELSRFASARQLMGYSGAVPSEDSSGQRTRRGGITKTGNAHLRRIAIEAAWSYRLRPGVGPALRKRQEGVSEEIKEIAWKAQHRLHKRYTRLSAAGKDQRKIITAVGRELLGFIWAIGIKAEASSKLPIAA

SEQ ID NO: 154521 - protein, 445 aa, unidentified
MPNVQSTQSPVVLVAIDIAKLRHDVLIEAPGWKRRKRLVLLNTAVEFRRLADYLHSFQMPVHIVFEATGNYHRPLAHFLLSQGFHLELIPSLAVARTREAMHNSWDKNDPKDAQVLLHLLRTGVTQRYHDPLVNHTHDFQELSLTYAQVSMEKTRMQHRLLTHYLPLYFPEIERHYHASRSLWLLDFLQAFPTPATITSLDREQFIAKAWPIIGRKVAKRRLLEDIFHRAQCSIGLPVGEESEAIAMFRVLLKEMSRLCKLRQELEQRAESYLGDNDDFRRLKQIPGIGPILALTILAEAGDLRRFGHHRQFLKFCGLDLATQQSGQFRGATKLSKYGNARLRCALWMAATIAVKQRENSFREKFERYIRKDPLSADRKRMAYVAVAGKMARVVYGIIKSGTEYRCFHEVRDRAASDLVSLWSIAPPLHVEATWDYSHFHPRAGC

SEQ ID NO: 154522 - protein, 341 aa, unidentified
MKVTTIGLDIAKSVFQVHGEDCNGKVVVQKRLRRSQVVAWFSQLPRSLIGIEACGTAHYWARTLRELGHEVRLIPAAYVKPFVRRNKNDARDAAAICAALNRPDMRFVAIKSVEQQASRGLERSRDLLVKQRTQLMNCTRSLLAELGIIAAQGRRGFAELVARVNDGDAAIPPVLLTALLPLIRQIEGLHTTIAALEDRIIAAARENPVMRRLAGIPGIGGLTAHAIVTAVGDGRQFGSARDFAAWCGLTPQEHASAAKRHDKGISRQGDIRLRKLLALGASTVMRNARSRTDRATAWQRGILARRPVKVAVLAQAAKNARIAWALLVSGETYRTATPTAA

SEQ ID NO: 154523 - protein, 348 aa, unidentified
MTVYIGVDFHARQQTISYLTTEDGAIQHLTLLHESSEPVRAFYEQFAGQRVVVGFESSGYAAWFEELLEELGCEIWLGHATYIRQYAKRRQKNDRRDAALILELLLAGDFPRIHRYSRGTRQVLQQLRYRQRLVKLRTMVVNMLLFMASSRGVTFRTQLQSKRGQARLAQLPLPQPLAQQRDELLQLLQEFDQKLATVEKELEQVAAQDVAVQRLRTHPGIGLLTSICVRYTLESVERFATTRKVSAFAGFDPMEDRSDERRHMGAISKQGSRWLRFFLVEAGQVAMRKDTDLARVYQRICRRGGHAKAKVAVGRRLLVRAFIMLRDEIDYAEFQRRGVAARSSRGTA

SEQ ID NO: 154524 - protein, 358 aa, unidentified
MKTKKKRLNYQGETIYVGIDIPKRSWNVSIVLSGIKLSTFSMVPNVKALFSYLVSHYPNGIYKVVYEAGFSGYWLSRELQSLGIETLIVNPADIPTSNKERDRKSDKVDSGKLARELSKDDIEGIYIPNKSEEALRVLTRIRNSFTKDQTRLKNRIKSLLYFVGMELPENYEMQHWSKRFIEHITAINFTEEGLKVTMDELLCNLEQIRLQLTRIIKELRNIVNGDSFMKTTICYLQSIPGIGFITAVTLYSEIIDINRFSKLEKLCSYVGIVPSCHSSGEKDITPRMSKRQNSFLRNIIIEASWVAIRKDTALTLAFAKLSQRMKKQEAIIRIAKKLVSRIMYVWKNQTEYVYSVSD

SEQ ID NO: 154525 - protein, 360 aa, unidentified
MLKKQSMRIARQVKQNVLKFRTGDVLFVGIDVHKRKYHVALWKNGAPASHWVMPANNEAVVKRLQPVRRGIQRIVYEAGPTGYGLARTLEAAGFPVGVAAPGKTPAPANEGNKSDRIDCRKLAEFAAKGLLTFVAAPTPAEEHERQVLRLRESMIDKRRRVKQQIRSFFLQHELQEPKGMNYWAARAVATLNALELPADLRFCLDELLQELEHSTDALKRFDRKLAVIGARHEKRMQLLRTHPGVGEKTAMQFLLEVYRCERFADRQGLASYLGLAPRVRQSGATRREGGVVPAGRGRLRAHLVQACWQWIRRDAVGKKLYGRLCRNTGCAQKAILALARRMAVDLWAMARDGRPYCAAT

SEQ ID NO: 154526 - protein, 340 aa, unidentified
MQVTTIGVDLAKNVFQVHGIAENDVVLFNKPLRRAQFLPFFAKLDPCLIGMESCSSAHHWARELTALGHEVRLIPPMYVKPYVKRGKSDAIDAEAICEAVTRPTMRFVAIKTVEQQALLSLHRARDLLVRQRTQLINGLRGLVAEFGIYIPRGLARVIGFAEDITLGEVLDLPDIANEVIRNLSEQLMALHKRIRWYEERLKQVAKEDARVRLLRTIPGVGAVTASAIIASIGDGHQFRNGREFAAWLGLTPANKSSGGKEKLGRITKMGDQYLRSLLVVGMTSLVRQTRSHPERASKWLTSLFECKPACVATVAMANKTARIVWAVLTRDEPYSPRAAV

SEQ ID NO: 154527 - protein, 321 aa, unidentified
MKKRYTKHSAVTSYVGIDISKNRLDVHIHPDELSEYFSNDMKGFKALEKWLGSVPIALIIFESTGRYHHDLHIFLAGIGYSVCVVNPYRSRRFAQALGYLAKTDKADAKMLAQYGAMTKPEPTPLCDKYIKTLRELIVARRALLKRITQITNHIQGCHSPLLKRQSQQAVKQCKRHLVQIDLEMEKLTSAKPILKQRFDILTSIPAIGPATAFTLIAEMPELGNMTAKQASSLIGLAPVAQDSGMYRGRRKIKAGRRGPRMALYMAAVASLRFNQDMAKFYTRLKENGKPSKVALIAVMRKMIVLANTLLGQQRKWATSSP

SEQ ID NO: 154528 - protein, 342 aa, unidentified
MTLYIGVDIHARQQTLSYLETADGTTGQVVLDHEVDDVAGFYRQFQGEVIIGIEACGYTNWFEELVERLGHQLLVGDAAEIRRLARRRQKNDRRDADLLLDLLVHDEFPALYRYCQESREVLRQLRYRHKLVKLRTMVANTLHALALNAGLSLRAKLLTKGGRQQLSALPLSAISQQQRNELLSLADELTRRIQLVEQWLAVQAARDGRVQRLQTHPGVGLLTSLCVVHTLGEVQRFSSTRKVAAYVGFDPMEDSSAERKAYGGISKAGSRLLRYLLIEAGQTAAKDDEQLKQFYRRLLPRRGKARAKVAVGRKLLLRCFIMWRAEIDYAEFLRRGQKAETE

SEQ ID NO: 154529 - protein, 359 aa, unidentified
MQQATGSAVERTVGLDIGDRTSRYCILSQDGTLLEEGQVATTEAALRRHFSPMDRARVALEVGTHSPWVSRLVADCGHEVIVANPRQLRLIYENQRKSDRTDAEYLARLARVDPKLLAPITHRGEQAQADLALLRSRDMLVRARADLVNHVRGAVKSVGCRIPKCSTPAFARRAKAHVPELLEATLRPVLSTITQLSEQIHQMDRQIEEVAQSSYPETEVLRQVPGVGGLTALCYVLTLEDPARFPTSRSVGAYVGLVPKRSSSGQRDPELGITRAGDEMLRRLLVQAAHYTLGPFGPDTDLRRFGEKLAARGGKNAKKRAIVAVARKLAVLLHSLWSTGEVYEPLRHHPQAAQEQEAA

SEQ ID NO: 154530 - protein, 318 aa, unidentified
MSEQTCWIGIDISKAELDVAVRPGGVRWQAHHDAAGIDALVERCVALAPQRIVFEATGGFEIGVAAALAAQHLPVVVVNPRQVRDFARATGQLAKTDRLDAAILAHFGEAIQPDVRPLPDATARALSLLVARRRQLQEMLIAEQHRLLSAAVQDAPVPLRDELGDHIAWLRRRLDQMNDDLNQQIRSSPVWREREDLLRTIGGIGPIVSATLLSHLPELGQLDRKAIAKLVGVAPLNRDSGSVKGVRHIWGGRAQVRTVLYMAALVATRHNPQIRTFYQRLLAAGKPAKVALVACMRKLLLICNAVLRSHTSWSPASP

SEQ ID NO: 154531 - protein, 427 aa, unidentified
MSYRIAGIDVHKKMLAVVVADVEIEGEYQFEQRWFGTSPDHLRLLAEWLIEQKVEETVMESTAQYWKPPWQALERYWKPACQKREGAGPMSGALHLAQAFSNRGRQGRKKDFRDAKRLVKRLVAQELTLSFVPDAEQRLWRTVTRKKYQLTRDHTRLQNRLESLLEETHIKLSSLVSDLLGASARRMLKALSEGETKPAALAALADKKLRATQAQLCDALGACTDLNAVYRRLLKMALEELQLLEQQIVQLDQEMASLLRPHHDAVQRLAEVPGLGVDSAQQIIAEVGAQAATFPSEKHLSSWVGACPGDQESAGVNYSHRSPKGNRHMRRILNQCANAAVKHKGSIFETMYRRLVSRLGHNQTIGAIAHRHCRLIWLILHKGVRYEERGPAVSERSRKRRTTKMIRELRLLGYRVVPGTSQPANPA

SEQ ID NO: 154532 - protein, 377 aa, unidentified
MLYIGIDQHAKQLTIDLGDESGEMIVHRKVSTKPKLLRQFLEELRTRAGSESYLAIVEVTGFNDYLLELLPQYGCRHVVVVQPVEHKRRKTDRRDARQLRDLLWANRHRVLNEQRLPGVRVVTPATAEQSDQRQLTSLMRLLRKQRTQVINRMHTILKKHNIQHDMPAKGLDAVSSQRWLLTLTLGPIDGLERDVLQSQLRQLDGEIRKINAQLRVSFMQSLPARIVASTPGISVYGGLAISSRLGDITRFANGDSMANFVGLTPSCRNSDAAIRHGSVTKLGSSFVRFFLGQGLIHLLRKDRWLRRWYQRIKKRRGGNVARVAVMRRLVTMLYAMLRDQMPYVPGGPQRYQQLLAMREDQQLSYDQVESLAFSPQV

SEQ ID NO: 154533 - protein, 394 aa, unidentified
MKLIGIDIGKNKHFFCIMDQQTGEIISQPISFSNDKEGFDFLVQKIKSYPKDSILIGMEDTGHYHFALLKYLLDLQYTVALINPKTTDFNRKMQGGITKNDKLDTINICDVLDTPERKKQYRITKVNSFDLYEQKQLTRHHHNLKEEENVYKNRLQKCIDIVFPEFNKLFNSKYGTVYMNILKMFGSAENIANTDIRTIRKCFEIEGRGNRISLTPERLKECARSSIGISSSAEVIQIKHLTAQIELIEEQLTEIDKKIEEFSIQNNSPILSIPGISHFSGTSILAELGDISNYSKPSQIIKFAGVAPLHYESSQFNAQHTAITKKGSKYLRKTLYQIILPVIRHNPVFNKYYQLKISQGKGHRCAQGHCVRKLLRIIYHLLKTNQQFDPQLLR

SEQ ID NO: 154534 - protein, 477 aa, unidentified
MQMTLGIDVADESGRFAWSGRRFRTTVADLNRLWGQIPQPVALTVVMEPTRNAWVPLAAWFRRRGATVVMVPPEQSADLRDYYSKHAKSDRLDSRMLARLPLLHPEGLQAAEGLGPADALRRASRLRSSLVKRRNVILARLDSYLELLGPSWHAAFGGDLANITPLRFLAAGYADPHAVRRLGLARLTRFIWRYSHGAFGEHYAAGILAAAAETLQLWDGELSYPDLAEDIATEARLALALTAEIRDLERKLASLLHQLDPAGILTSVPGVAQILARLGDPARFRSLAGARSFSGLVPSLTASDASGRHGPPTKSGDAALREALFMAANQARRIDPVLAARYHRLMVSCGKHHNSALCHISTAVLTRIIACWRAGTPYQIRDLDGTPLTTAQGRAIITQRYRVSTNCAHYAAPATARQGRAGDIRSRQALRHRPAPTPRYDQTPPNCLTPLKNSTVHPSDGAHRPGRHRDRPACLAR

SEQ ID NO: 154535 - protein, 412 aa, unidentified
MTITCGIDWAEDHHDVALVDEVGKLVAKRRITDDLEGFRQLLAMLAEAGDSAEAPIPVAVETARGLMFACLRATGRRVYSINPMAVARYRERHRSARAKSDHADAMTLANILRTDAEVHRPLPADSELVQAIAVLARAQQDAVWNRAQLINQLRSHLKQYYPAALVAFAVRGVGLDAREARTVLAVAPEPAAAARLTRAQLRAALRRSGRQRNIEVWVERLRTVFTGDYLHQPPLVEQAMGRQTLALVAQLDAACRAADDLAEAAAEAFAEHPDAEILGSFPGIGPLTGARVLAEIGDDRTRFADARALKAYAGSAPVTIASGKSHIVRHRRVKNQRLAAAGYVWIFGALPSPRVKAEYDRRRGLGDRHTAAMRNVFNRLLGCLFHCLQTGQRFDPDKAFPGTTPAPVALAA

SEQ ID NO: 154536 - protein, 348 aa, unidentified
MTIVERARAVVGGVDTHADVHVAAAVDELGGVLGIEAFDTTEAGYRAVACWLRSFGPVRLVGVEGTGSYGAGLARHLSRAGIDLVEVDRPNRQTRHREGKSDPIDAVAAARAALSGLALGRPKSRDGDVEAIRVLTVVRRSATSERIVTLNQLRHLCFTADPHIRRRFEGLSVALLTKTAAALKPRPGDDAVRYSTLFAIRALARRVVYLRDETAELTTMLKPLIDGCAPSLMTVYGIGYDVAAKLLIAAGDNPDRLTSERAFAHMCGVAPLPASSGKTQRHRLNRGGNRQANNALYRIVITRMSSDERTRDYVARRRAEGKSIGEIARILKRYVAREVFPHLRTAII

SEQ ID NO: 154537 - protein, 334 aa, unidentified
MENIALIGIDLGKNSFHIHCQDRRGKAVYRKKFTRPKLIEFLATCPATTIAMEACGGSHFMARKLEELGHSPKLISPQFVRPFVKSNKNDFVDAEAICEAASRPSMRFVQPRTESQQAMRVLHRVRESLVQDKVKTTNQMHAFLLEFGISVPRGAAVISRLSTILEDNSLPLYLSQLLLKLQQHYHYLVEQIKDLESQLKRKLDEDEVGQRLLSIPCVGILTASTISTEIGDGKQYASSRDFAAATGLVPRQYSTGGRTTLLGISKRGNKKIRTLLVQCARVFIQKLEHQSGKLADWVRDLLCRKSNFVVTCALANKLARIAWALTARQQTYVA

SEQ ID NO: 154538 - protein, 361 aa, unidentified
MNPSMPEQPRLVTGGVDTHADFHVAAVVDEVGRVLGTEKFPASINGYKALLSWVTSHGQLTKVGIEGTGSYGAGLARYMATAGTEVVEVIRPNRQARRRRGKSDVTDAVAAALAALNGEASGTPKSHDGAVEAIRALRVARSGAIKARTQAANQLRDLVLTAPEALRQDFAGLPTESRVAKAARLRPGPLLGPLEGAKAALASVARRYQELSAEIDRLDAALDELVDRTAPEDFLAKLGVGTRVTAALLVTVGDNPGRLKSDRSFAALCGASPVDASSGKQVRHRLNRGGDRQANSALWRIVMTRLAHKDSRTQAYVERRTKEGKTTKEIMRCLKRYVAREVYKSLVAPALGQERATLVAA

SEQ ID NO: 154539 - protein, 352 aa, unidentified
MKQQERKITIGLDLGDRRHRFCALAGSGEVMEEGTVGNDRVGLSELSDRYPGALVVIEAGCHSPWVSRHLEQAGCEVIVSNPRKTRAIYQHERKSDRRDALMLARIARMEPALLYPVQHGSEQAQQDLLRIKLRDSLVRARVGLINSLRFTLKSLGYRTANPSTERFHKVVKSGLPPYVVQVIAPSVQALEELSVRIKLLEQEISTLARSKYPDTAWLEQIPGVGSITALYFVLKIEEPTRFERTRDVGAFIGLCPRRDQSGESDPQLRISKRGDAYLRRLLVSSAQYIMGPFAPPTALRQYGLNLATGGSPRDKKRAVIAVARKLAVLMLTLWKNRSSYEAFPQARQKNED

SEQ ID NO: 154540 - protein, 457 aa, unidentified
MVAEGFHGNRGLVLRARASDFVLLPALPVANAFFADVDVGRVVVEVVHARCAGMDISKTDAKVCVRIAGAGRRKTAETVTTWGAMTGQILTLRDHLAAEKVTCVVMEATGDYWKPFYYLLEDLPGVQVLLVNARHVKNLPGRKTDVADATWLAQLGAHGLVAGSFVPPAPIRALRDLTRTRTAVTRERGREAQRLEKLLEDAGIKLSSVASDILGVSGRAMLEALIAGQRDPDVLAGLARRRLRARIPELAQALEGRFSEHHGFLARVHLDLIDQHTAAIGELTRRIEQVIEPFRGFRDLICSIPGIATVTADVIVAEIGDDMSRFPTAGHLASWAGTVPGSNESAGKVKSSTTRPGNPYLQGVLGTAAMSCAQHPGTYLNAKYRRIATRRGPQKANVAIQHAILVAIWNMGTSGTFYEDPGGDYFTRLNPERARTRAIRQLESLGYAVTLAGTSAS

SEQ ID NO: 154541 - protein, 398 aa, unidentified
MTESSDYESVQVFIGVDVGKDTHHAVAINRSGKRLFDKALPNDENKLRSLISDLKQHGQILLVVDQPATIGALPVAVARSEGVLVGYLPGLAMRRIADLHAGEAKTDARDAAIIAEAARTLPHALRTLKLADEQIAELSMLCGFDDDLAAQTTQASNRIRGLLPQIHPALERVLGPRLEHPAVLDLLQRYPSPEKLASLGEKKLAAQLCKLAPRLGKRLAADIAQALAEQTVVVPGTNAAAVVLPRLALQLITLRKQRDEAALEVEQRVLAHPLYPVLTSMPGVGVRTAARLLTEVACRAFASAAHLAAYAGLAPVTRRSGSSIRGEHPSRRGNKALKRALFLSAFAALRDPLSRAYYTRKMSQGKRHNQALIALARRRCDVLFAMMRDGTFYTPQGS

SEQ ID NO: 154542 - protein, 337 aa, unidentified
MNAITIGLDIAKSIFQVHGVDAHGKPVLRRKLRRGEVLRLFANLEPCLVGIEACHSSHYWGRELSKLGHQVRLMPTQYVKPFVLGGKNDVNDAAAICAAVRRPDMRWVAIKSAEQQSVQSLHRMRARLIQERTAKSNQIRSMFSEEGFVFARSIAQLRRSVVQLISQENTRLTPILRRLAAMYLEQLDALERWLAELQAQLQELFAQREDCRLLASVPGIGPVVATALVGTVGDPRQFKNGRQFAAWVGLTPKQRSSGGKTLLGGITKHGDTYLRMMFVQGAQAVLRFVDRRSDRQSLWLKRLLTRRHKNVVVVALANKLARVAWAVLAQRQAYKAS

SEQ ID NO: 154543 - protein, 373 aa, unidentified
MKKVRVLGLDVHAETIAVAIAEPDGEVRSLGIIPNREEPIRKLVKKLGPAEQLQACYEAGPTGYVLYWQLTALGLKCEVVAPTLVPVKAGDRVKTDRRDATKLARSYRAGDLTAVWVPNEEHEALRDLVRAREVAKQDQLRARNRLSKFLLRHGRRAPAGIKAWTQKFQEWIKEQVHFEQPAQEYTLLDYLHEVEHVADRIRRLEQAIAEAVKLAPPQMQEVIQSLQALRGIAQISAVTLVAELGEISRFEGARQLMGYSGAVPSEASSGKRIQRGAITKTGNAHLRRIAIEAAWAYRHRPAIGLALRKRQEGLSEEVKEIAWKAQHRLHKRYRTLSAAGKEKQKVITAVGRELLGFVWAIGVQVERKHKRVA

SEQ ID NO: 154544 - protein, 400 aa, unidentified
MSAYWVGIDSGKREHHCVVIDQTGAVLLSKRVENDESALLDLIATVAEIAAGGEVCWATDLNAGGAALLIELLAAHAQQLLYIPGRIVHHAAATYRGDGKTDAKDARIIADQARMRRDLQPVRGADQISVDLRLLTARRTDLICDRVRAINRLRATLLEYFPALERAFDYSKKAPLLLLGGYQTPEGIRRIGLTRLTGWLKKRGCRNSAKMAEKALIAANSQHTVLPTQATGSALVVRLAEQISTLDTEIGDVDAQITELFRQHESANVLLTMPGFGPVLAATFLANIGGNLNAFDSVDRLASVAGLAPVPRDSGRISGNLHRPRRFNRRLLRTCYLAALSSLKNSPASRTYYDRKRGEGKSHKQALIALARRRINVLWAMLRDHTIYQEPMPRITAQAA

SEQ ID NO: 154545 - protein, 338 aa, unidentified
MAIVGGFDLHRRQITFDYVDTVSGEVSRGRVAPADREHLRAWLRRLEGQDATFAVEACTGWRFVVEELEGAGAQAHLAEPADTAALRGPKRRAKTDRADARHLRELLMAARLPESWIPPAHVSDARAEIRLYKALVDERTAWLQRVHAILFQLGAPAVPGLARASGRGRLDLAALPLVARSAVEVGLRSVDRVNEELDTLRPQLARLSRAQRGCRALQAHYGIGPLTSVAIWAELGDCGRFSSSSDAVRHSGLDVTVHSSDSRRARGHLARQGPGVLRWALFEAAVCAARPASPDHAYYLQVKARLGHQRAVLSVARKLTRWCQHTLRALGEQALAPA

SEQ ID NO: 154546 - protein, 369 aa, unidentified
MTDLTLFIGLDVHKKTISVAMAEATTGAEVRFYGTIANTPDTVRGLCKKLTKDGQQLHFCYEAGPCGYGVQRQLTRLGHRCDVVAPALIPRKVGDKVKTDRRDAMMLAQTLRAGQLTAVWVPDEAHEAMRDLVRLRAQAMRDLRKTRQQLLSFLLRHGLISPYGHWTKMHRRWLGELTFAHPAQHLAHEEMLQRIERAEALCDRLKGAILDLVPQWTLAPVVRAIQALRGVSLIVASVIVAEVGCFSRFDSPRQLMAYLGLNPSEHSSGATVRRGTITKTGNALARTCLVEAAWTYRFPARVTQIIRDRLKNLPEPIRNVAWKAQVRLSARYRKLIAAGKPAPKAVVAIARELVGFIWAIARMVEPKFA

SEQ ID NO: 154547 - protein, 340 aa, unidentified
MIIGCDFHPRFQQIAYLDQETGEYGERRLSHPEEGERFYRSLARRQVRIGAEATGNFRWFQRLMQELGHEFLLGDASAIRACCPRKQKTDKRDARHILNLLVEDRFPAVWQPPLENQEVRQLLLHRCRLVRMRTRIKNQLDAMAKNEGLLRPRVWSPQRRSEIEALPLPGWYAHRRVDLLGLLEELDKRIRPLDEAVREAAEDSREACLLMTHPGVGPVVSLAFVLTIGDWRRFPRGKQVGSYLGLIPAEESSGDKRRLGHISKQGNTLVRWLLVEAAAIAQRYDASWHRQYVRLSMTKHHGVAKVAIAHKLAVRLYWMLRSGQDYSNVMERGSHAGQSE

SEQ ID NO: 154548 - protein, 410 aa, unidentified
MSEPKPSYAAFVGIDWADQEHAVCLMEGERHQLHQLPHKPETIDAWARDLEHRFGGRPVAVCLEQSRGPLIYALMKYTFFVLFPVNPKQLARFREALAPSGAKDDPSDAWLLAELVRHHHPRLRPWHPDDAPTRRIRLLAESRRRFVDDRTRLGNRLKALLKEYFPFALTLCGGHVYADSFLRLLARWPSLKALQRARPQTVARVLFAGRKRPDDEAERLAAIRQTVALVKDPALIEARSMATQALVAQLRTLNRAIAAHDAQLEAAMSKHPQAAVFRSLPAAGEAMAPRLLAALGSQPDRYDSAAAVQQHSGIAPVTQKSGKTCSVRRRRACPKFLRQTFHEYAQHSLKNSAWARAYYRLQRERGKKHHPAIRALAFKWIRIIFRCWHDKTPYDESVTVHALGAVFGEN

SEQ ID NO: 154549 - protein, 370 aa, unidentified
MKKFIMYIGLDVHKNSIEVAFADAGRDGEVRSYGKIDGNLTALDKVIRKLEAKGSELHFAYEAGPCGYEIYRHLNSNGYDCIVVAPSMIPRQSGNRIKTDRRDAQMLARLHRAGELTSIYVPALEDEAMRDLTRAREDAKSVERKAKQRILAFLLRHGYRYSGKTPWSRAHFRWIAILKMPHPAQQIVLQESLDSLSECTERVNRLTEQIQRLLPQWRMFPVAQALQTLRGVSLIVASTTIAELGDLTRFASPVELMSYLGLVPSEHSSGEQTKRGSITKTGNGHVRRVLVEAAWAYRLPARVSTALHLRQEGMPLNVCAISWKAQLRLCNRYKRLLERGKARQLIITAIARELCGFMWAIANEVETPTV

SEQ ID NO: 154550 - protein, 411 aa, unidentified
MVLFVGNDWAEAHHDIEIEDGEGRVLVRRRLPEGVDGLATLHSLIGDHLGEDAEPNEVLVGIETDRGPWVQALIAAGYTVYAVNPLQVARYRERHGVSGAKSDPGDAHVLAEIVRLDRAHHRPVAGDSVVAEQVRLAARAHQSMIWMRQRSANTLRSLLRECYPAALAAFGDDLSGRDALAVLTAASGPAAGRRLTPARVVTLLRKAGRQRNLQTRADQIVAALRAEQLPVRAELEGVNAATVSALVAVLTTMVAQTAVLEEQVRLGFGQHPDAEIYLSQPGLGMILGARVLAEMGDDPDRYSDARARKNYAGMAPVTRASGTKRVVLARYARNRRLADALYQQAFAALTASPGARACYDRHRAAGATHHQALRTLANRLVGILHGCLRHQQPYNENTAWPAGTTILSDAA

SEQ ID NO: 154551 - protein, 412 aa, unidentified
MLFVGDDWAEDHHDVEIVDDQGRRLARKRLPEGLDGIIGLHALVGQFVPDEWAELGPGEAASRVKVGIETDRGQWVQALIAAGYEVFAINPMSVARYRERHSTSGAKSDCGDAHVLAEIVRLDRAHHRPVAGDSELGEAIKLVARAHQSLVWDRTRQVLRLRGVLREFFPAALEAFADLDAADTLELLAVAPDPQRAARVSKSRIAAALRRANRRNVQEKADAIQSVLRAPALRQPAQIQAAFAAIVTSQVRLITVLNAEIAQLGEVVASYFDRHRDAEVYASQPGLGVILGARVLAEFGDDRTRFADAKARKNYAGTSPITRASGRKKLVLARYARNTRLGDAVQQWAFGSLKGSPGARAYYDALRARNIGHQAALRQLANRLVGILHGCLKTGTVYDETTAWAHHLTAAA

SEQ ID NO: 154552 - protein, 366 aa, unidentified
MQEITYVGLDAHAESTAIGVAEPGTVAPRFIGVTGAKFMELNKALAKIGKPGDLRIVYEAGPCGFAMVRQLRNAGFQCEVVAPSKIPRKAGDRVKTDRRDALTLAGLARAAQLTYVTVPDERDEAIRDLSRARIDAVRARLKARQQLKALLLRHDRRYSGKTSWTAVHERYLASISFPLRAQEIAFVEYRRAISEAQARVDLITQALSQELEHWRMRPLVKALMTLRGVDQIVAISLVAELGELKRFAHPRDLMGYLGLVPSEYSSGPKRALGGITKTGNSQARRMLVEAAWSYRFPARISRGLQVRQEGQSTAIRDIAWRAQVRLGHRYRRLTARGLQHNKLCVAIARELAGFIWSIAQQITVSA

SEQ ID NO: 154553 - protein, 347 aa, unidentified
MEYVGIDLHKKESQICRLTETGEVIERRIRTEPQRFAEVLGGRPRARILVEAATESEWVARCLEALGHEVVVADPNFAPMYATRTRKVKTDRRDARALQEACLLGAYRPAHRLSDAQRHVRGRLAVRDALVRTRTRYIALTRALLRRHGWRVPTGSAETFSRRVMGLPLPGRLLSEVAPLLAVMRPLNQQLAYSDGAIEAVTRPDARVQRLQTVPSVGPVTAAAFVATIDDARRFHRAHEVAAYLGLVPRELSSGESQRRGRITKAGNTRMRWLLVQAAVSILRLRDPRTAVLRRWATGIAARRGKKIAVVALARRLAGLLYAMLRDGTTFTPQVEPRHAAEAAVPV

SEQ ID NO: 154554 - protein, 438 aa, unidentified
MSNKVIFNLDELFISVGIDVGADFSWMSIALPNQQFVGKPYKILHNSIDSLTTAVSKIKEAEELYSLESRIFLESTGIYHYPLFCYLRDKGFNCSVINPIITKNSTNINIRKVHNDRFDSKKAALVGLKPDLKVSLMPSDLALNCRNLCREYYDLMDNRSAYVNKLQGELRMAFPQYLGIFSKVTINTSLTLLETYTSPSAFLEADKQEIIDIIKSTARFGLTYAQNKYNAIIQAATDANQFGYIIDSNIKRIRLYISFIRKYDEEINNILESLHELVDANEDADFVKQIHLIETFKGAGFLSAVSIMGEIGDFSAFSKPKQLFAYFGLDPAVKQSGKFEGTKVQMSKRGSAIARRVIHTLTLQSISISRNGEAKNPVLREYYLKKCDSKPKLVAMGAVSHKVCNMIFAILRDNKPFKIIAPQEHIKQYNAAKCDMTA

SEQ ID NO: 154555 - protein, 427 aa, unidentified
MNYTQNRKIAQVTETTLVVGVDIGSQWHYARAFDWRGIEITKKAFRFSNDLDGYTAFEKWVRETAKNSAKMEVLIGCEPTGHYWYTFARYVGLHGMKLAFVNPYHVKQSKEMDDNSPRKTDEKDPKTIAKLVTEGRYSFPYLPEGIYAELREAVSVRDQIVKAMNAAANRIQRWLTIYFPEYLKVYKVFDSVSGLTMLWQAPLPEDVVKLGADGIVALWHEKKLRAVGKKRAQTLIEAAKSSIGMPGGNCANMDLHLLLEDYFTKKEQLERITAVLQEELLKVPNSEKLLAVKGIGIITVAGFLAEVGDLRRFTSPKQIQKLAGLEPKENSSGKHKGRTSISKRGRRKLRRLLFQAVLPLIRSNEDFREVYTYYSTRKDNPLKGTQAVIAVGCKLIRIFYVLLSHGADYSSTRFRADILRPGQAKAA

SEQ ID NO: 154556 - protein, 382 aa, unidentified
MNENAKPSVSVYAAIELSKSTWLVAVLSPNSDRVKLRQVRGGDTAALVGMLEREQMSATQVDGCPAEIVVCFEAGYDGFWLARFLRKRGIRTSVLDSTSFLVNRRSRRAKTDRLDAESMVMMFKSFDQGDRTVCREVRVPTPEEEDAKRLDRERLQLSAERTRHVNRIRALLNLHGVREVKALWGGDWRGWLQVVRTADDEPLGKFLAAELTREFERLELVHAHIRDLDRQLEEGLRDGALGIPNVDKVRRIATLKGIGRLSAVLLVSEVFHRQFANRKCLASFLGLAPSPYASGAVKHDQGISKAGNRFARRLLVELAWCWLRYQPTSALSQWYRGTFGAGSGRSRKIGVIALARKLAVAIWRFVEDGLVPQGASLKPEAP

SEQ ID NO: 154557 - protein, 363 aa, unidentified
MKIMVGIDLHSNNALCGLMDENGRRLVHKQLPCDLGAILQLLKPYKKRIATIAVESTYNWYWLVDGLQDHGYHVVLANPARMQPYNGKKHTDDVSDAYFLAELLRLNLLPTGHLYDRKTRPVRDLLRRRLLLVRQRTTLILSFKSLNERTLGQHVPLARVKAMKAEEAQARFTEPADQLLSGEQIILMGHLTDSIMKLEQHLLGVVGKWPAYQRLQELPGIGKILGLTIALETGDAKRFADAGNFASYSRCVKSLRTSNGKKKGENNRKCGNKYLAWAFVEAAHFACRYDDQCRRFYDRKKQQTNPVIATKSLACKLAKAAWHVMAGDVPYDAARVFGATQKNDFGETGREPAKGSGHPSQQD

SEQ ID NO: 154558 - protein, 455 aa, unidentified
MSIVSSLPSEFERINISAAGIDIGAQKHYVAVPKGRDPKGRDVRHFDTFTADLYALVDWLKQCHIDTVAMESTGIYWIPLFEILEQNGFEVRLVNPRSIKHAPGRKSDVVDCQWIQQLHAYGLLTSAFRPDEQIHVLRAYHRQRTMLVNHAATHIQHMQKALEQMNLKLTNVISDITGTTGMKIIRSILAGERNPQKLAKHRHPRCKKSDKEIAKSLHGNWRDEHLFALQQALALYDFYQTQIEACDKQIQAQLCRFEDHSDGGKPPVSTGKSKGSGKRLSFDATEHLYRMTGVDLTQIVGLNTPTVLTIIAEVGLDMSRWPTSKHFASWLGLCPGSKISGGKNFSSKSKPSANRAAHAFRMAAYSLHRSQTAIGAFLRRKKAQLGAPKAITATAHKIARIFYEMLKTRTEYKDLGVDYYQNRYKERMLRNLKRKAKAFGLELVNSNQVQLVMVN

SEQ ID NO: 154559 - protein, 401 aa, unidentified
MESPIVSIDVSNGSSHYMCFIKNNKRFGKVKKIDHDIEGFKRLLEDIQKLEAETNEKVCAVFEATGVYTKPLERFLSKNSIKTYIINPLESARKRKEEIHNKKTDKLDPISISKVYYDKEEMMELKKKDETYNWLRKKNRLYEDQLNHLRKYKVTFQNQLSICFPGYLDLFKDGYSDIPMTILKKYPHPDLLKNKKTETVARYLEKNTCHTHKVSLEYALKIIGFAKKTYPGCEKDDVEVEIFKILLDKVIETQRECEKTLNEMITVASTLEEYRYISSIDGIGPNLAARIIAEIGDIEEFKSREALVAYAGLDPHIYQSGDQDGKHLKISKKGNKYLRCLLFLAVGCSIRGAKDNPVNRFYQKKKQQSNPLNSKAAKTACTAKLLKIIYGICKNKTTYER

SEQ ID NO: 154560 - protein, 349 aa, unidentified
MDRTTYGLDIAKSVMQLHWVDGETGEIGRKQLARARLAAYFAPLQPVRIVMEACGSAHHWARVFTAQGHEVELLPAGQVRPFVRGNKDDAADARAIWRAAQQRDIRRVPQKSVEQQAVLALHRARSHWVSVRTATLNALRGLLYEFGVVLRGGRRAGLKALGEQRAGIDAQLPPTMRTLVDGQLQALRQIDERIDVLEGEIAALQKQLPGAARLRRVPGIGVLGSTALAATLGDAKAWRSGREFSASIGVVPAHAGTGGKVRVGHLSKRGDPYLRTLLIHGARSVIQHAKDKPKWLEQLLARRPLNVVVVALANKMARTAWALIAHGRAYQRDWQSARPGGGAAQAVAA

SEQ ID NO: 154561 - protein, 320 aa, unidentified
MQTPTEVLNIGADIAKDEIVVACSQGSFPARTLANQRTALLAFLKGLPAGSRIGVESTGTYHELFANVAHQLGFIVFVLNPKDARHYAKAVGLRGKTDRVDAELIARMIAHEHTKLHTWIPPTPEQREMARLIKRRAKLSSLRQALSMSLKGLDGFAADLKVLRARFDQIVARIDERVKALVEASPDRQQHVTHLRTIDGVGQVVSAALVNTLERAPLKSADAFVAFTGLDPRPDDSGQHRGKRRLSKRGPAELRRLLYVAAMSAKKSKAWKPLFEHYRAKGLSSTAALVILARRIARTAWSMYTYRTEFDPVRLAKSLT

SEQ ID NO: 154562 - protein, 407 aa, unidentified
MDWMQQPGAFAGIDWGGHEHQLCVVDGAGSKELELRVTHDVSGLDELVRALALHGEHVPVAIERAEGLLVEHLQAHGHPVFPVSPRISARARERYRVAPVKDDRFDAFVLADTLRHEHAHWRALAVPSSLLAELRALTRDRGRLLETQQATEAQLRAILECYHPAPARLFSSLDRQIALAFVADYPTPAVASRVRTTRMAGFLRRNAYTGRVPAQVLAERMRANLLSGSSGTVAGKAHSAKTFAHLLGAMNESLAEFDDAIASVVAEHPDAHIFASFPGVGPILTAVLLAEIGEDRSRYPTVQALLAESGLAPVTRSSGRSHSVRFRYAANTRLREATMWWAFNSLKTSPWAAAAFRHARDERGQRYHRALRGLAARWMRVAWRCWQDGAAYEPARHMAAVIAEATA

SEQ ID NO: 154563 - protein, 428 aa, unidentified
MNKHKITRREQFCQIQSEITGSGQYLVVGIDVAKDKHHAFMGTAAGKTLLKKLIFENDLDGFGKLLQRCEAARVQNGLAKIVLGLEPTGNYHKPLANHLIENGCQVVLVTGKAVKDNRRQLDGRWDKNDTKDAANVADLVSRGRCLYYDAGSAQINQLRDLLSLRRRLKKEEHSLRMRIRNTVLAKYFPELDRFYGACESESLAIVRWCLDPAKIAAMDFDPFFAMVTRSRRGIAQKLRLQKIHQLAAQSVGCPMGPAAEFEAVLLVQKLKQVREQIKQVEDLMQQVARDFDEYQILLSIPGFGPYVAAVVLAAIADALRFESSNQVVKLAGYDLCANRSGKSSDDAVPVISKNGNAQLRYALYQAAFIASVHNPHFSAYFTHVLRGRQRERGIKTKMRVKLAAKMLIIAWTLMKKKEPFNPDYLHIE

SEQ ID NO: 154564 - protein, 428 aa, unidentified
MERFEANRLEAFRQLKKEIRGSTEHLIVGIDVAKDRHYAFMGTATGKVLYKQLVFDNHREGFEKLILQVEAVRVRHGLTKVVFGLEPTANYHKPLGEFLIRKEHMVVLVASDAVKKNRSLLDGRWDKHDTKDADNIADLISQGKCVYYEFPSVEFRELRNLLSMRRKLKKLEHGLRIRIRNHLVAQYFPELDQCCHWAAQEGLAIVRWCLNPEEVSGLDYEEFLSRIHTRGQTHAQQRRLSAVWHKAPVSIGSRFGPSVQFEADKVVSLLKQVRQTIGDTDEQIKQICLQFESYRYLLSIPGFGPSVSAMVLAAIGDPFRFSVGSQVLKMAGLDLSASRSGKYSADSTPRISKKGKAEVRYGLYQAALVASNKDKHFIAYFTHKLTGRQKEKGIKTKMRVKLTAKMLIIAWTLMKKKEFFDPTYLKID

SEQ ID NO: 154565 - protein, 391 aa, unidentified
MVCVGIDVAKDKHDCCILDSDGTVRADCFTIPNNMDGFKQLLQTIRNCTKKSDKIKVGLEATGHYSYNILGFLLDNGLPTYVINPLHTNLYRKSLSLRKTKTDRVDARTIATMLLSDVDLKSYTDTAYHNEELKSLTRYRFDKVRERAKLKQSVSRLVTILFPELEKLVPSLHIASVYALLSEYPGAKQISEIHLTKLTNLLATASKGRYGKDKAIQIRDAARTSIGSVMPAKFLELKHTIKLIRELTSEIDEIEVSIQKIMDELNPPILSIPGVGIQSAAMILAEIGDFSNFESPDKILAYAGCSPSTYQSGKLTNCYAHMEKRGSRYLRYALYNATKYVCHWNPVFAEYLAKKRAEGKHYNVALSHATKKLVRLIYALQKSGKAYLVAA

SEQ ID NO: 154566 - protein, 327 aa, unidentified
MDQEGKVLAKSRVSTDRPAIQNYLKSLDGLKPTKAVIEAGFNWSYFYDQLAEEIEEVCLAHPLKTRLIAEARIKTDSLDSETLAHLLRSDLIARAYAPSWETREVKNLLRFRISLVRIRTSLKNKVHSVLDRHQVEDNVFRGLTDKFGKTGMKIMRSLELRGNDRAILNGYLDLIEELSRRIAALNKQIKALVKEDEISSYLKTVPGFGDLLGLLLRYEIDNMERFASAKKLCSYVGIVPSTYSSGGKTWHGRITKEGNKWLRWVVIEAVHGAIITSPSLRRYYNSVKQRRGDKAATIALARKLLEIIYHVWKEKRPYYEKELAYTV

SEQ ID NO: 154567 - protein, 341 aa, unidentified
MNIKRIGIDLAKQVFQIHGVDGQEKVVLRKQLRRAQLLDYFKKLPPCLIGMEACGSAHYWARELQKLGHTVKLMAPQFVKPYVKSNKNDANDAEAICEAVARPTMRFVAIKSIAQQDIQAVHRIRSELVQQRTAKVNQIRGLLAEYGTVVGRRIDVLENALPLILEDAENGLTADFRVLLEGLQQDLATLNGRVDDLDKTIKSLATSNTDAKRLQQIPGIGPIIATALICAIGDGKQFKRGRDMAAWLGLTPRQHSSGGKDRLLGISKHGDAYLRTLLIHGARSVLKVASQKDDPRSRWLQNLCSRRNKNIAAVALANKNARIAWALLSKNTDFLPEGEPV

SEQ ID NO: 154568 - protein, 349 aa, unidentified
MILVGCDLHTRKQQVALLNTDTGELWDQELSHDGDAVERFYATLPPPVTVGIESTGYSLWFHALLQRLGHTLLVGEAAKIRAMVVRKIKTDRRDARHLRDLLKDDRFPVVWIPDPATRDLRALIKHRLRLVRIRTMVKNGLHAIALNQRLALGPSLWSRAGLAQLHALVLPPHTRRRRDDSLELLQWLNGHIHELDLHVATAAAADPDARRLMTHPGVGPLTALATVLVLGPVGRFPNSKHVVSYIGLAPAVSASADKYRLGHISKQGSALLRWVLGQAAPLATRGDAALKRIYFAVLRRRGRPKAKVALARRLLIRLYVMLRDQINYDEFCRRGRTQRPGLEPARIPV

SEQ ID NO: 154569 - protein, 381 aa, unidentified
MRVVFGIDVSKVSSEVAILVNGEKVHNYTMSNDAIGFSRLLGDLKTVHKPEIIFEATGVYSRRLQSFLDEHGYAYTRLNPLEAKKQLDSLRVRKTDQIDAEKLAQSQFVLNRKTTYVQEEIYQNLRDLSRFYQNLTEDIVRAKNRLHKALQVTFPELENILSTPSGEQYWNLVIAFPCKDFVLDLSKDELSESIRQSTSKRISDKRVAYLAEKLIALANQSYCAVKKTSPMLEEVRYYAKELFRLSEQRQTILDEMVELAQPLPEYDILLSIPGIAETTATSIIGELGDIRRFQSANQINAFIGIDLRHYESGNFLAKEHITKRGNPYARKILFKCIHNIASASHTNPCHIADFYEKRKRQSQTTSTKPNKLYDYASTQNR

SEQ ID NO: 154570 - protein, 316 aa, unidentified
MEQKPLYVGLDVSKTQLDIAVRPTGQRWSAANNEVGIADVVAQLQSLAPALIVLEATGGLQVPVAAALGTAGLPVAVVNPRQVREFARATGKLAKTDRLDAQALAHFAEAVRPEPRPLPDVQTQTLQALLARRRQVVTMLTAEKNRLSSSLPPIRQRLEAHIAWLQKELDTLDDDLGQTMRQTPLWREHENLLRSVPGVGPVLTFTLLAELPELGSLDRRQIAALVGVAPLNRDSGSLRGKRRVWGGRATVRTALYMATLVAARFNPVIQLFYQRLCASGKPKKVALTACMRKLLTILNAMLKHRTPWQPDHVLIS

SEQ ID NO: 154571 - protein, 337 aa, unidentified
MKVTLIGIDLAKSIFQVCGVNQAGKRIFNRQVRRARLMELLIQHPEATFAMEACSGSNFWGRVLQQRGFQVMLIPPQHVKPFVKGNKNDRNDAFAITEAARRPDLNCVEPRTLAQTDLIQVHRVLDRMIRQRTALINQIRGFLNEYGIVYAQGKEKLLAAMPDLLEDAENGLTPSSRSLYQEMYKQWRQANEAIDRIEKGLKRQANSDEAAQRLMKMRGVAEKISTATIAHAGNGHGYKNGRHFSANLGLVPKEYSSGGIQKLGGITKRGNHYLRRLLIQGAWSVVRNADKNDDRMSRWAKQLVERRGKHKAVVAVANKMARIMWSMLYHQTEYRAN

SEQ ID NO: 154572 - protein, 315 aa, unidentified
MDETGYFVGIDVSKAMLDVHVRPGDGRARFDNNSTGWAELVAWLSPFSVVRVVMEATGGYERKAAQELLRQGLQVCVVNPRRVRDFAGASGVLAKTDRLDAAVLAHFAQVFDPHALSQADEAEARLAQYATVRDGLVGQRTSLSNQIGLNDDPDLLRLLQDLLEQVKARLADLERLIRACIREKAELRRRYEQLQSVKGIGPVAAVSLLAFMPELGRVSRRAIAALVGVAPYTRKSGKMQGQSRIAGGRAGVRRVLFMASLSAVRHNPVLKAFYQRLTKAGTSKKKALIACARKLIVILNAMVRDDKQWTPKITA

SEQ ID NO: 154573 - protein, 353 aa, unidentified
MDKIYDICCGIDVHKKLIVACLNHKRKKELREFGATTRELMELAEWLQKNNCEIVAMESTGSYWKPLYNIMESYGLHVIVVNPAHMKAVPGRKTDVKDAEWIAELLQHGLLQPSYIPSKDQRELRELVQYRKSLVGERTRELNRLQKMLEGANIKLSGTVTNINGKSARKILEYILSGNEIDEKKYDEMYEEKLIAHNLKASKEQILDDLKGFMSPLQRRMLKELLQHLDELNVHIENLNDEIDNFMKPEEKQASQMIQDVTGIGNTSAQAIIAVIGTDMERFPSDRHISSWAGLCPGDNISAKKRKGGKIRKGNALLKSTLVLCAHAAVRHKSSYFHAQFKRISTHLSLIHI

SEQ ID NO: 154574 - protein, 437 aa, unidentified
MKTLAVLDPRAAFVDVGSEHMHVSVAGEEPAVFGTVTSQLHALRDWLKSQDVRSVAMEATGVYWLPLYGVLEAAGFEVRMVNGRQTRNAPGRKTDMKDCQWGATLHMHGLLNAGFVPPADIRRLQDYLRLRADHVASAASHVQHMQKALERMNIKLHDVIASLAGMSGLAVVRAIVAGERSPEALLALCDQQIRRAKAEQVKEALRGTWEAEHIFALRQALQSWDHYQLQIAQCDHQIQAVLPPHDPDQPPLPRPKTPKRAGVNSPDIPKLREILAQMCGGRDLTQLPAHTHYGVLQIVGEVGTDLTKWRTEKHFTAWTSLAPGNHDSGKRKGHVKRGRNRTGRLFCMMAQSLVRSKHIALGGFYRRMAARRGGLIATMALARKLAAWYWRVMVKGDDYVEQGLAHYDAQVLQTKQRALKRLAKELGQQLVPIAQPA

SEQ ID NO: 154575 - protein, 352 aa, unidentified
MMIIGCDFHPRFQQISFLFEETGEWGQRRLMHPAEAEQYYRSLRGAKVRIGIEATGSYGWFRRLMGELGHELVVGDATQIRASNPRRQKTDKRDAEHILGLLVADRFPAIWQPPAENEQLRQLLLHRSRLVRLRTRVTNQLDGMAKNEGLLVASGWSGKRRKAIEALPLPGWYGERRTDLLALLDRLEERIAPLNKAVSQAAANNAEACLLMTHPGVGPVVSLAYVLTIGNWQRFPRGKQVGSYLGLIPSEDSSSEKRRLGHISKQGNTLLRWLLVEAASTAQRYDPSWHRQYLRLSMTKHHGVAKVAIAHKLAVRLYWMLRSGEDYQHVRERGSHARQSECPGGRSKRPIE

SEQ ID NO: 154576 - protein, 406 aa, unidentified
MNQNTCITIDVSQNKSHIQGFIGPNKPLSKARTMRHTKQGYQFILTLKNLIESKTNETPLIIFEFTGIYHKSLEKFLISQNLKYHIVAPLRAAKARNSEIREQKTDARDCLSLSKLFYSNNLGVFYSEDETYSNLRKLNRYYDTCMKHFVKIKVNFRETLAVIYPNYKKLFTSIYSDESLTFLKEFPHPSFYTSKSEDEIIEILKDKWNHVESWTSSKVKKLTPLINEVVPGCNVTEPDIIMLLSYITQIEYYLNQIKFTISKMNELAKKVPLYNLVHSLPGIQDILTCKFIAELGDISRFINYKQIVAYAGIDPMIRQSGDKDGLHLKMSKKGNKRLRTILHLMVSSLIKTNRESNAIKDKYQKKTHQLNPLKPKVASMACANQLVRIIFYMHKTSSTYTYQKCK

SEQ ID NO: 154577 - protein, 337 aa, unidentified
MGLYCAIDLHSNNHVLTVIDEADRRVYERRLPNDLAVTKAALEPYRAELVAVAVESTFNWYWLVDGLMEAGYAVRLVNTAAVRQYEGLKHTDDEHDAFWLAHLMRLGILPTGYIYPKSGRGLRDLARQRMRLVQHRSSLITSVQNQVWRSTAVRLCADTIKGRGKKPWPELPDPDLALSVKAGRAAIDTLTVQIERLEKLILKRVDLSPQFRLLKTVTGIGPILAMTIALEVGDIGRFAGVGEFASYCRCVDSQRLSNGKKKGEANRKCGNRYLAWAFMEAAHFAIRILPAAKRFYERKRRQRHALLAVKALAHKLARACFYILRDQVPFAPERLFV

SEQ ID NO: 154578 - protein, 337 aa, unidentified
MMYGGIDLHSNNSVVAIIDDADRVVAQKRLPNDITKIVGFLARWQDQLAGVVVESTYNWYWLVDGLQDAGMHVHLANTAAIKQYEGLKHSGDETDAQHLAHLLRLGILPMGTILPREHRALRDLARKRMQLVQSCTAHVLAVENIMARQLGGRITSNQIKRLTDDTIDSLPLAADVGLAIKANVAVIATLQSQIEVLEKRLQERVKPRPQYGLLTSVPGIGQTLATVILLETGPIDRFADVGNFASYARCVDSVHTSNRRKKGEGNVKNGNTYLAWAFVEAANFARRFCPEAKRFHERKKARTNNIVATKALAHKLARASYHILKEGRPFEATRCFA

SEQ ID NO: 154579 - protein, 317 aa, unidentified
MRASAAFFVGIDVSKQQLDIAVRPSGESWTVAHEEAGLSALVARLRGLAPTLIVLEATGGWEVTVTGALAAAALPVAVVNPRQVRDFARSTGLLAKTDRLDAQLLAQFAEVLRPAPRPLPDAQAQELTALLQRRRQLVEMLTAEKNRLPLAARRIRPQLQAHIAWLHQQIAQFDEDLRQLIRSSPLWREKDDLLRSTPGVGPVLATTLVAALPELGTLSRRQIAALVGVAPLNRDSGTLRGRRTVWGGRAQVRAVLYMSTVVAVRHNPVLIAFYQRLRAAGKAPKLALTACMRKLLTMLNAMLKHHRRWAPVRAQHA

SEQ ID NO: 154580 - protein, 447 aa, unidentified
MGDGSSYGRIVLMQSTKSIVEGAILVKNSLASRLKQVPEGYLIVGIDPHQKKHAAVAITQDFTTRCKFKFNNSMEGYNMALERLRGEMIKAGCKGIMFALETGGHYWRNLAYFLDERGLPFRFINQFSLKRRREGKDLNRRKNDYRDSEVAAQLLCTGEFTDSRLKHGVYAELHAAHNSYRRMVKERTRIGNLVRGLLDGLFPEFRLVFKDVCCLNALSVLAACPVPSSISSITEDQFVSFIRNNHRGLLKKKKLRDLYRFASTSVGIEVGAQAVSLEIGFLVEKLRLIRSQIISLERVLIQLVDQTEEGKYLLSITGLNYISVAGLLAELGSFRSYKSAKQMIKMAGSNPTEKESGGKRGQRTPMSKHGRPVLRHCAWTSVVPMLRFNADFRAWAKQRRERPAHANPLCGKEVLGAALNRLLRLAFALVRNRTYYQVSRPELALTA

SEQ ID NO: 154581 - protein, 448 aa, unidentified
MKKVQKNHYFVNGRKVVKRKTRGLKRSQEKMEKKKKIINHNTLVIAMDLSLEEICTVAMSPRNKQPITSFSVPFDKDGFEGLIETAKELKEHYNFKHVVFAMEPTSHYWIILAEHLKAARQKYVLVQPISVWRERQSEHYSYAKTDYEDAQLIGYLAIDMKFTFTQLPQTPLWASMEALASEWILLNKKKSAEAMRLKAFWHRIVPEFLDIFKEQAGNTAIALSKALLPLPQIRKIKLEEFIGRIRNYLNKKRLMVFKVKVLYEIIRNDKSFGSRLYEGGLTYSISHAAKRYELYNTQQQEAEERLLKLYKQTGYDQFLDSIPSVNPVKNALTLSFIGDPCNYDCPRCLPKLAGTNACQNTSGRHSGKTPITHWGNSHLSYLTYLIGFSLKTHNPEFKMRFNYLINRAKNPLKESQAIVACGNKYLRMVHVLCTQKVCYNMAMANGIF

SEQ ID NO: 154582 - protein, 410 aa, unidentified
MERVIERCCGLDVHKKTVVACVRVPGRTSVREQHVRTFGTTTAELLALRDWLGGYGVTHVAMESTGVYWKPIFYVLEDAFTCVLANAAQIAQVPGRKTDVKDCAWIAQLLEHGLVRGSFVPPAPIRELRDLTRYRAALIGEHTRETNRLQKVLEDAGIKLASVASDVLGVSGRAMLDALTQGTHDPDVLAELARGALRRKLPALRQALTGRFRPHHAFLVSQVLAHLDYLDEVIEALSTHLDEVMAPFAEEVSRLDTIPGVNKRTAEVLIAEIGVDMGVFPTAAHLASWAGLCPGNNESAGKHRSGKIRKGNRWLRGALIQAALAGGTRATKGAFAARYRRVMRHRGHKKAVVAVAHAMLVAAYHLLARHTTYQEPGADYYERRHAERVRQRAVQLLERQGYRVTLEPAA

SEQ ID NO: 154583 - protein, 385 aa, unidentified
MHQVESERSVLDGAAVFVAIELSKSAWLLAAQASPSGKTSSHRLESGDITGLLALLRRLQARERQTYGGGAVQIVVGYEAGYDGFWLQRRLAAEGIICWVMDPGSLQVNRRARRAKTDRLDAAMLLRALIAWCRGDRVACHMVQVPSVAREDARRTHRERQRLVAERVQHVNRIKGLLATQGITDYQPLRRDRSARLGEVRTKDGHALPPRLRREIERELQRLELVLEQLEAVEAERDAAVAAPAVDDADAAKVALLVRLGGIGNELATVLVREGLYRSFTNRKEVAAYAGLTPMPFASGERHREQGISKAGNPLLRKAMVELAWLWLRYQPDSALARWFTDRVGSVRGRIRKITAVALARKLLVALWRYVTAGLMPEGARVKAA

SEQ ID NO: 154584 - protein, 357 aa, unidentified
MPSKLNSAITCVIGIDIGKNSFHLVGQDQRGAIVLRQKWSRGQVEARLANLPPCLIGMEACVGAHHLSRKLKGLGHDARLMPAKYVRPYSKGQKNDFRDAEAIAEAVQRPTMKFVATKTAEQLDLQALHRVRERLVGQRTGVINQIRAFLLERGIAVRQGPRSVRSELPAILATRSDVLSPRMLRLVEDLAGDWRRLDAPIEGLSDEIEGLARQDQACERLMTVPGIGPIISSAMVAAIGTGDAFSKGRDFGAWLGLVPKQISTGDRTILGSISKRGNRYLRALFVQAAWVVLVKLGPTQWERYGLRSWIEAAKKRLHHNVLAVALANKLARIAWAVLHNARAFECVKTEEMAPRSA

SEQ ID NO: 154585 - protein, 344 aa, unidentified
MDHFGGLDVSVKETNICIVDDTGRIVKEVKVASEPAALLKVLGNPTYRFKRIGLEAGPLSQWLFSALAEAELPVICVETRHMQAVLKAQINKTDRNDARGIAQMIRVGLYRPVHVKTLRSQKLRMLLTHRKLLQSKAIAIENDLRGTLRNFGLKVGMVGKVRFEARIQELVENIPDLAVLVEPLLIVRRVLREQIVILHRRLLAIVREDEVCRRLMTTPGVGPVVALTYRATVDVPARFRKSKSVGAVFGLTCSRYQSGEIDWSGKISRCGDEMMRTMLYEAAQSMMHSKKWSWLKAWAMQIARRRGMKKAIVALARRLAVIMHRIWVDGTEFCWTREQATAAA

SEQ ID NO: 154586 - protein, 349 aa, unidentified
MRFYNQQHRFYCGVDLHARTLSLHVLDAVGETVLAKTIPASPNPFLQAVAPFREGLAVACECMFAWYWLADLCLQEQIPFVLGHALYMKAIHGGKAKTDKIDARKIAVLLRGGMLPQAYVYPRGMRETRDLLRRRTFLVRKRAEALVHLQNTNSQYNHPPLTKKLSYAANRVELDLPARFTDPSVKKNVELDLALLDTYDEHIREVELYLTRTAKVDDPQSFQRLLSVPGVGKVLALVLLYEIHDIRRFPEVGQFLSYARLVRCSHESAGKKQGTGGNKIGNAHLKWAFSEATCLFLREGDQAKQWLARREKKYGKARALGALAARLGRAVYHLLRKQQAFDAQRFFAS

SEQ ID NO: 154587 - protein, 520 aa, unidentified
MSAAGKHSAVSAAPRSRSEYRELSRLERRSPVRGKAPVQRLKRASPAGAQVPSGPRIRSTGDRPAAAVAQGKRPAERPVMSESVGPEPSSPKPSSQSEFAKLSHYCGFDWARKAHHVCVVVDKAGAVVLELSFADDAEGWDSFGKKLSAVAEISSAGVAIETSCGPEVERLLEMGLAVYPMNPKAASRYRDRKSVSGAKSDLADAFSFADGLRTDGHGWRRLRPLDPLTQELRILCRDEVALIEQRTALVNQLRVTLREYYPAALEAFEQWTQAPAWRLVIAFPTPRELAKAGKGKWNRFLHANKIYRPETAAKRLEIFAHADTFASPNSAVTAAKSMLAVSLCEQLVTLERQLDKYRQRIQKLFGDHPDHDLFGSLPGAGPKLAPRLMSELGCDRSVFGSAESLQCFAGTAPVTKQSGRTRIVQFRRACSMSLRAAVHQWCDCSRLKCAWAQAYYQKKREQRMNHAQALRCLGQRWLKILFKMWREKKPYDEARHTLDQVKHGSWVVKLLPESPAAQPA

SEQ ID NO: 154588 - protein, 370 aa, unidentified
MSQSSMLYIGMDVHKDSIAVAYVAHEHGAEVTYLGTIGTRQCDIDHLIRKMQSKATQLIFVYEAGPCGYWLYRYLTKQGHNCWVVAPSLIPKKAGDRVKTDRRDAVQLARLMRSGDLTRVYVPSVEDEAIRDLSRAREDTIRDLKTAKCRLKAFLLRHDIRYTGRATWGPAHLRWLSEVVCAIPAQQIVFQEYVRAVNEPSERLQRLDQELCEHVKTWRLAPVVEALQALRGVQFTVAVTIVAELGDLTRFENPRQVMKYLGLIPSEYSSGERRRQGSITKAGNTHARRALVEGAWAYRYPAKVSRHLQLRLETLPKPIQDLSWKAQVRLCKRYRRLIARGKHANQVVVAIARELAGFMWAIAKQVPVTL

SEQ ID NO: 154589 - protein, 335 aa, unidentified
MQVYGIDLSMESFEVNFIDENEKVRNKTVNNKLSSISNFLSSIPEDGILCAEHTGVYGDLLVFLCNLASIPIALVSGYTIKHSLGMLKGKSDKLDARRIREYGERFSDKLKLSRYDDEHIAELKQLYTFRGQLVDARKLLLTSEKGREYLPFQNVSVHNHLQPVNAVLDEKIATIEAEIEDLIRSHQDLDENYKLAKSVIGIGPVIATALIIKTSNFNIIDTSRKAASYAGVCPFPNSSGKMVVKSKTSPLADRNLKSLLHMGARSAVKHNKEYRLYYQKKQLEGKPHYLIMNNISNKLLRTVYSVVQNKTPFSSDYICLDPRERNMNSSSKKVA

SEQ ID NO: 154590 - protein, 369 aa, unidentified
MKEFSKYVGLDVHKEAIVVAVADAGGEVRYVGEIAHTPEAITKLVRQLRKGAGQMSWCYEAGPCGYGVHRQLSAAGENCQVVAPSLIPKKAGDRVKTDRRDALSLARLHRAGELTAVWVPDQAQEALRDLTRCREDMKHLQRQSRQRLSAFLLRHGRGFSGKSKWTQAHLRWFETVRFEQPVQQIVFQEYVDTVLACSRRVRALDEQLERVARESVFWPIIEALMALRGVNLLTATTIIAEIGDLHRFTSAPQLMAYLGLVPSEHSSGSKQTRGAITKTGNAHVRRVLVEAAWTYRHPARKSAFLQRRAERTGEAVQDIAWKAQKRLCQRYWHLTNRGKQSVQVCTAIARELAGFIWAIGYAAPRAAAV

SEQ ID NO: 154591 - protein, 354 aa, unidentified
MLTIGIDAHKHTFAIAVVDPSGRLMAHAQLARADATSTAVLAFVAVHGPVAQVGLEGTGTYGRQLAQDLVARGTPVFEVPGASTARERGRSRGRAREKTDATDALAIARVVLRDHEHLPRVGIDGIGLQCHLLTEHRQNLLQERGRLVNQLYAQIDGSGEELRPRFRSRNNRRQLRALTTVSLEGLAPIPQLRHGIIKQLAELVLALDDAAAGFTHQLEALAPRVAPHLLPIPGCGALTATRIIAEAGHADRFTTAARFGAYSGAAPIEASSGTQTRHRLSRRGNRQLNSALHIIAVTQRRWHPLGQTFLTKKLAQGKTRKEALRSLKRQLANVVFRALKQDAVLWPQMRIPQT

SEQ ID NO: 154592 - protein, 407 aa, unidentified
MIFVGVDWAEAHHDVHVEDAEGRRLGGGRLPEGVEGIARFHELVGAHVEDPSEVIVGIETDRGLFVAALVAAGYLVFAVNPMSTSRYRDRHSSSGAKSDPGDAKVLADMVRTDRHNHRPVAGDSEVVTAVKVLARAHQSMIWSRRRQANALRSALREFYPAALSAFDDLASADATEVLKVAPTPSLGAALSLAKIASALRRGGRQRRIDERAREIQAALRAPQLRGSALVASAIGASVQASVAVISMMNVEITKLAQQLEAGFEQHPAAKVVRSLPGLGTVLGARVLGEFGDDPDRYASAKSRKNYAGTSPITRASGTKRVVLARYARNMRLADAIYLWAFASLTASPGARAFYDAHRKAGDTHHAALRALGNRLVGILHGCLVNGSFYDEHTAWGHRSESQLTEAA

SEQ ID NO: 154593 - protein, 348 aa, unidentified
MLIIGCDYHPGFQQIAFVDTDTGEAAERRLTHREEAEQFYRTLEARRVRIGMEASGHGRWFERLLNELQFELWIGVAAEIRTKRVRKQKTDRQDAQLLLKLLMEDRFPRIWVPDAENRDLRQLLWHRHRLVQMRTRIMNQLHVVALNEGVRRKKALWRPAGRSELESLVLAPWALRRRRDLLDLFDQLTPKIHDLTRALEEEVEKRPIARRLMTHPGVGPLTALAFELVIGTPERFHCGKQIASYVGLVPSEESSGDRRRLGHINKQGNSLLRFLLVEAAQVTVRSQVQWRNKFFHLAMRRGRKIAKVAMARKLAVHLYWMWRRGWDYGEFEKLGSHSGEPGNRHGVQ

SEQ ID NO: 154594 - protein, 405 aa, unidentified
MSFILAFDVSKGESYKVLYHDRHCLSEGKVLHNQEGFRQLLEEIIALPEMPEIVFEATGVYSRPLEKFCQDHLLTYCLLNPLEAKKQMEEGTLRSWKTDKIDAHRLAQTHWKNTRLPKIHQAEVFQELRDLARFYQEIEDKISRVRMDLHQALQLTFPELEHFFSSRVTPYALSLIEAFPHPEFVLASTRTKIKNRLVKSTRKCISENRAWQKADQILTYAQNSYPAVDAASIHCQKTSYYARLLQDLLEQKESLMAQMIQSAQALEEFELYQSIPGIGAPTVALLIGELGDIRRFPTANQLNAFVGIDIRRFQSGNYVGKDHINKRGNPKGRKVLYFSIRNMIRQQHAAPNHLVDYYYKLKKQPVPKKEKVATVACMNKLLKCMHSMVRNHTMYAYAYTASNDQ

SEQ ID NO: 154595 - protein, 347 aa, unidentified
MRFYTKFHPYYCGIDLHARLLYVCILNERGEKVLHQKIPADPIQLLRLLKPYIGQIVVGVECMHCWYWVSDFCRELKVDFILGHALYMKAIHGGKAKNDKIDSYKIASLMRGGNFPLAYNYPSEYRTTRDLLRRRTHFMRHGASLKAHVVNTDSQYNLPSQSLNLKNVSAREGLRHHYDDPVIQRMITFEMNILDCYIRELKHVESFIEKEARDDFPVLRNIIRTFPGIGQILGLTILYEIGDIQRFASVQKFASYSRLVKCKAESAGKIYGTSGNKIGNGYLKWAFSEAAVIYLRGNDKAQRYLKRLQKRMSKGKALSALAHKIGRCIYFMLKNKQVFDENKFLKG

SEQ ID NO: 154596 - protein, 416 aa, unidentified
MWNKATRAKCSVEQHHNLTVGGFIMVVSVGIDVSKDKHDCFILNSEGEVLADVFTIPNNMDGFTCLLQKIRDCTTSQGKIRVGLEATGHYSYNILGFLLDNGLATYVLNPLRTNLYRKSLSLRKTKTDRVDARTIAAMLLSDVGLKPYTDTAYHNEELKSLTRYRFDKVKERAKLKCSVSRLVCILFPELENLVPSLHGASVYALLEEFPGAVQIAGAHLTRLKSLLTDASRGRYGRDMALDIRDAARNSIGSRMPAKSLELQHTIRLIRELDAEIEEIETEIQAMMDELHSPITTIPGIGCRMGAMILAEVGDFSRFESPDKLLAYAGLSPSTYQSGQLKNCYPHMEKRGSRYLRYAIYNATKYVCLWDPAFASYLAKKRAEGKHYNVAISHAAKKLVRLIFALEKSRQPYRLVA

SEQ ID NO: 154597 - protein, 360 aa, unidentified
MTTYYIGADVHSNSTELAIEKRNKIVARYSVPTTIPAISNVLDSLQGKKYLAFEEGPMAGWLYRNLNQKVDKLIVCDPRRNKLISSDGDSDDKIDAGKLALLLRGGYLRAVYHSDNDQRAELKHWVNLYHDRVRDAVRNINKIRARCIMFGLTIPRYALRDPAHRLKWLFKINHPALAKQLKMLWIGYDATAKQARIAKRQLSVLGKNHDIIKLWDRLGGIGLIRATTLFAYLDTPWRFKRKNKLCRYCGVGLQRAASGTDKKGRPKPARLRLPWAVNRTLKNAVLGAAISAINQKDNVFKDYYERMVQDGMITSNARHAVARKMLTVMWGMWKTNSRFDEKLLYLPSELSKPTASVSSR

SEQ ID NO: 154598 - protein, 363 aa, unidentified
MQACERAKTLFVGVDVHKDTHTAVGLSPFGEKLFELTIGNYPRDFAELIEKVRLTGQNSSLSPRIGLEDCQGFGGRLAAYLQNTGYPVTHVPPILVDHNRKKAAHPEKNDSLDAQGVAQVMIQKIDMLPVNKITQDSQIAKDIQELSLDREYLVKEQTRLKNQLHLLLHRIWNTEYRGKFKDPFAVKALRYWKKSVPKNISSFLSRNMKRKVKKLEALRLEIKELEQDMASLLERSRHTVHTVNGCGIVLSAMIIGEIGDITRFKSPAALAKYAGCAPREHSSGKTQHHRKTRSGNRRLNCAFHRLALSQISRMGNEKAKTYFLRKISEGKSKQQALVCLRRQIVNIIWMIMKHKTAYNLQKS

SEQ ID NO: 154599 - protein, 417 aa, unidentified
MDDEQTTIRCAGGIDWAKDYHALCVLEQSGRVLLERRFAHDEGGIAKMCASLAEQGVGSVAIERPEGVLVERVLEAGIVVIPIHPNQLKAARPRFRASGARSKSDSFDALCLAELARTDQHRFRALTPDSDQTKALKALTRSREDLVGTRVALANRLRAELEAFWPGAAVLFSEIDCAISLAFLERYPSPTDASKLGEKRLLGFLCGHGYSGRKSALELLERLREAPQGRAGEAEMEARREAVLALVATLKALTERIKLLEERIAKAVRAHPDGEVFLSLFLGQKTTLTAASLVAEIGDRRERYPTNEALAADAGMSPVAIESGKRKVAGFRRACDKRLRKAVATLAESTRHHNRWAKEIYLRARERGCDHAHAIRILGRAWVRVIFRMWHDGVPYDPARHGGLRRLQSAEGLPQGV

SEQ ID NO: 154600 - protein, 386 aa, unidentified
MGVIIGMDPHKRSVTIEVIDRHEKVLTIGRYGTDSAGFCEMLTAVEGFEGRVWAIEGCNGIGRHLAHRLVSDGETVIDVPAKLSARVRVFATGNGRKTDPVDAHSVAVAALRAPNLRRVQADPQLEALGMLVDRRDELGRVRTELINRIHRMLLELVPGGAKRWLSARQARAMVAGVAPAGPAVRMRLRVVGELIDDLEIVDARIKTANKELRQQVAATGSTLMELPGIGPAGAARLLADVGDIRRFATRDRFASWNGTAPLDASSGDQTRHRLSRAGNRKINRALHIMAVVQQGGYGGGRDYVKKRKADGKTQKEALRALKRRLSNTVYTRMLADQRRREEASPGGQSGATTDSCATGSTPYTGPSDRPLPGPAIHQPNELQTAP

SEQ ID NO: 154601 - protein, 362 aa, unidentified
MQEINRNLICRVGVDLAKRVYQVHAVDGFEKVVLARSMTPERFFEWCQSLQAGCVVAMESCSGAHHICRRLRPMGLDTRILPAQHVGAYRLAGARSKNDATDAAAICEAASRPHLYPVPVKSAAQQGILSIHKLREGFKEERTALINRIRGLLAEFGLVFAQSPDALHAALPDVLEDACNELPGDLRLALDRSLKHWGRLDEEMAWCEQRITQHARSDERAKRAAELLGIGPITASAVVATVDDFTQFKSAKQFGGWTGLAPSQNSSGGKTKLGGITKRGDVYLRTLLIQGAKSAVMTAHKRKDPISLWLVQLKERVGWQKAIVALANKNARILWCVMTRGDRFDPNHVPKRSVAGQEVAAA

SEQ ID NO: 154602 - protein, 406 aa, unidentified
MKHVVAFDVSMGKSTMVIYDRYRQCEYEGEITHNRYSFEKLNKTLITLTQKDGQAPDIVFEATGVYSKPLERFLGDQGYMYYRVNPLEANIQMASMRRQKTDKSDAHELAKTHFRVEREQTYQEEDYYKQMRAMTRYYDELSSEMTHLYSRLHAILQLSFPELEKLFSKRSALFLNVVQLYPHPDHVLVCSKTVIRNRLKANTRKNLSLARAEEKGIALIEAAKEAYPAISKDDIRCEQVRDYAKRIADLKEKRDQLVQKMVKLSKDKQEYQILISFPGIGETTAVRLIGELGDIRRFKNHKQLNAYVGIDIMRYQSGNTFYKDKINKRGNNKLRKILFYMIQTMIQLRKNTQNHIVDYYDKLKTQPQRKPHKVASIACVNKFLKSAYHLITHNLKYDYEKATMHQ

SEQ ID NO: 154603 - protein, 341 aa, unidentified
MEMIVRIGLDTSKSVFQLHGVDGTEQPVLRRKLRRGQVLEFFSRLPPMLVALEACGASHYWARELQSLGHEVAMIPPQYVKPYVQRGKSDAADAEAICEAASRPKLRKDFVPIKSAEQQGAQMLARVRNQFIGRRTQLANSIRGYAAEFGFTAPKGLSRLQQLMIDIQADATVPDLTKELVDALAAELARVDDQIAKLDKKLMQLHRNNEMSRRLATIPGVGPIGATLLSIKVVDARGFRSARNFAAWLGLTPKNHSTAGKNRLGVITRAGDGMLRTVLVAGATAVIADMRRRETRSWPWLKDIIARKPPKLVAIALANKLARIAWKLMVSGEPYRPASSS

SEQ ID NO: 154604 - protein, 311 aa, unidentified
MTILTSQTVVGIDIAKAEIVVYRADLETIEAVKNDRAALKRWLKTLPAQSAIAVEATNIYHLETVDLAHAMGHQVYVVDAYRVSHYRRGVGQRAKNDPCDARVLARYLTNEQSKLRLWNPPPKAYTVLKSLLHRRATLIQNHTGLMLSWADEPLLKKERTAQQKAFERSDKVIQKLLRKVSKEAGIDDNIDRCKAIEGVGELTATGLATTYMRGDFANSDAFIAFLGMDLTVDDSGKKNGPRFLSKKGDPEIRRLAYNAAMAACRSTKWKPFYESYLTRGFSKTQALVALARKLCRVAFTLMKNQGEYRSV

SEQ ID NO: 154605 - protein, 337 aa, unidentified
METMHYIGLDVHKKTISYCIKSHQGCTIDQGTIASTRPALRSWLGQRDMPWLGAMEATMFTGWIYDVLKPHATELKVAHPEMLKAITAAKKKNDRADAEKLADLLRVDLLPECTMMSSELRELRRILRYRNMIVRTAVTMKNKIAGLLMETGVSYDKRRLHGKRYFTTLINQRLEEVPESVIELLQLSRSNLELFTAIQKKLINVLRHHRAIRQRVETLMTIPGVGEILALTWVVEMGEITRFMSTRQAVSYCGLCSAQRESAGKEQRGPLSKKRNKHLQTMLVEAAKLAPRFNPQLQTVHERALRKGNRNRATLEVARRLVKYLLAVDRRGTPFVP

SEQ ID NO: 154606 - protein, 333 aa, unidentified
MTYIGIDVSKATFVVAYSSAKDSKTKTYANTASGIHKFIQTLPSEAHCVMEATGNYSMLLLYLLDKANITVSMENPLKIKNFARVMLSVVKTDEIDAKLIALYGERMQPKPFKMRSDSLMLLKQKRTVLRQLKKQLVANTNLQESMEALPFVDSISKKVLEKTIKFLQKQIKQMEEELASLANIEYKKQMSLLTSIKGIGVTLATALIVATGGFTYFDNAKQLTRYLGLSPTYQQSGTSVNVKGRINHNGDSYLRSQLYVAAFSSLRCNKECKACFDRLRSNGKPGKVAVVAVANKLVRQAFAVVTKNKPYIDGYKSVKPENTPAEGAPAARG

SEQ ID NO: 154607 - protein, 433 aa, unidentified
MLKINYMSTLFVGIDVSSKTNAVYAMDFEENKYISSSFGNNQPGADQLVTMIAQCMHKHKNLDTVLIVLESTSVYSVHISNFLSTSEVLMPYKPYVFCVNPKATSNYRKSYIGMEKTDPTDAYLIADFGRVGRTKKLEPWRGGQFIALKRLTRHRMHLSECITREKTYMVSNLYLKFSELQLLEGDDKPFGSLYGATSSSVLTEFLSPQEIIDMPEEELLAFLAGKSRNRISDLSKTSELLRKAARDSYRLDKCMYEPLNVSLASSFNCIHAYQKEIKLIEQAIEKCINGMNPNALIILQSIPGIGPVWASGILSEIGDITAFHSSDALAKYAGLYWPKGDSGDFTSEDNKMSKAGSPYLRYYLGEAANSVRKHIPEYADFYARKYAEVTKHQHKRALALTSRKFVRLVFGLLAKNQLYTGEKLDAEYNIKSN

SEQ ID NO: 154608 - protein, 382 aa, unidentified
MNNTKEKRLSQLDERSFLVGVDIAKAFHVARAIDDRGIELGKKIKFNNDIIGFKSFEFWINELMLKNKKYKIIIGMEPTGIYWFNLARYLTDQGIEVVTVNPMHVKKVKELNDNSQTKTDEKDALLISNLVKDARYSKPNLLDGVYAELRNAKGFRKILVKDITRKNNQIVNWLDRYFPETGKVYKSWDSKTLIMILKEYVFPSEIAKKTTEEIYMFLPPKSRRGVGKNKLKKLIEVAKESIGSTVGLVAARIEILSLLNDYERKNEELDYLDKTIKEMCKSLKETELIAEIKGIGIATASAIVAELGDIRKYKSPSQIIKMAGLSLIEHSSGKHKGETTISKRGRAGLRTTLYMAIISMLAHNKSFKQLYSFIIPSGQKIN

SEQ ID NO: 154609 - protein, 370 aa, unidentified
MTGTEPHAWGTDLMDDIIFVGLDVHKATVCIAVAEGGRDGDVRQLGVFENRPEILSKVVSRLSKGGRRLSFCYEAGPCGYGLHRLLTGYGHECVVIAPSLIPMKAGDRVKTDRRDALMLAKLHRAGELTAIWIPDAGHEAMRDLVRARATAVRVLVKARQHLQGFLLRHERIYRGARAWTLAYRRWLTTVRFEHPAQQIVLQDYIHAVQEAETRRERLTQQIEELLPNWSMAPVVAALQAMRGVALIVAVTVVAEVGDFRRFANPRQLMAYLGLVPSEHSSGRSVRRGGITKAGNALARRVLIEGAWTYRMSARVSRKLYDRLEPLPAAVRDIAWKAQLRLCARYRRLAATGRPKVVVTTVIAREMVGFI

SEQ ID NO: 154610 - protein, 356 aa, unidentified
MTSSIKYVGMDVHKESITMAVRNATGKIVMECVIETKANTILQFFDGLRGDVQVTFEEGTWAAWLHDLLKPQVTKLVVCDPRRNALLLDGNQNDRVDARKLSDLLYMNKLKPVYHGDHGLRTLKELVRSYLTITKDLGRVMTRVKAIYRSWAIPCSGKQVYAARHRAEWLGKINEPGVRQRADFYYQQLDALRSLRQTVRRDLLAESKKHKAWKRLCQIPSIGPIRAAVLLGILQTPHRFRTKRQLWTYSGLGIEVHSSADHEVAQGQLRRKKKPVEIRGLNQNCNHDLKNLFKGAAVVASAKPGPFEKFYAALVAKGMRPEMARLTLARKIATIVLIVWKKGVCFEANHLKPQTA

SEQ ID NO: 154611 - protein, 431 aa, unidentified
MMEGDDVLGVGIDWSEEFHLVALGTPGDGVIEVVRVEHTPKAVDALAARIATLEPDPAEVRVVIEARHGMLVERLVDAGYVVVPVNPDLVARRRGPAKKKDDTEDARIACLIALDRFERLRPLIPHGEIAGELRAIARDDERAARDERRLLNRLRQDLITTFPAALQIAGDDLGAPTFLRLLERWPTAEALTEVPHDQLADFARSHKHGWPERFVDKVATALAGDHFIPRDYLVRAKADTIRLAAVQLLVIGAQRRSWEKRMGHLLLGAPRRGRAKQPREEEQGQAFPGGEIYLSFPGLGDRLAARIAGEIGDHPEQFETPNSLQCYAGKAPVTRRSGKSELVVACRLAHNRFLGNAVQQWAFTSLTRSTWAREFYDTQRARGKGHQAALRALGNRWLEVLWHCLARGIPYDENVHIANRNRALGATTKAA

SEQ ID NO: 154612 - protein, 417 aa, unidentified
MMETEREVVCGADIHKKFLLATILTKGGQKFQDRFDSNFEGLLNFRQWLLDHGCQRLAVESTANYWLPIYFVVEKDVEFVLANAYQIKHIPGRKTDVLDSEWIAELCLKDLIAPSRIFSEDDRDLRAMTRTRENYVKMRSQTKNRIHQELESACIKLSSVLSDIFGKSGIHIIRGILGGLSIEDILDSIPSKKLKAKREEIQDAIRANISPVQVDLISLLLDSVDFLTREIASIDKQIQTLISKSQGDLKIAMSIPGMGFTSASTILAEIGCFRDFKTGEKLAAYCGLVPSVYQSAGKLITGHITKHGSPHVRRMLVEVAHAISRTKADSKLKRFYFRIKSRHGAKVAIIALARKVICILHHLIVNQEMFEDETANKSKREKTGRSSSSPELNIADAIQILVRAGYLVQKRSETEGG

SEQ ID NO: 154613 - protein, 302 aa, unidentified
MNGIGIDVCKAMLDVAIHRGPFARFHNTPAGHHKLLAWLANQRAGQIVLEASGGYEQQVLDALFVAGHHVVRADARRCHAFAAAIGLPAKTDRLDAANLACMADTLELRPYQPMEPWRRKLREFVRARQQLVDLTISAENQLEHVTDTILRRALQANINQMKKNCVRLEKHIAEQVRQQPQLQAMRAFKGVGATLQAVIASYLPELGTLDGKAIAKLVGVAPIAHDSGSLRGVRQIRGGRIEVRNVLYMACLSAIQHEPRIREFYRSLRARGKPGKVAVVAAMRKMIVILNARVREARAVPV

SEQ ID NO: 154614 - protein, 476 aa, unidentified
MARDPVREIIDITVWPDLQPTGEGMDNQLGNSNGLSLERIELSAAGIDVGATEIFVAVPPDRDQQPVRSFKTFTDDLRQMAAWLVQCGITTVAMESTGVYWIPPHEVLEEAGIRVCLVNSKHVKHVPGRKSDVSDCQWLQYLHSVGLLRASFRPESEIRAIRALSRHRSSLIEIASVHVQHMHKALTQMNLQIHHVLSDITGLSGMAIIEAIVAGERSPVRLAALCNQRVRSDQETVIKSLVGNYRSEHLFTLKQSLTAYKHYQELIADCDREIERLMRLLNGKIDPPPSSPATPPDPRFQKRSKNQFRFDMGSELNRVFGVDLTTIPGISGLTAHTLLAEIGPDLSRFANVAAFASWLALCPANKKSGGKVLSSRTRQTNSRASHALRIAAQTLARSKSHLGNFYRRMRARLGGPQAITATAHKLARIIYHLITTGQHYDETVFVREDQKQAQRQEKRLRKQAKSLGFQLIPIAA

SEQ ID NO: 154615 - protein, 337 aa, unidentified
MNVTLIGIDLAKTVFQVCGVNQAGKPVFNHQVRRNRLVEKLLQYPDAAIAMEACSGSNHWGRTLIELGFEVLLIPPQHVKPFVKGNKNDRNDAFAITEAARRPNMRFVQPRSLAQTDILVLHKLIDRKIQSRTALINQIRGFLNEYGIVVSPGKERLLKALPELLEDAENGLTGPAREVLHSLLEEWREANRQIQAHEAKLKQAAKQLEPARRLMGVKGVAVKTATAVVAYAGDGKAFKSGRHFAANLGLVPNEHSSGGKQKLGGITRRGNNYLRRLLVQGAWSVIRYAGQTTDRLSRWAAKVMERRGKHKAVIAVANKLARILWAMLYHQTEYRAV

SEQ ID NO: 154616 - protein, 417 aa, unidentified
MAREIKSAQTRDELYYERCCGIDVHKNMIVACFRNGRKQTVKEFGTQSKELRELASWLLDGGCEMTAMESTGSYWKPVYNILELLGVEAMVVNAQHLKTVPGRKTDVGDAEWIAKQLSAGNLKASYVPGREQRELREVTRYRKSLTEERAREINRLSKMLEGANIKLSSVVSDVLGKNARRLLTEFSEGADITQETIGSYLDTCMAGKAGALAEAMDGMMSRTQRKLIKAVLDHIDDMTRRIADLSKIIEDEMSQYDDAIKRLDKVDGIGEQSAQVILAEIGLDMDKFPTAGHLAKWAGLCPGNNESAGKRKGGRVSHGNVTLKTTMVQCAQAAVLKKGTFLRAQYDRLIVRRGKNRAKVAVAHSMIIAIWHMLKHGTEYKDLGGDYYNRFNKEKKITMHLKKLTELGWSPPVQATA

SEQ ID NO: 154617 - protein, 418 aa, unidentified
MKVVFPTCCGVDVHKSFLVATIIKTPENSLQPSYQKRRFSTFNSNLNRFADWLHENDCLDVCMESTGKYWVPVFNILEKRGIRVVIANPKWVKAVKGNKDDTKDSKWIGDLFRIGLVKSSFIPDKDIRILRELTRYRYKLTSMKSSEKNRFQNAFTVCNVALDSVVSDMFGKSATAITDYLTSDKNFNAKHCVSLLQGSLKKKADDVLLSIEGYEITAEQKTRIGIIRDHLRYIDTLIDRVDACINTLVDKYEGYIVLLCTIPGVDRSSAITILSEIGVDMTQFGSSKRLCCWAGLTPGNNESAGKKKSVRISRAGVYLKPALVQIAHAAVKDKLSPYYALKYEQISKHRGKKRAIIAIARMILTAVFVMLSNLEEWNPVDLYRVDMPEHLKEKQLSKAVKQAIHFLKAQGLTVLDSA

SEQ ID NO: 154618 - protein, 311 aa, unidentified
MFIGIDVSKARLDVAMRPSAEKLSVSNDEVGIQALVKRLSELKPVLIVLEATGGLERSVSGTLGSAQLPVVVVNPRQVRDFAKATGQLAKTDRIDAEVMARFAEVIRPPLRPLPDEVSLELRALIARRRQLIEMMVAEKNRLSAASKAVRKRIAAHIRWLETELDRADKDLDHSIRQSSIWQEHEDLLRSAPGIGPVVSRTLLAELPELGRLNRKQIAALVGIAPLNCDSGTFRGRRGIWGGRATVRAVLYMAALVASRRNSVIRDFYKRLRDKGKAPKVALVACMRKLLIILNAMIKHKTRWSEIIPQTS

SEQ ID NO: 154619 - protein, 348 aa, unidentified
MHVYNKPHAYYCGVDLHARTMFTHILDAHGDTVFAKDLAADPDVFLHAIAPYRHGLVVGCECMFAWYWLADLCEDHAIPFTLGHALYMKLIHGGKAKNDRIDAGKIAALLKGGMFPMAYVYPRAKRATRDLLRRRSHFVRHRAQLITHITNTNSQYNLPPFTRTLSRASNRADDLAERFSDASVRCNVQADLDLIDAYDAKILELERHLIKTARVDDAPTLELLKTIPGIGKVLSLVLLYEIDDIGRFPEVGNFLSYARLVRCEHESAGKKKGSGGKKIGNAHLKWAFSEAACLMLRAVPAVKKWLSKQERKRGKRKALSILEAKIGRCVFEMWRQQKPFNAKRFLGQ

SEQ ID NO: 154620 - protein, 393 aa, unidentified
MICVGIDVAKDKHDCFILSSEGEVLADVFTIPNNRDGFETLLQRIRSCALPAGKIKVGLEATGHYSYNILGFLLDKGLPTYVINPLHTNLYRKSLSLRKTKTDRIDARTIAAMLMSDVDLKSYTDIAYHNEELKSLTRYRFDKVRQRAKLKQSVSRLVNILFPELEALVPTLHMASVYMLLSELPGAQQIATVHLTHLKTLLKEASKGHYGRDEAVEIREAARRSIGSYMPAKSLELRHTIQLIRELDKEIDEIEASIEGIMNSIQSPITTIPGIGYRMGAMILAEVGDFSNFDSPDKILAYAGLSPSTYESGKFNATGAYAHMEKRGSRYLRYAIFNATKYVCHWDPTFAAYLAKKLAEGKHYNVAISHAAKKLVRVMYSLQKSGQAYRTAS

SEQ ID NO: 154621 - protein, 355 aa, unidentified
MERRTAMQHYAGIDVSLELLSVCIVDAKGKIVKEAKVGSDPDTLVAFLRGLDLAIERIGLEAGPLSQWLHAGLTSAGFEAVLLETRHVKAALSAMTVKTDRKDARGIAQLIRMGWFRAVHCKSAGSQEVRALLVARKLLLSKLLDVEFSIRGILRGFGLKMGMVTRKRFEARVRELYAGHAMLEQICSAMLTARSALQTEYAKLHKALLVIVRKDEVCRRLMTTPGVGPLVAITFKTGVDDPSRIHKSKAVGALFGLTPKKYQSGETDVTGGITRAGDEMVRTALYEAASVLLSRVTRFSALKRWGMDVAKRRGTKRAKVALARKIGVILHRMWVDMTSFRWTKGAPTTMRLARV

SEQ ID NO: 154622 - protein, 386 aa, unidentified
MPHPNDLSRSLVAFDQDSTLIAIIEMSQSSWLVAGIIPGVERHPLKKLDPNENTLLQVLYRWRAEASKTGHAIMRIAVAFEAGRDGFWLARWLRARGIETHVIHPSSVAVSREHRRAKTDRLDTGLLKRVFIGWLRGEPEHCRMAAIPTIEAEDAKRPNRERESLVGERTRIVNRMKSCLARFGIRNFKPTLRNAPERLVTLRTPERVCLPPNTSAEMRRDMARLSFVMDQIKAIEKARLQRLEQTAEEGPHAMVRLLARVLGVGIETADMLVHEVLSRNLRDRRAVARYAGLTGSPDESGSRRRERGLARTGNARVRRGMIQLAWRFLMFQKNSALAQWYRARTEDARGKRKTMIVALARKLLIALWRLVTTGEVPAGVALRTTP

SEQ ID NO: 154623 - protein, 350 aa, unidentified
MIIIGCDYHPGCQQIAYVDTETGELQERRLQHREEAEKFYRDLAAQGLKVRVGMEASGHARWFERLLAELNVELWIGDAAEIRRKRGRKQKTDRQDAQHILRLLLKDDFPQIWVPSWENRDLRQLLWHRHRMVQARTRLMNQLQAVALNEGLRSKKRLWREAGRQQLEAFRLAPWASRRRQDLLEFLDRLNPTIAELTQAIEREAEKCPEARRLQTHPGVGALTALAFVLIIGKADRFQCGKQIASYLGLVPLEDSSGSRRRLGHITKQGNSLVRFLLVEAAQVTVRSDPGWRSKYHHLMMRRGRKIAKVAMARRLAVRMYWMMRKEWNYEQLKKFGSHAGQLVSGDGVK

SEQ ID NO: 154624 - protein, 360 aa, unidentified
MKKVSKQMQKMEAADKPEMTVGLDLGDRYSHYCLLNADGEVLEEGRMQSTEAALRHHFEGEPRLRIALECGTHSPWVSRLLKKLDHQPIIANTRKIRAITSSDSKNDKNDAELLARFAAHDPRLLSPIEHRSPERQSDLNLVHVRATLVRVRTTLVNALRGLVKSAGARLPACSTESLPTRAMALIPAPLLDAATPLIEQIALLSTQINGMDKQIEKLASKYPEIKLLRTVPGVGPIVAAAYVLTLDSPDTASNRSAGAFLGLRPAQSQSGDADPQKRISKAGDKCLRSLLVQSAQYILGRFGPDSALRNWGLKLAASGGQRGKKRAIVAVARKLAVMLHSMWRNGQRFQAFPQPATVAA

SEQ ID NO: 154625 - protein, 416 aa, unidentified
MNAVGIDVSSRKSTVAVLRPLGEVVCLPFDVTHDIAGLASLVEKLKAIDGETRVVMEHTGRYYEAVAKALHEAGLFVCAVNPLLIKEYGANSLRRVKTDKADAVKIARYALDNWADLRDFTPMDAIRYDLKTLNRQFQLASKQRTASANNLIALLEQSFPGIRKCFDSPVRSDGTQKWVDFAHSFWHVDCVRKQPFPAFCERYRKWCKRHAYLFKLSNAEEVYALAKRAVVLTPKSKVVKVLVQEAANQLISISRSVEVYRAEMDRLAAMLPEYPVVMAMYGVGKSYGPQLMAEIGDVRRFERKQALVAFAGIDPMPNQSGDKNVRSNKSSKRGSPYLRKTLFNVIRTYLQCAPQDEPVFQFLNRKRAEGKPFYVYMLAAANKFLRRYYAKLRDYFASLDTLQPVAPIPTILKATL

SEQ ID NO: 154626 - protein, 340 aa, unidentified
MQITTIGLDIAKNVFQVHGIDAAEKVVVRKQLRRGQMMKFFAALPPCLIGMEACASAHYWARELTKLGHEVRLMPAKDVKAYVKRNKNDAADAEAICEAVGRPRMRLVRAKSAEQQGRLMQHRARDLLLRQQTQVINALRAHMAELGIVAAQGREGLKQLLKNIADEKDARLPIDARASLIVLAAQLQALQTMIGSIERRIVVQHRANEASKRLECIHGIGVIGASAITATVNDPGAFRSGRDFAAWIGLVPRQDSTGGKQKLGPISKRGDRYLRRILVVGAISVLRRAKLNPEKYPWLTQLLARRPFKVVAIALANKMARIAWALLANGSHYRPRLATT

SEQ ID NO: 154627 - protein, 391 aa, unidentified
MILVGVDVAKDKHDCYIMTSEGEVLFKSFTIANNMEGFNQLYEKILSVIDNFDNVKIGLEATGHYSYNILGYLLDKGLTPYVINPLHSNLYRKSLSLRKTKTDKVDSHIIASMLMSDVSLKPYSNTLYHNEELKSLTRYRFTKVQERAKLKISISRLVTILFPELEKLVPTLQMNSIYALLYEFPSAHAISKAHLTRLTNLLNTTSKGHYTKDKAVLIREAAKNSIGSNMPAKSLELKHTIKLIKELTSEINEIEEEIKIIMNKINSPILTIPGIGLSTGAQILAEIGDFKNFSSPDKLLAFAGLSPSTYQSGNMYSSNTKMEKRGSKYLRFALFNAAIYVSYWEPTFSQYLKKKRVEGKHYYVAISHVVKKLVRVIFHLEKTNERYSTVV

SEQ ID NO: 154628 - protein, 424 aa, unidentified
MKVTFQTCCGVDVHKSFLVATIIKTTGGIEPSYQKRRFSTFNNSILEFKKWLLENECLYVCMESTGKYWIPVFNLLEDEINVTIANPKWVKAVKGNKDDTKDSKWIGDLFRLGLVRGSYIPCKKIRILREFTRYRYKLVSCRSSEKNRYQNALTVCNVALDSVVSDVFGKSSTSIIDYLLEQSGTSIDHEMIASKLLKRLKAKEDAVIESIEGYQMTDSQKYRMHLVRAHMDYITAAINDVDSEIESLISSDPDYQNAAELLCTIPGVKHDSAITIISEIGIDMSQFCTSKRLCCWAGLTPGSNESAGKKKSVRITRAGVYLKPALVQCAHAAVKSNKSPYYKKKYESLVKRRGKKRAIIAIARMILTAIFQMLTTGETWNPCDLYKIDMPEALLEKQKQKAIKQAQKLLIREGLLPPTEPIAS

SEQ ID NO: 154629 - protein, 457 aa, unidentified
MMETKRRREQRSMLPVHPDAAAIDIGATVHVAAVGPARDPEPVRSFGTFTGDLHRLADWFAQCGIKTVVMESTGVYWIPIYEILEQRGFEVRVVNARDAKHVPGRKTDVSDAAWLQRLHEFGLLRGSFRPHGAIAALRAYLRQRERLLDYAAAHIQHMQKALTQMNLQIHHVISDITGATGMRIIRAIVAGERDPDTLASYRDIRCHSSAETVRQALIGNYREEHLFALAQAVELYEVYQAKVATCDEKIEGVLERLKQPCRAPAKPLRAARHKTRQPNAPAFDARGALYAVLGVDLTQIHGLGPYLALKLISECGTDLSAWPSAKHFTSWLSLAPGNKISGGKILSSRTRPSGNRAAALLRLAATTVGRTETALGAFYRRLSARIGKAKAVTATARKIAVLFYNAVRHGMDYADPGASYYEERYRQRVLANLQRRAKALGYVLQPTEIKVVSTAVS

SEQ ID NO: 154630 - protein, 463 aa, unidentified
MKHNSKGPRARKKEHASIPLFERIQPDAAGIDCGQNSHFVAVPPERDPQPVREFRTFTADLHRLADWLVQCGVKTVAMESTGVYWIPLYEILQERGFEVLLVNARDVHNVRGRKSDVKDCEWLQQLHSVGLLRPSFRPAAAIVPLRSFMRQRETLVEEAATRIHRMQKALTEMNLKLHTVLTDLTGQTGLTIVRSILAGERDPERLAAHRNYRCHASHAEIVAALTGNYRAEHLFALRQNFTAYEFLLKQIAECDGEIEALLATLAAQQAPPSAPLPAARRKRVSKHQPQFDIRGPLHRLTGGADLSQIDSIGPQAALQIIAETGTDMRRWPTEYHFASWTTLAPNNKISGGRLLSSRTPPSANRVAIILRRCAMSAGKTSTALGAFYRRLAVRIGKAKAITATARKLALLVYRVLSGQLVYNDPGADAYHQLNRTRELKSLRKRARLLGFHLVDQTTGEVTT

SEQ ID NO: 154631 - protein, 471 aa, unidentified
MAQEQCNIRKKSKQYRRRHGRRMPRNLEVVNPDAAGIDLGSAIHYVSVPDDRCEEPIRHFGCYTPDLQAMAKWLLECGVTTVVMESTGVYWTPVFRVLEQQGLEVLLVNPKHVKYVPGRKTDVADCQWLRQLHTFGLLKGAFVPPNEVAEMRALWRHRKNLIEHKSKTILQVQKVFTQMNIQLHVVLSDISGVSGMKIIRAILRGERDPNVLVRLVNKQVKATHEEFVAALSGHYSDSQLFILGQLMAQYDSLQQQIQECDAQTEAYLSQFESKADVKSLGLHPKKSKRCKSRKNEPHFDLRMELFRITGVDFSRIDGVDCLTAFSVLSEIGFNVDAFRTEDHFVSWLGLCPNNQITGGKVKRRSTRKVVNRAATALRVAAQSLCRSKSYLGALYRRFAARLGPSKAITACAHRLARIIYRCIKYGYEYVDKGQQHLEQQHLERSLKSLKKLANKHGFILVNAETGECVCA

SEQ ID NO: 154632 - protein, 338 aa, unidentified
MNEVTTIGLDLAKYVFQAHGANATGKVVFRKQLRRNKMLAFFAEQPPCLVAMEACSGAHYWAREIGELGHEVRLIPPAYVKPFVKRQKNDIADRSARRPRPTMRFVPVKSEEQQASAVVFRTRDLLIRQRTQMINALRGHLAEYGLIVPKGTAHVTQLVEWVTDPKTDVPAAARFALDILIKTMATLETQIKKLDREIVRRARKEKDARRLMTIPGVGPMTATALLALAPAAASFRCGRDFAAWLGLTPLQRSTGGKQKLGATSKMGERTLRRLLIIGATAVVQHARRRGASPSSWLGRMIARKPPMLAATALANKMARIVWALMANGGVYKAPTVAA

SEQ ID NO: 154633 - protein, 411 aa, unidentified
MELLHPRCAGLDVAKDEVVACVRVPDGRGGRQQEVRTFQTFTSGLEALADWLAAEGVTQVVMEATGQYWKPVWYVLEERSFQLLLVNARHVKILPGRKTDVADAAWLAELLEHGLLRGSFVPPAPIRELRDLTRYRKRLIQAHASEGQRIQKTLEDAGIKLDSVAADVLGVSGRAMLEALVAGERDPQVLAELAKGRLRAKLPQLRQALRGRFGAHHALLIRLAMAHLEQLEASIAELDTHIDRVLAPFAQARDRLDTITGVGKRAAETIIAEIGTDMTVFPTAGHLASWAGRCPGNNRTGGKRRSGKPTKGNRWLGEVLIECAWAAARSRDTYLSAQYWRLARRIGKKKAAVAVGHSILVIAWYLLTDDCDYQDLGGDYFVRRDTDRQRQRAIAQLQALGYQVTLEPVAA

SEQ ID NO: 154634 - protein, 488 aa, unidentified
MKSIFQKTCPAIQKVFESAEQPDRVVIVPIDYAKKTHMALICNGAGHQLRKPFPVQNNPEGVSFLEDVIEGVRRKHGLQAEHVILAGEDGGSFTFNFIHALCVRGRLVIGVNAQDAKAERKQMAASTDKIDLQGIVSLILKREGREVQSVYTQATMLRGLTHHRDALVRSQTASSLRMHTLVDQLCPGFLDSRQSGVSPFTDASLWLMSERFSPAQLRARRTPALIRKLRDFQVDEPEETARQIKALANSVLPPPEALSQSLQFNLCREVEVYQALQQSVHRSTADIARHLAATPGAMLTTMPAVAIVSAAGLYAELADPARRRALPRMAAYAGIVTRLKQTGGPEKEARSAGRHRRGNKTLNNILYMMIRQLKQNGHPELREDYARRLEAGQDVRFTMARRMLRIVMHLIEHNAFFLPPSLLEDPNPDRAREYYQKSWKGILIKWRNAGAIRQAFAENAPLEQWRRMLNERYDLRLSNVSPQHGQTT

SEQ ID NO: 154635 - protein, 355 aa, unidentified
MNQEKYIGMDVHQATISVAVMDSSGKLIMECILETKATTILEFIAGLRGTLSVTFEEGTSAAWLHDLLKPHVSHLVVCDPRRNALLKDGSKSDRIDARKLAELLHANKLHAVYHGEHGVRTLKELGRSYLTITKDLTRVMSRIKALYRSWAILCSGATVYAPRHRDEWLAKIPHPGVRLRAERLYQQLDVLQPVRQEARRDLLAESHKHPAVKLLRQIPSIGPIRAALLVALLQTPHRFRTKRQLWAYSGFAVETHDSGEYRYVRGKLQRNRERITVRGLNHNHNHDLKNLFKGAAISASTRPGPLCDFYVALVEKGMRPTMARLTVARKMAAITLAIWKKGVDFDAKQLNRQAA

SEQ ID NO: 154636 - protein, 376 aa, unidentified
MIKTDVQYPTVHLAIELSRSVWLVAARLPGVEKPSLHRIGGGDTAALLALAETLRARAAAKLGAPVRVACCFEAGRDGFWLHRLLTAEGLAAHVLEPTSILVSRRARRAKTDRLDALGMLRVLAAYLGGDRQVCSMVRVPTPEEEDAKRPHREREDLVRERVRLENRIAALLATQGVRERPSLRNWERDLAALRTGDGRPLPPHLRAELDRLRRRLVLALELTREVEAERDAALAAEPRDAVGRKIAALCRIRGVGPNFAAVLTREVFYRAFANRRQLAGYVGLTPVPHQSGEADRDRRISRAGNPRARTTPIQLAWLWLRYQPDSAPARWFRDRVGALRGRTRRIAIVAMARKLLIVLWRYAETGLVPEGVEVAA

SEQ ID NO: 154637 - protein, 316 aa, unidentified
MPDQRDNAVNVGIDVGKHQLDVAIYERDLHFSVPNDAQGIRKLLGRLGRYTLARIVVEATGRREYELVLAAAERGFPVIICQPIKVRRYAGALGLQAKTDKIDARLLADYAATLQPEVRPLALGNIRKIKDMIARRRQLIEISTMEKNRLDVMPRNLRADIRRHIRHLQAQIEKLDRLVAELVEQVDEWREKRDLLLSVPGIGSQVVNTLLADLPELGTLTNKQIAALVGVAPFNRDSGATRGKRRIRGGRASVRTILFMAILTSVQHNPVIRGAYQRLVAAGKHKKVALTACMRKMITILNAMLRDQAPWRVEHA

SEQ ID NO: 154638 - protein, 339 aa, unidentified
MKYTPVGFDIAKHLIQVHFIDENTGEVVDKQLRGRDFLEYFSNREPCLIGMEACGGSQHWARELTKLGHNVRLLQARFVKAFVMGNKNDVMDARAIWMAVQQPGKEIAVKTEEQQSVLVLHRTRMQLVKFRIAQINALHGTLLEFGETIHKGRAAMEREFPEALERMKERLPPYLITVLKNQYKRLNELDSLIEDIEKQLASVAKQNETCKRLLDIPGVGPLIATAAVATMGEASAFKSGREFAAYVGLVPKQTGSGGKIRLLGISKRGDTYLRTLFIHGARAAALLTKEPGPWITELKKRRPASVAIVAMANKLARTVWAIAAHDRKYDRNHVSIRPY

SEQ ID NO: 154639 - protein, 333 aa, unidentified
MKNYLFYVGVDVSKQKLDFNILDVSSFKSEHFVIENDIKSISAFVKNLKKKIDVKQTLFCCENTGVYTNHLSSVLVNLQLDLWIVPAIEIKRSKGISRGKTDKSDAKDIAYYSYRNIDKLKLFTLTDTDIQKLKILYTEREKMLKSLLLLEATKENKEFINKEVFKEVSNINQALINTIKNSIRKIESKIKEVIKSNHQLNKQAQLIKTIPGIGEQTSIYLIIATKGFTTFKNWRQFACYSGVAPFEYSSGSSVKGRTKVNHMADKKMKSLLQMCAMTTLKYDPQLKEYYDKKKAEGKNSMLVLNNIRCKLISRVFAVINRETSYINTYKFAS

SEQ ID NO: 154640 - protein, 377 aa, unidentified
MDQQTGEIISQPVSFSNDKEGFDFLVQKIKSYPKDSILIGMEDTGHYHFALLKYLLDLQYTVALINPKTTDFNRKMQGGITKNDKLDTINICDVLDTPERKKQYRITKVNSFDLYEQKQLTRHHHNLKEEENVYKNRLQKCIDIVFPEFNKLFNSKYGIVYMNILKMFGSAENIANTDIRTIRKCFEIEGRGNRISLTPERLKECARSSIGISSSAEVIQIKHLTAQIELIEEQLTEIDKKIEEFSIQNNSPILSIPGISHFSGTSILAELGDISNYSKPSQIIKFAGVAPLHYESSQFNAQHTAITKKGSKYLRKTLYQIILPVIRHNPVFNKYYQLKISQGKGHRCAQGHCVRKLLRIIYHLLKTNQQFDPQLLR

SEQ ID NO: 154641 - protein, 377 aa, unidentified
MKAITLYLGLDVHKDSITIAIAEPGPKGEIRLFGTITNDVDRLEKALSRIRKAHPGALLEVGYEAGPCGFVIARRLKQLKVPCLVAAPSLIPRQPGSPFKTDKRDACAIARLLRAGELTAVYVPEATDEAIRDLCRARTDAVDDHRRCRHRLKAFLLRHGYRYQGKANWSQPHMRYLRELVLPHPAMKAILEEYLQGIDAAHQRVQRIEASMLSLLQSWRLQPAVEALMAFRGFQLVAAMITVSELGDIHRFEHPRQLMTYLGLVPTESSSGPRQRQGAISRCGNGHQRWLLTECAEHYALPPKISKELSRRQQAQPDSVRALSWKAQHRLHLRFIKLLGRRLQRNKAKVAIARELCGFIWALLRAQDCYKQPGNAT

SEQ ID NO: 154642 - protein, 378 aa, unidentified
MSNCTRYLGLDVHAETITAAIAEGRGRIRSLGKFPNRPEAVRKLIEKLGGGKNLKVCYEAGPTGYALYWQLTKLGVDCEVIAPSLIPKKAGDKVKTDRRDAEKLAQSYQAGDLTPVWVPSPEHEALRDLVRQRAAAKADESRAKHRLVKHLLRRGLREPEESGAWTHPWWRWVQSLKFEHEAQQVALADCIAEVLHMGERLARLDKAIDRLVQSAPAHMRAVIEALQALRGVAKLTAVTIVTEVGTFKRFRRPTEMMGYTGFVPSEYSSGGRESKGRLTRTGNAHLRHVLGEAAWHARHRPWLNLRMKKILPTLPAGVAEIAWKAQERLHRKFTKMTYCRKPAGKVAAAVARELVGFIWAIGTLVESRLDDNSKARAA

SEQ ID NO: 154643 - protein, 346 aa, unidentified
MLYAGLDLSRKRVDVCLLDEDGKRIAVTAAPPDADGLRGLARRLAGHGQPIYAALESMNGARFVHDELERYGWHVELADAQKVKGLAPLAAKTDRIDAYVLAELARRDLVPAIWLPAPGVRAERELARFRLHLVRHRAALKARIHASLIAHGHPCPVSDLFGTRGRALLDAFELPKAWRASTEASLRVIAHLDTEIDTCERELRRQGADHPCVPLLMSAPGIGPVLAYTIAAEIGEIERFSGPKKLCGYTGLCPRVYQSGASDRRGPLAKNGPKYLRWALIEAAVHAARHPAYAAHYQATRQRLGRQRGAKVARVEVARKLAEAIWYMLTREQTFAPQGPTAALVA

SEQ ID NO: 154644 - protein, 387 aa, unidentified
MSQTIAAAIPAAVDYERTLVLAIEVSNKSWVLAAQVPGLPHTKAKRTIDPEAEALLAAIAAYRARAAATGRSIERVIAVYEAGWSGFWLARWLMRHGVEVYVVQPSSVPVDRRIRRAKSDGIDSEVLLRTLLAWLRGEPRVCSMVPVPDEADADARRCVRERSELISERIGLTNRIGAILATLGVSDYNPLLRNRGRRLAELRTALGEPLPANAHAKLKRLLARLELVLTQIAELERERDAVVETEASDGASKMIQQLTALRGIGVQSATVLVREAFVRRFANGKALGSYAGLASSPYSSGGIDREQGIGKAGNRRVRTVMVELAWLWTRYQPGAAQVCWFRERVVSTGRRVRKIMVVALARKLLIALWRFVIDGVVPEGAVLKPAA

SEQ ID NO: 154645 - protein, 414 aa, unidentified
MSKQDSQKRYFGLDVHKAYIMVAAVNADQEVVLKPRRVTFARLENWIDKTLRPSDEVVLEATTNAWHVHDLLAPHVAQVIVAHPYHVKLIAAAAVKTDKRDALALAKLLAAHLIPPVWVPPQHVRDLRAIIAHRERLVSQRTAAKNRMHSALHRHNLTPPQGDPFAPNHQAWWDDLSLPASEKLRLKQDRSIINYLSPLITETEDELTRLATDPHWAPLLPFLLQITGVGLVSAMTILSAIGDISRFPSAKKLVGYAGLGGRVHSSGGKHHTGSITKQGRTELRASSIEIAWTAVKFNPYWKEEFDRLKARIGVKKAIVAIARKILVSIWHILTHRQADIHATEDKVAYKLLLFAWQLGPQHRPDTYSAPLLTRFFLTQLDLGHDLEAISPGGVKRLIPPASDLEALPPPFADR

SEQ ID NO: 154646 - protein, 366 aa, unidentified
MLQEAELSGQADSENDLGGSSEIMYFIGLDVHKKTISYCVKDAAGRVYQEGKVGSSRRELDVWIRTMPQPRMIAMEATIFTGWIYDHLLPHADKVKVAHPLMLRAIAAAKRKNDRIDAGKIADCLRCDFLPECHMASTEIRDRRRTLRYRSLVVKQMVQMKNRVSGLLMETGVNYNKQRLHKVGYFEELITTNEDVHESIRPLLKLSREMISRSQKLDYALISSLERDPLLKERLRRLRTVPGVGPITAVTWALEIGDFTRFTSNKQAISYCGLCGDEKSSADKVLRMPISKQRNKHIQRVLIEAAKLAPRESPDLAMIRARELEKGNPNRATLAVARKIVIYMLAVERRQQDWVPAEQFRCTAAA

SEQ ID NO: 154647 - protein, 335 aa, unidentified
MEFNYFIGCDVSKNELDFAVMKGKEFLFHQEIENTPSAVKYFIDGLLKKEGFNIKDAVICLEHTGIYNNHLLCYLHKKQANICLEVASQIKNSMGNVRGKNDKVDAIRIAEYAYKNRDGLRLWTPKREIVTELSHLAALRSRLINAKKQLSMPLEESSSFVSKKILNQNKLLCNKALKGIEDDLKSVEETMEKVIKMDEELKRLFSIITSVKGVGKITATQIIITTNEFKDIKNPKKFACYAGVAPFVRESGLMKGKGRVSHLANKKVKTVLHMSALVAINHNSDLKKYYERKVKEEKKNKMLVINAVRNKLILIIFACVNQNRKYEEEYIRAVA

SEQ ID NO: 154648 - protein, 483 aa, unidentified
MKPKQLEKNKKANCRPTQNNWHEMNRKQQREMTRKIQSEDLSLEVVHPDAAGIDIGNEFHYVAVPPTRDSQPVRRFGCTTSELKEMAVWLKQCAIRTIALQSTGVYWIAVYDILEEAGFEVYLVNARETKNLPGRKSDVQESQWLMKLHTYGLLRNSFRPSQEIRTMRTYWRQRNDLVRAAGRHIQRMQKALTQMNIQLANVLSDVSGMTGQAIVKAILAGERDPYQLAALRNWRVKSSEEEIARSLEGNWQEDLLFLLQQEQDGYEFCQKQMAECDQRLQRYLQQQEDRRHGASLPQEKRKERLRKKKKGNAPQFALRAELFRMTGTDLTQIDGIDVTTTMTILSEAGWDMSKWKTEHHFVSWLRLCPDNRVSGDKIIGKGRLPTNNRVTNALRMAASTLRLSNTYLGAQFRRLRTKLGAPVAIKAMAAKLARLIYRMLRYGMQFIDRGAEFYDAQHRKLQINYLKRKAANLGFQIIEAPAA

SEQ ID NO: 154649 - protein, 411 aa, unidentified
MRLFVGDDWAEDHHDVEVMDEAGRVLAKRRLPEGVAGIAQLHELVGRYLPGDAEDAEVAVGIETDRGPWVAALIAAGYTVYPVNPLQASRYRERHGVSGAKSDTGDAHMLADMVRTDSHQLRPAAGDSPEAAAVKVVARTHKTLIWERTRAVQRLRHQLREYFPAALEAFEDLDAPDTLELLGKTPDPARAAKLTRAQIAAALKRARRRGIAEKTDAILAALCGEHLGLPAPLTAAYAATARSLIAVITTLNEQVKILEEQVREHFGRHPDAEIYQSQPGLAAILGARVLGEFGDDPGRYADAKSRKDYGGTSPITRASGKKKVVIARFIHNDRLIDALMAWAFSALNASPGARSYYDQLRSKGIEHNDALRRVANRLVGILHGCLKTRTLYDEATAWGHRENPGQSRVAA

SEQ ID NO: 154650 - protein, 343 aa, unidentified
MQVTTIGLDLAKHWFQVHGVDASGAVAIRKKLRRSEVLGFFQSLPPCLVGMEACATAHYWARELTKLGHTVKIMPPAYVKAYVKRNKNDAADAEAICEAVGRPSMRFVPVKDTEQQSVLLLHRARNLLVRQRTMLVNALRAHMAEFGMIAPQGLRHVELLTRIVAHEQERLPELARQILQLIVDQLHETMARVRAIELRLTQWHRQSQVSRLLATVPGVGIMGASAIAATVADPSLFRSGREFAAWLGMTPRQNSSGGKERLGRTSKRGDKYIRSLLIAGAVAVLRHARNRPTRDGVWVRALLDRKPTKVAAVALANKTARIIWAVMMRGDGYRAKQVLGQPA

SEQ ID NO: 154651 - protein, 357 aa, unidentified
MNSPITIGIDLAKEVFAICVLDERGAVRERRVLRRAAFERWAAQAPSGTIAMESCSSAHHWGRWFSARGHTVRLIAPEFVAPFRKGGKNDAADAEAIAVAARQPTMRFVTIKTVEQQAILSWHRARLGWIEERTALINRLRRLLAEFGIALGRSRSTLRAALPRLTDDARLPASIRALLLEAREQFAALEARVTRCDAEIAAHLVDNAPARRLRELLGIGPLTASALVATVSNASSFRNGRQFGAWLGLTPQQHSSGGKSRLGKVTRHGDGYLRSLLVQGARSALQSALRCLPDRLSRLGRWIVDLFHRKGYHRTLVAIANKHARMLWAMLAHDEAYMPRRRSQYGDWRKIMTTGKN

SEQ ID NO: 154652 - protein, 387 aa, unidentified
MQKPHDNSKVCPAAFVQDSTVIAVIEMGLSSWLVAGMIPRVSRAPLKKINPNAEMLLQLLYRWRDEAIAAGKEINRIAVAYETGRDSFWLARWLRARGIDAHVIHATSVAISREHRRAKTDRIDTAMLRRGFLGWLRGEPGHCSMAIVPTVAEEDAKRPHRERDSLVHERTSTVNRMKSILIQFGVRNFKPVLRKASEKLDAVRTPEGIALPPNAVAALRRHMERLRIINEQIKAIERARLQRLERDPADKMNAMVFLLVRIIGMGVETAEQLVHEILFRDLRDRKAVARYSGLTGSPDESGSKRREKGLSRSGNRRVRNILIQLSWRMLMFQPESALVLWYKKRTESARGSRKPMIVALARKLIIALWRYANTGVVPEGFALRPAA

SEQ ID NO: 154653 - protein, 352 aa, unidentified
MESMPASTAPVTVGVDTHLDLHVAAVLDHTGRLLGTKAFPASTRGYVALVTWAERFGPVERIGVEGTGTYGAGLARFVRAYGLEAVEVNRPDRSLRRRQGKSDPIDAQAAARATLAGVAATTPKTREGQVEMIRVLRVARRGALKARVAAAEQLYGVLSSAPEELPAPLLGLKTKALVRACAALRPGPLTTPTAATKAALRTLARRWQQLQAELTQLDNQRQELVSAAAPTLVALPGVGIDTAGQLLVTVGDNPQRLRSEAAFAHLCGAAPIPASSGRIHRHRLNRGGDRQANHALWRITLVRMHCHPPTRAYVERRTKQGLSKLDIMRCLKRYIAREIYHHLTDPPATCPK

SEQ ID NO: 154654 - protein, 392 aa, unidentified
MYIVGIDIGKNHHEASIVSPEVKQIGRSLRFATTHKGADSLMSFIFKNIGNSPCVFGMEATGHYWYPIYSFLKAKGYTIYVINPIQSDSLRKMYIRQTKNDSIDSFLIAEVIRFGQFGTTSMADENILAMRQLCRYRDSVISSRTEIKLRIGTIMEQIFPEYEKQFSSLWVSTSMGILEKYLTPENIENAPIDELFEIIKDKSHNRLTRAKAISIKEAAADTFGIKIAQDAFSFQLKQLIDRMNFLDKQIEALDCQILEYYEKFDCYLHTIPGIGIIGAATILAEIGDISRFKNSSSLIAFAGIDPTVRQSGEFNSTHNHMSKRGSPYLRHAIFLAATTCSFHNSPLNAYYKKKRDQGKHHLTATGAVARKLTTVIYAVLRDSKPYEPKKFC

SEQ ID NO: 154655 - protein, 347 aa, unidentified
MKQEVVYCGIDVAKSRLDVALSGQRWELPNTKGAMARLVQGLEGRPFKVQVICEASGGYEQTLMRALHRSGLAVTLVQPNRVRQFARASGILAKTDRIDAALLVRFAQAIKPTATAAQPLPLLRLRELDTQRAHLTRLLVREENRLAQLQCVQLRRFTRSLIHKVQKQIASIDQRIKELIREDETLRYKAQKLISFNGVGERTAALLLAQMPELGQLNRRQVAAWAGVAPFNRDSGTMRGKRCIFGGRRALRSGLYMSALTAVRYNAVLAPFYRRLLAAGKPPKLALTAVMRKLLIALNSVTTTRAVAYPIAGCGSDSSITAAPTGSPFSMRRISRCFANPVPAGIK

SEQ ID NO: 154656 - protein, 343 aa, unidentified
MEHYAGIDVSLELSSVCVVDATGQIVREAKLASEPEALIGWLRGLGLELARVGLEAGPLSQWLFAAMHEADLPVELLETRHVRDAFKAMPVKTDRKDARGIAQLLRLGWFRPVHCKSASAQETRALLTARKLLQSKYHDVEMSLRGVLRGFGLKVGRTTPRSFAARIRELVEGHATLTAIVEALLAARETLGAQLCGLEKRLRNQAREDERAQLLMTVPGVGVIVALTFAAAVDDPGRFRSSKTVGAHFGLTPKKYQSGEKDVTGRISKIGDAGVRTALYEAAHVILTRPVKGSELKSWAARIAKRAGMSKAKVALARKLAVVMHRMLVDGTSFAAERAAVAA

SEQ ID NO: 154657 - protein, 425 aa, unidentified
MDILYEQVAGLDVHKDTVVACVRILAEGKTTRKCRTFATTTDQLMELRAWLEECRCTQVAMEATGVYWMPVFRILGEGAFELIVANAAHIKNVPGRKTDVNDATWIADLLACGLIKASFVPNEEIQELRSLTRTRKQLVREQTRHVQRIEKTLAEANIKLNSVISDIMGASGRRMIEAMIKGVRQPRQLAELAGKQIKATPKELYDALHGRLTDHHRFLLDLHLTQWDGLDETIRKIDREIDQRIGCLHKKGEGESGKRPFRTLIELLSTVPGISTVSASAIVSEIGCDMNRFPTAGHLVSWSGLCPGKNESAGKRKPSRLRKGAPWLKTMLVQCAWAAKRKKDSYYRAQFFRLQSKRGPQKAICAVAASILTAVYHILKDGTEHRDLGASYFDRRPTELKASRLVARLKKLGFNVQLQPAAEAA

SEQ ID NO: 154658 - protein, 323 aa, unidentified
MTVYLGIDIARKKFDVAELCDGNYRCKAFENTSAGFLALYKWLGQSTMPDIHACLEATGDYGTSLATFLYENKIKVSVVNPARIKGFGASELSRTKTDKADSKLIARFCKAAVPDGWKPTPAPVRKLQALVRRISALNGMLRMECNRRENAEANIQASLDRIISLLKTEIEVVRQEIKDHVRSDDELKKQDALIQSVPGIGEVSSNLILSFMSGKGFRKAKEVTAYLGLNPRHHQSGSSVRGKTRMSKMGDTRLRSALYMPALVALRYNPDIKAFGQRLLLAGKPRMLVVGAVMRKLIHIVFGVLKSGTAFSSRIAVHSVVTS

SEQ ID NO: 154659 - protein, 349 aa, unidentified
MSMLAELVEVVIGVDTHKHTHTAAVLDARTGAVLARATVATDPGGYAELTGLVEEQPGLRAWALEGSGGYGAGLARHLAAAGELVIELDRPVRPKRRAGAKSDPTDAERAARDALARTRLAQPKSGAERAALQMHLTARRAAVEAAADAQRQLHALVVTAPERVRAKFRGQSTRLMITTASGLRTSRGGDAELSAAVTVLRALARRIRFLEGEALEHEQTIRALVRTWRPDLLDLPGVGPIVAATLLTSWSHPGRCRDEAAFAMLAGTAPIPASSGQTVRYRLNRSGDRQLNRALHVIALSRLRHDPATRAYAERRHTEGRTNREIQRCLKRYIGRQLYRHLEAGPSTA

SEQ ID NO: 154660 - protein, 341 aa, unidentified
MKKFIRTAIDLGKTYFQVHGLESEGGQSISRKMKRSKMREFYEQIEPCRVGMEACGSGHYWARELVAMGHEVMLIPPAYIKPYIKRGKNDAVDAAAICEAMSRPGMRFVPIKSADQQAVLMLHKTREMFVKQRTMSVNALRGHLAEFGIIVAKGIGRVDELLALAQSDAELPQIAKSAVAGLAQHLEGLDQSIEAVADEIARAHKQNPTSRLLDEIPGIGVLIASVIASSVPDPSVFKTGRDFAAWLGLTPRQNSSGGKEKLGSITKQGNRYIRKMLVVGATSVMRVAGKRKGALADWINALQAKKPKRVAAVALANKLARICWAIMTTGEGFRVDTYVKA

SEQ ID NO: 154661 - protein, 329 aa, unidentified
MDEVVVGLDVHLKNTQVTVMKLNGEVVKKERIKTCKAELRRSLETVPEGSRVALESVGFCWPWIDFLDELKFVPLLANPMRVKLRAEDVKNDKVDSKTLADLTRMNWLPTCYVPSTEMRWLRSLLRHRSFRTKLSTGVKNRTKSEFRKRDIELEVNLGSMKGRKAASGLGVFEVSQNVELLELMNRQTKEIEAMLFKRYGHVKPVELLMTIPGVGFLSAITLYAEICDIKRFSSAEKLAHYAGLVPKVRQSGEHSFTGKETRGDAWLKWILIEVAWAHVRYCPNGHLAEVFKDACKRKGDSRDAIKIVARKLVNVVWAVWSSERDFTVK

SEQ ID NO: 154662 - protein, 455 aa, unidentified
MSGKKTRGKSSGQLSTINPDAAGIDIGSTFHVVAVPRDRDDQPVRTFRTFSSDLHQLADWLAQVGITTVAMESTGVYWIPVFEILETRGFSVLLVNARHVKHVPGRKTDVNDAQWLQQLHQYGLLRGSFRPRDGVVRLRAYLRHRERLVEYAAAHIQHMQKALMQMNVQLHHVVTDITGVTGMRIIRAIVAGNHAPDQLAAFRDVRCSASAETIREALTGTYRPEHLFALRHALELYDVHHAKVAECDQAIDAVLQQLNTDRPAPDDPLPAVRHAKGRNEPQFEVRSALYTLLGADLSQIHGLGPYTVLRLVAECGDDMRKFPTAKHFTSWLSVAPGNKITGGRLLSSKTRRSTNRAAVLLRIAAVNIGRTQTALGAFYRRLAARVGKAKAVTATARKLAILFYNAMRFGMKYVDPGVAYYEERYRQRVIHNLHRRAKDLGFSLVPNSAAPAGVS

SEQ ID NO: 154663 - protein, 343 aa, unidentified
MKKIAIGIDFAKEKFDVTVKNVTNNTSVYGQFPNTRGGGRDMVRMVKRFAKDTTSEDWIFCGEDTGYYSQTIARYLTEKGYFMWLQNPYCIKHSEGGIKRGKNDKADSVSIADYAHRYEDKARKYEMPSKASEELHLLLTRRDAYVRAKRVIQSGAMEIPKSDKQGETVNLIKASNRHLVKEIDDEIERLEAQMEKIAAEEEAIQKNYEILLSFPGIGIVNAMCFICYTDNFKKFDLKARKIATYWGVAPFGEDSGTSVHKDPHVSHFCNHWLKAILSNAANSAILCNPLIIPYYKKLQKAGKCDGICKNNVKNKIIHIITAMIRKGEKFEPEFQFTKQKAAA

SEQ ID NO: 154664 - protein, 341 aa, unidentified
MLIIGCDFHPTFQQIAFTDTETGEYEERRLHHPREAEQFYRALAKGKARVGMEATGSFRWFRRLLTRLGHELWLGNPTEIRASAPRRQKTDKRDARQLMKLLLEDRFPQVWLPTVADEDLRQLLLHRCRLVRLRTKVRNQLDAIAKNEGLLGQRVGTKKGRQQLQALPLSGWYQQRRQDLFELLDQLERRIVPLNQAVQQAAEERADAQRLMTHPGVGPVVALGYVLAIGDWQRFPRGKYVASYLGLIPEEDSSSNKRRLGHITKQGNSLVRWLLVEAATKAQQCDPGWHRQYLRLARNKHHGVAKVAIARKLAIRLYWMLRSGQDYEQVKERGSHAGQSV

SEQ ID NO: 154665 - protein, 372 aa, unidentified
MEEGTKFHVGLDVHKDSVSIAAAELGRAPARLVGKVTHDLNKLLKVLTKIGTAEHLHIVYEAGPTGFGLQRALKERGYDCEIIAPSQIPRRPGDRVKTDGRDCIQLAECSRAGQLSAVWIPEPGDEAIRDLARAREDAVNSRVQARHQLKGFLLRHDIRYPGKTSWSIAYYRWLSTLNFDAGATQTAFTEYWHAVEGADERVERLTKALGTSITGWRFEPVVRALQSLRGVAEITAISLMAEIGDLARFSHPRKLMGYLGLVPSEHSSGERTSRGSITKTGNAHARRLLTESAWNYRFKARIGREALARQEALPESIRTTAWKAPLRLTQRFAALRNRGVQINKACVAVARELAGFIWAIGLQVRREEQQAG

SEQ ID NO: 154666 - protein, 419 aa, unidentified
MSKEVVSRMRVRILPANLFVGVSVMVYVGIDIGKNHHEVGAVNTEGKKLGKTLRFANTAEGFQKAMEFISSKQEGEAFPRICMEATGHYWLALYSYLFEQGFSISVINPIQSDSIRNTRLRPAKTDVIDAYLIADVLRFGQYEETHLADEDLIALRNLARFRMAIVDTCSDFKRRVITLLDQVFPEYEKIFSNVFGQTSKAFLKTCGTPEQCIDIPTKTLSTLLKKASRGRFSSAKAQQLKEAARNSCGVKLANDAFAFQLHLLIEQIEFTEGQVEQIDAQIASQLEKVNSVVMTIPGVGPSLGAIIVGEIGDISRFSTPSKLVAFSGIDPSVMQSGNFAGTHNRLSKRGSPYLRRAIWQAAVVASRTDPVFEAFYEKKRAEGKSHGTAIGAVARKLTYTIFAVLKANKPYEIRQQTIG

SEQ ID NO: 154667 - protein, 346 aa, unidentified
MSQYVGLDVSVKSVSICVVDVEGAVIARGETSADPDQISSFIGEHAPRAERVVHESGILAIWLTRELEARGLPIFCIDARLAHKALSGRINKSDAGDAEGLAHLARTGWFSTVHVRSEASERVRVLIGTRERLIRMRKDLEGHVRGVLKVFGVCMGTVHRTKLRQGFRDQLAEAAGTDPAIAVMAEMFNPVHEALCAATDAMDDELKDIARKSALARRLMTVPGVGPVVALSFIATLDHAGRFRRSRDVGAFLGLTPRRHQSGEMDWSGRISKCGDRDLRRLLYSAASTLITQVRKPSPLLTWAKRLQERKGFKKAAVATARKLAVILHCIWRDGTLYDPRLEATT

SEQ ID NO: 154668 - protein, 426 aa, unidentified
MKEHIDYLSTLFVGIDIASRIHVISALDFNQDFFIKMKPFENTKEGAGIVEKMIADVLADNHQFKYVVIGMESTGFYGVHLANYLSTSELLAPFSVRVYCLNPKEVKNYKKSFNDIGKNDGIDSFVIADFARVGRIAIKPWRGSQYLALQRLTRHRMHITECITREKTYMLNNIYLKFSEYALLRNGEHPFSNKYGATAEAILTEFTTNEDIVNSSIEELIEFINSKSKGRIADPEETAKIVQAAARNSYRLDKCLYEPLTISIASSFNCISSFEKELKAIDKAILKTVQGLNPEEYTVLNSIPGIGKVYSAGILAEIGSIKAFQNANQLAKYCGIVWNDNDSGDFESEDSRMSKAGNRYLRYYIIEATGSVINHCPEYKAFYQKKYAETRNHQHKRALALTSRKFIRLLFGLLDKGQLYSPEKSR

SEQ ID NO: 154669 - protein, 378 aa, unidentified
MEYNTTIGIDVSDKTSKICMMTKINGERRIIDEATVKTSREGFSKYLADKDHSIPVVFETGTHCRWMRDLIARDLDFKVYVANPAKLPMITQSNTKNDRNDAKELARIALADPEMLHPVHLREEVYQTIIRYAKARDAAMGVRTKLTNMIRGFGKAMGFRIEGCTPEKFVDLDRSEWPSTLRNVVLPLVKILKETNAVIKKYEKMIRNLASKSPFKEKVERVQEIYGVGDIIAPVFVAVIGGDVSRFRVARDIGPVLGFTPKQDQSGTIDKQLHETKAGDKLMRRLLVEGANVIMKENARDTDLKLKGYRICMRGGKITKAKAKIAVARALAVTMTALLMKPDMKYVPLSERAEREFAWLREEEARRQQAKAGKPKVT

SEQ ID NO: 154670 - protein, 349 aa, unidentified
MQPTTIAVDVAQSVFEVAVSQRPGQVAERHRLTRPQFSRFVATHPPATLVMEACGMAHFWGRQAQSFGHRVLLLPPHAVRPYVPRNKTDRADAKGLLEAARNEAIHPVPVKSLSQQTLTALHRLRSTWLATRTARLNTVRGLLREFGYHIPIGSRHVVPRLRALVEDADSALPDALRPALDAAATEIRSLEAHLRDTERHLEAIAEQTPVVERLRTIPGIGLLTATGLVAFVGDIQRFPSGRHFASYLGLTPRESSTGLRRRLGAISKRGDTYLRMLLIHGARAVLCHAKHAAPPTSLQSWALRLERLRGHNKAAVALANKLARIAWAVWKHGVDFIDRPTCDLASERR

SEQ ID NO: 154671 - protein, 323 aa, unidentified
MSIDSNSIFVGLDISKSWVDVCVLEGEKRQQWRVARDAEALGELAAQLAAQGLPRVVMEATGGLERLVVGVLHAAGVDSAVINPKRVRDFAKATGLLAKTDRLDAYVLALFGRQIEPRMRPPAEPQRRLLLDLQLRRQQLVRLRSIERNRLKRAEQQACEDSCVRVIDLLGEEIELIESQIASQIQQSEAWQVREKLLRSAPGVGAKTVWSLLAQLPELGSLDGKQIASLAGLAPFARDSGVYRGQRRITGGRKLVRQMLYMAARTAVRCDLGWRSFYDRLLARGKRPQVALIAVARKLLVTLNAMVRDHQPWESRLSTEISS

SEQ ID NO: 154672 - protein, 327 aa, unidentified
MTDATTPSPVVPVFVGVDVAKDKLDLARSDAEAVLTVANDAAGIAHVVRLLRAAGPALSVIVVEATGGLERPLLDALLDAGLPAALVNPGHVRHFAKGIGKLAKTDAIDARMLAEFARLAAPRLAQKRSANRAELEALVTCRRQLLHVRTEQANRRGATASKAAVRSIDRVLKALDKEVDALDAQVKKLVESDEDLDSIDRLLRSVPGVGPVLSSTLLAELMELGTIGRRQVGALVGVAPFNCDSGRSKGKRAIRGGRASVRSVLYMATIAAMRVNPVIRRFAERLAGAAKLKKVAIVACMRKLLSILNAMIRERITWDQLKLVKST

SEQ ID NO: 154673 - protein, 315 aa, unidentified
MEHLPAAPSFVGIDVSKDRLDVHILPTGQTLVVQRNEKGFEDLISELRKLAPALIALEATGGLEVTVAAALASANLPVAVVNPRQIRDFARAVGRLAKTDALDAQAIALFAERVRPEPRPLADADSQSLAELVARRRQVVEMIGMETNRLHQARNPRIQRMLRATLKTLTAQLAQLDRDIDDLIKRSSLWRDADDLLTSVPGVGDVTAHTLIADLPELGQLDRRRVAALVGVAPVNRDSGQLRGKRTIAGGRIGVRNTFYMATLSAIQWNPVISTHYHSLVNRGRPKKIALVACMRRLLGILNAIMRTKTPWQCA

SEQ ID NO: 154674 - protein, 417 aa, unidentified
MGKKFLAVCIMVGALEGEPRVEIQRFGTTVLELRRLRDWLKQEGITHVVMESTGSYWKPVFNILEDAVKVYLANPQDVKNRKGHKTDNKDGWWLAHLLRHAMIQPSFIPPRAIRELRDLTRRRRRLLGNGSSEKNRVQKILEDANVKLGNVLADVFGVSGQLMLEALLEGKAGPQEIAQLAKRRARQRIPEIAAALEEHQMNAHHRQMIRYSLQHMQFLEQQIIQLDKDIAQKIGESGLETEWKLLQSVPGVQANSAATILAETGTAMQQFGDEKHFSSWAGVCPGNNRSAGKEKSSHTTGGDPWLRSALTECAWAAANLKTSFLKEKFWRVATKHGGKKAPAVVAVAHTLAHIIYAVLATGQPYHEKRAPALTLSQKERIIRHHVRRLGKLGVSVYAPQPAPRHRHQSAGSTPAPE

SEQ ID NO: 154675 - protein, 317 aa, unidentified
MTTPGTYIGVDIAKAELVVATPTTLLCRVANDRAGHAQLLQRLAGMAVKAVVLESTGSYGQALATALADAGVAVAVVQPGRVRSYAGSLGIRAKTDPIDAKVIARFGEAIEPRLFTPPAPEVLHLRALVDRRDQIIEQRKQEQNRLDVMSNPIIAKELRASVKRLRASEKTYTEHIAKHIAQHDQLRRLSAALQEEAGVGLQTAATLLAHLPELGTLNRQGIAALGGLAPYDQASGARDGRRAIYGGRRRLRRALYMAAITAGRCSPWLSDIYKKLIQRGKPAKVALIACARKLLIRLNSIAAKALQQTPKAPVMTP

SEQ ID NO: 154676 - protein, 396 aa, unidentified
MYFVGIDIAKKTHQAAIICSDGKLIGKPFKFPNTVDGFNLFLEKLTAVNTDLSQFEIGMEATGHYWLNLYTWLSDKSFRLHVINPLQSDALRNLYIRKTKTDSVDAKIIADVIRIGQYSETQLADENIIALRDLNRQRFYLVDMAADLKRKIIAMMDRIFPEYQDFFSDMFGKTSVQIMKEYTSPEQILQIPTERLTQLLKKASRGRFTETKAKELKALAANSFAALLSSEMTTLLIRQMLEQLDLLEKQIADIEHIIAAQFAQFDTKLTTIPGIGTTLGATIFSEIGDINRFDKPKQLIAYAGMDPSVKQSGNFVGTQSHMSKRGSPYLRRALWLAAVVAVNHDDLFKYLFQQKMNAGKTYAQAMGYICHKLLNTVFAILKTGEEYKPVYPPQIG

SEQ ID NO: 154677 - protein, 319 aa, unidentified
MQLTPVGVDIAKSVFQVYQVDAPTGEIVNKAIKRAGFLEYFTNRTPCLIGMEACGGAQHWARMLMKLGHQVKLMPARLVKAFNIGNKSDAADAKAIWLAVQQPCKAVAVKTEDQQAVLAMHRVRQQLIKIRTMQINALRGLLTEYGEVMGKSRAALDRGMSGALERLADRLPAMLIDTLQERYSELSKLDEQIGKIEQRLKAWIRLDKACQAIADIPGVGLITATAAVATMGNANAFRSGREFAAYIGLVPKHSGSGGKVNLLGISKRGDTYLRTLLIHGARSVLAHAKESGSWVEQMCRRRPLNVVIVALANKMARMV

SEQ ID NO: 154678 - protein, 394 aa, unidentified
MKLVGIDVGKNSHHFCVMDKETGEFNVTPSSFSNNKEGFDFLINSLKPYSKKSILLGMEDTGHYHVALLKFLLSNGYTVALINPKTTDLTRKMEGGITKNDKLDTITICDVLDTPERKKQYRITKVDRFDLYEQRQLTRHHHNLKEELNIYCNRLQKSIDLVFPEFNTLFGSKYGVVYMNLLKTFGSAEAIASTDIRTIRKCFEIKGRGGRISLTAEKLKECAKNSIGISSEVETIQIKHLVSQIMLIKEQIAEIDKKIEEFSITNNSPILSIPGISHFSGTSILAELGDIGNYSKPSRIIKFAGVAPYHYESSQYNAQHTAITKKGSKYLRKTLYQVILPVINNNPVFKKYYRLKISQGKGHRCAQGHCIRKLLRVIYHLLETGQSFDPALLR

SEQ ID NO: 154679 - protein, 360 aa, unidentified
MLYLGIDQHALQITFSLRDDQGDVLQARQVSTQPEKVPAFFTQLTQNYLREGDSFLAVVEVCGFNDWLIRLLEEFHCQKVILIQPEERKKCKTDRRDAAGLSELLWVNRDRFLTGKPVRGLRQVDMSSVTDQENKRLTTLRKEASQSRTRVINKIKHLLRRHNLQWNLPTKTFPTQRAVAWLKQVSLPEIDRLEMNFLLVDLERVQQRMDALEKVIIERCQNNDDTNLLRSIPGVSYFTATSLACRVGRVNRFPRACSLANYWGLTPGCRNSGENSQRLGRITKAGSNTARGLLAQVTHQALRKDGRLREWYKRIRRRRGSTIARVAVMRKLATVIWQMLSKQQTYFECRTFAASGGLAA

SEQ ID NO: 154680 - protein, 344 aa, unidentified
MDHYAGIDVSLECSSVCVVDASGKVVREAKVVSEPEALIGWFGSLGFELARIGLEAGPLSQWLYAAMKQAGLAVELLETRHVSDAFKAMPVKSDRNDARKIAQLMRLGWFRPVHCKSIAAQEIRAMLTARKLVQSKLLDLENSLRGILRGFGLKVGKTTRTNFARRIEELVKGHPNLQTIGQALLRARAVLLAEFNGFEKRVRAMSRLHDKARLLMSVPAVGPIVSLTFACAIDDPSRFTSSKQAGPHFGLTPKKYQSGETDYTGRISKHGDASVREALYEAAHIMLTKPIKGCSELKSWAMRIARRAGTNKAKVALARKLAVIMLRMLKDNVPFNPAAKAATA

SEQ ID NO: 154681 - protein, 391 aa, unidentified
MIFVGIDVAKDKHDCFILNSEGTVLADVFTIANNRIGFETLLSRIQSCSQGESKIKVGLEATGHYSYNLLGFLLDSGLATYVINPLHTNLYRKSLSLRRTKTDRIDARTIAMMLMSDVDLKSYSNTAYHNEELKSLTRYRFDKVKERAKLKSSVARLVNILFPELEKLVSSLHIAVVYALLSNYPGASYIANANTEELAETLCTASKGRYTKSKTAEIQVAAGVSIGSKMPAKSMELKHTIALIRELDKEISEVESAIDKITSQMDSPIFTIPGIGRHMGAMILAEVGNFSNFASADKLLAYAGLSPSTYQSGQLQNCYAHMEKRGSRYLRYALFNAAKYVCLWCPTFSAYLEKKRSEGKHYNVAISHAAKKLVRLIFAMQRSGKAFLADY

SEQ ID NO: 154682 - protein, 392 aa, unidentified
MFYCGIDIAKHKHEASIIDSEGKILLESISFTNTQAGCEKVIALFEKLNIAADLVVIGMEATGHYWLSAYEYFSQLGYDVKVINPIQSEAFRKMYIRQTKNDSIDSFIIAQIMRFGQYSSTTLSDENIIALRQLSRYRLSLVDSCGDCKRRVIALLDQVFPEYDKLFSDTFGVTSKELLLNCQTPEDILAISTRKLTTLLNKTSRGHFGKSKAEQLKTVAKGSFGITFALDAFSFQIKQLIEQILFLENQIEDLEKHISALLHQTNQVITTIPGIGDTLGAIILSEIGDINRFDAPNKLVAFAGLDVKVSQSGEFTGSKNKISKRGSPYLRRAIWLAASRAAFCDPILSEYYLSLKARGKHHLTAVGAVSRKLCNIIFVILKQNRPFESRNS

SEQ ID NO: 154683 - protein, 357 aa, unidentified
MGLFTGVDLHSNNGYYGIINEDEERIFKKKLPNHLPTVLSNLEPFREDIVGIVVESTYNWYWLVDGLMKEGYKVHLANPSAIKQYEGLKYSDDVREAFFLAQLLKLGILPEGYIYPKEERPVRDLLRRRLILIRQRTSHILSFQSLITRNTGVKMSCNDIKKLEVEDVKRFLDEECLILSGETNIAVIRFLSKKIGEIEKAVLKRVKLKEEYKKLLTAPGIGKILALTIMLETGDIRRFAKVGNYSSYCRCVKSEYITNNKKKGEGNRKNGNKYLGWAYVEAANFAKRYCPEAKKFYQRKMAKTNQIVATKALANKIARACYYVIRDREVFKVEKVFGRREGCGSEPRKGLVKSQEI

SEQ ID NO: 154684 - protein, 417 aa, unidentified
MPATVCPGPMAWKWSVLMAVMIGIDPHKGSHTAVAVGAAEEPLGKIRVRACPAQAEQLVGWAQAWPERTWAVEGAPGLGRLLAQQLIAAGERVLDVQPKLAARVRLLHTGNTGKSDPNDALSVAIAALRSTTRREVIADDHATVLKVWAKRHRDLSRARNQIACRLHAVLCELIPGGVPDEITAGHAAKIVGQIRPAGPVAEARCELAAELLADIRHLDAQRREVKKKLATAVKASGTSLTEVFGVGPVIAATVIGDVVTVARFPTRDHFAAYNGTAPVEVSSGEKKIYRLSLRGNRRLNHAIHMAAITQIRHKHSDGRAYYERKLAAGKTHKEALRCLKRRISDAIYARLRADARKGRPGGQPGNHSVSRAASSHPAHRLFGQATPGPQASLRSAAALTPAIPPSEPPAKKTRRAT

SEQ ID NO: 154685 - protein, 357 aa, unidentified
MTKIQKKADFTGQTIYVGMDVHLKNWNITLYHGQQYLRKFQQESNPDVLIKHLRANYPNAHFKLAYEAGFCGFWIQRSFERAGMECIVVNAADVPQTDKGTKTKTDTTDSRRIGLALSGGMLTPIHIPDEQTESDRCIVRYRYKLRNDLTRSKVRIKSHLHKCGIKLPAEFAKSKFTAAFIKWLKALEIPHHFSKLTLNRMIEHVEYLQGQILQLTRDLRVLVRTERYQGQAKLLMSVPGIGSLSALTLLTELGTIKRFKTFYHLNSFVGLCPTEFSSGESERKGSITPRHHSLLRSLMIEMAWSAVRLDPAMTLAYNDYLKRMTGKRAIIRIARRMLSRIYHILLKQQSYEKGIVK

SEQ ID NO: 154686 - protein, 322 aa, unidentified
MSLTILGIDIAKQKFDVALLVDGKTRNKACKNSTDGFDVLKLWLEKQGVQKVHACMEATGNYGEDLAIYLHEAGHTVSIVNPARIKGFAQSELIRTKTDKIDAGVITRFCLAMKPDAWIPPAPEIRSLRALVRRVDSLIDMRSQEKNRIGTAHESVMVLIKEHIAYLDQEIEKIRKQIDDLIKLNPQLKQRKDLLDSIPGLGKATIPHLLAELNNLDKFTHVREMVAFIGLAPRETISGSSIKGKPRLCKIGHARLRKALYMPALVSIQCNPVMIAFYNRLKERGKNGKVIVCAIMRKLVHIIFGVLKSGKKYDPNYKPTLA

SEQ ID NO: 154687 - protein, 464 aa, unidentified
MGKGSGNGMTRGDRRRNARRERLRGLLPRDGAVIGIDLAEDKQALAVIDHDVRVLARKSVQVKAFRLGQALDWAAAQAKVKGFERVTVACEPTGPRWMQVQRLCTERGLPLVCVQPLVSHIAREQQDYTPHKTDESDCVLIGRLATELHCYVPEELDETWAHLRHLGRRRAQLVTAATASVQRIRDFLSVAWPVVTEACAGPFESVTWLAALQVVTARCGGDPARLAAMGLGEFTALVRAAVPAWGGKKGWGRICGRVFAALTDTEGVVTWSRRGLLRRVADELGDLARTRAQLRAVAADMVLVLGELGLSRLGDIPGLSAVGAAAILAETGDPRRYDSSSSLVKHAGLSPADNASGAFEGQAHISRRGRPGLRLTAWRAVWPMLQFNPVMAAKYAALTQAADAAAADAGSQQARAAAAARARRAKARVACAASLLRWIYSMVVHGTSWDAAVASGVACQSEAA

SEQ ID NO: 154688 - protein, 337 aa, unidentified
MRKSSPASSEVLWAGVDLAKLTFQVAIWGHLSFPEMQCRSFDRTRKAMKGFLAWLRDQTPAGAKLGLVMEATGTFAEEMASWLMDLDSTLWLAIVNPGQTSAFIKSLGFRNKTDDLDAKGLAKYGQERRPVPWERPSPELAALKDLVRIRMDLINARTAMHLRLTDHKRAAKRASDAMRKVILSLKTQIQQLDIAVKDQVAAFPELAHQMERYTSICGVAQVTATVMVELGDLRRFQRSRQLTAFAGLSPKRHQSGTSVNGKTRLCKQGSARVRAALYMAASCAVRFNPDMKATYDRLLAQGKERRSALGAVMRKLLVLMRAVLIADRAWQPMKVAA

SEQ ID NO: 154689 - protein, 406 aa, unidentified
MTTDYYVAGIDVHKKVVWVALTDISQEEQEFRVGKFLTTTSGLRELAAWLRQQRVCEVVLESTAQYWYPVWVALEGVCRLHLAQAHSNAAPQGRKTDYADAKRLVRRWAAQELRLSFVPEAEQRDWRCLTRARHQLTRERVRLQNHLEALLEEMQIKLSSFLSDLLGMSGRKILGALAHGETDPEVLAQLANSRVRASREQLQDALSGQVRPAHRQLLQFQLERLATLERHMLELDQALERRLQPHQDAIQRLLEVPGLGQQAAHQILAQVGPAAHAFPSPQQLASWVGVCPGRKESAGVSRSDRSPKGNRAMRRILTQVAHAAVQTKGSYFQALLRRLVGRLGFHKALWAIAHRLCRIIWKILHDGAHYNEPVSRSPQAAQRRAKHLLQQLRNLGFDVSITPAAC

SEQ ID NO: 154690 - protein, 371 aa, unidentified
MHDTIFVGMDVHKATISVAVADGGRGGEVRQLGNFLNRADHVDKLVQRLSKTDGRRLRFCYEAGPCGYGLHRQITDLGHECAVVAPSLIPMKAGDRIKTDRRDAMMLAKLHRAGELTAVWVPDAAHEAMRDLIRARATAVRVLGKARQHLQGFLLRHGRVYPGKKGWTLPYRRWLTTVRFDHSAQQVVLQDYIHSVHDAEERVARLTKQIEDLVPTWSMAPIVEAFQAMRGVAFVAAVTVVAEVGDFIRFDNPRQVMAYLGLTPSEHSSGTAIRRGGITKAGNALARRVLIEGAWTYRMQARVSRKLHDRLEGLPQIVRDIAWKAQVRLCARYRRLAATGKPKVVVTTAIAREMAGFLWAIARQTQIGSPA

SEQ ID NO: 154691 - protein, 351 aa, unidentified
MSQCATPAMARMGIDIGKSAFHVVGLDAGGRPVFRGRFTRERLIEFLARASPTIVGMESCPGSNWLARKVTDAGHSTRIVPAQFVKPFVKSNKTDIVDAEAIAEAISRPTMRFVQPKTEAQLDLQALHRVRQRLVSSKTAVINQARAFLLEYGLTIGVGAAYFVRDMPSILSDDENGLTPSMRRLLDELWQEYRCVEARLLQLRRQIESIATADDTATRLTSVPGIGQLTATAITAFAGNGTQFKSGRHLAAWLGLVPREFSTGGKQHLLGITKRGNPYLRKLLVHGARSCVLHLDRTKDHLGVWIGRMESRGIHRNKVIVALANKLARIAWVVLTRQGAFYLRQPRQQQQ

SEQ ID NO: 154692 - protein, 338 aa, unidentified
MNQFSYFVGVDIASASFMVCAGTTPWKLEVKPMKFDNHEDGYASFLLWLKEHNLTPEKTVVCMEATGVYGEGLAYFLYASGYAVAVEPPLNIQHKFPVNASKTDWLDCQYIAEYACRYVDKLTLWQPRNEILEQVKVLLTTRQQFSVQLASHKNALHAINRKKVSPKLAKQVHQDIIKQIVKFIADIDAEIRRLIESDPTFKNTLLLLLSIPGIGLQLAAHLLIIMQDSLDPRELAAFAGICPYQHQSGTSVYATPTSRHYGPPALRKLLYLAACSVRTHRKEFKLYFLRKTAEGKPGKLVLNNIQNKLLKIACAVVRSQKPFTPNYVSVNPLLLKSA

SEQ ID NO: 154693 - protein, 368 aa, unidentified
MGTLYIGLDVHKVSISVATAQEARDGTVQFLGAIPNTPTDVGKLANRLAKTGDRLEFCYEAGGCGYGIYRQLVELGHGCTVAATSLIARKPGDRIKTDRRDSQMLALQHRSGALTAVWVPDEVHEAMRDLVRARGDAMMQLMRARQQLLAFLLRHGRTYPVGNNWTLRHRRWLAGQDFDQEAHRIVFQDYVEAVWTAQDRRDQLDARIVALQAGWSLAPLVDALRAIRGLDMVSAVSFVAAVGDLSRFESPRRLMAYLGLVPSEHSSGDRIRRGGITKTGSREARRMLVEAAWSYRYPARVSMGKTDVVSRQPKVVRDVAWKAQVRLCDRYRKLLASGKRSTVVVTAIARELSGFIWAIGQEVRPAAP

SEQ ID NO: 154694 - protein, 356 aa, unidentified
MQTQVTKKIDFSGKELFIGLDVHKKSWSVTILVEGMEHRTFTQPPDPKALFNYLQKMFPGGTYYSAYEAGFCGYGIHRELNALGIKNIVINAADIPSSQKDQLEKRDPIDSRKIARALGKGLLRAIHIFDRDMEELRSLNRTRFYLMRDLRRSKNRIKSFLQYYGESIPPEFDNNQWTLKFVSWLKQVKMQTMSGQDAFSNLIRSYEYHREQILTLSRQIRLRIREYDNELYSLLKTISGIGPLTSSALITELGDINRFPHIDHLSSFVGLIPRVKQSGETSYSGGITFRCNEYLRTLLIEASWQAIRQDPALMQYYHEHLINNKGQKVIIKVARKLLNRIRYVMKNRQPYVTGVA

SEQ ID NO: 154695 - protein, 397 aa, unidentified
MYIVGIDIAKRKHEAAVIDGEGTVIIKPFSFTNNCSGYNRLLAMLTRAKLPLDEVSFAMEATGHYWLALFTRLQKEGFRVQVINPVQTNSIRSFYIRQAKTDPRDALLIAEVIRFGHFSESTLHPENIYELRELCRGRHAIVSMQADVKRKVVALLDQVFPEYETAFTNLFSDTSMAILQTCPTPKELSEMPLEELCHLIEVSSHKRFRMAKAQELQELARNSFGFAMAGDVFSTMIRLYAKHLDFLKQQVREMDRKIAEVMETLDTPITTITGIGPTLGAYILSEIGDISRFSSAAKLAAYAGIDPTMRQSGEYNGVRNRMSKRGSPYLRHAIWLAASSAVLHDPALKLYFQKKRDEGKPYMASVGHACRKMVSIIYAVMRDNKAYTPYIPNEISA

SEQ ID NO: 154696 - protein, 417 aa, unidentified
MHIRKKGVSHHGRTPIITVDVSKGSCHYQPFIENGHPMRKPKQLSATIDGFQKLGQTIKDLEAKTEREDIPVIFEATGVYHRPLQKYLEDHKIRYYIISPLLSATYRKTDLHSNKTDALDCAHIAKAYYCEKELRQYQAQPQEYKRLYQLSRIYESELVHLRKRKVSLRSMLDIIYPRIDKTFKGNQNLYDPIPMEILKRYPHPSLLLSHREDTIVKTVGHCTGHLKGYTERIVHKIYEKAKECYSGCEINDIEVVKLPSLIENVQEQKKKCDSLLKEMIEIARICPYFASVVSIVGIGENLAARIIAELGDVSRFDNRAAIVAYAGLNPKIQQSGDIDGLHLKISKKGNKHLRCLLYLGAQCNYRLRKEDPLYEFTKKKRQQTQCPLSSKAAYTASAHKLLVIIYSLCKNGTLYHS

SEQ ID NO: 154697 - protein, 341 aa, unidentified
MTKFIRTALDLGKSYFQFHGLESEDGRAISRKLTRSKLLEFYGRIEPCRVGMEACGSAHYWARELVAMGHQVVLIPPAYIKPYVKRGKNDEVDAAAICEAMSRPVMRFVPIKSAAQQAVLMLHKTRELLVKQRTMSVNALRGHLAEFGLVAAKGIGRVDELIALAKADADLPQIAKSSVEYLAQHLQGLDQAITVVEHEIAEAHRQNPTSQLLDQIPGVGPLIASAVAASVPDPAVFKSGRDFAAWLGLTPRQNSSGGKAKLGAITKQGNRYIRKMLVVGARSVLRVAGRRTGALADWINALRTRKPERLVVVALANKLARICWALMTTGESFRTQAYIRT

SEQ ID NO: 154698 - protein, 337 aa, unidentified
MNKPESNFVPCGIEVSSQTLLVARGSKAPRAFPNTSAGHQAVLRFLDQAGGRVRVCMEATGRYGLDLALTLHGAGVAVMVANPRAVRHFAIADMRRSKTDRVDAAVLVEFAARRRFRLWQPPSPTALQLVAVARRLQALTAMITAEKNRLHAASLSEALPGYVRLEITRHLQILARHVARLRQAAEQFIADDPELTERYQLLQSIPGFGPTSALQVLAELALLGPDLDVRQWVAAAGLDPRQYSSGSSVHKKTRISKLGNARLRRGLYLPALVAVQHEPHLAAFYQKLLARGKTKMQALVAVMRKLLHAIFGMFKHRQPYDGAKVHALTPHPEALCA

SEQ ID NO: 154699 - protein, 354 aa, unidentified
MQNDRQSSETVILGVDTYLDIHVGAVISQAGKLLGTHIIQTNQADYLELLDWARSFGSLERAGIEGTGTYGAALTRYLIKNSIYVVEVNRPDRSKRRLEGKSDPLDAENAARTVLSGSSKAIPKMQSGACEALRIISVARRSAVKACTQAINQLRALLVSAPQDVRDKLWKSKPHECVTACINSEVSEHSPLRIALCSTLRSLAKRWMALTEELNELDESLDKLTRKYASNLRSQFGVGPQTAATLLAVAGDNPERLKNEAALASLCGVNPLPASSGKTVRHRLNRGGSREANNALWTIALVRMRSDPRTRIYVDRRTGEGLSTKEILRCLKRYIVRELYPLILSDLAYANRRS

SEQ ID NO: 154700 - protein, 457 aa, unidentified
MYRELHSLRHALREELKGTLPSLTGVDPDKMLETYLNQLTLYVGLDVADKTVTLLAMNANQEELGHLLDAPNTLKGYVQIGNWLESLRVQHHLRIMAVACETTGVFYWGVWDSLAQRPNVARVLYNPRTTEHMGEVLSKRVRTELVDALLLAEQLRLGSTPEVVLTDNAELLSARLCSRAARDAAQMINRKKNQLRSLMRGYNPVIAQVFPGQKFHHPAVYAVLQQYVFPNEFVTAGVETLTTILTEHSRSAFGTEQAQKLVELCQGYLSRPIRHEIVRQRVQDLIEEITLTRKHQQAMLKAGYALIKDRPEAKVLKASTGAGISNTLALVTELCDIQRFPDGEHAASFLGLTTSKHISGTSIYHSKHITKQGSPNGRYAAVNMALHLAVRVPKYQAMYKAIKSRKPPRKGHFVALVAIARDFVTNVLYDMWRYNRPFFIKVEDYRQYRKEHPRPTS

SEQ ID NO: 154701 - protein, 338 aa, unidentified
MVYGAIDLHLRYSQIRILDETGAVVGDRRVVTSRERLTQAFAGYGPMRILLETSTESEWVAQTLEAAGHEVIVADPNYAPMYGERTRRVKTDRRDVAALAEANRRGWYRATHRVSATQRETRQILRSRRLLVQQRASIVSLIRALLKQSGYRLASGSCETTSARLEQLAVPAALGETVAPLARQISALTTEIRTIDARLRVRVATDPVVTQLQTVPGVGVVVATTFRAFVDTIERFAHAGQVSAAIGLVPREDSSAERRHRGHITKAGPSELRALCIQAAWACWRSPGGAMFRAWVDRVAARRGRRVAVVALARRLSRVMYAVWRDGVSFDATRFATA

SEQ ID NO: 154702 - protein, 420 aa, unidentified
MQVICERCAGAGVGKDVIAVAVRLPGKGRGQRKTEKREYRAFYGVLREMARWLESLGVTHVAMEATGSYSMPVYHALMESGFEQVLVCNAGHVKNVPGRKTGLADAEWLARLLECGLLAGSFIPPAAVKAVRGLARYRARIAGQRASEIARLGDVLQDAGIKPGSVASPIATKSGRAMIAALSDGERRGQVLAEMAIGRMRSKIPDLPMALQGRFGEHHAMLCRPHLDHIGYLEKAIGELDARTEAMMQPFRAARDLLITIPGIAAVPAAAVISETGPSPREFFPAAAHLASWAGLCPGSNESAGKRHSGKRRHGSQHLQPVLAGIAWAAVRHEGYLRSLFRRHVTRNGGWRPAAAKNKAIIAVAHAIIVIIWHVLTTGKPYSDPGADYSGRRADPDRQARRLIARLEALGRHVTLVDAA

SEQ ID NO: 154703 - protein, 342 aa, unidentified
MYYIGLDVHKKTISYCVKDASGRICQEGKVGATRWELDIWIKTLPQPWTVAMEATIFTGWIYDHLKPHAADVKVAHPLMLRAIAAAKKKNDSIDASKIADCLRCDFLPECYMAPTEIRERRRTLRYRHLLVRQMVQMKNRVSGLLMETGVSHNKQRLHKVGYFPELLANADAVSASIRPLLQLSRESITRLQRTEGAIIRSLQRDPLLAERVRRLQTIPAVGKVTALSWALEMGDISRFRSIRQAISYCGLCGAEKRSADKVARTPISKQRNKHIQRVLVEAAKLAPRRNPDLALVYENARQKGNANCATLAVARKLVAYLMAVDREQRDFEPVRGLAGIAA

SEQ ID NO: 154704 - protein, 391 aa, unidentified
MSMYFVGIDISKYKHDCCIISAADQQIVSKFTVKNDKDGFEHLLTTLNSLSNPEDIKIGFESTAHYALNLELFLENAHHSFMEVNPVLIKEYKKSTTLRRTKTDSVDCESIARWLITVEYKPHSKGFYHAYSLKSLTRLRDRLIRQRSFYLVKITNVLDHTFPEFKPFFNERLSKTALYLLENYGSAEKMARMNSASYDKLRCISRGKFSIQQFLRLKELAANTVGVNNSIFDLELNTLLTLYKSLSDEINTLETEIIKLIEEVHPHYMSIPGIGPISSAVIYAEYGDISNFSNPGQMLAFAGIEPGINDSGTESHGGRMVKHGSSQLRYVLLNACLPLIRFDLTFATYYEKKRAEGKKHRVAITHVAKKLIRVIYALERQDVDFNVQKLR

SEQ ID NO: 154705 - protein, 482 aa, unidentified
MKKRNIYQNQSQAIVNLFEAAGSNEKIMCVPMDYAKKDHLAMFCNGHGDILRKPFSVKNTPEGIAYIDDQVTRSCRRRGIKKEHVFFGGEDANSFAKNFVSTLRSKGFLVANVNARDAKKQRESVQASTDRIDLMGIAAMLLHCRGNCCPAQSGTYRNLRLLVRHRRKLVQMLTEVKNRVHGIVDELFPGFLKEQNTGIVPFTQSSLYLMEDRFSPKQIRRRKRQKLSEILKRFGTSKAEKTAAKLQHYAAKVLHAPVEYVDTMQLSLAQHVKHIRCLKESVAQMDKEIALNLAQTQGAFLTSVRGIGLVLAAGVTAEIGNPNEQKPLNNLSSYAGIVPRVKQTGGTEGKTYTGPVARRCNRILKDYVVKSAYHLGLHGPQNLMVDYKRRDASGQHADFGMGRRYLRMAMCLMRTSQVYLPPDLRKSNYTPEEKASYYLMNWPYLREKWKKVGALEEAFTSNRPLGLWRLVVQELYDIKLKL

SEQ ID NO: 154706 - protein, 334 aa, unidentified
MNFKNFIGIDVSKGTFDIALLRESAGNSIVSAQYSNDFHGLVKLEEFVKKQGLNMDETLFCMEHTGIYCRLLSHYLVENKYHVWLEMPVQIIRSLGIQRGKNDRVDAIRIAEYACLKKDKAVLWQPPREIVIQINDLLTLRDRLIESRKSLKQPIKEFIDAGFKDTAKLIENMCCNTLKALDKEIEQIEKELDKIINKDSNLKKLFKLATSVPGIGKITAFTLLYFTNEFKLYTNANQLACYCGVAPFERTSGTSVKGKSRVSSFANKRLKKLLHLVAMSTISCDKQLSVYYQRKVNEGKNKMLVINAIRNKVLHRLCSVIKRGTPYQVEYQIA

SEQ ID NO: 154707 - protein, 323 aa, unidentified
MAFYLGCDVSKTKIDVALVNEHGNVLWEDKVSNESTVLTNFLLTVTGAYPDTHITGVVEATGRYHYPLLDASVAVAVDCLVYNPILTKQGIRSSVRGKKTDRTDAIIIARMGLRGEGRLYTPEPYLATKMQTRSYQKLSEWRQSLNKHTGHLQAMNEAVMTEQVIAVFQAVEEAIQTARKELYREMQDSANGDVFRRLQTIPGIGPFVAACLIGEIQDMTRFKRPKHIVAYIGLDPRVRQSGHSLNSTGRLSKRGTPHVRRSLFIAAGAARRCDPYFKALYDKKRAEGKTYKVAVCAVSRKMLTIVRAVWLSGGTYDTSFWEA

SEQ ID NO: 154708 - protein, 409 aa, unidentified
MERQLERCCGLDVHKETIAACVRIGGRSGRAVQHVQTFRTTAADLVTLRDWLAAHGVTHVAMESTGVYWKPVFYALESDFTCLLVNAAHIKQVPGRKTDVQDCVWIAQLLEHGLLRGSFVPPVPIRELRDLTRYRKALIQDRTRVANRLHKALEDAGVKLATVASDILGVSGRAMLEALARGTTDPEVLADLARGRLRGKLPALRAALAGRFRPHHAFVVGQLLAHLDYLDEAIATLSAEIESHLAPFAEPLARLDSIPGINRRTAEVIIAEVGVDMSAFPSAAHLASWAALCPGNNESAGKHKSGRTRKGNRWLRMALIEAAAGASRAKNSALQARFRRVLRHRGPKKAVVALAHTLLRIVYHVLANGTTYRELGGDYYDRHHSQRAARRAIRLLERQGYRVTLEPAA

SEQ ID NO: 154709 - protein, 353 aa, unidentified
MKCDQYMGMDVHQATTVVVVLDVEGGLVLETIVATEAAAILRLIRSLSGPLHVTFEETTQAAWLYEVTRAYVAEVIVCDPRRNKLLSEGSKADKPDARKLAELLRAGMLRSVYHGHEATRKLKEFVRAYETLSADTGRTMVRIKAIYRGRGIRTAGRGVYQIQQREQWLEQLTEPGVRQRVSWLYEQLDQLRPLRRRAKQAMLAESRSHRAVALLRSIPQLGPIRSALIVATVDTPHRFRTRQQLWSYSGLAVVTHMSSEYEIKQGRVVRSRKPIATRGLNRNCNRRLKEVFIGAATGGSQAEPYRSYLEKLKQTGMRAEMARLTLARKIAAIALRIWKKGETFDPKKLNGTT

SEQ ID NO: 154710 - protein, 351 aa, unidentified
MEKIRKTAKAPKVLFMGIDVHELTYRVSMFFEGEELLNSTYPSDTKHLKRLMARYSAFRIHAVYEAGPFGYSLYDWLQSQRVSVIVTPPSKMPVAAGDFVKTDKRDARRLAHLLSSGLLKAVPVPDKRKREDRDLLRTREQLVEQRRRIFLQVQSKLRFHGIPIRCRVLITRKNRSMILEYPGMGASLRESFESLLDSYDYYTERLKRIRRAVLDLSEDNAYRPGVEILKGIPGVGIITALSFLLELPDMHSFDSNEKVGSYLGLTSSEYSSGEHQRQGRITRCGNSRIRSLLIQCSWRLIAGDDAMKRFYERLKRRRGGKRAIVAVARKLSGRMRTILIRNEPYQVGLVQ

SEQ ID NO: 154711 - protein, 337 aa, unidentified
MALYCGIDLHANNSVIAVLDEQDKALFEKRLPNELTKIVGALRPYQGDLAGCVVESTYNWYWLVDGLMDAGFEVRLAHTGAVPQYAGIKYTNDESDARHLAHLLRLGILPEGHIQPREQRAVRDLLRRRLLLVRQKIRHHLSLQSLIARYTGQRLSANQLKQLDNAAIAELLDEPIVLGGQISCLARRWLEDAIEVLEHEIQKQLKPCLAYQLLTTVPGIGQALGSTIALETGDIGRFPGPGHYASYARCVKTEKISNSKLKGRGNAKNGNKYLAWAFMEAAHYAAIWSPQIKRYYQRKQARSHVLVAKKAVANKLARACYHMLSRQEPFDVNRAFG

SEQ ID NO: 154712 - protein, 488 aa, unidentified
MSAKKSNTSEARPATSSGQRPEATKPRPAVDDPGLRIANPHAAGIDVHSREHWVCVPASSALSRPKDHPANLPANVRAFSTCTPDLEQLADWLLACGITTIAMEATGVYWIALFELLERRGFAVMLVDPRQTRQVSGRPQSDVLSCQWIQRLHSYGLLSASFRPDDETCVLRGYLRQRQLLIADAGRSTQHMQKALEQMNVKLTETINDITGVTGMLILKAIVRGQRDPQELAKYRNEHCKCTPAEMARALQGNWREEHLFALRQALKTYEHLRKQLAECDGCIKTYLKALADKSGGAVLPKKTPRRSSKATEPTFDARDLLFRWSGQDLTVIEGIDQSTALNVLAEIGIDMSKWPTENHFVSWLGLCPQHRGSAGKIKNRRLRGGANRAARAFRLAGQGCHHAKNALGAFYRRVQARAGGGKAVVATARKIACRAYRLLKYGEKYVRQEMAAYEAQFRIKTTKGLAKKAASLGYKLVPVAEEEAQAT

SEQ ID NO: 154713 - protein, 356 aa, unidentified
MRWSPTPCERYAGRVFYFEETIMQNVTLIGIDLGKHSFHVHCQDKHGNALLRKKFSRTQLIHFLGSYQAATVVMEACGGAQFMARRIADLGHEPKLIYPQFVRPFVKSNKNDFVDAEAICKAASRPSMRFVKPRTQDPQAMAALHRVRDSLIRQRVKTTNQMHAFLLEFSVSLPRGIAVIRRLSAVLEENDFPPYLARVLSRLHRHYVYLCGEIDEVDKELKTHLAEDENAQRLLTIPGVGPVTASLLATRLGDGKNYASSRDFAASTGLVPRQYSTGGKTTLMGISKRGDKNLRRLLVQCARVFIQRLEHNPGRLAEWVRKQLANHHSNVVACALANKLARIAWAVTAYQAAFSQ

SEQ ID NO: 154714 - protein, 352 aa, unidentified
MAKRLWAGLDVGVETTSICIVNEAGDVVHEAMCPTKVRDVHRELAVLRRLRFARVSLEAGVGTALARGLRNLGYSVDIYETRQLSKFLRVRRNKTDAGDANGIAQAGRLGTTIVSKVHLKSLECQFLTSRLTIRRHLIKTRVKAASLLCRQLEQLGGRVRGPGKGKDLRVKVEQQLKELFGKAANPVAERFRPLLSQCETLSAWQEEIDRDLYRLAHENEHCCRLMQIPGVGPICALTFFAAVGEPDRFQKSAAIGCYLGLTPRLHQSGLTSRMGRISKMGNKAARSLLVQASIRFMRASRTDIELHAWASRIEQRRGRGRARIALARKLAVVMLAIWKSGQDYRPTLLEAA

SEQ ID NO: 154715 - protein, 413 aa, unidentified
MSIDPGTAAARVTAGVDWAKDDHAVCVVGGQGEALERFTVRHDAAGLRQMAARLLRAGVLQVGIERSDGPAADALLRAGLAVFVIPPGQVKNLRGRYRSVGSKDDRFDAYVLGDVVRTDIQRLRPMERDSEQTAALRSAVRARRDLVGHRVAAANQLRAHLQIVFPAAAALFAEVDSEITLAFLSRFTTQEQADWLSPKRLAAWLKSVSYSGRTDSAVLHARMLAAPGGKTGRHARLHAGTTLALVAVLRVLNAQIQALAASIGAQMDAHPDAPVFRSLPPAGTVRAARLLAEIGDARGRFPTRDSLTGLAGVAPYTSQSGKVRTVAFRWEADKQLRDALCDFAGDSRRASPWATDLYDKAVARGCDHPHAVRILARAWAHIIWRCWQDHIPYDPAAHNSLQVILKQQQPAAA

SEQ ID NO: 154716 - protein, 350 aa, unidentified
MNNSLVAFHPCGIEVSHLTLLVALRTGDHDEPPREFPNTAEGHQSVLRFLNRSVRPVRVALESTGLYGLDLALALHQAGVAVMVANPRAVRHFATALMQRSKNDQLDAVVLREFAARMPFVVWRPPSAAALKLVAVARRLEALTDMMAAEKNRRHAASLSAALPAIIRRDVERSIQTQQRAIQRLTRAAQEFILDDPELARRYELLLSIPGVAATSALHLLAELLLLPAGMDVRQWVAYAGLDPREYTSGTSVHKKVRISKVGNKHLRRALYMPALVAVQHQPHLRAYYEHLQARGKTKLQALVATMRKLLHAIFGIFKHDQLFDGRKVYAAVQLTAPAPLPVPQEVLCP

SEQ ID NO: 154717 - protein, 334 aa, unidentified
MERVQYVGLDVHKKAIEVSVLNGENAAPEIEKALPNQETRIKVFFERLKMQGSVIACYEAGCVGFELQRILESIEIPCIIAAPGLLPRRPGERVKTDRRDARKLARNLRNGEVTPIHIPTREDEAVRDYLRMQGDFKVERKKTKQRLLHFLLRHNLIYTDGNHWTGKHEKWLRALEFDNPVLKETFDEYFFHLKELEEKIGRMNEKIEEIALRDSYREPVAKLKCLKGIETLTALSMVVEVGDFRRFMKAEEFMAFLGLVPSENSSGDKRKQGGITKAGNSHLRRLLVEASWHYRFDRGVGKCLVARRKGQPVCVVSYANKAGKRLSRKFNRLF

SEQ ID NO: 154718 - protein, 455 aa, unidentified
MSKSKPKSLAKKPLRAAAAEISAPEITVKATYTSAIGIDVHLNLLVCTAQVQLDNHQELTESRDFYTNRDDLDKFAAWCKSKNPQIILMESTGSLWYSVYEALEDVGFTDKELVLINARDAKAACGRKTDRKDASRLASLARSGNFRKSFVPIRPFRLQRFISREIQKNTQEMARVSNRIQKMLCATGCRASTVFSNVHGKAASVILDAKLRNAPDLALVIQNNCKRLRCSAEEIYSALNFNIEPQIANQLLAAKQKLLWLQEYDDESFERLRELQQPYDHYVKLLMSIPGIKERAARLLFAELCPNLEEHFLDSEHFCSWLGICPGDNTSAGKQKSGKCPKGNKWFRRCLIQCAQALAVSKRAPYYERFMALKLRRGRKRAIVALAHFLSRVIYSILTSRKAFTSRETSVFRDVVVQRVKQSIRQLKKMSGVSVINDLIVENDSGAILGRISLA

SEQ ID NO: 154719 - protein, 415 aa, unidentified
MSDPKRWYAGVDWGSLSHCVFLTDDEGRKLGQKFFKHSGEGLAEMADWLMKTSGAETAGQVFVAIEVPHGPVVEALIERGFTVHAINPKQMDRFRDRFSMSGAKDDSRDAEVMASSLRTDPRCFRRLAVGDPIVVELREWSRIADELGFERIRLANRLRAQLWRYFPALLELEEDCGAEWLLDFLGIAPTPAKAARLREARVAQFLKERRIRRFDAATILKAGRATPPTLAPGTVEAASAHVASIIPRLKLVNRQIKEADRKIGALIDGLAASEENEPGQEKQHDAAILASLPGVGRTVLATLLAEAWEPLQRRDYPALRSLAGVAPVTKRSGKSCIVVRRQACDNRLANALYHWARVAVQHDPRSRAKYAELRKRGHSHGRALRSVADRNLNVACAMLRNGTLFDPSLAAQKAA

SEQ ID NO: 154720 - protein, 343 aa, unidentified
MSVYVGIDVHGKRSQVAVVDASGKVLTNRNVPNGVEPILKVIGGLPPGTPAALEAAFGISWLVELLEDYGFDPHLVHPLRCKAIASARLKNDKVDAAILGQLLRADLLPEAWIAPPAIRQLRALLRHRAQLVRLRTLLRNRIHAVLADHGHDRPAGYWSGPGRAWLAALPLPAVSREIVDDGQGLIEAVEARIDRLDWQIHQRARSDPRVKVLTQLPGVGPFTALVILAEVGEVSRFGSARKLASWAGLTPTVRGSDRVAHYGHISKQGSAWLRWVLCEAAQTAKRSPQFAASYQAIAKRRGKKIATTAVARKLLTRAWHLLTDAEHTIPQPEAASAPRTGTR

SEQ ID NO: 154721 - protein, 401 aa, unidentified
MIENYDSVDVFISVDVGKSEHNAVALDRTGKRLYDKALPNDEVQLRAVIRKLKLRGQVLLVVDQPETVGALPVAVAVAYTEGILVGYLPGLAMRRIADLHPGEAKTDARDAAIIAEAARTLPHALRPLRLEDEQLAELSMLCGFDDDIVGQMTATSNRIRGLLMQVHPALERVLGPHLDHPAVLDLLQKYPTPTAMKAAGLTRLGTRLLKLAPRIGCRLAEEIFQALSEQTVVVGGTNATRAVLPRLAEQLATLRRQRAEIAVEVEELVDAHPLEPILTSMPGVGVRTAARLITEVSGKDFATAGHLASYAGLAPVTRRSGSSIRGEHPSRRGNKALKRALFLSAFAALSDPVSRTYYDRKIAQGKRHNQALIALARRRCDVLYAMLRDGTIYQAQSPTTP

SEQ ID NO: 154722 - protein, 397 aa, unidentified
MALPGLVAVVSARPTGGDPRPPASEEKAITSMHTAAPDVTVTIGVDTHKDLHVAVALDALGRRLGELVVPATAAGYQQLHRWATDQGQVDAFGVEGTGSYGAGLARHLRRTGSRVIEVNRPDRASRHRKGKSDPLDAEAAARAVLAGTATATPKDGDDQVEVIRILKLTRDSAVKAQTQAVNQLKAVLVTAPTELRESLAGLGLVALLERCTALRPGEPTTPLSAAKYALRLLARRVLALRAEAKHLREVLTGLTAAAAPALVELTGVGPDTAAALLLAAGDNPHRLHSEAAFAALCGTSPIPASSGKVTRFRLNRGGNRQANAALHRAVITRMHWHEPTKIYVARRTAEGKTKPEIMRCLKRYLARQVYRCLVRRVPVNPVAEQSRDHHEDLAGAA

SEQ ID NO: 154723 - protein, 361 aa, unidentified
MQRVKVNEKTFEGQPIYVGIDDHKKSWKVSILGREYEHKTMSSEPDPVQLARYLKRNFPGADYKAVYEAGFSGFGSQRRLKELGVDCIVVHPADVPTSEKDRQQKTDKADSRKLAKMLRSGEFEGVDVPDEELEADRALIRQRYRLSKDLTRYKNRVKSLLFQFGIRIPDRFTASQSRTWAKNYMDWLTELPEADEGVRTVVGNYVGAGILIKKQLAAVTKQVRELAGKERYRGNYALLISIPGIGLVSGMALLVQLGDVGRFRSLDELCSYVGLVPRMHGSADRMVTGKLTGRGRREIKVMLIEAAWVAVRQDPAMMARFNELKKGMNGNKAIVRIAKNLLSRIRHVLNNQTAYERGVIK

SEQ ID NO: 154724 - protein, 358 aa, unidentified
MGNIKSSRLDFSGQPIYIGLDVHKKSWSVSIFSKYGEYKTFNQPPEVDKLLHYLRHHFPGGDYRSVYEAGYCGFWIHDQLRQKGIQCLVVNPADIPTKNKERRTKRDPVDCRKLARSLRSGELEGIYVPCRWKLEDRTLIRTRQSMVRKQTRCKNQIKAILLFYGVVIPEEREMGHWSRRFIQWIEGIRMERASGDIALKAHLEELSHLRQLIASLNRAILRLARTQEYWPLVRLLKTVPGISTLTAMILLTELGEILRFPSLDELSCYVGLVPDTQESGEKEYVGSLTQRRHSQLRWLLIEASWTAIRKDPALLMAFEEYCKRMRKTKAIVKVARKLLNRIRYVLKNQAEYVPCVIQ

SEQ ID NO: 154725 - protein, 403 aa, unidentified
MIVAVDIGKGFHVGYFRAPSGEEQKPFLFANSAKSFNEFWHSAQEFSKTHDLEGIVVGFESSGPYAEPLFHYLLKKPVTLVQVNPFHTKRVKELTGNSPNKTDRKDPRVIADVISLGHALTLVVPKGPAAHLRRLTQARERAMKRRTAALNQIQDLIFVIFPEFLKIMKGISTKTALYLIKNHPTAESIVALGLEFLATIVKRTSRGKLGFQRAQELFDAAQNCVGIQEGKQSILLEMEYLVSQIGADNRFIDSLEKQMEEYLEEIPYSQSILSIKGIGKVTTAGLIGEVGDFREFETISEITKLAGLDLFEISSGQHRGRRRISKRGRPLLRKLLYFAAINVVKTNGILHEPYQQMLSRGMPKVKALVGIARKLLRIVFALARDNTVYVADYCHDHHLRLAA

SEQ ID NO: 154726 - protein, 326 aa, unidentified
MEHELHYIGIDTAKEKLDVDVLRPDGRHRTKKFANTTKGHDELVSWLKGHKIDHAHICIEATGTYMEPVAECLYDAGYIVSVINPALGKAFAQSEGLRNKTDTVDARMLAEFCRQTRPAAWEAPHPLERALRALVVRHQALTDMHTQELNRTETAREVQRPSIDAHLLWLEAELKRLEKQIKDLTDDDPDMKHRRKLLESIPGIGEKTSAVLLAYIGLKDRFAHARQFAAFAGLTPRRYESGSSVRGASRMSKAGHVSLRRALYMPAMVATSKTEWGRAFRDRLAANGKKGKVILGAMMRKLAQVAYGVLKSGVPFDASRHNPVAA

SEQ ID NO: 154727 - protein, 317 aa, unidentified
MTFAGIDVSKPHLTLALVSNSPKPTRLRFPNTPEGRKALLAALAHLRPAWVALEPTGAYHLPLLKLLAKNRLQVALVNPYPRAAFRKAKGERQKTDRHDALLLARYAQVYHGELRAYTLPPEALRELKALVGYREDLAGRERAILNQMEAVEWAGSGEVLALLQKELACVKGLLGEVEARIQALLATLPEAEALMALPGVGPQVAAAVLALLPPELWGRAKRAASYAGLTPEREESGKRVERSRLSKKGPPLLRRKLYMGALVAVRHDPEMRAFYHRLLSRGKRKKQALVAVAHKLLRRMMGRLREYYATQLDQGVA

SEQ ID NO: 154728 - protein, 366 aa, unidentified
MTIVAHAHPFVIGVDTHAKKHALSILAAPVGEVVDDGEFPTTTAGIGRAIAWAGRRTRGGQDVLWVVECSATYGAQLANAVRAAGFQVVEAARMSARASRGVGKSDPLDARRIAAAVLPLETSRLRRLREGQGVRAALRVAITARDTMSGERTAALNTLTALARVMDLGIDARKPLTTTQVLEASRWRTRAEDVAAATARAEAVRLARRVVELEDDLTENTKTLTTLLRQSPARVLLEMPGIGPVTAAVVMAAWSHPGRLRDEAAFASLAGVNPIPASSGNTVRHRLNRGGDRRLNQALHMAVVVRMRWDTETKAYVERRTAEGRTKREFRRNLKRYLARQVYRALTTASRTPAPTLTPAAPTCGT

SEQ ID NO: 154729 - protein, 419 aa, unidentified
MKNMTSEKSFAAFIGIDWADEEHAYSLAPAGSSRIERGRLQHTPEALHAWAEQLHKRFAGRPVAILLEQKRGALVWALQEHPFITLFPINPLTSAKLRQAFFPSGAKSDPLDSDLLLDILRHHRDRLRPFQLDDVQTRLLERLTQDRRGAVEQRKSCVQQITAALKEYFPLALEVLGKLECNLAARFLLKWATLEELQAAQPHLVRKFFHGNNGRFQIEQRLKRIKQAQPLTSDPAIIEAGRRKVQMLAQLIITLNEYIADYQKRIETLFQRHPDRHIFQSFPGAGAALAPRLIAAFGMDRSAFADALSVQNRSGIAPVRVSSGKTAIEKMRVVCPKFLRQTFHEFAATSVRYCAWARTYYQAKVAAGKKHHAIVRALAFKWIRIMWACWQNQQAYEETRYLRALSRSGSPFAVTLKKT

SEQ ID NO: 154730 - protein, 351 aa, unidentified
MKKMFIGIDFAKEKFDVAIISAFGLEESGDRQFVTFKNDKNGIRKFIKWVKANSVGTYETEWLFCGENTGSCSDALSKWLYGKGLDIWIENAYVIKHSSGLQRLKTDKADASMIAEYAWRHQDKFKQYEPLSEALSQLREVFLYRHKLVQQRTSMCVRKQSKTKTEPSKAMSFINRKSEHLMAEMDAAIKECDDMIDKIIKEDEELMENYEIVTSIKGVARQNGVCLLIFTNNFKRFDMDARKIACYYGVAPFVKTSGTSVHSPARTSHFANKLIKSLLSQAAQIAKIFNPEIKSYYERLIIRGKKHSVALNNVKNKLLRIIVSLVKNKIKYDPNKYVLCKNRLDRKFVTI

SEQ ID NO: 154731 - protein, 340 aa, unidentified
MNAGIEFSLGIDLAQQSFAAAVAAEGSPVQEWRNLPRIELPWVPEKAEWIDALLGWLDQQCPEGRCLRVVVESTGQLSKRFARALRGRGLPEVCIINPHRSKAFGQSLGVREKTDRIDSAILALFAMVHRCEPVESSSEAQERLRELTRMRQRYVEELKTWQNRLRETTEPKTRKIVEKTTKHLKKQIEEMDRAIEQEVLDDEALTFQVNALMKIKGIKQVAATTLTAELGDLTQYGRNQIIGRAGVFAKKFESGSSVHRRARLAKGGGSQIRRVLYMGATSILNRKGPLREYAEGLRAKGLHDMEVLMALMRKLLLVSRAVMINGGKLDDSKILRGARP

SEQ ID NO: 154732 - protein, 354 aa, unidentified
MLAELVDHVIGVDPDRDWITVAAVDARTSGVIATDRFPATRDGYRDAMVWADAHTAESERAWVIEGTASYGRGLTMALQRRDELVVEFDRPMRKATKDGAKSDALDAIRAAREALGRDKLNQPRAHDGIREAIRVHTVARAGAVRARTAAVNELKAFIVTADEQLRGELRGLRTAKVVARCSRFRNSTARPVVERCTRNAMRALARRIQHLKDEIADHDAVLKQLIDQAAPQLIAERGVGYVTAAAFYLAWSHPRRCHSEAAYARLGGTAPIEVTSGQNQDRHRLCRGGDRQLNRALYFVAVTRQRCCPITQDYMARRTSQGKTEREATRCLKRFIARRIWRLLEHPEIHLDNT

SEQ ID NO: 154733 - protein, 309 aa, unidentified
METIVGIDVSKERLDVAVLPQGEVFAVGNDHAGVDALVERLQAVGVDVIALEATGGFETLAVAGLSSAGLTVLVVNPAQVRAYAHAIGRRAKTDPIDAAVIAAFVLATKPEIRPLRDAETQALSELVARRRQIVQMIVAEENRLRMALAKQAQKSIKRLLAALRRELESLDADLDDHIRKSPVWRVRETLLVSVPGVGPTTARTLLAELPELGSLDRRQIASLAGLAPWTRQSGQWKGKSFIGGGRGKVRAVLFMAALVASRHNPSLKAFRDRLVAAGKPKIVAIVATMRKLLTILNAIIRDARPWQNA

SEQ ID NO: 154734 - protein, 350 aa, unidentified
MPRKFDTAVVTIGIDPGKNTLHLVGLDARGEIVLREKVARSKIVSRLANVPPCLIGIEAGMGTHYVTRELLALDHDVRQVPPVYAKPFRQTHKNDFRDAHAVAEAVQRPTTRCVPPKTDEQLDLQALHRVRYRLVGERTAIINQMRCFLLEHGLTVRQQLHWLRLALPDILAQRTDVLSPRMVRILEDLAQDWRRLDDRIEAVSGEIEALAQTTESCRHLMTIPGIGPIISSAVVAAIGNGIAFTRGRDFAAWLGLVPKQISTGDRTILGRITKRGNRYLRMLFMQAARVVLLRPRNWMKHGFGPWLAAAAQRLHHNVLATALANKLARIAWSVLAQHRVYETRLSAAAL

SEQ ID NO: 154735 - protein, 390 aa, unidentified
MLIGMDVHKHSVFVTEMEEEGNVKDQYEMSNDDESWESFLSRYSVYGNEIALEISTTGKFIARKLRNMGFSVHIADPVKLDLIFNTTKKNDREDSYKLAKLLRLGELPEVHLPSKESDDLRSITRYRKSIGEEITMLKNRIHALLSSYGISIEATDIFGKKGTAEIDKVSKILSESDRFILSSILDRIASLFHQERSVEDQISRMVLNNRNVARIMTIPGINVYSAAVVISEIDDISRFATKEKLASYAGLVPRQDQSGNRDIKGHITKHGPSMLRFILVNAAHIVIKYSKRLRSKYLSLVRRLGKNRSIVAIARILLEMIYTMLKNGEDFVDEIDSLTERKMISMQIRAKNPSPVRKLEELMKSIKKNKDTMKFVNEKMIRGAPKKLFS

SEQ ID NO: 154736 - protein, 315 aa, unidentified
MSDVPCFVGIDVAKAQLDIALRPSGERWAVANDASGVATLVDRVQTLHPTLIVLEATGGLERAVTSALAAAGLPVVVVNPRQARDFARATGQLAKTDALDARALAHFADVIRPTPRPLPDAQTQELRALLGRRQQLIVMRTAEQNRLAGTSERLTQDIVAHITWLNADIATLDNDLETTLRASPLWRENDDLLQSAKGIGPVCARTLLLELPELGTLTRQQIAALVGVAPLNCDSGTLRGRRTIWGGRAHVRTVLYMGTLVATRYNPQIKAFYERLLAAGKVKKVALTACMHKFLTILNAILKHRTPWQPQEVQN

SEQ ID NO: 154737 - protein, 420 aa, unidentified
MGTFNKSDFVAYVGIDWADKKHDVCIQKANSEEREFDVIPHQVDLIDEWAMSLNKRFGSPIAIAVELTKGPIVSALQKYDFFVIYPVNPSTLAKYREAFKPSRAKDDPTDAELALDLILCHPKHFKALKPQSVEIRTLTSLVEHRRTLVEERKRITNRLRNALKQYYPQVLEWFEDIDTFMFCDFLERWSTLTQAKKARKNTLKTFFSQHRMHRSQVLERRATAIKAALPLTTDEAVIIPHRLQSLVFIEQLRVVLKAIKQFDAEIARLAAGHIDYGLFSSLPGAGPSLAPRLLVAFGEDRERYNNAEEMQKRAAVAPVTERSGNKHWVHWRWKCSTFLRQTFVEWAGQTINKSYWAGAYYRQQRAKGSHHQAAVRSLAYKWIRILYRCWQTRIPYDESIYLKALERRGSPLVKQMVKIA

SEQ ID NO: 154738 - protein, 428 aa, unidentified
MIQAEVAAWLGIDWADQKHRWAMRVPGETSTQQGDLEHTPEAIELFFSTLAARFPGQRVAVALEQRRGALIFMLSKYEHLVLYPIHPNTLDHYRRSLYPSGAKSDPGDAALILDLLWKHPERLRPLNPDTVETRTLQLLVEARREAVDDKTRYLNRLTAQLKMFFPQLLDWFDHMDSLVVGQLLRKWPTLEHLQRTRPSRVTEFLRKHRLPASRIGALQQAIRQAVPAIQDRAVLEASVLIVQRLVLQLEALRESIAEHDRRIEALAESHPDSAIFSSLPGAGAVMVPRLIAAFGTQRDRYGSASEIQCYAGIAPVTESSGKQKWVHWRWACPKFLRQTFHEWAWMSTRKSEWARAFYDRQRERNKSHHAAVRALAFKWLRIVFRCWKDRMLYDEARYTQALKKRVANLVEIRFKNIEGFTQLDGFSC

SEQ ID NO: 154739 - protein, 328 aa, unidentified
MENVGIDVSKAKLDVLWLRDPQRNKIKTRVFRNHAREMPALIRWLQEKTGAPPQAVRVVLESTSVYHETVAYALHEAGFVVIVANPKWVHHFAKSEGQTHKTDKQDSGVLARYGLEKGDRLSRWQPEPEEIRHLRGLLGRLRALEKDRDREQHRLEKALATTTPARVTASIRDMITALEAEIRRLKDDIDDHIDGHPHLKRERALLESIPAIGEASSRVLLCSYHSRTFRSARQWAAFVGLVPRHHQSGTSVDKPSRIGRGSAGLLRKTLYMSGVTAQTYTPEVRALKQRMAAQGKAGLSIVVAAMRKLLHIAYGVLKHQQEYRPQTT

SEQ ID NO: 154740 - protein, 339 aa, unidentified
MYYGAIDLHKNNSVLGIINADGQRLYVRKIPNDLDLIKKALGPFAENLEGIVVESTYNWYWLVDGLQDAGYRMHLANPTAIQQYSGIKHTDDVTDAWWLAELLRTKQLKEGFVYPRAERAVRDLLRKRAHLVKQRTQNILSIQNLTSRNTGGRLNANQAKQLTEEAVLKFYDQEEERALAINCSLRVIQTLKREITLIEKQVKSKLKLSQPYQVLQSVPGIGELLAMVIMLEAGDMSRFPSVGDFSSYCRCVNSVRLSNGKKKGSGNRKNGNKYLSWAFMEAAHYAVRYYPVIRKFYQRKSAQKGMIVAQMAVAHKLARASYYVLRDQVPFEESKSFVH

SEQ ID NO: 154741 - protein, 364 aa, unidentified
MDVHLRSTTVCALDAETGEAVTRRFRGNPWGEVAEWMSGFPGPSLAAYESGYLGFAPQRELSGLGVDCVVAAVSKVPRSAADFSSKNDRNDAARMAKAILSHDISPVWVPSPEIEGLRDLAGAHDAATARLAAAKQRLLAFLARRGYAYGGTTPAGNPRRYWTYDFLRWLDKVRPADDGGIRALAALRNEVEAAAETRDDLLAEYRAAVAAGPLSAEVEALQSIKGCGFALAAAFASEVGDFSRFRSGRQVTSYFGLAPKQRSSADSVRLGGISGAGNALVRRLAVEGSWSYVQASHQPKLMPKGSGVPLEVRMHGRKGSERLLRRREEMLARGMPQAKANAATAAELVRWLWALGAMCREATE

SEQ ID NO: 154742 - protein, 352 aa, unidentified
MSHKTAGSSASTITVGLDLGDRFCRYCEMDFQTGVIAEGRLRTTAEALRRQFAGREPLRIVMEVGTHSPWASRLLEELGHEVLVANARRVRLIYANDSKTDKVDAETLARVGRLDPKLLFPIRHRGEAAQADLARLRARDCLVRARTQLVNHVRGAVKALGGRLPSTSTPAFARKVQPHIPQALRPALQPLLETIEILSQEIRAAERQLGALARERYPETERFRQVAGVGAITSLCYLLTLEDPARFKNGRSVGAYLGITPRQHDSGARSPQLRVTKRGDAMLRRLLVGCAQYILGPFGPDCDLRRWGLRLAERGGKNAKKRAVVAVARKLAALLYTLWVTGAEYQPLRHAA

SEQ ID NO: 154743 - protein, 354 aa, unidentified
MACPKHQRGMTMDHYAGIDVSLELSSVCVVDATGRIMREAKVASEPEALIAWLRGRNLELTRVGLEAGPLSQWLYAAMREAGLPVELLETRHVRDAFKAMAVKTDRKDARGIAQLMRLGWFRPVHCKSAPAQETRALLSARKVLQTKRIDVEMSLRGLLRGFGLKVGPTTVRSFAGRIRELVEGHPCLTAVAEALLAAREVLGVQLAGLEKRLRDAARSDDRAQLLMTTPGIGVIVALTFVSAVDDPGRFRSSKAVGAHFGLTPRKYQSGETDVTGRISKAGDAGVRTALYEAANTILTRAVKGSALKSWAARIAARAGMKKAKVALARKLAVVLHRMLADGKPFVADRAALVA

SEQ ID NO: 154744 - protein, 348 aa, unidentified
MRFYTHQHKYYCGIDLHTTMMYVCITDASGTVLIHKNLRANPQEFARIIEPYTEDLAVAVECVFVWYWIADLCSSLGVTFVLGHALYMKAIHGGKVKNDRIDSKKIAGLLRSGMLPQAYAYAKQMRSTRDLLRRRLYLVRRHAELLTHIQNTRHQYNMPAFAKQIARACNRVGIADRFDDPMVAASIQVDSDLLDALHEQILFIERQIVEQVHHHDPVAVQLLRTVPGIGKILALTILYEIGDIARFPRVGNFISYARLVKCAHESAGKSSTGKNAKIGNAHLKWAFSEAAVLFLRGNVPAKAWHQKLISKYGKAKALSIIAQKLGRTTYTILNRRTAFDRVKFFESL

SEQ ID NO: 154745 - protein, 356 aa, unidentified
MSRDIKYIGMDVHKEAVVIAVLNGSGKLVMESVVETKASSILQFIHGLRGELHVTWEEGSWAAWLYDLLQAQVTRVLVCDPRRNALLKEGNKSDKIDARKLADLLRTGMLRPVYHGEHGLRTLRELGRSYQTLSQDLNRVMNRIKAVYRGWSIPCAGSQVYAPRYREEWLQKIEHAGVRRRAELLYQQLDGLQALRRTLRPELLAESRKHKASKLLRQIPCIGPIRAARLIALMQTPHRFRSKRQLWTYSGLGIETRDSAQYRYLHGQLQRTKKPQQIRGLNQNHNHEMKEIFKGAATRASCGVGPLRDFYVALLAKGMKPELARLTLARKIAAIALTLWKKEERFDAEQLKPQAA

SEQ ID NO: 154746 - protein, 447 aa, unidentified
MKQKISYRAVSIEKLTSAILAALLSGSQKLVVAIDVAKLKMMAGFGREDGSVARLVRFESPMQTREFVELVVATGQALGVPVEALMEPTGTYGDGLRALLVSRGVSVFMQSPKRVHDAREVFDGVPSLHDAKSCVVMAQLHRQGVSRAYTPQSADRVRMRALVRRREVFEKPLQMHLSELEGLLGRHWPELLIDMDVWRRKTPLELLAVHPSPAHVVAHRSEAREVMRRASRNTIKEEEAQRVLDSASRSVGTAASEEECDVIRAVAHEVLHVRASIAAVDKLIEKTAEEHEATRGIAKVVGRVTAVVLVAYLGPLSEYASPATLEKACGLNLKIKSSGNLIGRPSITKRGSSEARAWLYLAAVRLVKNEPLIAAWYRARSGYGGGRKLTALVAVMRKLARALWHVARGATFDVTKLVDARALPVSRAPITALASPPTSHDAPPPLG

SEQ ID NO: 154747 - protein, 413 aa, unidentified
MDRLIERVAGLDVHKASVKACVRVPAERPGERQSQTRTFRTTTAGLVLLRDWLASHQVTVVGMESTGVFWKPVYYLLEDEFQCWLLNARHLRNVPGRKTDVADAAWICQLVEHGLVRPSFVPPRPIRQLRDLTRYRKALIHERTRETQRLAKVLEDAGIKLACVASDTLGVSGRAMLEALVAGTTDPQMLAELARGQLRKKLPALREALEGRFGPHHALLVGEMLARVDQLDESIQRLSVEVARVLVPFSPLVALLSTIPGVDRRTAEVVLAEIGPDMGRFPSSAHLASWAGVCPGNHESAGKHYSGRTRKGSKWLRTALVQAANAAARSKDTYLAAHYQRIKGRRGHHKAIVAVAHSILVIVWHLLTGNQPYTDLGGDYFVQRQHSEAYKNRLIRQLERMGHKVTVEPADPA

SEQ ID NO: 154748 - protein, 429 aa, unidentified
MNCTQNKKIEQVKETTMIVGIDVGSEKHYFRAFNWRSIELTRKPVLFSNSMEGFNSFYNTIVELMQENKLEEAMVGIEPTGHYWFDLGQFMGGKNIKFVMVNPHHVHKTKELDDNSPSKNDRKDPRIIAGLVKDGRYFYSYMPTGVYAELRNASNRRFVLVEEQTRTKNRLQKWIAVYFPEYKGIYTHIDAKGGLMVLKQAPTPEEITKLGEEGIIKIWKDAKLRGNGHKKAMKILNAAMRSIGLKAGLTEARMEMQDLIEDYELQTKRLERVNDLIKELCRQVRYADKLLEIKGIGITTVAGFIAEVGDITRFDSTKELQKLAGLELVADSSGKHNGRTKISKRGRKRLRYLLFEAAISVVGKNEEFKEIHRYYTTREKNPLKKMQSLIAVACKLIRVFHVILTKGVSYDASKMLEDIRHPKEQLKAA

SEQ ID NO: 154749 - protein, 445 aa, unidentified
MAMRKQEEDVVFPNAAGIDVGASSHWVAVPRDLAEKAGCEPVREVGAMTDDLHALADWLLTCGLDTVALESTGVYWIPVYEVLEQRSLTVWLVDVRQMKYVPGRKSDVLDCQWLQKLMSLGLLRAAWRPGDEVCVVRAVVRQREVLLAAQAEWVQRMQKALVQMNLQLGEVLSDLMGMTGQAIVRAIVAGERDPNVLARHRHARVKASERDIARALTGNWREEHLFVLGQALAMFDSLAQRILECDAKIEALLAPLGRHEVELGGPGKRRGKNTPEFDARTALARWSGVDLTRINGLAVTSVLTILSEIGPDLRRFGSVKHFCSWLGLCPGTKVSGGKVLSARTRRSTNRVRQALKLAAMSLSHNDSALGAFYRRLCARMDKPRANTAVAHKLARMVYFMLTRGETFVDQGQQRYEEQQRERSIAALKRRAAALGYQIYPVAVAP

SEQ ID NO: 154750 - protein, 414 aa, unidentified
MPNPLFVGIDVSSTDNAVCCLTNDDEKRPISRFTVLNNRPGIMELKERISQLANKHSFDGIRFGLEHTGCYSTHAAMYLQRHLDFGCPDVKVYMFNPSLIKAYKKSHFLDAPKNDRVDAWFITAKLRDGHLPHPFTWSEPMMALQRLTRARYHLMQNLVRESNFLMSNLYLKWSDYTLVFENKLSATSLAVMEEFESTEALAEISLDKLVDFLVQHGKNRFDDPQAVAEDLQKAARSSYRLPKAVNDSVNLAMASSIRVIRTVQEQLKSVKKAIEDHLKAIPQTLDSVPGIGPVFASGILAEIGDISHFESHKQLAKFAGIAWTEHQSGNFTASQTRLIHSGNRFLRYYLMEGANSVRVHDPVFAEYYAKKKAEPKQFAHKRALALTARKLVRLVFFLLKTNQLYQPKGGLPTK

SEQ ID NO: 154751 - protein, 489 aa, unidentified
MNDKRRLVGIDLGIASAHTVRVLDGEGNTVAKRKAWPTVESLTDVENAALAGCGAGTRLEVIVEPTGPAWMPIAVFFSARGHVVHRVSSAKAHDLRRFLSRHTKTNGIDADTLARLPLFDPAGLQPLVLPGVERAALDRRVRATDRLTQAGAEHKRRIKDLVRQVLPMTPLTGDLGVADLAVLERFADPNTLVRLGLKRLTALIAKSSKGHLGVERARQWLDAAESSLELYAGHPAVAFVDLAAEVATEVRLLRAVQTELAAHATERERRYRWVDPTGLARSLPGVADIGGPALVAAIGDPARFKRGKQFRSFTGLVPKASETGDTDRKGQPMSKAGSSLLRTTLVRAADTARKQDPQLARVYYVQMVERGKDHLGALCVVAAHLAERFWAVMHRAMPYVICDTDGRPVEPDEAIAIIAEHWTVPAEARARRRSKKVGKAPQNVLAGQSKPHAPSAGTRGDLPQQASSPPRNGPVKHHRPDAGADDAVA

SEQ ID NO: 154752 - protein, 473 aa, unidentified
MVKSTHNTHQHIGGTKGNIFLSQVRSKNLENVMVIPLEIGKSYHKALIANYFGSLLKDPFEFHNSQEGMRFLHKAISDLSKHQPVEQVVIGMEATGHYFKIPAAMLHDLGYSNLFILNPLSTSYCRKAGLTWSKTDDEDLCAIGQALICGYGNPYQPEKPLWEDLKEACRYRRALIRYQTSLKNRIHAKLDLLLPGITELTMFSNTHLWSPASLDFFLKYPDLESIGQLNPKNIIKSFQSQGRRLSPEMAYQLIQWSKNALNPHLRATDCRKFIFKSLIEQLRKLSQDISQIEVKLTGYLVQIPAVLLLSIDYIGPIRAAEFAGEISPFDQYPESSALIKAAGLDSTRYQSSTLESSKHPISKKGSRRLRYITIDIADSLMKQNQHFAYLSKKLLEKGRSNGCACVATGARFIRTAFWMIKEQKTFQPPDGLGISEEPLAKITAFLQTLHASDLNDEYLSYAQKYFKKGEKTM

SEQ ID NO: 154753 - protein, 416 aa, unidentified
MAIKRLIERCAGLDVHKQSVTACVRVPGPGAGERSSETRTFSTTTAGLLVLRDWLASFGVTVVGMESTGVLWKPVFYLLEDDFECWLLNAQHLRNVPGRKTDVKDAAWICELVEYGLVRPSFVPPTPIRQLRDLTRYRKAVIEERTREAQRLHAVLQDAGIKLSSVATDILGRSGRDMLQALVAGTRDPKVLAELARGRMRPKIAALCEALEGRFSAHHALLVAEMLARLDHAEETIARLSAEIERAMAPFAEQVELLRTIPGIDRRVAEIIVAETGGDMARFPSPGHLASWAGVAPGNNESAGKHRPSRTRKGDKWLRKALTEAAWGAARTKDTYLASQFARLKGRRGPTKANVAVAHSILVIAYYVLERGEPYSDLGADYFLHRQSSDAYKARLVHQLQRMGLKVTLEPIQPAA

SEQ ID NO: 154754 - protein, 382 aa, unidentified
MQATHPSDFTPADPVLAVSLELSKNSWKIGLHDGRRNTPAIHTANDEQATERLRHVIRVIETTRQKWKLPAAVRIVVSYEAGQDGFWIARDLIGHGFEAVVVDPASIPVERKARRAKTDRLDVIRLVSSLRAWLGGERERMKVVRIPTPEQEDQRQLIRARGQLQKEVEQHRDRIRKLLRTVGTWQAAADFGERLAGGGVLDRTGEPLGAGLLYRLNDEWQRLTLVATQLASLEKTMQEQLPETVQKRIGTLMRLKAVGAVGATRLTLELFWRRFQNRRQVGACVGLTPQPYNSGDSRIDQGISKTGNKRVRALLIEMAWFWLRYQPASSITKWFMQRTAHDGTNRRGKRIAIVAVARRLAIALWRYLDCGVMPEGATLKTT

SEQ ID NO: 154755 - protein, 401 aa, unidentified
MGTVRDNATRVKRFRELKASLRTDRSRLLVGIDIAQAEHVVHFRHAHTRVVVPTLTIPNTTRGFTQLWARIQQAQRTTGCREVVCGLEPTGTYHQAVATFLETQGADVLLLSSSVAYWNRRTQDGTWDKHDRKDAANCADLLEQGKVLFYSQPTGPLAELRYLVKLLRRARGELAACKARWRTTLRPALAPMGEALPQRLWAELPAVLQAWERAAPGRPALAKGRLPLGLASAWADLGAQVTGVQARIAAIEQALTPVAERLPAYPLLRTIPGIGATVGAILLAEIGDIAWYTQFSQLRKLAGLDIVRVQSGQFAGQARISKSGRGLLRWALYHAAIGLARTGAGRTRLAALKAKRRGDRFAGFKAIVELAAKQLRVIWGVWRSGLPYDPRRGGGLSRQAC

SEQ ID NO: 154756 - protein, 397 aa, unidentified
MLAVGIDVSKSKSTVAILNSDGSVLVKPYTMEHTQSDMCALTDYLRTFDEPLTILMEYTGHYHYPVLKKLQQEGFPVCVINPYQMKKYGDVEIHKAKTDKKDAIRIATYALEKAYKLVPYNSLEQKYEDLKFLSRQYNQRISSVAYTKVQLINLLDQTMPGITRILPLRSRHPEQCTLLLFIKRFKSFDEINKIGKTRFLASYATLVKKTRDRHAPSKGLAIYELATNSITTRGEDPYIQLAQSQCVDLLASAQNAADEIILQMQTIAETIPEYKVLRSMAGVGDRLGPVILAEIGDIRRFHSGKALNSFAGNDAPPYQSGQFESRNRHISKRGSATLRKACFEVMQCLKLTKPQDDPVYLFMLKKEQEGKPYNVAKMAGVNKFLRIYYARAMELYK

SEQ ID NO: 154757 - protein, 421 aa, unidentified
MKVLNRRCAGLDVHKDEVVACVRLAMRNKLSHEVRRFATTTRGLLELADWLEASGVTQVAMEATGVYWKPVWHMLEERFQLVLANAAHVHNVPGRKSDVNDATWIADLMAHGLIRASFVPPAPIQELRDLTRTRKQLGREIVQHTQRIQKVLEDANIKLSSLITEVLGASGRRILKALIAGESDAGALAALGGPRLKCSRQELRDALEGRITSHHRFLVGQHLRMIEELEATVTAFDARIEAVLAPFRDAAERLMSLPGISDVAAQVILAEIGTDMSSFPTAGHLLSWAGLTPRLDESAGKRRSTRLKKGAPWLKPVLVQCAFAAARAKNTYLQAQFLRLKARRGPKKAAIAVAASILTAVYHMLRDGTFFRDLGPDHFARYDKTRAAMRLVRRTRTSDMMSRSKPPPDRQIRISACRVSG

SEQ ID NO: 154758 - protein, 353 aa, unidentified
MEGYAERQFVGIDLHRRRSVIVRMTSAGERLETVRIDNDPVALALEIAKAGPDPEVVLEATYGWYWAADVLAAQGARVHLAHPLGVKGFTYRRVKNDVRDAADLADLLRMGRLPEAWIAPPAVRELRELVRHRAKLVALRTGLKAQLHAVLAKQGVAVRVSDLFGVAGRALLETVPLDPVYRGRVNSLLRLIDAYGFEIAAVSTRLTADLAREPGYQALLTLPGVGPVLAGVFFAEIGDVHRFPTAAHLVSWAGLTPRHRESDTTVHRGSITKQGSTLVRWAAVEAVQKTPADAGWLVARRHQLAARRGANIATVATARKLLTLVYYALRDGHVRALSPRPRPQPRPLAAASA

SEQ ID NO: 154759 - protein, 375 aa, unidentified
MASQTTTIPRDPDGNVIGIDPHKRTLSATVLDRRGGRVAQAHFHVSGEGHRALEAWAAGFGPVARWGIEGASGLGRHTATYLCHTGHDVRDGCPNRTAERGRGRHQGKSDALDADRIAAETLTHPELPAAFKRAAGDTGPDHTREQLALWHKTRRSLVKLRQQLLGEAESLLGDLPEELRAELPDTTAVLPRLTALARRDHGRAWDATTTLRLRLLDAHAELLTELAAQEREATRALGKLVAQAGSTLGELVGLATRSVAELLVEVGDPRRFTEGGFARFNGTAPLPASSGEGPGEPVRHRLNRGGNRNVNAVLHRMAVTQLRCEPRAQEIFANARKGGHTKKEAMRVLKRHLSDVVHRRMLRDLNARQLPTASA

SEQ ID NO: 154760 - protein, 373 aa, unidentified
MKQFSKYVGMDTHKDTIAVAVADGRGGKPRYYGEIANTPAAVARLAKKLSPEGEVVSFCYEAGPCGYGLYRQLTALGHTCEVVAPSLIPTKAGDRVKTDRRDGESLARLHRAGELTPVWVPDREQEAIRDLTRAREDMKAMERQARQRLNAFLLRHGQVYEAGKSKWTQRHFRWLEQVRFAIPVQQIVFEEYVDAVKQSQERVAGLEEEMRRAMSDWRLAPVVEALMALRGVNLITAMTVMAELGDIRRFDSPRALMAYLGLVPSEHSSGKSRRRRGITKTGNGHVRRVLVEAAWSYRFQARKTAHLQRRAEKTPAAVQAIAWKAQKRLCGRYRHLRARGKLKVQVCTAIARELVGFIWAIACTVMGRPVTVR

SEQ ID NO: 154761 - protein, 424 aa, unidentified
MGKFTKTLCISERKEYHIMEGPIITVDVSKGSCHYQPFIENGHPMRKPKQLSATIDGFQKLGQTIKDLEAKTEREDIPVIFEATGVYHRPLQKYLEDHKIRYYIISPLLSATYRKTDLHSNKTDALDCAHIAKAYYCEKELRQYQAQPQEHKRLYQLSRIYESELVHLRKRKVSLRSMLDIIYPRIDKTFKGNQNLYDPIPMEILKRYPHPSLLLSHREDTIVKNVGHRTGHLKGYTERIVHKIYEKAKECYSGCEINDIEVLKLPSLIENVQEQKKKCDSLLKEMIEIARTCPYFASVVSIVGIGENLAARIISELGDVSRFDNRAAIVAYAGLNPKIQQSGDIDGLHLKISKKGNKHLRCLLYLGAQCNYRLRKEDPLYEFTKKKRQQTQCPLSSKAAYTASAHKLLVIIYSLCKNGTLYHS

SEQ ID NO: 154762 - protein, 374 aa, unidentified
MGQHSRAFVGIDTSKLRNAVAVAEEGRGGDVRYLGEIDTAEAATRKLVVKLAAKYRQLTFCYEAGPTGYGLHRLIGKLGHDCIVAAPSLIPKKPGDRVKTNRRDAVGLAKLLRSGELTAVWVPDERHEAMRDLSRAREAARKDLKGKRQQVSSFMLRLGRHYPGKKTWGPAHMKWLMLQKLEHREQRIVLEELLGAVRQESERVERLEQAIRDAVPEWSLAEVVTALQAMRGIDLVAAVTVLAEIGDLSRFQTPRELMAYLGLVPSESSTGDTVNRGGITKAGNGRARRILVEAAWSYRYPPRVSREKQMKVAAAPRAVREIAWKAQMRLCGRFRSLTRKGKRPTVVATAIARELAAFIWAINREVVRSHAMAN

SEQ ID NO: 154763 - protein, 322 aa, unidentified
MMAEPAEIQSILGLDVSRDTVTLCDGRRHTVTVANEADALRAALQPYQGTTTLAVCEATGGYEDILLGVLLELAIPAHRADPAKVKAYIASFGKRAKNDPIDARWLSRYGCDRATTLPRWQPADPTQQKLELLVARRLDLVAMRVQEQNRLKAPRSRLIADNIRDHLAELERHIEALNAEIDTLIGESRDLALRAQQLRSVPGVGPVLAPLLLAVIPELGTLNRRQVASLAGVAPHPKDSGKANWHRSTTGGRRQIRPALFIAALAACRGDNPLAVAYKALLKAAKPKRVALTAIMRKIITIANARVRDAVRHQNEIGKINA

SEQ ID NO: 154764 - protein, 355 aa, unidentified
MLYTGLDLHKSFSYITIMNDRGEVIGQKKLPSNGEILNFLKGFEDSMEVAIEATPSWYWLYDCLEDEGFEVKLSHPLRTKAIAYAKVKTDKVDSATLAHLLRSNLLPLSYVPEKPVRLNRELLRYRASLVKIQTGIKNKIHTILAKNNVSHDYTDLFGKEGMVFLHSLSLPENYRIALEGYLSVLEALRHEIRQASKRVQELAEENQDAVLLMTIPGVGYYSALMIKSEIGDVKRFPSAKQLCSYAGLVPSTYASGNTCYHGHITKQGSRWLRWILIEAAIHAVKRPGPLRRFYFRVERKKGGKVAKVATARKLLEWIYHMMRDDKSFQEVERLAELQGKGELVKKPGLYFRPSI

SEQ ID NO: 154765 - protein, 312 aa, unidentified
MTQDALVVGIDVSKDMLDVAILPTGESLRLPNTGKGWGKLTRRLLGKPVAVVTFEATGGYERGLLRALHAARLPAARINPSRARDFAKACGALAKNDRLDALMIARFAASLPPRLTEPDPSVDALAELVIARRQLSEDITRAGNQAEHALSAVVKRVARRRIRALQVDLKLIELEIAKAIAAEKRFADKDLLLRSAPGVGAVTSATLLALLPELGRLANRPAASLVGVAPFDHDSGKLKGQRCIWGGRRPVRDALYMAALGAIRTRQSIFRACYQRLVEKGKKPKVAIVAVMRKLITTLNAMLRDNRPWSPA

SEQ ID NO: 154766 - protein, 356 aa, unidentified
MVIVAIESHLGALYMQISTIGLDIAKNVFQVHGIDAAEKVVVRKRLRRRQVLEFFKALPPCLIGMEACATAHCWARELTKLGHRVRLMPAKDVKAYVKRNKNDAADAEAICEAVRRPTMRFVRIKSAEQQGQLMQHRTRDVLIRQRTQIINALRAHLAELGLVAAQGNAGVNELRAIVTDEQDTRLPIDARASVIVLAAQLEALESVIGAIEKRIKMQHRSSEASQRVEAIPGIGVIGASAIVATVADPTIFRSGRDFAAWIGLVPRQDSTGGKQKLGPISKQGDRYLRRILVVGAIAVLRRAQENPGKYPWLTQLLARRPFKVVAVALANKMARMAWALLAHGGTYRAPELAETA

SEQ ID NO: 154767 - protein, 353 aa, unidentified
MPHERARRPQMQAYAGKQFVGIDLHRRRTVIVRTTETGEVLETVRIVNDVQRLASVMARAGDCPEVVLEATYGWYWAVDALQAGGANVHLAHPLGVKAFEYRRVKNDVRDAQDLADLLRMGRLPEAWIAPPPTRELRELVRHRAKLVGLRSHCKAEVHAVLAKCGVQVLMSDLFGVWGTELLDGLELPAPYAARIASLRRLMDDVDFEINLFAGIIRGRMAQEPGYTAVQKIPGIGPTLAAVLVAEIGDITRFASASKLTCWAGLTPKHHESDTHVRRGRITKQGSRLVRWAAIESVKTVSKNSEVGVLRERVADRRGRNIGSVAAGRRQLELVFYALRDGHVRALEHLPRVA

SEQ ID NO: 154768 - protein, 400 aa, unidentified
MNAVGIDVSKGKSTVAVLRPFGEVVASPFDVIHNDNDLKRLVKLIRSLPGESKVVMEYTGTYFEPIAQFLHNNGIFVSVVNALLVHNYSGNSLRKVKTDKKDALKLASYALDRWTELDEYVPADEQRRTLKLLNRQYNQSIKIQTTMKNNLISLTDSVFPGINRLFTSLERQSDGHEKWVDFLHAFPHKDCVAKLYLSAFKAKYKSWCSRNKYRYSESKAEKIHSYAKSVIAVLPLNESVKLLVTQVVSQLNTILETAFSIRTEMDRIASSLPEYDTVMSMFGVGKVYGPQLIAEIGDTRRFRNRRAITAFAGLDAPPYQSGQLDVSSRHISKRGSAALRKVLFQITEIFILSKPENEPVYQFIIKKRSEGKHYYSYRIAAANKFLRIYYAKVNQVLNAM

SEQ ID NO: 154769 - protein, 348 aa, unidentified
MNYYAGIDVSLECSSVCVVDAGGKIVREGKVASEPEALIAWFESLGFPIERIGLEAGPLSQWLCAAMREEGLAVELLETRHVRDAFKAMSVKTDRNDARAIAQLMRLGWFRPVHCKSIEAQEARAVLSGRKLLQSKLLDVENSLRGILRGFGLKVGKTTDRTFAGRVNELVAGHPALEVVAQALLAAHAVLLREFNGLDKRVARMARSYPPAKLLMTTPAVGPVVSLTYAFAIDDPKRFKSSKAAGPHFGLTPKKYQSGQTDISGRITKVGDASVREALYQAAHIMLTKPIKNCSALKSWAMRIAKRAGMRKAKVALARKLAVILHRMLADGQPFNPAARATTMTAAA

SEQ ID NO: 154770 - protein, 408 aa, unidentified
MKLFVGIDVSSEKLDTCFLTSEDQILLEVSLPNNVVGASKIKEHISHFTDLIQYDRIIIGMEATSIYSFHPSTFLAEDCELKSLGVEVVVMNPKAIHRFKGLFEEDKTDKIDAYRIADFLRFDRFNTSLIKEEQYMALQRLTRSRYQLIGQLTEMKQHFLENIYYKCNTLTKEIDTSVFGTTMMDLVTDSMTLEDIANMSLEDLAAILQEKGRGRFSNPEKLAKSLSKAIRDSYRLGKVMQNSVDVILASYAMMIKTIKKQIKELDKAIQQLFEILPESKSLLSVPGIGPVYAAGIIAEIGQIQRFENEAKIAKYAGLYWKRKQSGNFESERTTMTKTGNHYLRYYLIEAANSLMRNEPVYREYYLKKYHEVPKHQHKRALVLTARKFVRMVDVLLRNHQLYAPERSV

SEQ ID NO: 154771 - protein, 421 aa, unidentified
MTQSAPDTFAAFVGIDWADAKHDVCLQAAGSTKRECLQLEHTPEAIDAWVTTLRTRFNGHLVAVCLELTKGPLVFALRKYDFLILFPINPLTLARYREAFTPSRAKDDPTDAALQLELLLTHRDKLQPLHPQSPAMRALEQLVEHRRRVVGDKVRITNRLTSTLKNYFPQVLQWFPAKDTPIFCDCLSRWPTLKAAQLARRSTLETFFRDHHVRSADVVAQRLHAIKAATPLTTDAGVIAPNALLVQALVNPLRGTLAAIETLENAIAQRAQSPPACPLLQALPGAGPVFASRLLVAFGEQRERYTTAAELQKYAGIAPVTERSGKKAWVHWRLQCPKFLRQTFVEWAAESIRHSFWARVYYQQQRDKGKAHQAAVRALAFKWIRILYRCWQDRTLYDESVYLNALNNRGSSLIHNLAQGT

SEQ ID NO: 154772 - protein, 340 aa, unidentified
MDITTLGIDLAKSVFQLHGIDTNGVVVLQKKLRRGAVLNFLSKLEPCLIGMEACATSHYWAREIAALGHDVRMIPPAYVKPYVKRQKNDAADAEAICEAVTRSNMRFVPVKTEEQQGVLVLHRSRDLLMRQRTMILNAIRAHFAEFGAVAAQGARKVAELVSLLREDDNPRLPETARSALVALAVQLDSLEQEVRKIERELLEWHRQNAASQRLMTIPGVGLITATALAASVPDPAVFKSGRQFAAYLGLVPRQNSSGGKDRLGHISKMGNGYLRRLLVVGATSVTRRAPTTDSRTGAWVRSLLERKSTRLVTVAIANKTARTAWALLTKGENYKTTPAI

SEQ ID NO: 154773 - protein, 425 aa, unidentified
MKKIDYLSTLFVGIDIASRTNVVSAIDFHQEYYIRAKSIPNAQGGAEVLEDMIANVLAKHQQFRYVIIGLESTGFYGVHIANYLSSCSKLAPFSTHVYCLNPKEVANYKKSFNDLDKTDAIDSFVIADFARVGRIKIKPWRGSQYLALQRLTRHRLHITECIAREKTYLLNNVFLKFSEFAMLRNDEHPFSSKYGATAEAILTDFMTNEDLVNTSTEELIEFINHKSRGRISNPAETASLLQTAARNSYRLDKCLYEPLTVSISSSFNCISAFNKELKAIDDAILKTVNGLNPVEYQVINSIPGIGKVFSAGILAEMGSIQCFPNNNALAKYCGIVWKANDSGDFSSENTPMSKAGNRYLRYYIIEATNSVIRHCPEYKTFYDKKYAEVTTHQHKRALALTSRKFLRMLFGLLDKSQLYSLDKSR

SEQ ID NO: 154774 - protein, 339 aa, unidentified
MTALYCGIDLHSNNSVVVVLDGAGKVVYRRRLENDLQRIQQALAPYRQELSAVVVESTFNWYWLVDGLLEVGHRVELANTTAIQQYSGLKHTDDTSDAAWLAEMRRLGILPTGYIYPKAERAVRDLLRKRAHLVRQRTANLVSIQNLMQRNTGGRMKSEAVKALAPEQPGQLLENADVALAVAATVRVRQCLDTEIAALEKVVLERVKLRPEFIKLKSIPGVGDILGLTIMLEAGTIGRFPSVGNFASYCRCVNSTKLTNFKKKGAGNVKNGNRYLAWAFVEAANFAPRYSAPIQRFYQRKQARTNAVVAIKTVAHKLARAAYYILRDQVAFDVSKAFA

SEQ ID NO: 154775 - protein, 273 aa, unidentified
MEEVVTVGLDIAKSVFQVHGVDAAGAVVLRRRLTRSKLIAFFEKLPRCRVGIEACATAHYWGRRLTELGHEVGMMPPSYVKPYVKRQKNDAADAEAICEAVSRPSMCFVAVKTSDQQSVQVIHRTRMTLMRHRIEVSNTIRAHMAEFGLVAPIGRMGLQGLIGIVRDDGDERVPASARVCLKMLVDQLDLVNRQALENDRMVLADARSSEVGRRLMAVPGVGPVLASAIVAAVPDPRAFRSGRNLAAWIGLVPRQNSSGGKERLGGITKQGNR

SEQ ID NO: 154776 - protein, 342 aa, unidentified
MRKYAALDVSMEQTAICVVDESGKKIIEGKVQTDPDTVTTWLAEKAGSLEKVGMETGPLAVWLWNELRARGLSIVCLDARHASAALAMMPNKTDRHDAAGLAQIVRTGWYKEVRIKSHAAYVVRALLSARDALVGIRGKIENEIRGLLKTFGVMFGRKVGGFTRRAEEIVAGELAASPEIKRIIEALLEARRAILDRIKLLDRVRSVAKANATARLFMTAPGVGAVTALSVASAYDDPARFSRSSSAGAYLGLTPRRYESGEISRNGRISKRGSKLTRKHLFEAANALLTRVGKFSSLKAWGLRLAKIAGFKKAKVAVARKLAVILHAMWKARTPFRWSVAV

SEQ ID NO: 154777 - protein, 347 aa, unidentified
MLADELDYVIGVDPHRDTCALGFVQAKTGGVTFEAEIRANEAGYRKALSLAVRHAPDRRAWAIEGTGSYGSGLARFLTACGERVLEIGRVKRESRSQPKTDAIDAVRAARSALGKKRQSHPRSYGEREALRALMATREGALRAKRAGLCQLRALIVSCPEPLRSSLAPLTRARLLARLARLRPDSRGDLELRGTLISLRALALRVQTLTREERELKREIEQLVRKLAPSLVREVGVGPISAASVFMAWSHSGRIRNEAAFARLAGVAPVPASSGQVVRRRLDHGGDRKLNCALHQIIVSRKKVHRETIAYVERRISEGKSKREAMRCLKRYLARHLFRLLEEAPLAA

SEQ ID NO: 154778 - protein, 340 aa, unidentified
MEHAGIDLGKRESQIAIITEAGELVEKRLRTERERLRRFFVDRPKSRILMEASTISEWVARVLEELGHEVVVADPNYAPMYAQRSRRVKTDRRDARALAEMLQSGWYTEVFVKSEESHRMKALLSARDQLVRNKRTFFGQIRGMLRPFGIRLPARQGTRKFDEAARAACRHDDLLYACVNALLEALGAIEAQIAALDKRVRAMVQTSKACWYLTSVPCVGPITALAFAAAIEDPGRFRRSRDVGAYLGLTPRRWQSGEKDIVGVISKQGDAMARHCLYEAANCLLTTWGGRSALKSWGLRLVKRVGAKKARVAVARKLACLLLGLWKAESHYDEDQVRTA

SEQ ID NO: 154779 - protein, 366 aa, unidentified
MKKNSTMTTSRKQIFKGKKLTIGMDLGDRFTYYCILDEAGEVVVEQKVATTKQAIQQVFSKIPRSRIALETGAHSPWVSRLLTALGHEVIVAHARNVRLIGESSRKDDRLDARKLAQLARLDPRLLSPVQHRSAEAQIHLTVIRARAALVGARTALVNAARGLAKSYGERLRKCGTQQVSKNLAAGLSTELRTALEPLLAEVASLNQRIAEYDRRIEHIATEVHPEVALLKQVKGVGTLIALTYVLTVADPHRFRRSRDVGCYLGLRPGRRNSGSSQPQLHISKEGDRYLRTLMVQGAHYILGPFGQDSDLRRWGLKLCERGGSNAKKRAVVAVARKLSVLLHKLWVNGEVYEPLRNHPTTTSAAA

SEQ ID NO: 154780 - protein, 344 aa, unidentified
MTYYAALDVSLRTVNICVIDDEGEIKAETKLNSEVTDIIAYLDSLELEVASVGLEAGTLCQYLTYGLQSAGFEVVCMEARQVKAALSAMRNKTDKNDARGIAQLLRTGWYSKVHIKSMASHRIRVLLSSRKAVLCKCIDLEQEIRGLFKVFGIKLPPKLGHGAFDAAVRGIIETDATLSFALLPLLEARLVLYHCFRELDNRTRNMANDDPVCRRLMSAPGVGFITALTFKAGVDDPTRFKRSRTVAAHFGLTPRRFQSGEIDIDGHISRCGDRNVRCTLYTAANALMTRSSRWSSLKAWGMHKAKTRGHRRAVIAVARKLAVILHRMWVDETQFNWGTEDARS

SEQ ID NO: 154781 - protein, 431 aa, unidentified
MNYNQNKKIAQITSQTLIIGVDIAKFKHVARAQDFRGMEFGLPCYFENTKEGFGHFLTWISELQREQAMEKVMVGMEPTGHYWFNLAHILKENEIKFVVVNPLHVKKSKELDDNSPTKNDVKDAKVIAQLVKDGRYAEPTTPQGVYAELRVAKKIRDLLTDDLQTVQGQVHNWIDRYFPEFLTVFKKWEGKAALQFLKLYALPHEIIKFSDQELLTHLRKAVTRSVGLSKIRGLKQAASKSIGLRQGSDMAKLELKMLLDKYELIQLKFEELDAKIEVLLDEIPGVPQMLAIKGVGRDTVAGFFAEVGDLNDYTHPRQIIKLAGLSLKENTSGKHKGKTTITKRGRKKLRALLFRVCMILVAKNSAFKELHAYYTQRSDNPLKKMQSLIALCNKLIRIFFSISKKKFEFSEEKMLKDIPHLSVSKKVEMAA

SEQ ID NO: 154782 - protein, 412 aa, unidentified
MKDLLEISCGLDVHKEKIVACILTGPLGKPTRSEIREFSTLIPDMIALRNWIVSKNCHHVAMESTGIYWMPIYEILEDAFYGDITLLVVNARHMKNVPGKKTDMRDSEWISTLLRAGLLNGSFIPEKKIREFRDLNRYRKSVIRDITSQKNRIEKFLQSSGFRLSSFISDIFGASGRNIILHLIEHGQIDKTALDSCLKTKTRNRIDEILMSVNGTLSEHQKAFLRILMTHYDSLKKHLAEIETSLEEDMAPFALQVEQLNSIYGISTTASCAIIAEIGIDMKPFKTAEHICSWAGLCPGNNESAGKRKSTSVTKGNPYIKSMLCEIAWVIAGKRNTYLSAWYWRIKQKKGAKKAIVALARKLLVIIYTMLKQGTVFDESCFETRRKHCEQKQLSRYIRELEKHGYHVEAQS

SEQ ID NO: 154783 - protein, 411 aa, unidentified
MDIVVARCAGLDVHKDTVVACVRTPGPDGRRAEQVRTFGTTTVELLALRDWLVAEEVTLVGMESTGVYWRCVYYVLEDALACWLANARHLRNVPGRKTDVQDAQWICQLVEHGLVRPSFVPPKPIRELRNLTRYRKAQIEERTREAQRLDKVLQDAGVKLSSVAGDILGRSGRDMLAALVRGTRDPEVLAELARGKLRGELPALRQALRGRFGAHHGLLVGQILAKLDFLDEAIAQLSAEIDRVIAPFAVQVALLSTIPGVDKRTAEALIAEVGVDMARFGSAARLASWAGMCPGQHESAGKQRSGKTRKGPKWLGAHLTEAAKAAGRTKDTYLSAQYQRLRGRRGTAKATKAVGHQVLVAVYHILDRGVPYHDLGADWFVRRRPATQVRKLISQLNTLGYQVTLNPIQAA

SEQ ID NO: 154784 - protein, 335 aa, unidentified
MDPIQPMTWVGIDIAKLTFEVCLLRTQGKLQRKSFANTPEGFAKLVRWTEHLAPETICHFCMEATGSYYEALAVFLAEGDYRVSVVNPYRTRHAALGKGSINKTDTAEAYDLAEYARKEQPPLWRRAAPEVRLLIGLLRRLQTLKDQLAAEQNRLSEPGVLEEVQTSLKKSIAFLEGEIDALLKQIDTHIGGHPDLKADRDLLLSIPGIGELTAAWLMAELPDVSLFASGEAAAAYAGLAPSPYTSGTSVKRLTHLSKKGNPHLRRALFMPALTAIRFNPLVKALYDRLIAKGRPRMVGVGAAMRKLVLLAYGVLKNRVKFDKDWKSTPSSSAEA

SEQ ID NO: 154785 - protein, 353 aa, unidentified
MRIVCALDVHRRQITYAIVDVRSGEMSRGRITPATRESVREWLARFDSLRDVHFALEGTTGWRFVAEEVARVGHRAHLADPAETAVKRGRKRRAKTDRADCDLLLRLLSARELPESWIPPVQILELRTRVRLRKTLVDERTAWQQRLQAQLFHQGVPRGLRPRTRAGREALAKVELSPAGRELVSLALRMIDRIERELAPLDRALSLYARRQPGCRELIARLYGVGPVTATAIVAELGDARRFGCSDDAVRHCGLDVTVHQSDRKRASGHLSHEGPELLRWALFEAAQQACRSASPDYQYYRQVARRIDHNRACLSVARKLCRRAYHILRELGDEALAPIETPDREEVIAAAA

SEQ ID NO: 154786 - protein, 377 aa, unidentified
MNNIIYCGVDFHARQQTICCLKTETGELAFHELKHDDKDELRKFYSQFQGPVIIGLEASGYSPWFEQLLEELGHEVWLGDATEIRRRARRRQKNDRRDAELILELLLHDEFPRLHRPTPESREILRMLRYRHKLVKVRTIMKNSLQSLSLQSGLSLQARLFTRAGEQQLLATAMSPVMTEQRKQWLALLQQLNQRISETEWWLKQQALKDPRISLLRTHPGVGLLSSLGIVHTLIPVSRFPNTRKVAAYGGFDPMERSSADKKRYLGISKAGSRLLRFLLIEATQTAVKGDADLKRFYRRLEQRRGRPKAKVAVARKLLIRSYIMLRDEINYAEFQQRAVAARLARENARVNIPGPLIGQSASSAKAKGRERIKPHG

SEQ ID NO: 154787 - protein, 407 aa, unidentified
MLVQHAVPVSPLTVVVAIDVGKNEFAVSVTDAARRRLLKPRLGCPMTAPSVREVVGRISRLLPTGAVVKVGIEAAGHYHLPLLAAAVWPTGWELLELNPAHVTEQRKVLGKRTIKTDVIDLEAMTELLLAGRGLPVTATEAVLVELTAWSAHRTRRIQIRSGLKNQLLGQLDRSFPGLTLALPDVLGTKVGRLVAAEFADPTRLVALGSSRLIRFGATRGVQIRKPIADKLLDAARDALPMPDAAIARQVLAADLALASDLDRQVAQAEVELARLLPLSPFRTLTSVPGWAVVRAGNYAGALGDPARFSNPRQVYRSAGLNPIQYESAGKRHDTRISREGSVELRRALIDLGMGLWLNEPAATARAVELRARGKKGGVIACAMAHRANRIAFAMVRDQAIYDPSRWT

SEQ ID NO: 154788 - protein, 415 aa, unidentified
MSNSLIVGVDVHSQTNRTCVMDSQGRERGRRFSVANNRPGTQALIGHIVQAMNEGEFDSVCLAAEATNWYWLPFFQTLSQDPRLQDWPVALYAFNPRLTARYKEIFCDQDKTDSSDAWVIAERLRNGRQSPAPFQIDAKYLSLRFLTRYRHHLVKDLVREKNYCMSVLYLKASEYRQDHPFSNVFGATSQALIQEFASLEQVAAMPFEELVIWLDTKGKGRFPDPAAVARELHQVAQDSYPLEPDLQQSVNYVLTWSFQHVNFLDRQLQRVNTAIADAMRHIPHTLDTIPGFGPVFSAGIIAEIGDLARFNHDEAKVAQYAGLHWRQNQSGKFQAEDTYLTKRGNAYLRYYLCEAANAVRMRDADYAAFYQRKHDEVPKHQHKRAVVLTARKLVRLVVRLLTTNQPYRLRSAPSA

SEQ ID NO: 154789 - protein, 322 aa, unidentified
MSQPNPLCVGIDVSKATLDIAASSDVAQFTVSNDSDGFNAIITGLRRHSVALVLMEAIGGLEVAVACSLQAEGFEVAVVNPRQARDFARAMGYLAKTDRIDARVLTQMAEVINRHPERKRFIRALPDAERQALAAMVVRRRQLIAMLVAERNRLHPFHPQNKKSINTIIKALEDELVRLEKEMDSHIRNHFKEIAERLSSIKGVGTMTVSAMLAEIPELGTLSRREISALIGVAPVNRDSGTMRGRRTIFGGRAGVRSALYMAALVATRFNPVIKTFYVRLLAAGKAKKVALVACMRKLLTILNAMLRKNEEWDESYHHVAP

SEQ ID NO: 154790 - protein, 374 aa, unidentified
MGKVEEGFAKGKPMYVGIDVHKRDWTVHVLCQGEELYHSTITPEPERLIATLKRFEPSEVHTVYEAGPTGYWLHDALVEAGFDSMVTPPSLVPRIGGRMKTDHRDSTKLATMLAGGFLKRVHVLSPEERAHRQLLRTRNQIERHRKQTQAQMKSMLLFHGKRAPEGLLERWSEAHVKWLASIEWEYPALQASMMALVELFLYLDKQLKEMNVQLETLAQTAKYRERVGLLTQIPGMGIYSAMTILIELQDVERFQRADQLASYLGLTPSQRSSGESIRMGGITRCGNPRLRTRFVESSWTLIRYDKTVRETYERIKHQTGSGKKAIVAIARRLALRVRRVLLDAKPYHYGDGTVPEYAKDKQREIRRFQKMQTA

SEQ ID NO: 154791 - protein, 457 aa, unidentified
MARKGRSTKGIERAQPFEGISRVNPNAAGMDIGSVEIVVCVNGADNTQLVRAFGNYTADLENIGDWLEEHGVTTVAMESTGVYWIPIFEALEARGFECLLISSRSLRRVSGRKSDITDAQWIQTLHSYGLLESSFRPQADLIALRTLLRHRGQLIEHRSPHIQHMQKALLQMNVQLSQAVSDITGVSGLRIITAILNGEREPAKLGALREPGCKKSAEEIGRALTGTWRAEHLFVLKQSFEMYVYYSEQILDCDEEIEQTYAGLRVDNDPGDLPPMSRRKRGSHSKNKPKQAEEIRAHLKRISGVDLSLVDGFGISLAQTVLSEVGTDMSKFPSEKHFSSWLGLAPKHEISGGKVLKNRTLKTKNRAGQAFRMAAQSVKRSETVFGVKYRRMRARLGPAQATVAVAHAIARVVYRMLKYKVEYETISVEEYEKKYKAQQLKYVKKKAAGLGFALVPA

SEQ ID NO: 154792 - protein, 318 aa, unidentified
MLAQATVSATPAGYRQLLALADQQPGQRVWAIEGTGGYGAGLTRFLHTNAERVVELDRPKRPARRHGAKSDPLDATRAAREALGRDQLAQPRAAGHRAALQARLTTRRSAVQAATDAQRQLHALVVAAPDTLRGQLRALTTRQLVTACGRLRPRAAWDTETIATAASLRALARRIQLLDAEIADHTRAITTLVRAWRPDLLTRTGVGPIVAASVLCAWSHPGRCPTDAAFAMLAGAAPVPASSGQTVRVRLNRSGDRQLNQALHLIVLTRLRYDPATRAYAQRRRAEGKTTREIRRCLVRYVARQLYRLESAPALDPT

SEQ ID NO: 154793 - protein, 350 aa, unidentified
MLNRNVPRPAAVYGIDIGKNIFHVVALDTDGTVVQRVRFRRDTLLQFFQRAAPALVGMESCAGSQWIARKIQALGHKVRLIPAQFVKPYVKSNKSDIIDAEAIAEAATRPTMRFAALKTEEQADLQALHRVRDQMIGTRTRLINQMRAFCLEYGIALRQGAGLFKLDLPQTLEDLSNGLSGAMRKLLTDLFNDLRQLEQRIADVTREIEAIANREDVARRLMTIPGIGALGATALLAAVGNGRQFQKARDLAAWLGLVPREYSTGGKQKLLGISKRGNRYVRKLLVHGARSCFRHLDRTRDRLGNWLDGLQARMHPNKAVVALAAKMARIVWVVLTKPGALYERRDPAFA

SEQ ID NO: 154794 - protein, 340 aa, unidentified
MQAITIGLDIAKNVFQVHGEDARAGAVLSKRMGRASVERFFAQLPPAVVGMEACGSAHHWARVLGSLGHEVRLMPAAYVKPYVKRNKTDARDAAAICEAVQRPSMRFVAVKSVEQQCERALHRARDLLVRQRTQLMNATRAMLAEMGIVAAQGLKGFAHLRSLVEQGDAAIPALLLPSLSALVRQWHALDSEAAGLEREIVARARTDARARRLMTIPGVGPLTAHAVVAAIGDGRQFACARDFAAWVGLTPRQSSSGEKHSSLGITRAGDTGLRRLLTLGAASHLRQMRARPDKAGPWVTGILARRPMKVAVVAQAAKTARIAWAVLTSGEEYRARSVAA

SEQ ID NO: 154795 - protein, 347 aa, unidentified
MNFYKVPHKYYCGVDLHSRTLYLCIVGQDGIVLLHRSLPCDPDRFLLAIAPFREDLVVAVECVYSWYWLADLCAREGITFVLGHALYMKAIHGAKAKSDRIDSGKIAVLVRGGLMPVAYAYPADMRATRDLMRRRLLFVRQRGSLLGHIQITHHQYNVEAPGKRITYRSNREGLGEGFADPSVRQTIAADLALADHYEVIIGELELAVLRQARVHDPNALVLLTSVPGIGKVLALTILYEIHDISRFPSVRDFASYSRLVKCERRSAGKSLGSGGDKIGNAYLKWAFSEAAVLFIAKSEQGRTVLKRLERKYGKPKALSVLAHKLGRAVYFMLARKQPFDPQRFAES

SEQ ID NO: 154796 - protein, 466 aa, unidentified
MKHAPRRQGKKKPAAGPSLLERINPNAAGIDCGAEEHYVAVPADRDPVPVRWFKTFTADLHRLAEWLLACGVTSVAMESTGVYWIPLYEILEARGLDVVLVNARHVKHVTGRKSDVLDCQWLQELHSVGLLPSRFRPTAAIAVLRAYLRHRETLVQGAATHIQRMQKALVQMNLQLSVVLSDITGVTGQRVVRDIVAGQTDPHALAQHRDARCQASEADIIAALTGHYRPEHLFVLRQNLELFDMYHRQLAACDAAIEAHLAPLAAQAPPPASPLPASRTKPKRRDNAPRFDMRTPLHQLTGVDLSQIDAIGPYSALRLLAEIGTDMRRWPTEKHFTSWLTLAPCNKISGGRLLSSKTMPSANRAAGILRLAALSLGRTQTALGAFYRRLAYRVGKAKAITATARKLAILVYRSLKEGLLYHDPGAAAYDAHHQARVLRHLRQRAAHLGFSLVNRDTGEVLDHAVS

SEQ ID NO: 154797 - protein, 458 aa, unidentified
MKKELQISMEVVHPHAAGIDIGSRSHWVAVDQNPQNVREFGVYTKDHLLLIDYLRSHQITTVAMESTGTYWQTLFNALQSTGFEVILVKGSNTKNVSGRKTDLLDCMWIQKLHSLGLLSASFILSDHMQTLRTYFDHREYLIGQASRYMNKIQKALRLMNIRLDVAISDITGKTGRAIINAILSGNRDSRHLASLADRRIKKSRTEIENSLHGQWRDDLLFELKSCLTFYDMYVAEVKICDQKIEAVLQQDLPSNDQAFQLSNEPERSSAKKKNKSSPGFNVRQLAFAHLKTDLFQIPGVSHTTVLSLLCKMGKDIHRFKTAKQFASWLRLVPDNKKSGGKIISTRTPTGKNSLAHSLRLAANTISNQKDHPLAPFFKRIAYRKGRGAAITATARKLAIIIWNMITKSQSYKGYDYDMINQKRKSAQIRNIRRSLTKLNLTDEEMKNLLPITNSESTP

SEQ ID NO: 154798 - protein, 478 aa, unidentified
MTAGKSAKKDGAAAGSPAVAGPGGGEGAEVAEERVEVVTYAAAVDVAKGSGMVCTRVPGSRPDRKRQTVWQVDATYAAVVALMDHLRCEGIQRLVLESTSDYWRIWYYLAEAAGLEVWLVNAREAKHLPGRGKSDREDCVWLCKLNERGMLRRSFVPPEAVRDLRSLTRTRSRLAQDQVRHQNRVEKILEDALLKISVVISDLFGTSGRRFPGALVAGERSPAALAALGDRRLKATRQQLAAALTGRFREVHAFEIATHLRLIDTINEEITRLDARIEQQLASIPGVAPACAGCGLIGSGHSPGCASDGTPVLDLVARLDEITGVAVCNARVLIAELGTDMSVFPTPGHAAAWARLTSRTLQSGNSARPGRTGKGNPYLRGALGQCVMAAARTDTRLGEQYRRIARRRGKQKAIVAVSRVICEIACILISDPGARFTDPGADYYSRKDSRRQTRSRIRELERLNPGMKVTLTPVQQAA

SEQ ID NO: 154799 - protein, 347 aa, unidentified
MVVARSRSALHRTRMVEGTEGSHHKEGSTKMRKHNTVCAGIDTGKRKLDVALAESPHRLQVDNNCDGHTALSAWLRKHRVKRAGIEASGGYEQAAVAKLRRDGFVVIVFQPAQVRAYAKFHLQRAKNDRIDAALIAVCTAATQKIHSPPDPRLAPFAEHLTLVEQLTEDIAHVKRRRETCRDHRIRRYWDGEIARLKTLLRTELKALIAAIRQHRDLSARLDLIASVDGIGPKTAVAILLRMPEIGRVSREQAAALAGLAPYDDDSGDHIGVRHIDGGRERLRKSLYAAALAAAFHWNPQLNVIYRRLIAAGKPHKVALVACARKLLIYANTVVERGTPWTNRPVEI

SEQ ID NO: 154800 - protein, 391 aa, unidentified
MVCVGIDVAKDKHDCCILDSDGTIRADCITIPNNMDGFKQLLQTIRDCTKRSDKIKVGLEATGHYSYNILGFLLDNDLAVYVMNPLHTNLYRKSLSLRKTKTDRVDARTIATMLLSDVDLKSYTDTAYHNEELKSLTRYRFDKVRERAKLKQSVSRLVTILFPELEKLVPSLHIASVYALLSEYPGAKQISEIHLTKLTNLLVTASKGRYGKDKAIQIRDAASTSIGSVMPAKSLELKHTIKLIRELTSEIDEIEVSIQKIMDELNPPILSIPGVGIQSAAMILAEIGDFSNFESPDKVLAYAGCSPSTYQSGKLTNCYAHMEKRGSRYLRYALYNATKYVCYWNPVFAEYLAKKRAEGKHYNVALSHATKKLVRLIYALQKSGKAYLTAA

SEQ ID NO: 154801 - protein, 454 aa, unidentified
MLKINYMSTLFVGIDVSSKSNSVYAMDFEENRYISSSFGNNQPGADELADMIAACMQKHKNLDTLLIVLESTSVYSVHISNFLSASEALMPYKPYVFCVNPKATANYRKSFIGMEKTDPSDAYLIADFGRVGRTRKMEPWRGGQFIALKRLTRHRTHLSECITREKTYMVSNLYLKFSELQLLDGDDKPFGSLYGAAASAVLTEFLSPQEIIDMPEEELLSFLAEKSRNRISDISKTSELLKKAARDSYRLDKCMYEPLNISLASSFNCIHAYQKEIKLIEQAIDKCIKGMNPNALIILQSIPGIGPVWASGILSEIGDITAFHSSDALAKYAGLYWPKGDSGDFISEDNQISKAGNPYLRYYLGEAANSVRKHIPEYADYYARKYAEVTKHQHKRALALTSRKFVRLVFGLLAKNQLYTGEKLDAEYHIKSFEIYTEGLLKLPFFPKYTSKSF

SEQ ID NO: 154802 - protein, 337 aa, unidentified
MKITTIGLDIAKRFFHVVCCNEQGGIVKKKMLRRAQVLAFFQSHPECLVALEACATSHYWAREIKQCGHAVKLIPPQHVKAFLIGNKNDYNDALAIAVAAKQPHIKNIGIKSIEQQDNQAQHKARELAVRQRTALCNQIRGLIAEYGITLSKGVNHIRKNIPLMLDDETTQLSGAFKMILAQLQVQLTSLDDCIDTYDKTIIITVKSNPICQRLQTIPGFGPMVSSAYFNEVGNGANYSRGRDVSASLGIVPRQHSSGGKDTLLGISKRGNSYLRCLLIQGAKAVVSRAGTKRDKLSQWINRIVQTRGHNRACVAYANKMARMAWAISASGETYSPV

SEQ ID NO: 154803 - protein, 320 aa, unidentified
MTMNRSECFVGIDVSKTRLDVAVLPQEESWSEANEDKGIERLVKPLKKLRPTLIVVEATGGLEISLAGVLAAAGLPIVVVNPRQVRDFAKATGKLAKTDSLDAHILARFGEALRPHVRPLKNEHAQELSALVTRRRQIVEMITAEKNRLTTAPKPVHRDIKAHITWLEKRLDTTNENIAKLIKSSPLWREQDTLLRSVPGVGPTLSATLLCGLPELGTLNRRQIAALVGVAPLNRDSGLFRGRRTFWGGRAHVRAVLYMGVLTAVRYNPVLRRFYLRLCQAGKPKKVTLTACMRKLLTILNAIVKNRTSWQADYSLGPCH

SEQ ID NO: 154804 - protein, 374 aa, unidentified
MGNVIEAFVAFDTSKLRNAVAIAEAGRAGEVRFLGEIENTAVAVAKLVRKLAGKYGRLTFCYEAGPTGYGLYRQIEGLGYECLVAAPSLILKKPGERVKTNRRDAVSLVKQLRAGDLTAVWVPDPHHEAMRELTRARETAVEDLRRKRQQVSAFLLRQGLHYPGERAWTKTHRDWLASQKLEYAEHRIAFEEMLLAIRQAQERIERLEQAIRLAVPDWSLAEVVTALMALRGIDFISASAFLAEIGDLSRFRTPRELMAYLGLVPSEASTGDTVKRGAITKAGNRRARRILVESSWSYQHPPRVGKEKQEKLAAAPPAVREIAWKAQCRLSARYRALTRKGKLKTVAVTAVARELSAFIWAINRQIANSRAAAR

SEQ ID NO: 154805 - protein, 346 aa, unidentified
MDDAIAGGQVVGIDLHLYRSVIARIDERGEQLGWVRINNDPKALVAECRKAGRGAPVAIEATYGWYWAVDALRAARFDVHLAHPLGMKALRKRKRVKTDPADAYELANLLRLGSLPEAYISPPDLRELRELVRHRRQLVKLATAVKAGIRALLAKHNIRLPATQLESDTATGLLDALTLPGTYAVRLASQRRLMLVLADEIAAVEVELHGRLRGHPGYRNLLTVKGIGPILAATFVAEIGDVTRFPTAGALCCWAGLTPRHYESDKTVHRGHISKEGDPLVRWAAVEAIQRQCEPAVKAVKDGIVARRGKNARNIAKVAAARRMLEVVYYVLRDGQARCLTSKAAA

SEQ ID NO: 154806 - protein, 412 aa, unidentified
MEVMYPRCSGLDVHKETVVACVRLVEDGKISHSVRTFATTTASLIELGEWLEGNGCTHVAMEATGVYWKPVWQVLACESFELVLANAAHVKNVPGRKTDVNDATWLSELLAHGLVRASFVPKPEIQELRSLLRTRKQLVREKASHVQRLQKTLEEANIKLESVISDVMGYSGRAIMQALIAGETDPAKLAALAHRKVRASQATLREALQGRVKRQHRFLLRLHLQQIDALDASIAEIDREVDAGLSCFRDAVKQLITIPGVSELSAHVIISEIGTDMSRFATDAHLRSWAGLCPRNDESAGKHRSTRLRRGGHWLKTMLVQCAWASTRSKGSYLQALFLRLRGRCGPKKAICAVAASILTAVYHMLKDGTFYQDLGAAHFDRRRPDAQARRLLKRLASLGFSVELKPLATAS

SEQ ID NO: 154807 - protein, 336 aa, unidentified
MSLYCGIDLHSNNNYACVIDNKDKRIFEKKLGNSAELVIQALQPYKRRLKAVAIESTFNWYWLVDSLMAAGFEVMLVNTAKVVQYEGLKRTDDRYDAFHLAHLMRLGILPTGCIYPLAERGLRDLMRKRMGLVRDRTRYILSLKTQHQRQTGRNLASNDIKTRKFQLPVLGDANVQLAMSSNLSMIRVLTGEVKALEKVIMTQVESSPSFELLKTTDGIGDILAETILLETGDIDRFKSPGNFASYCRCVDSRKESNGKKKGVGNKKNGNKYLAWAFMEAAKFAIMHSVKASQYYSRKKAKSNRVVALKALSHKLARACYYIMKRGVAFDEDKLFN

SEQ ID NO: 154808 - protein, 411 aa, unidentified
MAEGYDFYIGLDWGTARHQVCVLDAAGRRVAEQTVAHSGAGVAAWLAELARYAPAERLAVALEVPRGAVVDALLAHGCHVYALNPKQLDRFRDRQTVAGAKDDRRDAGVLAAALRTDRGAFRALQPEDPRLVPLRELSRLARELRTESMRLTNRLREQLVRVFPQVLTLCPAADEPWLWTLLERASTAPEAARLRPNALRALLAEHRVRRVSGADLYACLQAPPLPASPAALAAAGEHIAFLLPRLRLTFQQRGQCERRLEKLLDALAAGEPAPGQPLEHRDVTILRSLPGVGRVVAATMLAEAWPALAARDYQMLRTHSGVAPVTRQSGKTRLVTMRRSCNGHLREGVFHWASNSLRLDPRCRAHYDRLRRQHGHARALRGVADRLLGLLVALLQAGTLYDPARRHVAAA

SEQ ID NO: 154809 - protein, 432 aa, unidentified
MRSTKMAKQNEETIAAYIGLDWADSEHEVTMLVVETGEVESRKLKQESEALADWVQSLRERFSGRKVAIAIEQRKGALIYALMCYDFLILYPVNPKTLARFREAFYTSGAKSDPGDSGLLLDLIRLHRDKLRPWVPEDADTRLLQMLVEERRGLVDEVTRLTNRLKSTLKQYFPQALEWAGELDSRQALDFLTRWPMLESIRKAGAVAVEKFYCQHSMRNQDKIEQRVKAIKEARALTTDRAVLAASKMKALAIVRQLRALGKSIVEMEARIQELFEQHRDHEVFSSFPCAKKVLGPRLLAAFGGDRTRYESALELQSFSGIAPVTRSSGKSKTIHKRMACPKFLRQTFHEYAAQSIKKPGWARTYYRRHRDKGVKHHAAVRALAFKWIRIMFRCWQEQEPYDEANYIASLKRRSSPLVSGLPPAPGPLVEV

SEQ ID NO: 154810 - protein, 317 aa, unidentified
MTSEMLIGIDVAKDELVIDSEQGLLTLANTAEAIDAWLKTLPTGSYIGLEATSDYHQLMAEQAVLMGMVVYVLNPRDMRHYALGLGRRGKTDRVDAQMIRRFITAERGHLRPYQPASAMQHQVALLQRRRATVVKHRQALQKALRSVKELEAPLIDTVAALDGLLKHIDQQLDDLLTLQPALKAEARRLESIPGIGRQTSTQLAVLFDRVPLSRSDAVVAFVGLDPRACDSGQKRGRRRVSKRGPGELRRLLYNCAQAAAKTAVWKPYYQELRAREFSATQALVIIARKLLRIAFSLWQQADARFDAQKIACLNNAA

SEQ ID NO: 154811 - protein, 338 aa, unidentified
MNSNDPRCKLYLGVDTHLELHVATLINVLGQVIKTKSFSVNLAGYRELLAWCKFYGFLQKAGIEGTGSYGAELTKFLIKNDIDAYEVMQPNRMERRLKGKTDSIDSENTARSVLSGEAKVIPKSHTESVESLRSLLITRNSAVKARTQAMNQTRALLVSGPGELKQSLYLPKLSTCAAACLDRCSNSSEPLMISLVLLAQRWSFLNDQVKVLDNALKKLTLDTAQSLVSRFGGGANVTATLLVAAGDNDNRLRKESSFAALCGVNPIPASSDKTTRHRLNRGGCRSANNALWTAGMVRMRSDPRTKGYVARRTAKGLSIKEITRTLFPLILRDLESVA

SEQ ID NO: 154812 - protein, 336 aa, unidentified
MSASVFEVARPTLCFRGLRGVAEPILIAGGRAVGHCSEIFVGIDVAKMRNAIAVADGERGGEVRFVGEVDASDDSMRRVVNRIAASCDRVHFCYEAGPTGYGLHRLITSLGHPCTVVAPSLIPRKPGDRVKTNRRDAIALARLLRAGELTAVWVPDAGHEAMRDLVRARAAAVETQRVHRQQVSGFMLKHGRIFSRTKAWTMRYLRWLQEQKFDHPAHQIALQEMVEAVRISKERVQRLEEAIEEFVPTWSLAPVVRALQALRGVDLIVAVTFVTEISDLSRFESPRQLMGYLGLVPSERSTGDTVKRLSRSRPWPENTALMSAVNNLDARCRPLG

SEQ ID NO: 154813 - protein, 350 aa, unidentified
MKTILAIDLGKRNSVFCRLNTSSLKPEYFTAKTDPQKFHDIFIELDIESSIVLFEVGTQAGWLSDVLRAIRIEFKVANVNHSAWKWTNNQNKSDKADAHRLAMMYHHGFFPEVYIPEKPVRQKRSLIYYRQKIVNRMTQIKNGIRALMTTVAIDLPTGKNCWTKKYRNQLEQSALPFDSIDDPCDLWRGQLHTELQQLDALRTCLDKTTAKLDELNKQKQSIKLLETIPGIGPRTAEAVVAIIDDPNRFKSCRQVSNYAGFTPRRYQSGQMERSGRISKRGNPLLRALLVQASWAALRFDWAKHIYKQVCRGSAKRRKIAIIAVARHLLMRSWAMLRDNEPWQYKTQTTL

SEQ ID NO: 154814 - protein, 374 aa, unidentified
MTYIGVDLHKDSMTIVCCDKQGEFIRKERIPCKCVGKIEEFFAQPQLHPCTVVVEAIGFYHWLFDLLEGKVEKLVLANPVETRKYCWDQAKTDFRDARKLALMLAGGEFERNKSLSCFVPDKTLRTFRELTRYRHNLVDRHTSLANSAHRILLKNNLAGPKNINGKSLESFLSRFGEKFSVYHKNFLMQISENLFYNERQIKQVEQEIQPFLHMDRFKQFYDILTSIPGIGDTVSASLISEIGDFSRFDHPDKLASYAGLCPRVFASDKTVRYGKITKKGSVFIRKSLINAAWVSIREDEKPRRIFNRVCKRAGRKKAVVAIARKLLVWIWYLVAEGEKWHAISTRPDSLTSNKSGVTLVRLLKHAPYRVNSQA

SEQ ID NO: 154815 - protein, 349 aa, unidentified
MRCFQPPAGTRFYAGVDLHARAIFVVVLDHDGRVVFAKNLPANPDAFLRAVAPFRDGLLVACECMHCWYWLADTCRQHHISFVLGHAYSMKAVHGCKTKCDRTDAEAIARLLRGGNLPPAYAYPSERRGLRDLLRARLRLVRQRARLYGHVHTARRQANLPPASSDVKYRCKRAACTADIADPFVRRRVETHLALLEPLDTTIRRLEKEISDAAGQIFPAELAVLQSAPGVGKVLSLTILLEIDTIGRFGTRQQFCSYARLCGAVQTSDNKRAGDGNRKAGNAWLKWAFSEAAVLSAQKDEQIGALLQRLASKLGKAKAYSALAHKLGRAFYHMLHTREVFDVNRFVRH

SEQ ID NO: 154816 - protein, 328 aa, unidentified
MKSNDSVSVAAELPVLGFDVAKASVQAELRTNGKRVRFGFANNVKGFAQLARILNQHNVAKVWAGLEATGPYSHALALWLHGQGHRVSLLNPRRVKQYARSAGNRNKTDLLDAGIIADFVCAIEPAPWQPPTLEVAQLQALVRRREELSLMLQAEKNRLEGVAPNVRSSLGRMIAALSAEKTRLEKLILQQIRSHQQLSRDHQLLCTIKGIGSLTAAILLAEMARPGQVERARQAAAHAGLAPRREESGTSVRRNRGLGKEGNRYLRKALYMPALVAIKYNAPLRYFASRLHAAGKPKMSVICAVMRKLIHIAFGVLKHQKPFNPSLA

SEQ ID NO: 154817 - protein, 320 aa, unidentified
MKTHEVYIGIDVAKTSLDVAMHSTEQRWNFSNDDIGIEHLVSALQELTPILVVLEATGGIEFPAASALALAGFPVAVVNPRQVRDFAKATGKLAKTDTIDAKVLAHFASAIRPEPRVLPDAVAEEFATILARRRQVIEMLTSEKNRLCRAKMSVKVSIQDHIKWLEQALAKIDDDLNQSVRKSPIWREKSLILRSAPSVGPVLSVTLLAQLPELGTLNRKQIAALVGVAPLNRDSGTLHGKRTIWGGRASVRSALYMATLVATRHNPVIKAFYQRLLNKGKSKKVALIASMRKLLTILNAMLKHGTPWRYVESPIFGSCS

SEQ ID NO: 154818 - protein, 408 aa, unidentified
MNTLYVGIDVSSKSNVIYLMLPNGDKHSNFSVANSHEGSTQLVKRIHSALTSHSLDTVLIGLEATSVYGDNLVYFLREDATLAPFNRKIHVLNPKQVKKFHDTYNDLPKNDYVDSFVIADCLRFGRINKEVYMGDYRYKALQNLTRARFFAVQNLVKEKQRFMNVLFKKYSTMTQEKVFSDTFSTTALAVYDEFESAEALANMDLHELTDFIMKKGKNRFPDPDAVAKAIQKAARSSYRLPKTVNDSVNQVLSISITSMKALESQIKEFDKAIKAQMELLPNVLISIPGIGPVYSAGIMAEIGDINRFNSQAALAKYAGLAWKQHQSGGFESEVTRLIPSGNRFLKYYLCEAAFSLVRCDKEYSDFYHLKYKEVNRYQHKRVFALTARKFVRLVFRLLKDNRLYTSAE

SEQ ID NO: 154819 - protein, 321 aa, unidentified
MNYVGIDVSKATFVVAYSSAKSSETKTFENTTKGVHKFIQTITTEDTHCVMEATGNYSMLLVYLLSKAGITVSMENPLKIKNFARVMLSVVKTDEIDARMIAMYGEKMNPAPFKLRSDSLMVLKQKRTVLRQLKKQLNANTNLLESMEALPFIDSVCKKILDKTVKFLMKQIKEMEEELSSLANIEYRKQMDLLTSIKGIGVTLATALIVATGGFTYFDNAKQLTRYLGLSPTYQQSGTSVNLKGHINRNGDSYLRSQLYVAAFSSLRCNTECKACFDRLRANGKPGKVAVIAVANKLVRQAFAVVTQGKEYVDGFISAKK

SEQ ID NO: 154820 - protein, 388 aa, unidentified
MLAVVVSDVEVDGEYRFERRMFGSNPEQLRSLAAWLIEQEAEEAVMESTAQYWKPVWEALERYWKPIREKREGASRRSGTLHLAQAQSNRGPRGRKKDFPDAERLVKRLVARELTLSFVPDAEQRLWRTVMRRKYQLTRDRVRLQNQLESLLEEGHIKLSSFVSDLLGTSARRMLKAIADGETDPAALADRKLRATPEQLCDALGACTDLKPVYRRLLRMVLEQVQFLEQQIGQLDQEMAILLNQHQDAVQRLAEVPGLGVDSAQQIIAEVGATAATFPSEKCLSSWVGACPGDDESAGVNYSHRSPKGNRHMRRVLNQTANAAARTKGSIFEIVYRRSVPRLGHNQAIGAIAHRQCRLIWLILHQGARYEERGRPSPNNPSKSAPRE

SEQ ID NO: 154821 - protein, 315 aa, unidentified
MEKYIGIDISKATLDLYDGEKSYKVNNNTQGFAFIRKLTKHKKDLVLIFEPTGVYAYALIAYCEKHGIRAIIVGSKEARDYARSIKQRSKTDKIDAKVLYRYRTQVSAEAITVPSLNSRVIQITQRRNVYDNYRHTIIQLNNLLEATLKEDKHLIRSIKKQIAHLEKAADALLKEIEKLLTKEEEQKQALKHLKTIPGIGHKSALALLLEFMRYPHAKSKEMVALMGLDPVLKDSGQFKGKARISKQGGTHLRTKLYMPTVVAIRHNDRLRVFYERLLSKGKPKKLALMAAMRKLLRIAFAVVKNNEPYRALEVA

SEQ ID NO: 154822 - protein, 312 aa, unidentified
MMQEVFVGVDIAKDWLDIFHPGSGLRRIDNTAAAARRFAKASAKDGVWVIFEASGGYDRLLRDALEAAQARFSRVNPRQARDFARAMGVVGKTDRVDARMLAEFGARLRPAPTAAAAPERCALQALTTRRRQLVEIRKQELTRLPQTLDPAARADIRSLILILNARIRRIEGAMAAQVGATPDMAQAARRMQTVPGVGPIVAATLLAELPELGQLDRRRIAALAGLAPIARDSGKHLGKRRIGGGRPTVRAILYIAALHASRLSQPFKAFRDRLKAAGKPTKVTLVATAHKLLDILNAMLAASTDYKANTMP

SEQ ID NO: 154823 - protein, 410 aa, unidentified
MEVLHAHCAGLDVHKDSVVACVRHMVDGKVTTGVKTFKTTTQELMALSDWLSAEGATHIAMEATGVYWKPVWHILSDGEFELILANAAHVKNVPGRKTDVNDAMWLTDLLAHGLIRASFVPGEPTQQMRDLLRTRKQMVRERSSHVQRIQKTLEDANIKLDSVVTDILGLSGRRIIEALIAGQTMPQALASLAHRRIHASADELEAALRGRVTRHHRFLLKLHLDQIDALDAALARIDEEVGANVEPFRTAVEMLSTIPGISTLSAEVIVAEIGIDMSHFETAGHLISWAGLCPKNDESAGKRRSNRMKKGAPWLKTTLIQCAWAASRKKNSYLQAQYLRIRSRRGAKKAIGAVAASMLTAAYHMLKDGTLYQDLGADHFDNRAKGKHVLRLVNRLQNLGFDVQITPLAA

SEQ ID NO: 154824 - protein, 331 aa, unidentified
MPSSYLGLDVHKVRTQYCLMDPGGEILAEGNLPTEEAASVVPSQGCAVVLEATGSWHHTYDALCDCADVVKLAHPSRIKAIASARIKTDKIDARILAHLLRTDLIPEAWAPPQEVRDLRDLVRLRWRFVGQRTTAKNRISNLLARQCLRYGGTDLFGRGGRAWLAELPLDPHSRALVELLLAAIAEADGHVVALTALLHERLDGAPELQLLQSIPGVGFITAATLIAELGDWRRFGSAKQVSAYFGIVPSVCASAAVAHYGRITRAGSPHARRALVEAAHVAVRLPGPLRRRYLALARRRGKKVALVAAARELLELSWILLSRGEVYRAAA

SEQ ID NO: 154825 - protein, 427 aa, unidentified
MDRVVIGVDPHKRSVTFEARDTREVLRVVGTLPTDRDGYRALLRVARQWPDRIWAIEGASGTGRPVAQRLLADGERVLDVPAKLAARARVFDTGQGRKTDATDAHAVVMVALRDTGLRELTTDDELVVLRMLCDRRDELSKAKAQGLNRMHRLLAELVPGGVPTKKSVAQYRAMLAAVRPRDQLGCTRRRLAADLLADLTQIEARLKALKAELKQAVLARGSGLMSIHGIGPAGAARILADVGDIARFPDRNHFASWTGTAPIDASSGEQIRHRLSRAGNRRLNHVLYMAAFVQLRHDTEGRAYYRRKLAAGKTPMEAMRCLKRRLSDVVYRQLVTEAARREREVEAGPGGHRGATLTSSAADLTPHVGTSDQPQPGPAPATLRPAPAASTSAVASTAAPKRRRARGVNVQRPTGRTTLTPTSAGAP

SEQ ID NO: 154826 - protein, 411 aa, unidentified
MERIYDKCCGIDVHKKLIVACFKKGNKQELREFGATTRELLELAGWLKSGGCEMIAMESTASYWKPLYNILEASELSAMVVNAHHMKAVPGHKTDVKDAEWIADLLQHGLLKASYIPGKDQRELRELVRYRKSLVGERTRELNRLQKMLEGANIKLSGTVSDINGKSARSILEYLLTGETIDSEKYDEMYEKKVIAHNLKASKEQIIDDLNGIMTPLQRRMMKELLAHLDELNNHIKNLDDEIDDFMKPEEKQAVKDIQDITGIGNSSAQAIVSVIGADMERFPTDRHLASWAGLCPGDHESAKKRKYGKTRKGNALLRSTLVICAHSAVKNKKSYFYAQFMRISAHRGKKRAYVAVAHSMLIAIYHILKEGVAFKDLGAGYYNQFNKERKINAYLRKLKALGWEAPAVAA

SEQ ID NO: 154827 - protein, 319 aa, unidentified
MNQKELFIGVDVSKHHLDVAFGHGEDAPVERIQNAPDPVAQLVARLQQLQPTLIVVESSGGYERMLLEACHKAQLPIALVQPQRVRAFAKAEGLLAKTDRLDARLLARFGARMCPAASEPPDEKQPIMDELAKRREQLMQMRTAELNRLKTTRCAARELIQKHLEYLEQELAEVERKIDELMKQSNELSAACDLLMSVPGIGRVTANILLIRLPEILKLGPKAIAALAGLAPMANQSGSKDKRRRIHGGRQDVRNVLYMATLSATRYNLVIKPFYQRLIARGKPFKVALVAAMHKLVCILNAMLKRKQAWNPNLCPSTS

SEQ ID NO: 154828 - protein, 436 aa, unidentified
MMEEVADEPLYRDRVCGIDIGKAEMYATIRVPSEKDPVRRASETRRFATTRRGVLELADWLRSWQVPALVMEATGDYWKGPCYRLEAEGFECVLADARQVKNLPGRPERDPSDSAWLAVCFERGSVTACFVATPEFRLIRLHTRYRRDLIEERTREKQRTGKLLESAALKPSSVVTGLHGVTGRDIMDHLIAGERDPGKLADLARGRARRKTGELEQALDGAEFFTAAHAALLKSMLERIDRVNAEIARLSQVIEDLLAPYEEQLQQAESMPGWGRRSAEDVLAETGPDMSRFPTGGHLASWCGRTPLDKQSGKRKGRSSHKKGNKYVAAATGETAVSAGRTDTREGARYRKLARSRGKGKACVALGNTQLKVYHKLLSNPGMRYEDLGPDYYDQRRSHHRQVSHHAASLHRLGYKVTIERIDPGTGELTGEILAS

SEQ ID NO: 154829 - protein, 341 aa, unidentified
MNEIGIIGLDLAKQVFQIHGASPDGRVVLRKKLGRGRMLEFFAKLPSCIVAMEACASAHYWGREIGKLGHEVRLINPSYVKPFVKRQKNDAADAEAIAEAASRPTMRFVPIKSAEKQASSMTFKVRDLLVRQRTQTINALRGHLMEYGLVAAQGMQNVPRLRQLIETHPDLPETARSLSFGLLQHIESLTDKINAVEQDLRARARQDDVASRLTTIPGIGAICATAMEALAPSAAAFSKGRDFAAWIGLTPKQNSSGGKERLGKTSKMGQRDLRRLLIIGATTVVRWARRRGAPAGTWLARMLLTKPPKLIAVALANKLARIAWALMAREGVYQAPAPGPA

SEQ ID NO: 154830 - protein, 407 aa, unidentified
MVNRISCQTTVPKSMEVIHMYLVGIDISKYKHNCFIATESGVPLKEFVFENNSEGFKLFHKVLSELDQGQEIRTGLEATGHYGTNLKQFIMASGYTYLEFNPYLTHQFSKAMSLRRIKTDKVDAKTISNMLGSVDYKTLHTQFYHINELKQLVRDRDEILTNRSKTLVKLTNSLDIVFPEFKSFFNNRLGSTALFILKKYKSPAKISKLIMKDYECLRSASNGRFTYPKFSRLKLLAKDTVGVQSTIYNKRMLALISDYEYFDQSLDEIDQEIIQLFSEAKTKLRTIPGLGIIQAATIYAEIGDIHLFSNPQKLIAYVGFDVSINQSGISEHHGHIVKRGSPLLRKAIWIYALPSLRFIPTLNDYYHKKKAEGKHHKVALTHVCRKLIRMIHHIEYNQIDFDDKEIK

SEQ ID NO: 154831 - protein, 342 aa, unidentified
MQVTTIGLDIAKNVFQVHGIDAAEKVVVRKQLRRRQVLEFFKALPACLVGMEACATAHYWARELTKLGHRVRLMPAKDVKAYVKRNKNDAADAEAICEAARRPTVRLVQIKSTEQQGRLMLHRARDLLMRQRTQVINAMRAHLAELGIVAAQGRDGIKELLKIIASEADARLPVDAHTSLVVLAAELQAMQTLIGSIEKRIMVQHRLSEASKRLKSIPGIGLIGATAIAATVPDPKVFGSGRDFAAWIGLVPREDSTGGKQKLGPISKRGDRYLRRILVVGACAVLRYARHKPEKYPWLTKLLERKPFKVVAVALANKMARIAWALLAKGDTYRVPALAAAA

SEQ ID NO: 154832 - protein, 428 aa, unidentified
MDDVARFTQFCKLRNEIRGSGKYLIVGIDIAKDKHHAFFGTPNGKVLWRRLIFTNDIVGYNRLVEQVNTPTHQHQLQHVVFGLEPTSNYHKPLAHWLTQNDYLVVLVAGKAVKDNRELIDGRWDKNDTKDSANVADLIGQGKCLFYENPEEDIISLRNLLSVRKQLKKQEHRQRMRIRNGLLAKYFPEMDRYWGSCIEENLAIVRWYLDPRKISKTDFSLFLQRVTTTDRGARQVTRLRKIHDAAKKSIGLPVDAAAVYEAKMLVKRFKSVRQESLQIMEQIEAICRRLPSYKLLLTIPGFGPYIAPLVLSALANPLRFKSRKQVIRLAGLDLNASRSGKKSQDSVPVISKKGDADLRYGLYQAALIASYHNDYFRTIYHRVLEGRQGERGIKTKARVKLAAKMLVVAWTMLKNNEPFNPNHLLTEPV

SEQ ID NO: 154833 - protein, 372 aa, unidentified
MKERSKIHVGLDVHKDSISIAAAESGRMPGRLIGKVTHDVNKLLKVLAKVGNADQLHIVYEAGPTGFGLQRALHSRGYLCEIIAPSQIPRRPGDRVKTDGRDSVQLAECSRAGQLSAVWIPEPEDEAIRDLSRAREDAVNSRVQARHQLKGFLLRHDVRYTGKTSWCGAYYRWLGTLNFGVGAAQTAFTEYWQAVTAADDRVERLTKALESSITGWRFEPVVGALQALRGVAAITAIGLVAEIGDLGRFAHPRKLMGYLGLTPSEHSSGERTSRGSITKTGNAHARRLLTEAAWNYRFKARIGKQAQIRQQALSEPIRRMAWTAQLRLTQRFAALNARGLQVNKACIAVARELAGFIWAIGMQAQREHGQAN

SEQ ID NO: 154834 - protein, 452 aa, unidentified
MAKKGKRRSDQLPVLHPDAAGIDVGASELFVAVSADRDPQPVRSFPTFTRDLNALADWLQQCGIRSVAMESSSVYWIPVYQILESRGLEVYLVNAQHVKNVPGRKTDVSDCQWLQYLHSVGLLRASFRPPGVICAIRSLWRHRSSLIRMASEHVLHMQKALDQMNLQIHRVLSDITGLSGLRILDAILAGERDPVTLARLCHSRVKSSEDTVAKSLEGDYRPEHLFALRQSLAAFRYYQELIVQSDAEIQRQLGDLETATIAEKTTPKRTKASPYQRRRYEPKEFDLRSELYRIFGVDLTNVPGISAITAQTILCEVGTDVSRFRNASAFASWLGLCPEKKVSGGKVLYTKSRRVRSRVATALRMGAHSLHHAKDYLGEFFRRITRKLGKPQATTATAHKLARIVYHLLSTKQAYDESVFHRCEEDTLRRAELRLRKHAAKLGFHVIPAANG

SEQ ID NO: 154835 - protein, 386 aa, unidentified
MKDETFTPREYDVFAGLDVDKKSIAATFSSQQGFIRSLHMPYSVDYLLNHVRKHFGDQKVAFVYEAGPTGYGLYDGLVAQGYRCLVAAPSMIPRAPGQRVKTNRLDSRGLSESLRGGQLKSIHVPSPIYRELRHLTQLRDTVVREAAAHKQRIKALLLLEGIGFPPATAGRQWTLRVKAQLRKLRCSRTVRFKLDQLLDSLEFCEKQVVSSTKEIRRFCKEDVELFQSIEYLMSIPGIGWIVASQLLARMGDWREIDNVRQLGSFLGLVPTENSTGDSVDRGSITRAGDGRLRSKMIQAAWSAIRQDGELREFYRSVCQRNPRGKGARIAIVAVARKLSTRIYAVLKKQRPYIVRKQVHSAPLTQEETSPQGTTRRCAEPGETDNS

SEQ ID NO: 154836 - protein, 342 aa, unidentified
MLLIGCDYHPSVQQIAMLDTETGDYSEHRLKHSDGEAEKFYRDLKLHTLKIRVGLEATGHRRWFERLLMELDCELWVGDAARIATMRVRKQKTDRQDAQLLLKLMMEDRFPRVWISSLEDRDLQQLLWHRHRTVQMRTRILNQLQSIAMNEGIQRRGGLRSVQGRKRLEQIPLGPWGTRRRSDLLVLLDRMNERVNELTAAVQQEAEKRPEAQLLMTHPGVGPVTALAFVLIIGYPERFQCGKQIGSYVGLIPSESSSGVHRRLGHISKQGNVLLRSLLVEAAQAAARFDPEWHKKFSHLAMRRERKIAKVAIARKLAVSLYWMWRRHRSSQIASKVGSYAG

SEQ ID NO: 154837 - protein, 316 aa, unidentified
MGPSPLLVGMDVAKATLDIAVRPTAETWSVSNDAPGLDALVLRLGAWAPTLIVLEAPGGSQGPLVAALVAAALPVVVVNPRHLRALAQAVGLLANTDRLDARVIAPCAEAVKPAPRPLPDAETPELRALLVRRRQLVEMVSAERARLDTVPPRIQDAIQAHIAWLTTQIAGLDDALTRASQTPPVWPAQDDVWQSIPGVGPVLARTMLGQGPELGTLGPKPLAALIGVAPVNRDSGTLRGRRPVYGGRAEVRAVWSMGALVATRHHPVIKTFDERLLAAGTAKQVALTACMHQLLTIMNAMVRDLKPWQPQEVPSA

SEQ ID NO: 154838 - protein, 430 aa, unidentified
MGLIVPNAMHPEHDEQPMPYEWFVGIDWGSQQHQVCMLDRDRRRVGERVVDHDGASLARLADWLLTVAAGQPQRVAVAIEVPRGAIVEGLLERGFHVFAINPKQLDRFRDRHSAAGAKDDRRDAFVLADSVRTDQPSFRRLQLDDPQLLRLRELSRAEETLLEDFRRNANRLREQLHRFYPQMLELCSAADEPWLWDLIDLAPTPAHAVLLSGAQVQQVLKAYRIRRVEAHEVLTCLQAPALPVAPGAAEAAQAHCELLLPCLRVLAAQLQACHQQVNALLHTLAEAPGEGGRVSDVAIVLSLPGVGRKITAWLFAEAAQPLAERDYQVLRTHGGVAPVTKQSGKRRQVMMRRGCNSRLRHALYHMARVAMQRDAHFSSVYAALRAKGQRHGQALRTLGDRLLRILMAMLRNGTCYDASRIRREPVVQRG

SEQ ID NO: 154839 - protein, 389 aa, unidentified
MKIYVGIDIAKLNHFAAAISSDGEIIIEPFKFTTDADGFQLLVSKLESFDKNSLIIGLESTAHYGDNLVRYLVTELYQVCVLNPIKTCQMRKNNIRKTKTDKVDTYVIAKTLMMQDNLRFVSFFDLDMMDLKALGRFRQKTIKQRTRLKIQLTTYVDQVFPEIQYFFKSGLHQHAVYALLKEAPSPKEIASMHMTHLANLLKVNSHGHFTKEQAKELRVLAQKSVGANDSAISIQITQTIQQIELLDSQLEKIEAEMTDIMKFNDSVIMTIPGIGYINGGMILGEIGDIHRFSNPNKLLAFAGLDPSVYQSGNFQAKTTRMSKRGSRVLRYALVNAAWNVVRNNATFKAYYDAKRAEGRSHYNALGHCSGKLVRVIWKMLTDNVEFNLK

SEQ ID NO: 154840 - protein, 348 aa, unidentified
MVLVAEQFEHVVGIDTHARTHTYCLIHARTGALIDTATFPTSAAGNARAVSWIARRAHGTSVLAGVEGTSSYGASITAVLTETGIEVAEVRPASRASHAHTGKSDAIDAEAAARSLLGRDVDKLAQPRQPGDRAALRVLLTARSLIDQQRTANRNALNALARSVDLGLDARKPLTDAQIKTIAAWRIPRDAEPVRVLRAEAKRLAATILEQSAALNVNHKQLADLTERLAPGLQELPGVGPVTGAILVTAYSHHGRIRSEAAFAALGGIAPLPASSGNSTRHRLSRSGDRQLNRAVDVIVRTRMSYDTTTRTYVARRRAEGRTAREVRRCLKRYVVRALFRELQTRMT

SEQ ID NO: 154841 - protein, 428 aa, unidentified
MYKVDRIRVERFRQLKAEIRGSQEYLIVGIDVAKDKHNAFFGKATGKTLLKRLVFGNNMEGFYKLLTFVEAVKVKHGLSKEVFGLEPTANYHKPLGEYLIKCGLDVVLVSGLAVKRNRELLDGRWDKHDTKDSANVADLVSQGKCLYYDYPCMPLRDLRDLLSLRRRLKKREHGARVRIRNHLFAQYFPELDRHYARSGSEGSAIVRWCLAPSVIAGLEYDDFVGLVAPGKKRMGQQRRLRAIWHSAVDSIGCDAGESLEFEAQMMVQELQHTKEAIRLIDDKIEEICLQFPEYSCLLTIPGFGPDVSAKVLGAIGNPFRFDTGKQALKLAGMDLSANRSGKKSQGSIPVLSKKGKAELRYALYQAALIASSKNTNFVIYYTNKLRGREKEKGIKTKMRVKLAAKMLIIAWTLMKKQEPFNPEYLNLQ

SEQ ID NO: 154842 - protein, 386 aa, unidentified
MQKLNDLSRSLTALEPNGTLIAVIEMSLSSWLVAGIVPGVERQPLKKLAVDESALLKLLHRWREEAEKAGRRIERIAVAFEAGRDGFWLARWLKARGIEAYVIHASSVAVSREHRRAKTDRLDTELLKRSFLGWLRGERDHCKMVEIPTMQDEDAKRPNREHDSLIGERSRIVNRMKAALVRLGIRGFNPKLKRATTRLDNLRTPEGEPIPPNALAELRRDMERRRLVNNQIRQIEEERLKRIEQAPCDGPHVMVRLLARVMGVGIETADMLVHEVLSRNMRDRRAVARYAGLTGSPDESGRKRREKGLARSGNARVRRGMIQLAWRFLLHQKNSALTKWFRSRTENARGTRKPMIVALARKLLIALWRLLREGIVPDGVVLRPAQ

SEQ ID NO: 154843 - protein, 405 aa, unidentified
MQVLYERCCGLDVHKKSVTVCAITPEGKEIQTFGTMTGDIIALVDWIKSKGCSHVAMESTGVYWKPLYNLLEIEQIETLVVNAKHIKAVPGRKTDVKDAEWIADLLRHGLLKGSFIPGRDQRELRELVRYRRSLINERSREVNRLQKVLEGCNIKLSSVASDITGVSAKAMLKAIIDDAGDPVLIARLAKGKLKNKQKELEKALLGLVGPHQKMILTAQLNHIEFLDQQIIELDQEIEARLHPFELELEILDSIPGIGRRTAEDILAEIGTDMHRFPSSAHLASWAGMSPGNNESAGKRKSGKTTKGNKSLRATLVLAARAAAKSKNTYLSAQYRRIAARRGGNRAAVAVGHSILVMTYQMLKKRESYKELGSDYFDQRKKESVIKNSIKRLESLGLKVTVEAAA

SEQ ID NO: 154844 - protein, 317 aa, unidentified
MEKDYIGVDVSKDALDVATYASNKKWRFSNNDVGITQLIIEFKETNIALVVIEATGGYETQLACALNKAGIPCAVVNPRETRDFAKATKKLAKTDTIDARVLAHFAAVIKPEPRPMSDEETLELEAILARRRQLVQMITAEKNRLHTAHPLVKKGITDLIAYMEKDLADIDSNLKGRIEESPVQRERYTLLRSVPGVGPNLATTLVVELPELGNLNCKQIAALVGVAPLNHDSGSKRGKRSPWGGRPQVRTALYMAALVAARFNPVVSVLYARLCAAGKAKKVALVACMRKLLIILNSMVKHKTSWLFEPVPVFSSR

SEQ ID NO: 154845 - protein, 483 aa, unidentified
MAKRKTSTFERLTQGPLNRKQRRELGRRLVSDDPGLRIIHPNAGGIDVGNESHFAAVPADRDAQPVQEFGSWTADLHRMGKWLQSCRIDTVAVQATGVYWIPLYDILTEHGIRVVLVNAQHTKNVPGRKSDVQESQWLMKLHTYGLLRDSFRLAENMEGVRTIWRLRDRHVKEAGRAVQHMQKALTKMNIQLANVISDISGVSGQAIIEAILKGERDPYRLADLKHERIQASREEVARSLEGNWRQDVLFELQQAVDSYQFAHRQMQQCDGKLETYLEMLPTRVIEVAGQPDLQPTAIAKAKKPKKPRGNAPAMDLAAELKRISGVDLTSIDGIDVMGAQTILSELGTDLRAFPTENQFASWLGLTPSKDISGGKVIGRSRRKVQNRVAMSLRMSASTLLNSKSYLGGRYRHMRKHLPTYAAAVKAMAHYLALLVYRMLTKGQAWVDRGAAKFEQKRIERELSSLKSKALANGFKLVPIAEAQ

SEQ ID NO: 154846 - protein, 427 aa, unidentified
MTKSQNLKFDAIENTDAIVGIDIAKNVHWAGIILPNGKEIKKSFSFNNNKKGFESLVETVKNVLTMLNLKKAIVGMEPTGHYWKSCARYLKKIDWIKVVTVNPFHVKNAKEFDDNCQTKNDKKDCMTIARLIKDARFFEPYLPEGIWAELRNLSNTRAELVRKQNAVKCRLVAIIDEYFPEYTKVFKNVLSRTSEEILKERPFPEDIKSIGKEELLKHIKKTVKRGYSKKQVETIYELANESIGTTEGIEGAKFQLNMYIEEEKLLEKQIKMTEQELEKQLKETGFYESLISIQGIGIVSAATFVGEVGDINRFDSYEQIRRYAGLNLVENSSGNHKGKTTISKRGRSLLRIILYRMAFTMVNKNKEIKELYKYLTTRKENQLKKKQAIVAVIGKILQIIYAVVTKNEEYKATRVFTGERLEQLKVA

SEQ ID NO: 154847 - protein, 408 aa, unidentified
MRVVGLDIHRVFAEAVMLDDGKVIRLGRIGMTRDHLGAFARTLTHDDHVVVEATGNASAVVEVIAPHVGRVVIANPRQVRMIAHAKIKTDTIDATVLAKLYASKFLPEVWVPDAKTLALRRQVTRRNQIVRQRVRLKTITQSILHAHLLPQCPHADLFGKRGRSWLLAQDLPTDERDAVERHLREYDRLGDDLRVVERELARDAMQGATIKRLMTVPGIDMVVAIGLAAAIGPITRFKGPDQLVSYIGLNPSVHQSGEGRPQHGRITKQGRTHARTMLVEAAWQAVRGPGPLRAFYQRIARRRGNHIAAVAVARKLAVIVWHMLTKNEDYAGVRPALHAKKLRDLELRSGLPARRGQRGAGYEYNLTRTRLEEKRRAEQDEIAYRRHVEGWTKRGRRAPTDAAKEERL

SEQ ID NO: 154848 - protein, 350 aa, unidentified
MNYYAGIDVSLGSSSLCVVDASGTIFREGKVASEPSALISWFLGLGVGLERIGLEAGPLSQWLYAALREAGLAVELIETRHVRAAFVTMTVKNDRKDARGIAQLMRLGWFRPVHCKSLAAQEVRATLTSRKLMQKKLHDVEMHLRGILRNFGLKVGRTTQKGFAGRIRELVAGHATLESLAAALLSVQEVLLREFAKLEKQVRSMARADKLVRRFMTAPGVGPIVGLTYAAAIDDPLRFTSSKKVGPHFGMTPRKYQSGETEVDGRISKAGDASVRTALFEAAHIILTHPVKGSALKSWGIRLAKRSGPKKAKVALGRKLAVILHRMWVDDTDFDFTRGAASVASDKKAA

SEQ ID NO: 154849 - protein, 340 aa, unidentified
MENIRTIGLDLAKNVFQAHAVDLGGSVVLRKRLRRGQVLAFFAGLPACLVGMEACATAHYWARELRALGHDVRLMPPQYVKAYVKRNKNDAADAEAICEAVKRPSMRFVTVKTAEQQSALLMHRGRELLVRQRTMLANALRGHLAEFGLIAAQGLHKVAGLIAIVRDVEDERVPDMARQVLRLIAEQIAELDTRIAAIEAQIMAWHKSNPMSQRLATIPGIGPIIATAITATVAEPGEFHGGREFAAWLGLVPRQNSTGGKTSLGGISKRGDSYLRRLLVNGAHAVLLRSKAGKTDPWLIALRGRRPRLVVAVALANKTARIAWAIMRKQESYRFAAAAA

SEQ ID NO: 154850 - protein, 302 aa, unidentified
METYAGIDLHSSNNYIGIINEQNQRLYGKRIPNELDRVLMALEPFKDTLKGVVVESTYNWYWLVDGLQEHGYKLHLANPAAIKQYEGLKHTDDKWDAFWLAHLKRLDILPEGYIYPKEERPVRDLLRRRLLFVQHSTSHILSLQSMITRNIGLKMSGNAIKKLKEEEVEGMFDSSNLVFMAQNNTATIQFLKKIVKDIEKQVKSQVKLRKEFKMLLTITGIGNILGLTIMLEVGDINRFAEVGNYSSYCRCVKSERLSNGKKKGENNKKNGNKYLSWAYVEAANFAIRHSVKAHSFYQRKKA

SEQ ID NO: 154851 - protein, 337 aa, unidentified
MSVYVGIDVHRKRSQVAIVAEDGQVQLNKNVVNGSEPFLRLIGDLPSGTPVAFEAAFGWSWLADLLEDYGFEAHLVHPLRCKAIASARLKNDKVDAAILAQLLRADLLPEAWIAPQSVRQLRALLRHRISLVRLGTQLRNRIHAVAADHGYDRSASYWTGPGRGWLAELDLPAASREIITDCLAVIDGLAPLTDRIDGELHARAKADPRVKVLRTLPGVGEFTALVMLAEIGDISRFGSARKLASWAGLTPTVRGSDLTVRHGHISKQGSAWLRWVLNQAAQTAKRSPEFAATYSGIAKRRGKKIATIAIARKLLTRAYHLLADMQAASMNEPPRRP

SEQ ID NO: 154852 - protein, 371 aa, unidentified
MKSIIYIGMDVHKKTYSLCALLKETGEIIGETKIPADVSLIIKFIENAKKSVDSDDVQIKTGYEAGCLGYSLYWQLAEKGIECDILAPSTMHRSAKNKVVKNDRRDAKNIATNLANGTYKSVHVPTDEDVEIKEYIRMMHDFKIELKKVKQHINAFLLRFGHQYPGKSKWIPAHIKWLKELELSDMYREILDEYLSQLEILSEKIERFKHRLEELSQKETYNEKIGQLRCIKGIDTTAAMTMHAETSDFDRFPTANAFASYCGLTPGEDSSGESYHRLSITKQGNSMIRTTLIEAAQVLVRGTIGKKGKKVKSKQKDQDVKVIDYADKAVIRLQKKYHRMIFRGVKRNIAITAVARELACFVWGIETGHIS

SEQ ID NO: 154853 - protein, 376 aa, unidentified
MAQTDVQYPTIHLAIELSRSAWLVAARLPGVEKPSLHRIEGGDTAALLALAAALRARAAARLGTPVRVACCFEAGRDGFWLHRLLTAEGVAAYVLEPTSILVNRRARRAKTDRLDALGMLRVLAAYLGGDRQACSMVRVPTPEEEDAKRPHREREELVRERVRLENRIAALLATQGVRERPSLRSWERDLAALRTGDGRPLPPHLRAELDRLRRRLVLTLGLIREVEAERDAALAAGPRDAAGRKIAALCRLRGVGANFAAVLTREVFYRAFANRRQLAGYVGLAPVPHQSGEADRDRRISRAGNARARTTLIQLAWLWLRYQPDSAPARWFRDRVGALRGRTRRIAIVAMARKLLVALWRYVETGLVPEGVEVAA

SEQ ID NO: 154854 - protein, 346 aa, unidentified
MRFYQQAHSFYCGVDLHARTMHVCVVDAQGRTQEHVNLPCEPGRFLKVIEPYREQLVVSCECLFAWYWLADLCREEGITFVLGHALYMKAIHGGKAKSDKIDSEKIARMLRGGMLPQAYVYPREMRATRDLLRRRMKLVRLRGQAIAHVTNTFTQYNVAAPEKKLSYHANRVGIAERFADESVQRAVRSDLAFAEHLDEQLRGIELYLTQHAKIDDPQAFGRLQTVPGIGPILAMVILYEVHEIARFGSVQQFVSYSRLVKCSHESAGKKTAGHGNKIGNAHLKWAFSEAALLMLRERPAAKSFVAKLEKKHGKAKAISILAARLGRTVYWMLKRKESFDEARFLK

SEQ ID NO: 154855 - protein, 529 aa, unidentified
MNCSELFNKGASAAWSRKAAELAPFVNNSERSALGNRPFWSHPRGADTTRPATTIKPRTLDVLVENFGRDESAAQLNEFSDASKLNGSYKPFAAEPSVVPAPPMTTNHDYAAYVGLDWADRHHQICLRAAGSNRDEQSEIKNTPEALHAWARAVRARFPDGQIAVALEQSRGPVIYALSMYAHLELFPLNPAIAAKYREAAKAASGTKNDPLDASLQCELVRVHRDWLRPLAPLTAETRELQLLVEARRMLVEQRTALCNRLKATLKSYYPQALELVGGDVGTPLAWAWLRHWPTLALAQRARPQTLRAFYQAHQVRSPELIEQRVAVVCNATALTNDVAVLATSPVLVTALIGQLETLHPTIADYDERIAECFARQAEASLFASLPGAGAQLAPRLLAAFGSDRNRYESAQQLQQYSGIAPVKKKSGATCTTHWRWHCPKFLRQTFHEYARCSIGQSAWALAYYKLQLAHGKTEHKAFRALAYKWQRVIFRCWKDRKPYDEALYLAALRQRGSSLVPYIDALENKVTA

SEQ ID NO: 154856 - protein, 413 aa, unidentified
MRLLVGDDWAEDHHDIEVLDAAGRRLARARLPEGVTGIARLHAIIGELAGEDAEDQDTDQDTQVLVGIETDRGPWVAALVAAGYQVFAVNPLQAARSRERHTLSGAKSDRADAHVLADMVRTDAHQLRPVAGDSTQAEAVKVVTRTHKTLIWERTRHTQRLRHALREDFPAAVQAFADLDAPEALELLAKAPDPASAAKLTRAQIRAALTRAHRRDIGAKTQQILTVLRADHLGQPEVVTAAYAASVRALLAVLVVLDEQITTLQGQVVAHFGRHPDVELLASQPGLGPILGARVLAEFGDDPARYASAKARKNYAATSPITRASGKTKIVAARHVHNDRLIDALMTQAFAALNASPGARAYYDQLRARGATHNAALRQLANRLVGILHGCLKTRTRYDEATAWSHHAKALAA

SEQ ID NO: 154857 - protein, 420 aa, unidentified
MDVVVERCAGLDVHRDDVVATVRVPGGGRRRWDQQTRTFRATLGGLADLAEWLAEFGVTLVGMEATGVYWKTVFQALEDRFECWLLNAHHLRNVPGRKTDVKDSEWICQLVQHGLVRPSFVPPPEIRRLRDLTRLRKAQTNERARTIQRLEKVLQDAGIKLSSVASTTYSKSARAMLEALLSGVSDPEQLAELSKARMRLKIPQLREALQSRFQIEHHGVMVAQLLAHIDTLDAALQSLTERIELVLVPHAQTIELLCTIPGVQAHAAQVLIAECGLDMTLFPTVGHFASWAGACPGHHESAGRRRSGRTRPGPRWLTDQLTECARAAVRTKGTYLAAHFAQLRGRRGEPKAIGAIRHDILVAYYHIVRDQVPFRELGPDWQRKRYSPEHRARRLQRQLEALGYAVTLDQVEQPEIEQAA

SEQ ID NO: 154858 - protein, 340 aa, unidentified
MKFIGMDAHSKTCFFVVMNKSGKVIRRQRVNTSESNILDFVRSVKGPKSLVFEEGVMSHWLYLLLKDEVDNLMVCQPREHDGPKTDEIDATENADLYRVGRLKAVYHADNEYMNLRVLVSGYDDLLGVITREKNRYKALYRHVAIPTEGAKFYKDQELLTKLPTDTQNYVACTLFEQIDLLEKQRRGYEERFAANVKRFKEMKLLTSIPGIGPIRANQLVAIMVTPHRFEDKYHLYAYAKLTKHPRESDGKKYGMKRANGRPMLKSIFKSAVLGAMKSDTSFRRKYESMKADGADEYAAKGAVSRMIAGTVLAIWKSGKKYNDKYKEVAQRRNQKKTKGS

SEQ ID NO: 154859 - protein, 405 aa, unidentified
MNAVGIDVSKGKSTVTIRRAGDEVVMAPRDIRHTQSAINELIGIIKGLDGETKVCMEHTGRYYEPVATWLSDAGIFVSAVNPILIREFGNDSIRAPKTDKADAKKIARFTLDRWANLRQYSRMDEIRNQLKTMNRQFGFYMEQKTAMKNNLIALLDQTFPGADKFFDSPARSDGSQKWVDFVDAYWHVDCVRKKSLEAFTEHYQKWCKRKGYNFSASKAEEVYRAASDLIAVFPKDDNTKLLIRQAVAVLNTTSATVETLRAKMNETAAQLPEYPVVMEMDGVGPTLGPQLMAEIGDVTRFTKRGALTAFAGVDPRANESGTYKQKSTPTTKKGSPNLRKTLFQIMDGLIKRSPVDNPVYTFMDKKRAEGKPYYVYMTAGANKFLRIYYGRVNEYLAALTESKES

SEQ ID NO: 154860 - protein, 348 aa, unidentified
MIAIGADVHKQQCTLAVQRPDGKLSMLPSMDNTRENWLDLLTQLPPEAQIALEVSTSGHFVMSVLEEAGWRDRAHWVHTAGIDSLRKQKTDRLDAQRLARKLSVMEQDPLPEAWFPPRPIRELRLRARQRCWVAVLRTRVKNRVRSLLQMSGRCAGTNPFTASGRTWLKEQKLSEATRESVEQLLRFHDFLTTEREKSETSLRGMEKDFPEIARLQTLPGLGHILSAVIWSEIGELKRFDSPRALVNYTGLAPSLYESGERSVRGGITRQGPVWLRWALITAVNAATRGHNAFARRYRRLRRHKLPNVAKTAVARSIARCAYGVLKHGVDYQEQRWGRKAGIEMEQEA

SEQ ID NO: 154861 - protein, 340 aa, unidentified
MSKAAFCSQAFCGIDVSAATLAAAVEQEDRPGSFERREFANSTAGRRQLVAWLRRSCVPVRVSLEATGIYSLDVALALEAAEGIAVAVLNPRRFHQFAETLRRSKTDAADAVALAEYSRRMPFVAWVRPSEACLELRAISRHIATLTEDHARLKNRLHAAEGSAATPRCVLQDLRRSLTGLGKRLLRLRREALAAIGKDAGLERKFHQLTGITGIGELSALHLLGELAGLDQEMTVRQWVAHSGLDPAHRVSGTSVHKPARISRQGNRHLRRALYMPALSAARFDPHMKAFYTLLQARHKTKLQALIAVARKLLHAIFGIFKSGTAWDGAKLFPQLIPNS

SEQ ID NO: 154862 - protein, 430 aa, unidentified
MKSNTQNAKIEAITEKTLVLGIDVGSKTHYARAFDYRGIEYSKKPFKFSNTEAGFATFKEWILDLKERHEKDKVVPGMEPTGHYWFNLGKFLQDNEMKPVLVNPHHVKKSKELDDNNPTKNDRKDPKVIAGLVREGRYMIPYLPEGVYADLRTASNIRFQLQAELTRIQNRISRWFNIYFPEYKTVYGKPDAKSGMLILKAAPFPEDILKIGINGVNQIWRDAKLRAVGKARAKTLIEAAEHSVGSKEGAVSARMEIRMLLEDYESRNIRLQEVMTLIEGLVKQIPMAEKLLEIKGVGIRTVSGFLAEVGDISRFNNPKELQKLAGLALVENSSGKHKGETTISRRGRKRLRYLLFEVAMSLVAKNPEFRELHNYYTTRRLNPLKKMQSLMAIAAKLIRVFYAMLTKGVDYDPKKMVSDIKRPAVYLQAA

SEQ ID NO: 154863 - protein, 367 aa, unidentified
MNKQFVHHERAAALTVAIHNVKLSSSVIKLGLDIHSKLYVVVAQYDHALPKSARRFAPQEFVPWVESLLRAGHTVHVVYEACGFGFGLYRQLRAAGAHCYVIAPRKLDEQRTGVKTDPRDAATLCQRLSRYVDGNTRELAVIRVPSEQEERARHTSRQREQLIHHRQKMEAQGRSLLISYGLPAPAHWWKNQTWSRLTKLLPGWILAHLEIYRPALFALQEQVAAFTAQLEAAAPSNIPEGMGKLTTVVVSREICDWNRFKNRRAISSYTGLCPGEHSSGSRRVPGSVTKRGNPRLRSALVECAWRMVRFQAQYPPVSKRLSILSKGAKATGAQRKKAIVAVARHLAVDLWRLHTGRCTATQLGLVC

SEQ ID NO: 154864 - protein, 330 aa, unidentified
MNSIGIDISAKKLDVALLSTDGKRKQRKFDNTPKDIGGLIEWIRAKGECRVTMEATGVYHLDLAFALNKAGIPLMVVNPRQARRFVEAMARNQQTDASDAVDLAEFGARMDFVPWKAPSANAFALHKIGRGISLLTRQHNAFGNRLHAAEATEETPREVVSMFHGLLRALEKERAKLVEKARALIAADLEARRRFKLLLTVKGIAETSAVAILSELIVLPEDLSAKAWVKYAGLDPMSKQSGSSVNTKPRISRRGNARLRAALYMPAMTAARHDPHLKTFVERLETRGKEGKQPICAVSRKLLHGIHAMFRTNMPWDSERLVTSYTPQTA

SEQ ID NO: 154865 - protein, 427 aa, unidentified
MTSDQDSGGTSFVAIDIGKAFHAVLVEFPDRTHQRFRMANSAEDYGRLVAFLRTLPGTVQVALEPTGNFHRTLAFRLITEGISLVSVSSVAGARYREAMFNSRDKNDPKDATVILQLLKHGLVQHYHDPLFAGHHDLQELAKTYHQVTMARKRLADSLLNHYLPLYFPEMARYWESTRVEWFVAFLTRFPTPRAVQALSLPEFIEAAGPLIGRKVNKRAKLEELYGLAQSSIALPVAVDSPAIDTFRLQLTHFARLAELRRELEAQAHRLLKDRPDYQCLCSLPGVASVLAMVILAEGGDLRRFGHYRQFLKYCGLDLAKCQSGQFRGRETLSKRGNARLRMAFWMAAQRAVRMTENSFRDKYERYMKQDPGNAGVRRKALTAVAAKMARVAYALVKRLEPYRGYHEHALPSGSIPLNRAVGALATP

SEQ ID NO: 154866 - protein, 367 aa, unidentified
MKKVSTAAMKQRRNISRQTLTIGLDLGDRNSWYCVLDESGQIQLEQRVRTTAKALQEVFGAMPRSRIGLEIGTHSPWISRLLSGLGHEVIVANARKVRLIGESRKKDDRLDAQTLARLARIDPELLYPVKHRSAQAQADLMTIRARAGLVRARTALVNTARGLAKSYGERLRGCNVRHMNAEKAEGLSPELQRALEPLLATIEELSERIVEYNDRIEALAQTSYPQVELLKQIKGVGTLIALTFLLTLEDPHRFRKSRDVGGYLGLQPGRRNSGQSEPQLHISKEGDPYLRTLLVQGAQHILGPFGIDCDLRRWGLKLAERGGRNGKKRAIVATARKLAVLLHHLWVSGEVYEPLHNSRRVTVAAAA

SEQ ID NO: 154867 - protein, 368 aa, unidentified
MTTNQIPPTSSAEDSSTLGEVIKLGIDVHIEKYVVVMKIDGSAPQRAKRFTPEQFMVWAQELTAKCEQLHSCYEAGPFGYSLHRRLTKMGVTNHVIRPINWDEHGKNVKTDARDATQMVLCLDGYLRGNHRSFSTVRIPSETEEQRRSTTRQRQSLIKERQRLAAKARGHVMYYGGRLQGEWWKPRRWLCLSEQLEPHLLDLLSALRTIIVVVEEQIVRLEKCLEKMTEVALPKGIGSVIFQQMEREVCDWNRFETRKQVGGYTGLCPSEDTSDKRRFQGSITKHGNPRLRHMLIECVWLLIQWNPDYRGIVKWRDKLLEAKLTKASKKKIVVAIARQFAVDWWRIRTGKITPDQLGLTMKALPAMSA

SEQ ID NO: 154868 - protein, 348 aa, unidentified
MEYYLGIDLHKQFAYWHLIDDSGEILWTGKVPSTERDTKARLEQPGIPLGSVTAAIESVEHYGWYADLLTKYGVGTVHLANPHKLRLIAENPLKNDKKDAEIIAQYLRSGTLPLSYLAPEEIRNLRELVRTRMYLAKQRTAAKVRIRNALAKHGLTCRYKDIAGEKAKVWLDIADIPEDHKREIESLLRVMSTLTKEIDSFEAEMKQRGQSYPEVQILKTVPGIADVRALIIMAEVGDFSRFNSPHKLAAFAGLVPRSFSSGGQERLGRITKRGSSLLRHALVQAAQQAHPKWGDLYTFKARIKEQKHTGAAKVALARKILTICWYLVQRNEPFRARLSEPGGSVNTI

SEQ ID NO: 154869 - protein, 339 aa, unidentified
MVYVGVDLHRRVSQVSAMDEKGEVLLARRIRTEPLEFLRVFGELEPKPMSVAFEATFGWGWFAELLKDAGIAAHMAHPRDTKAIANARVKNDAVDAKTLAHLLRTELLPEAWMAPLEVREARRLVRMRGALVRIRSRLKNQVHAVLADQGVLFPMSDIFGALGREELACLQLPPVMQHRLDGHLRLIADITHEVGIADLEIRALFKNDSRRKRLQAIPGIGLLTAATVMAEVGDFARFPSAAHLCSWAGLTPKERSSADNVRRGRITKQGSRWLRWALVEAAVTAERDPDLRALSTRIAARGGRNGKSIARVAVARRLLTLCFYAVRDEQGCRAFPVAS

SEQ ID NO: 154870 - protein, 337 aa, unidentified
MNDTIYDHYIAIDWAAANMAIARMTKKSNKISVVDVPADIKELQLYLDNLKGSKILAIEETSTSQWLYTELINHVDEIFVCDPFRNRLLNDGPKTDKIDASKLVQLLKADLLKEVYHSTNKFLYLRRLVSGYEDLIKAGVRLKTQKYSLLRVCGKNGYEKGNVKLHSQNEEFVLNGLNRQIASYEEEKKGYEKEFRKLARKYSEIRQQKSLPGIGDIHAVKIVARVVTPWRFASKGHYLSYAGLVKLVKVSGGRNYGRKNSRYCRQLKDVYKTGVIAAIGGNNPLNEYYDYLINEKGCQPHIARHKVCRRLAVLSYGVFKSGKTYQPYNKERRRADN

SEQ ID NO: 154871 - protein, 376 aa, unidentified
MRNIVICGADVHDNSIAARIAVNKEEPETRIFSYTTQGRKSMFKYLKFVGCKYGAERIVMAYEASSLGFGLCDEGWDAGIECYVLAPTKMPQSEEQRKRKTDKRDAQKILEQLRGHVLAGNDLAKVWIPDPQTRDDREVVRMRLEIADKLTEARTQVRTLLKRNKVEKPEGVGNAWTVSDCRWLRRLAEGGNGLAQGARTALASLLRQIAALEEEIKKLDEAIEALAATDRYRAAAEALVEELTGVGVLTAMVFLTEMGDLRRFRNRKKVGAYLGLVPTSNESGENNDHKGHITRQGPARVRKVLCQAAWARIAFDKEEQKVHARIVEKNPKKKKIATVACMRRLGIRMWRMALEAQIKASVYPDRELLQTRRPAA

SEQ ID NO: 154872 - protein, 419 aa, unidentified
MNTLNTTSFTAFIGIDWADAKHDICIQSSDSDDREFDVIPHQVERIDEWAHEMRRRFGSPIAVAVELSKGPIVYALQKHDCFVIFPVNPLTLAKYREAFQPSRAKDDPTDAELAVDLILRHSERFKPLKPQSVELRMLASLVEQRRHFVDDKIRTTNRLRFALKQYYPQVLEWFDQIDTPLFCDFVTRWPTLLQVKRARKSTLRKFFHAHNMRFEYVIERRLDAIKTATPLTLDAAVIAPHRLQALVYVEQLRVLLNAIKQFDVEIEDVAQQHEDYALFTALPGAGPSLAPRLLVAFGEQRDRFKSAADIQKYSGIAPVTERSGKKHWVHWRWQCPTFLRQTFVEWAAQTINKSYWAAEFYRQQRAKGNTYQAAVRALAFKWIRIVFRCWQTRTLYDEVVYLKALERRGSPLLNLAEAA

SEQ ID NO: 154873 - protein, 430 aa, unidentified
MKSNTQNAKIETITEKTLVLGIDVGSETHYARAFDYRGIEYSKKPFKFSNTEAGFVTFKEWILDIKERHEKDKVVLGMEPTGHYWFNLGKFLQDNEMKPVLVNPHHVKKSKELDDNNPTKNDRKDPKVIAGLVREGRYMIPYLPDGVYADLRTASNIRFQLQAELTRIQNRISRWFNIYFPEYKTVYGKPDAKSGMLILKAAPLPEDILTLGIDGVNQIWRDAKLRAVGKARAKTLIEAAEHSIGSKEGTMSARMEIRMLLEDYESKNMRLQEVMVLIEELVKEIPMAEKLLEIKGVGIRTVSGFLAEVGDISRFNNPKELQKLAGLAVVENSSGKHKGKTTISRRGRKRLRYLLFEVAMSLVAKNPEFRELHNYYTTRRLNPLKKMQSLMAIAAKLIRVFYAMLTKGVDYDPKKMISDIKRPTVYLQAA

SEQ ID NO: 154874 - protein, 402 aa, unidentified
MDIGDIEVFIGIDVGKSEHWATALSRDGQKVLDKALPNDEDRLREVYQRLQAKGQVLVVVDQPATIGALAVAVAQDMGITVGYLPGLSMRRIADLTPGSAKTDAKDAAVIAQAARTMPHTLRAISTSDEEAAALSMLTGFDLDLARQVNQTANRIRGLYTQIHPALEAVVGPWLEHDAVLEVIAAWPTPADLKRAGKARIDARLKKHGCRRHATWAGQIVSALEHQTVVVAGTDAAAVVLPHLARQLTSLHSQRADVATQVETLVEAHPLYQVLTSMPGIGVRTAAVFLAETLGKTFDTGAQLASYAGLAPVTRRSGSSIRGEHVSHGGNKRLKRAMFLSSFASLRSDPVSRAYYQRKRDQGKRHNQAVLALAHRRILTLHAMIRNGALYDPQPATKLPAAA

SEQ ID NO: 154875 - protein, 315 aa, unidentified
MSSQVFVGIDVAKAQLDMALRPTRERWAVPNDDTGIAALVAQLQAVQPTLIVLEATGGYQRAVVAALAAAGLPLAVVNPRQARDFAKATGQLAKTDALDARALAHFAEAVRPLPRPLPDAQAAELRALLVRRRQLIAMRTAEHNRLGSASRRLQADIQAHITWLNERLAALDDDLDTTLRASPVWREHEALLRSVPGIGPVCTRTLLLELPELGALSRQRLAALVGVAPFNRDSGTLRGSRTVWGGRAHVRATLYMSALVAVRYNPVLKAFYERLRTAGKAAKVALTACMRKLLTILNAMVKHHTTWQPQEVANA

SEQ ID NO: 154876 - protein, 402 aa, unidentified
MNPVIGLDISKEESHGQAFLERGNPFRGTFHFQHTRHGLANLHQVLKDVESVSKQRPLLILEATGHYQSPVVQFLEEHQYIYIVINPLISNRLRKSQLRKVKTDAADAYLLGELYYKEEFESFKKRGVQLLNLRYLIRQYESLSKMCVQTKLQFQAVLDQVFPAYKGVFGSMYSGISLRFLSEFPTSYLVLQTDEDTLKAKMKELLSSKRGRSEDWINQRVQRLLDAAKQNPFQQTMYASHLINLKVLITLILQYQEHLTGLEQNIDALAEEIEEFELIQSIPGIGHKIAATILSEIGEVDRFDHPKKLVAFAGIDPSVFASGKFTATRNRITKRGSRQLRYALVLAVQCGLIRARNIRIKEFYDRKRAEGKPHKVALVACANKLVHWLYAIMKNKKTFRSA

SEQ ID NO: 154877 - protein, 368 aa, unidentified
MNSIKFIGMDVHKKTITIAIANLGSRGPARSYGTINNDLSALDKFCRKMVSTASQLHFVYEAGPCGYGIYRHLTEKGFDCMVAAPSLIPKKSGDRIKNDRRDAKMLARLHRAGDLTTVYVPDCQDEAMRDLSRAREDAVIATRKAKQRLKAFLLRNGIAYSGKSRWSKAYFNWLSDIAMAHPAQQVALQEYIDTVHESIERVIRLTDQIRQLVPNWRLGPVATALQAARGVSLIVAVTIMAEIGDLSRFENPSQLMAYLGIVPSEHSSGDRIKRGGITKTGNGHARKVLVQAAWAYRMKPRISRILLKRQQQVSKEVRQISWKAQLRLCTRFRRLAAMGKPKQVVVTAIARELSAFLWAIAKQVQPVV

SEQ ID NO: 154878 - protein, 378 aa, unidentified
MKRILKIGMDVHTTNYTLCAMEPIIGEDDRVFATIKVTPDYKNILMFIENLKLKLGLNDEYDIQCGYEAGCLGYSLYNQLTAAGIKCVILAPTTMLTPQGVRIKTDMRDAYMIAQCLSYGGYHAVYIPTEDDDSVKEYLRMRNDHKLALKKIKQQINAFCIRHGFCYDGTKWTLSHLKWLKKLEITNGLHRETLDEYMASYEEQEAKIERYDKRIGEIAEQTRYHDKVKKLGCFLGIKTHTALSLIVETGDFERFAKGNQYASYLGLAPGENSSSDNIHRLGITKAGNSHLRQLLIEASGGICKGAVGHKSKELRARQNGNMAEVIAYADKANTRLRSRYYKFIRHGKKRNVAVAAIARELACFVWGMMTDNIEMKAA

SEQ ID NO: 154879 - protein, 413 aa, unidentified
MKLFVGDDWAEGHHDVELMDAGGRRLAKARLPDGVAGIARLHAMIGGQLGGDAEEEDAGQVAVGIETDRGPWVAALVAAGYTVFAVNPLQASRYRDRHGVSGAKSDAADAHVLADMVRTSSHQFRPVAGDSVQAAAVKIVTRTHKTLIWERTRCTQRLRHALLEYFPAALEAFGDLDGPDVLELLARAPDPASAAALTAAQISGALKRAGRRRVAEKAAQVRAVLRAPHLGQPEVVTAAYAVSVRALITVLSALDEQVKALQGQVEAYFGQHPDAEILLSQPGLGPVPGARVLAESGDDPARYSSAKARKNYAGTSPITRASGKKKAVLARHVHNNRLIDALMAQAFSALSASPGARACYDRQRARGAGHNAALRQLANRLTGILHGCLKTRTRYDEATAWPQHAAHREKTAA

SEQ ID NO: 154880 - protein, 386 aa, unidentified
MAQAKTWVGLDVHVWRTVAAVLDGESGELRRRRLSGRTDEIAAFVAGLEGPVRVTYEVGPTGFALARRLTRAGVGCVVCAPGLVPRGPSDRVKTDQRDAERLVRLLAAGELHAVAVPSVEEEAMRDLVRAREALRGDLMRARHRLSKLLLRHDVRFDGTARNWTVEQLRWLGRVRFERPATQRAFEDYLGAVEAVAIRRDVLEAEIARLLPDAPWAKTAQRLMCLRGIGTLSAAGLCAEIGDFRRFSHPEQVMSYLGVVPSEHSSGSQRRLGPITKSGSQHARRLLVEAAWHYRRPPRISDELRRRQAGADPAVVALSWKTQRRLHHVWNRMEQRGKRKTIIAVAAARELAGFCWAVATAQLSARAPRWSRRRRVSGRHLAQSIRD

SEQ ID NO: 154881 - protein, 360 aa, unidentified
MFSERTSVGLDVHARSVAAAAIDGVTGELIQARLSPSYDQVGAWVRTLPGPVAVTYEAGPTGFGLSRALNGSGIRCVVAAPSKLQRPAGDRVKTDAKDAIHLARLLRLDEVTAVVVPSVDQEAARDLVRAREDCRGDLMRARHRLSKLLLRQGIVYAEGQAWTGAHDAWLRRQRFDSPAVRMTFESDYEAVLMVKARRDRLDAAITTMAEASEFTPVVRRLGCLRGVGTLTGFALAVEIGDWQRFTGNSIGSFVGLVPSEYSSGASRSQGSITKTGNTHVRRLLVEAAWHHRARYVAGKTIRDRWELADPAARVRGDAGNRRLHARWVRFLERRKRPVIANVAIARELAGWCWSLAVLQE

SEQ ID NO: 154882 - protein, 382 aa, unidentified
MQEYIMVGCDLHDRSMLLKIARGREEVQKRSFSNDAGGRAAMIAYLQSEAEAAGDAKVLFAYEASGQGFGLYDELTEAGFECHVLAPTKMPPSAKQEKNKTDERDAIRVLEAVRGHVLAGNNLPSVWIPDLQTRDDRELVRSRLDAGNKLTRLKIQVGSLLKRNAVSRPACVGHGWTSRFQTWLAGLCKKGSRSNLGPGARAALRTLLHQIDSIEDEMTELNQAIRDLSRSERYAPAVEALQQIKGVGLLTAMVFLTEMGNLSRFSNRRQVAAYLGLVPSSRESGEANDRKGHITHQGPGRVRGALCQATWAAVRSNPEIREIYERLVAKNPKKKKISLVGGMRRLAVMMWHRGLEAQTLAKKKSDPAPQKTGRQRRRTAAA

SEQ ID NO: 154883 - protein, 411 aa, unidentified
MRVHHNVCCGIDVHKKSVTVCLMWGPADKEPQFEIRRFGTMTRDLQKLAEWLKQAGCEAATMESTGSYWKPVWNVLEGRIPKLILANAQHVRALPGEKTDRKDGKRLAELTRHGQIRPSYVPPRAILELRDLTRYRNKLLSAGSSERNRVQKVLEDANIKLGSVLSDVFGASGQKMLQALVKEDTVDTAKVAQLAHWSLKPKIEAIQHALEGKLTDHHRFLIGASLQHMRFIEEQLVRLDKEIQRRLQPYQEEYALLQTIPGIKETGAARILSEIGADMSPFPDGDHLSSWGGACPGNNESAGKKFQSKIRKGNPHLLAALTECAWAATKKKDCHFRNKYYRLKSRRGSQRAIVAIDHAMLKCIYVVLSQRKPYEEPKPTSLTQAQKERKASSLCRQLRALGYDVKIQKAA

SEQ ID NO: 154884 - protein, 347 aa, unidentified
MDIIIERACGLDVHKDNITACILTSEGKEIQTFSTKTVFLLKLLDWIKESNCTHVAMESTSVYWKPIVNLLESEGIEFLVVNAQHMKALPGRKTDVKDAEWIAQLLRHGLLKASFIPDRNQRELRELVRYRRSIIEERARQLNRIQKVLEGANIKLGSVVSEIDGVSSTDMLRAIANGEDDPDKLANFARGTLKKKKEELKLALQGHIHPHQRLMLKTILAHIDFLTEQIEMLDQEVAQRTSPYQEDIERLDSIPGIAKRTAEQILAEIGTDVEKQFSSAPRLCSWASLVPGHNESAGKRKSSKSKKGNKYLKSGLTEAAHSVRGSKNYLVRRLENLGYTVTITEAS

SEQ ID NO: 154885 - protein, 312 aa, unidentified
MDVFVGIDVSKAVLDIAVAPTGEAWSVANSTEGMQELVSKLGEISPKLIVLEATGGLERRAVAALAGASLPVVAVNPRQVRDFAKAMGQLAKTDAIDAAVLALFADRIRPQIRPLRDEETQELEALVVRRRQVVDMITAEKNRLMAAPPSKRVRTAIGKTIKWLQKQLEEIDRDLDNSVKGSPIWREKDDLIQSVPGVGKVLSRTLLSLVPELGTLGKKQLAALVGVAPLNWDSGQQRGRRSVWGGRAHVRAVLYMSALVAARFNPVIRAFHARLIAAGKLPKVALVACMRKLLTILNAIVRDRTPWTREIA

SEQ ID NO: 154886 - protein, 377 aa, unidentified
MKRIIRIGMDVHSTNYTLCAMEPIIGEDDRIFATVDVTPDYKNILMFIENLKMKLGVDNQYDIQCGYEAGCLGYSLYNQLTAANVKCVILAPTTMLTPQGTRIKTDARDARMIAQCLSYGGYHAVYVPTEDDDSVKEYIRMRDDHKTALKKIKQQISALCLRHGHHYTQSKWTDAHWKWLKQLDLSALYREVLNEYMASYEEQTAKIERFDQRIEELASQEQYAEKVKKLGCFLGIQTHTALSLIVETGDFARFAKGSIYAAYLGLAPGEDSSGTKTNRTGLSKAGNSHLRQLLIESAGGICKGAIGHKSKALKARQNGNTAEVIAYADKANTRLRSRYYKLIRHGKARNVAVAAIARELACFVWGMMTENISMKTV

SEQ ID NO: 154887 - protein, 452 aa, unidentified
MKENEISMEVVNPHAAGVDIGSRSHWSSVGQKDDEVQEFGVFNEDLYSMVKWFHEHGVKTVAMESTGTYWQSLYAVLLSEGFEVILCNGKFTKNIKGKKTDIKDCQWIQKLHTLGLLSGSFLPDKQTEQLRTYCRQRALLLDSSASATKKMQKYLRLLNMRLDVVVNDICGLTGLTIITAICNGETDPLKLASLRHYNCKKSESEIAKALETNGRQDYLFGLKQELDMYKMFQTKIQECDVEIKKLLDKIIDENDSKRQHHIEAKPHKRLNKNTPENIDLNLKSYQFFEGVDLMAIEGMSYSTVLSVMSEVGYEGIKKFKTAKHFANWLRLAPNNKISGGKILSSKVPKGSNRLKIALRNAANAIGNLKESTPLRDFFQRINFRKGRVSAISATARKLAVIIWNMVVKCKPYFNPVEYLYLDQKRKMGLVKRIQKQITKFELTKENFDFVIG

SEQ ID NO: 154888 - protein, 351 aa, unidentified
MFRSVNGYIIKVTANLMETVYFLGIDVSKETIQSALTLDGVSMFEMEVKNTAQAIASYFRDLKKKFKFSKEQLMVCLEHTGIYSHPLLDYLSRMEIKVCVESALQIKRSQGLKRGKSDQVDARRIAQYAYKNYGELRFWKPQRVVIQRIKALLVVRERLVKTRMQLATPLNECQDYIEESIRKRMVANCKRTLQGLAKDITKIEQEIDQLIQGDDKVREQLKCASSVPGVGKIIALNVIVATDEFEKISEVKKFACYAGVAPFEHTSGTSIRGRTRVSKMANITLKKLLTLGAMSAIRWDEEIRVYYKRKVAAGKNKMSVINAVRNKLISRIFACVENKRLYQKIYQYALA

SEQ ID NO: 154889 - protein, 369 aa, unidentified
MAFFIGVDLHKTQFTVHVRTEEKVESLDQIKQYPTTTAGYAEFLSRIETYKATGAAVKIGVESTGNTRFFKNQAEKAGAEVTVINTLKFKVINESTKKTDRHDASTISEFLSKDMLPESYLCGKETENIRRLLKSRERLVRSTVGQKNEIHALLVSLGLSDELRSLQSKKGRQRILDTLESNDDYVLEAQSVRLMLEIIERIEESVKMIEKQISELTKDDEMVSRLVTIRGCGKITAWTIRAYTEDISRFATAKKYAAFCGLVPWVQDSNETIHHGKITKRGPQELRTCFVQLVMGIRRCKDTSEWRMMQRYEYMKKNKGSGKSIVAAARKMAEIVWAMLSGKQDFDSAKMIGKYKPMILADEALAAMN

SEQ ID NO: 154890 - protein, 403 aa, unidentified
MKNLKYASGIDVSKSDFKACISVISEDLSIKIKASRTFANTAKGILAYVDWIKNNHKEPEIPFFHLMEATGIYHENLAWGLFNIDFKVIIVLGNKAKKYLQSLGLKSKNDKIDAQGLSNMCASQVLDCWKPISKKIYELRSLTRLHEDISVQHTGFNNRLHAYDFAMYELKEVKKSVKKILVQMEKQKELVELKIRDIITNDTELNKKYELITKIKGLGMMSFAVLVAETDGFANFHNVRQLTSYAGYDVIENQSGARTGRSRISKKGNSHIRRIMHMPALNVVKYEPLFKTFYERVYEKTGIKMKGYVAVQRKLLNMVYTLWKKNEAFDPSFISPLSIKKSEQKDSQKLAQKNIEKTPQRDDILEERGCPSFSLNNNPAYGGITLDELPSDVGMPSFPLVRR

SEQ ID NO: 154891 - protein, 360 aa, unidentified
MMLYLGIDQHRKQLTVCVRDEQGDVILRRQVSTEWDRVRGFLAEICKRGGKAGWVAILEVCGFNDWLLRLLDEYGCREVLLIQPEKRSKRKTDRRDANALCELLWVNRERLLAGKRVQGVRRIQPPTDREAEDRQLTELRKRLGQLRTRSINGVKHVLRKHNLEQECPTKGIDTIRAKKWLATLPLSVIDRLHMDLVLAQWKLWDEQIKTLEAEITRRQAESPTAAVIATVPGCRAYSSLTLASRIGSIERFPRPSSLANYWGLTPGCRNSGEATDRLGSITKQGSATARFILGQLVLHVLRRDGAMRAWYARIKKRRGSKIARVAVMRRLATILWHMLKHHQAYQVGGPPRQKLRRKTA

SEQ ID NO: 154892 - protein, 430 aa, unidentified
MKSNTQNEKIKAVTEKTLVVGIDVGSEFHYARAFDYRNYEYSKKAFKFSNTEEGFAAFMAWMLDIKTDHGKDAVLPGMEPTGHYWFNLGKYLQDNGIEPALVNPHHVKKSKELDDNNPTKNDRKDPKVIAGLINAGRYMYPYLPDGVYADLRTASNLRFQAQAELTRIQNRMSRWFSIYFPEYNEVYGNVDAKSGVMILKQAPLPEDILTLGVEGVNKIWRDAKFRGVGLKRARTLVDAAKRSIGSKEGATAARMEIQMLLEDYESRSARLQEIMTLIEELVKQIPMAEKLMEIKGVGIKTVSGFLAEVGDISRFDNPKQLQKLAGLAIVENSSGKHKGQTTISRRGRKRLRYLLFEVAMSLVAKNREFAELHHYYTTRAVNPLKKMQSLMAIACKLIRVFYAMLTKGVDYDPQKMLSDIKRPEVYMQAA

SEQ ID NO: 154893 - protein, 403 aa, unidentified
MTAIREPQRTTSSPRLHLAFELGWCQWKLAFTIGHGQPPRLRTLVARNLPGLLAEIARAKRRFGLPEDAAVVSCYEAGRDGFWLHRWLTAQGIDNAIVDSSSIEVNRRRRRAKSDRLDAAKLVTMLLRFHAGEHKVWSVVRVPDVATEARRQLHRELIAVQDERTEHTNRIKALLAGQGIALTAVTSAFLDDLAALRCWDGSTLPDDLQQRLRREFARWQLTDQQVRDLETERKRRIRQGDTPQVEPMRRLLELSGVGLSGAWLLVHELFGWRKFRNRRQVGAIVGLTPTPFQSGNSRREQGISKAGNVPVRRMMVELAWGWLRWQPDSALSSWYERRFARHGARARKVGIVALARKLLVALWRYLDQGEIPAGARLVSWKAKVNRHAGTISNRRRAAAVAVA

SEQ ID NO: 154894 - protein, 342 aa, unidentified
MNLPIRIGMDTSKSVFQLHGVDENEVVVVRRQFRRAEMIRYFERLPPVLVAIESCGSSHHWARLLQSFGHEVKLIPPQYVKAYVKRGKNDAADAEALCEAVTRPSMRFVPVKSKERQAACMLMTVRERLVSVKSQLSNAFRSYAAEFGIVGPAGRQNVAALIKRVLEDDSLPEMARDLFRLQAEEYAAVEARLAKIEAKLMKWHREDDVSRRIATIPGVGPIGSSMLSMKAPPPETFRSGRDFAAWLGLTPKDHSTGGRQRHGGITKAGDSVLRSTLIVGATALLRHIRKGRHKPTLWLASLLERKPLKLVAVALANKFARIAWRLMISGGVYNRPAAATPI

SEQ ID NO: 154895 - protein, 353 aa, unidentified
MIWVGLDLHKRYITACALDEGGAVVAEHRRLPTAVEALVAWLQELGGPVTVAMEATLYWAWLHDRLSAAGIAAVAAHPYQVKVIWQARCKTDPIDARKLADLARTNLLPVIWVATPTVRAQRTLLRGRAYLVRMRTGVKNRIHGLLLAENQWVDVSDLYGRAGRAWLQTVPLSPMARMQVDLLLDMVDVLDQRVARLDQRVQRAMKGDPVVQLLQTWPGIGTFGAALLRAEIGTIDRFRTSHELAAYAGLTPSTQSSGGKTTHGGVGRAGSPWLKWILIEIVQSLKLAPGPIGQHYQKLLRAKGKPKATVAAARKLCCYLYWCLKEEWSYDEWLRQHEESREVRPRHALGSAA

SEQ ID NO: 154896 - protein, 418 aa, unidentified
MSVLSSLFVGIDVSKNSNQVYAMNFDQEKLLSFSAPNDSEGASKIETKLIECLNKNNYESVVIVLESTGMYSFHIATYLSASEYLANYSVLVYCINPKTSQNYRKSFSEMDKTDPKDSYILADMARLGKVKSLTPVKGTQKLALQRLTRHRKHISEQIVREKLYVLNNIFLKFSAFDHKFDGLAPFSDPFGATAQAILLEYKSPEEIINTPIEDLTSFISTISKNRFADPKKVAETLTKCAKMSYRLDKSAYEPINTAIASSLVILRCLENEIKHIDKEIKILSKGFNSDEYNCLISIPGIGPTFAAGILSEIGSIKQFDNEEGLAKFAGLTWRRHQSGDDEHEDTPMTKTGNAYLRYYLIEAASMAILHNPIYKEYYQKKFAEVKTHQHTRALALTARKLVRLIYGLLSKNQLYKAN

SEQ ID NO: 154897 - protein, 349 aa, unidentified
MFAGVDTHKDTLAVAVIDHAGRVVRQLELPNQDSGYAQLLALLSSHNVVRVGVEGSGNFGWPAAIYLLKRDLNVVEVPPLMTSRERLSRPGQGKTDPVDAVAIARITAREPSLPPVRPMTGHAADLRVLTEYRDQLVNERTATANRVHTDLGWLRPGYQHQLPHLTNTAHLHAALELLSGDDSVRAAVTRSRLDRMLTLTEQLAELRIQIDALVKASGSTLPEVYGVGPVVAATIIGHVFDVRRYPTRHHFATANGTAPIPASSGRTVRHRLNRGGNRQLNRAIYTIAITQIRADTEGRAYYQRKRAEGKTSREALRCLKRRLSDLIYRTLRADLANTAQRTPTLSVAA

SEQ ID NO: 154898 - protein, 360 aa, unidentified
MKVQRTSVGLDVHARSVVACALDGDTGEVFERRLTPDHQDILEWLQSLPAPVAVAYEAGPTGFGLARFLAAAGVLCLVAAPSKLQRPAGDRIKTDARDAAHLARLLHLGQIVEVVIPSAEQEAARDLVRAREDCRGDLMSARHRVSKLLLRQGIVYSGGRTWTGTHEAWLRRQRFESPALQLAYDTVLDTMLATVDRRDRLDGAIAEMSADSVYTPVVTRLGCLRGVSTLTAFGLAVEIGDWHRLTGRSIGAYLGLVPCEYSSGSSRSQGSITKTGNSHARRLLIEAAWHHRQPYRPGVELRRRWDAATPAARVRGQQANRRLHSRWCRFDARQKRPVVANTAIARELAGWCWSLAVLHT

SEQ ID NO: 154899 - protein, 331 aa, unidentified
MKKVTETIGIDVSKLTLDVYVRTTKVHKQFSNDVKGFRQIISWTIKQKINLEETLFCFEHTGWYCLLLSYFLFENKHRYCCINAIEIKRSMGLKRGKSDKADAWEIANYAWLRREELIPSVPPAKKLIELQRMMSLREQLVKQLTASKNLYKGMQEIVMDELNDVSLGILKENMNQLEKQILTTEKSINELIKQDETMITNYKLSKTVKGVGMVLAVQMLLHTHNYTRFESPRQFSAYCGLVPYPYQSGTSINGRNKTHPISDRKMKSLLSMSAISAIQHDKELKLYYQKRVEEGKPKMVVLNIIRNKIVSRVFATVNRGTPYVEMSKFCA

SEQ ID NO: 154900 - protein, 401 aa, unidentified
MVSDFMKGRYNLMKIFVGIDIAKLNHFAAAISSDGEILIEPFKFTNDADGFQLLVSKLESFDKNSIIIGLESTAHYGDNLVRYLVAEFYQVCVLNPIKTCQMRKNNVRKTKTDKVDTFVIAKTLMMQDDLRFITFFDLDMMDLKALGRFRQKTIKQRTRLKIQLTTYVDQVFPEIQYFFKSGLHQHAVYALLKEAPSPKEIASMHMTHLANLLKVNSHGHFTKELAKELRVLAQKSVGANDSAISIQITQTIQQIELLDSQLEKIEAEMTDIMKFNDSVIMTIPGIGYINGGMILGEIGDIHRFSNPNKLLAFAGLDPSVYQSGNFQAKTTRMSKRGSRVLRYALVNAAWNVVRNNATFKAYYDAKRSEGRSHYNALGHCAGKLVRVIWKMLTDEVEFNLE

SEQ ID NO: 154901 - protein, 339 aa, unidentified
MEKLIRIGMDTSKQFFQLHGVAAAEQPVLRRQLRRRELLPFFKRLEPTLIVLEACGGSHYWARELAGLGHAVKLIAPQRVKPYVPRGKNDAADAAGLCEAASRPTMRYVPVKTAEQQAALMLAGVRDRLVRNRAQLANTIRGYAAEFGLVAAKGMARIEGLLSSAQTDETLPVLARELFTGLGREYARLDTELVAIEAKLLAWHRASDLSRRLAAIPTIGPVIASLLVMKTPDPHAFGSGRQFAAWLGLTPKDHSTAGKQKLGAITRAGDETLRSLLVVGATAVIWQTRRGKGRNPSPWLVELLKRKPPKLAAVALANKTARIAWKLMATGETYKQAAA

SEQ ID NO: 154902 - protein, 419 aa, unidentified
MTYRIAGIDVHKRMLAVVVADVAVDGGYQFDRRTFGTAPEQLRQLAAWFLTSGVDEVVMESTAQYWRPVWDLLEQAWVLPRRRQPGAPPTAGTLHLAQAQSNRGPRGRKKDFPDAERLVRRLVAGELILSFVPDAEQRLWRTVTRRKYQLTCSRVQLQNRLEALLEEMHVKLSSLVSDLLGPSARRMLEAIAEGATDPTAVAALANQRLRATPEALADALGACADLHPVYRRLLQLALTELRGIDAQIEALNREMGGLLRRHQDAVQRLAAVPGLGVDSAQQIIAEVGPAAVTFPAPKQMASWVGVCPGAEESAGVTYSRRSPKGNRQMRRLLNQAANAAVKTKGSIFELVYRRLVPRLGHRQAIGAIAHRLCRLIWKILHDGVTYEERGPAVTKERLRARTAKMIRELKTLGYRVEPA

SEQ ID NO: 154903 - protein, 402 aa, unidentified
MNAVGIDVSKGKSMVAIMRPFGEIVSAPFEIKHTASDINSLVELINSVEGESRIVMEHTGRYYEVLAHQLSEANLFVSAINPKLIKDFDNDSLRKVKSDKADAVKIARYTLDKWQNLKQYNVMDELRNQLKTMNRQFGFYIKHKTAMKNNLIGILDQTYPGVNTYFDSPARSDGSQKWVDFASTYWHVDCVRKMSLNAFIDHYQNWCKRKKYNFSQSKAEEIYGKAKELVPVLPKDDITKLIIKQAVDQLNSASTTVESLRTLMNETASKLPEYPVVMAMKGVGTSLGPQLIAEIGDVSRFTHKGAITAFAGVDPGVNESGSYEQKSVPTSKRGSSDLRKTLFQVMDVLIKTHPQDDPVYQFLDKKRAQKKPYYVYMTAGANKFLRIYYGRVKEYLASLPES

SEQ ID NO: 154904 - protein, 362 aa, unidentified
MRIIGCDLHARQQTLAMLDTTTGEVVKMTLKHEGDNVREFYSKLPLPVRVGIEATGSMQWFLNLMEELGIECQVGHPAQIRASEPRKQKHDRRDAELILKMLVEGRFPAIWLPSKELLDLRALLRHRHQWVRMRTRVQNALQSIALANGLRRGTALWSHDGQSRIASLPLAPHAAYRRSELQAMYEKFEAEIEKLNQRVEEQACKRPGARLLMTHPGVGPITALATEVFLGDPARFADSKALASYVGMIPREYSSGEWQRLGGLSKQGNPLLRFLWGEAGAHAVRRDPELQRFYRRKLVQKGLGKASVAVARKLGIRLWIMLRDQIDYNEFCHRGQKQQKSSGACAGMPETRYGAKSHRPID

SEQ ID NO: 154905 - protein, 417 aa, unidentified
MSSFALPDALFFTGIGWAAETHAVCVLDAAGKVAAEFTIEHSAGGISVLLRRLARYGAAGGMPVAIERPDGRLAGLLLEAGHPVVPVKPNAIKTWRDGEVLSGAKSDAGDAVVIAEYLRLRAHKLKPAAPYGDQTLALRTVVRTRGDLVEMRVAATNQLSALLEAHWPGARAVFADVESPISLEFLTRYPTPAAAAHLGEKRMAAFCLKHGYSGRRNAAELLARLRAAPAGTSLESLGEALRDAVLAAVAVLQALNASVKSLDRSVAAHLGEHPDGAIFTSLPRSGQVNAAQVLAEWGGCRPAYEHPDSVAALAGVTPVTKESGKHRSVHFRWACNKRFRAAITTFADNSRHASPWAAQIYDKARAAGKDHPHAIRILARAWIRVIYRCWLDGTPYDPARHGAAAAIAEHPARQIAA

SEQ ID NO: 154906 - protein, 343 aa, unidentified
MDHFAGLDVSVKETSVCIVDDTGKIVREVKVASEPEALLAVLKNPAYHFKRIGLEAGPLSQWLFSALAEAELPVICVETRHMQAVLRAQINKTDRNDARGIAQMMRVGLYRPVHVKTLRSQKLRMLLTHRKLLQSKAIAIENDLRGTLRNFGLKVGMLGTVKFEARIKELVEGLHDLAVLVEPLLIVRRVLHEQIVILHRRLLAIVQDDDVCRRLMTIPGVGPVVALTFRATVDVPARFRNSKAVGAAFGLTPSKYQSGEINRTGDISRCGDEMMRVMLYEAAQVMLTRTNKWSWLKAWAMKIARHRGMKKAIVALARRLAVIMHRMWVDGTEFRWTREAIAA

SEQ ID NO: 154907 - protein, 427 aa, unidentified
MARAIGLDVHLEFCEVAIAEDRAVRSAGRVETKPDALELFAQSLGPDDRVALEVTGNAWEIARIVEPHVARVVVVSPADTGIRQARAKTDRLDARTLARLLWSGELDAVWMPDRVTWVMRRRLSRRGQLVWARSRAKNEIHAVLMRCLVGRPPFADLFGVKGRRWLAELELPVEERETVDAGMRQVEFLDTEIAAVERLIARDALASEEIKRLMTVPGVNVIVAASFVAAIGDIGRFHNPRKLVGYLGLDPRVRQSGSGPASHGHISKQGSVRARHALVESCWSAVRQPGPLHAFYQRVRARRGHSVAIVACARKLACLFWVLLTREEDYAYAQPSLTRKKLRLLELAAGAQRYSPAGDGVWHANEAVRAAERELAHQAEIAYQRTVRDYHATQATTKGAGATPGRASSSRQSGKQRGRATVPDPAL

SEQ ID NO: 154908 - protein, 476 aa, unidentified
MLVSASVVHWPGGVGVLFVLSEGRTLVSIQSSDPPRLVRVGIDAAVVAQHEVCIRSTDAAGRVEVDRFRVPPTLAGLRSLADRLAVTPGVLAVAEPTSMTWLGLSVALADAGCDLSLLGARHAARLRGAISGKSKSDVIDADVLARAGEVFDLHPLRPVDPGQLALRRACVRRGSAVIDGNRFLRRLISLARWAFPDVWNGFRGSLPTAVAVLERWPQLAQLATTRRSALTGVVALHTRGVADVPARVEAIRSAAGAWAAFWDGHLDLDALAFDVSEHLTDMADAKARTERATAAAQRHWRQLYGDDELLLSVPGMGPVTGCVVRGFLADGHMFSSAKAAASYAGLNPSTWSSGTVSQPSRAITKEGPAVLRLALFQAANAARRQDPQLAGFYYRLMTQQRHCHTQACVAVARKLMERTWTVLTRGEPYQLRDLDGRPVSHLEAKKLIKEKCTVPDHIRAAARARSAATNRAKLTR

SEQ ID NO: 154909 - protein, 402 aa, unidentified
MFVGVDWASRAHELCVVDDHGAVVECFGFAHSEQGLHDALTRLARLAPPGQLPVAIERPSGLLVERLLAAGHPVVPIHPNAFAAARPRWEGAASKSDTGDAYRLADYLRTDRQRLRRLEPLDRQTRELQALVRLRDDQLAARVAATNQLAALLDEHWPGAKAIFGRLDSEIALTFCERYPTPDSAARLGEARLAAFLRRHSYCGRRSPSELLTRLRTAPQPIQRLDPEIVAELVHAQLRLVRTLLGTLADLERALAAALQTHPKAHLLRPLPRIGTISLGQVVAEIGPLIERTNTAEQAAALAGAAPVTKHSGQHKAVCFRHQTNAKARKALTLYADNSRHASPWAQRIYREARARGCRHPHAIRILARAWLRIIWACWQTNTPYNPTHRPLTQPTTTQALT

SEQ ID NO: 154910 - protein, 352 aa, unidentified
MQALAVGCDAHKHYSQLEVQDSAGQALSRVRIDHAHGSILRFFSTLPEGTPVALESVGNWYWIADEIEQAGCLPLLTNPAKAKLLMGHVNKTDKLDASGLATLLRLGSLPSVWLPPAELRDQRELPRTRMALTTLRTAIKNRIHSLLAKYNLAPDGGIQLFSKAGRAWLDSSASCLPPESARCLTQQIELLDSLSLQISTLEERIHSLIPLTPTMQLLKTIPGIADILAIVIEREVGSIERFPSAPQFSSYCGTTPRVNSSGGKTRYGKLRTESNQYLKWAFIEAANAVAAHHAQRGWTTRHASRLYLRIRSRKGGSVAIGAVARHLAESAFWVLKKNEPYRETNAVSPKQG

SEQ ID NO: 154911 - protein, 417 aa, unidentified
MDPLLPVVLSCCCGIDVHKKSLTACLLTCGASGEVVKEIRTFATVTAGLQELAGWLRQQGCRHVAIESTGVYWKPVFNVLEPAGLEVILVNAQHVKNVPGRKTDVKDAEWLATLLRVGLLRASFVPPQDQRELRDLTRYRTQVIRQRAQECNRIQKLLEDGNIKLASVASNILGVSGRDMLQALANGQTDAETLAELARGKLRDKLPELRAALDGVLRPAQRWLLGEQLRKVTELDEAIARLDAKVAELCLPFAQALALLDQIPGVNERIAQVIVAEVGLDMSRFHGAAQLAAWAGVSPGNHETAGKRKSGKTRGGNRWLRAALVQAAWAAGRAKGTSLQATFGRLKGRRGVKRACLAVAHRILRITHCLLSSGRPYEEEGPDYYRVPDKERLKDRLLLRLQRLGFQVTVTATDQVA

SEQ ID NO: 154912 - protein, 351 aa, unidentified
MNITTVGVDLAKDLITVYAADSAGRMISVRDLRCKEFSAWLVQLPPGCMLGMEACSSAHHWARRMLELGLVPRLMAADFVQPFRKSRATKNDRNDAEAICTAVRQPNMRFVAVKSVEQQTRLAWHRVREGFKEERTAVINRTRGLLAEFGIVIGKSSSAFNRALAGLVRDEAQSEGLRSLLERMRLSLVMLDEQMATCDHQIAQQARASEAAKRIQSIPGVGPLTADAIISTVGDAREFKNGRQFAAWQGLTPRQYSSGGKTRLGRITRRGDAYLRTLLIQGARSTLQAAMKRMPDKRTRIQQWMIGLAARVGYHKTLVAIANKHARMIWSILAKGEEFNIDAWQQYQAGV

SEQ ID NO: 154913 - protein, 347 aa, unidentified
MKNINVIGVDLAKNVIQISVVSRSNRELQNKSLSRKKFAEFLARQAVSLVAFEACATAHYWARAAKRHGHEVKIIPAKAVTPFRQGHKTDPNDALAVAEAARRPNVKLSPLKSIDQQSLQSIQRSRELLVQNRTALSNHVRGILMEFGIVIPQGFSSLHRYLPEILEDGESELPDMYRSTLHLLWRRLCELRDDVKQLTTEIEGLVKQEGSCKRLLALEGVGPIGAVLLFATLGTGEAFVNGRQFSAYLGLTPKQFSSGGKVNLVGISRHVANKRLRAVLIQGARAYVHKLKEPKSSKDRWLMALIERAGTGRASVALANKNVRTAWALLTRGTAYEKHHEHALEAA

SEQ ID NO: 154914 - protein, 349 aa, unidentified
MSQNLNSAVAVIGIDIGKNSFHVVGLDDRGAIVLRQKWSRGQIEARLANLPPCLIGMEACVGAHHLSRKLKALGHDARLMPAKYVRPYSKGQKNDFRDAEAIAEAVQRPTMKFVATKTVEQLDLQALHRVRERLVSQRTGIINQIRAFLLERGVAIRQGLRFLRAELPRILATSPDVLSARMVRVIRDLAEDWRRLDERIDQLSSEIAVLARQDAGCERLMSVPGIGPIISSAMVAAIGTGEAFSKGRDFAAWLGLIPKQISTGDRTILGKISKRGNRYLRVLFVQAAWVVLIKPMSWERHGLRSWIEAAKKRLHRNVLAIALANKLARIAWGVLAGGRIFEASKLQAA

SEQ ID NO: 154915 - protein, 426 aa, unidentified
MATPRPNSKEPTLAWKAGSDWDALSSPVTHSKGAEKDGTGMKKNSKNETTKSKRETKKVAELAAPRLTEREANTLVIGIDLGDRTSSYCVRTLGQQIVKEATVATTATAILEAFQGLRRQRVVIETGTHSRWVAQLLELMGHEVIVANARKLKLISENNQKSDKVDARLLSQLGCMNVEWLHPVYQRSQDAHCDLLLARAREALVETRTALINHVRGSVKSFGSRLVKCGSERFVGVARVTLPDALRPAMSGVLATLEEINEQIYHYDCQIEHLCHTKYKEAAKCWMQVNGVGPVTTLTYVLTIEDKDRFEQSRDVGPYLGLVPNKRQSGQRDPQLGISKAGDEMLRKLLVNCAHHILGVNGQDSDLRRWGLELVRAVERKGKKGARKLAAAAVARKLAVLLHRLWVTGAEYEPLRNRGAQQTPAA

SEQ ID NO: 154916 - protein, 422 aa, unidentified
MPLSSNIYRGDEAMLKIVYPICCGIDVHKTFVVACIASTNDKGVTTYQTKRFSTYTKNLNELSDWLSVNNCKDVCMESTGKYWHPVWNVLERTCRPVLAHPKYLKAIRGKKTDKKDAKWIADVFKHDLVSGSFIPPVIIRKLRDLMRYRVKLTNYTTGEKNRAQNCLTTSNIQLDHAFTDVFGKSATRILNHILDNPGDKTFDVTPFVDRRCKTPIEEIQLAVDGDISSEQAEKLKIIRSHMDSLDLCKVNLESAILFLVDPLLPQVNLVSSVPGIKDFSAIAVIAEIGFDRSGFPTAKHLCSWAGLAPQCNESGGKKKSSRVSKAGAYIKPLLIQCSNAVVTSNKHPEIKNRFLAIKKRRGHKKAIVAIARMLLTAIFHILSKSEPYNPALYRNSDVSPVDSVDRAVMLLEKRGFTVSKPA

SEQ ID NO: 154917 - protein, 462 aa, unidentified
MKIRLGVDVACRAAHQASLADEQGRFLFVGHRFRTDPDELDTLWARLPKDAERIEVVMEPTRNAWVALAAWFRRHGATVVMVPPEQSADLRDYYNKHTKTDRLDSKVLARLPLLHPEGLHREDSLGPGDELKRAVKIRSGLVHRRTACMARLDALLEILGPAWIAALGSDMTLTALRFLARYANPVQVKRLGKARLAAFFRRSSRQAWADERADAIIEAAATTLRLWGADGSELDFDALAADIAAEARLALTLTDEINGFDKRIGALYDKADPAGIVRSVPGAGRVCAPQILGRLGDPTRFANLAAVRSFAGLVPAADSSGQADGHRGPTKAGDCCLREALFIAADHARKVDPTLAVRYQRLMLAGKHHDSAVCTLAAVLLTRIAACLRAGTHYLLRDTDGRVITEAQGRAIVAERYTVPPEVRAARRKVTPHRHPRRNERNERAKTGVATRSKASPVPQPA

SEQ ID NO: 154918 - protein, 422 aa, unidentified
MNEMDGMRQEQQRCWAGLDWGSETHAVSVVNDAKEVLGSFKVEASLKGLEQLVKRLGGFGTVAGIAIEATRNPVVNCLTSAGFTVYLVNPKLSKNWRACNSVACVKSDERDGLVLAMELAGRHASLRALKPEDPTVAELAGLCEKLRVLVDERTSLLQRLKATLGQYYPGALGFFTDWASPVAWRFLHRFPRPEMLAHAHKGTLIRFLKANRIGLKPIWLARIEARGEVTCWPSPGDRVALEAMALAIVAQLQSLQPHIDKMDRLIAESARHLPHTYLLESLPGAGKRLAPVLAAITAPVASGQTAIKAIRCVSGVAPVKDESGKRRHVCVRRRCNKHWRDVMHLFAFSSTHWCGWAKAFYDMHREKGDHHASALRKLADKWLKIINRMLETGEPYDDQRYVEALRRNGSPLYLRLAKKTCG

SEQ ID NO: 154919 - protein, 352 aa, unidentified
MSIIAFDSHKRYTWARVEDENGQNVQECRIEHQRGNIVGFLRRQQPGSAVAIETIDNWYWIVDEIEKAGMRPVLVHAGKAKLMMGCINKTDKLDAKGLNMLQRVGRLPTVWIPPADIRDKRELPRVRMVFGVARTKLKNRIHSVLDKYGLQDEFEDISDIFGVKGMQRLNRVIEQLPEQTYCTTVLLLEHLEQTQQKIDCIEGRMKELFEETPQSILVETLPGVGFILAVVIIQEVGDIGRFSGAGCFASYCGATPRVHASGGKVRYGRLRPDTNHYLKWAFSEAGNSVALNSKRLPDRHVSQLYNRIRHRRNHGKAIGAVARHLAEATYWMLTEGEAYRERGLLEVSSTGA

SEQ ID NO: 154920 - protein, 411 aa, unidentified
MKLFVGLDVSSFDIKVCFLNGEGDEMNSFTVENDLPGATSLRDEILQTVQGKSVTELRIGLESTSVYSFHPSMFLHNDKFIQALGGQVFVMNPKQIANFKKSYSDMDKTDEIDAFVIADYMRFGRLPMSIVKEEQYVALQQLTRARYQIVQQITREKQRFLQYLSYKCNTFIEDVESSVFGKAMMDLFLESYSLEELSQMPLEDLADYLRVKGRNRFPDVNQVAKSIQKAARSSYRLDQVVEDSIDAILGTSITLIRTFEKQIKELDKTIERIMKGIPQTLQSIPGVGPVFTAGIIAEIGQIERFDSEAKIAKYAGLYWRKHQSGRFTADVTSLSRNGNQYLRYYLVEAANSVRRQIPEYSDYYAKKYQEVPKHQHKRALVLTARKFVRLVDALLRKNQIYTPKRSVIYEA

SEQ ID NO: 154921 - protein, 349 aa, unidentified
MNVTHYIGFDVHKKHINFCSKVANGEVHQEGRLIAQRSVLREWASQQREPWHGAMEATLFSGWIYDTLKPYAARLEMAHPAMLKAISAAKKKNDRIDARTIADMVRCNLLPTCYVATPEIRELRRLLRYRNLVVRQSVRMQNKMAGLLMESGTPFIKEKLHGRKYFTRLLESLEEVPGSVKDLLRLSRGAFEMFQTSQKRLVQQLLAHPELGKRVERLASIRGVGEITALTWALEIGDPFRFSSSAKVMSYCGLTTALKSSADKQQRGPISKQRNAWLQTALIEAAKLAPRWNPQLAALHARELERGHRNRATLAVARKLAAYLLAVDKQGQPFQPRTLSPIVMTQETG

SEQ ID NO: 154922 - protein, 390 aa, unidentified
MIYVGIDVAKDKHDCIIVDSDGVIRFPTFTILNNKQGFSELLTNIKTCGSDLAKIKVGLEATGHYSDNLLEFLIANDLPTTVINPLHTNLYRKGLSLRKTKTDKVDAHSIVTMLRTEILKPYSKTSYHVRELKSLTRYRFSLVQDCARLKTSYARLCVILFPELEKLVPSLHMASVYALLSEFPSAKSISECHLTKLTNLLTTASKGRYSKEKATEIRNSARSSIGSYSDVKSLELQQTIQSIRMIESQIKQVEAKINPIVDQFHSPLLTIPGISYRMAAIIIAETENFSNFSSAEKVLAFAGLEPSVYQSGQLTSTHAKMVKRGSKYLRYALFNAAKYVCHWDPGFGQYLAKKRTEGKAYNVAVSHAAKKLTRVIFHLVKTNQTFVSQA

SEQ ID NO: 154923 - protein, 406 aa, unidentified
MKQIVSVGIDVSKGKSTVCAMIHPNTIIKESFEVLHTVEEMSMLADYIGSLDGEIRIVMESTGHYHLPVAQFLYQKGFFVCVENAYIIRQFSRIMLHGAKTDPLDAKKLAKYGLEYWSELKPYKFHPSCYTELSLLSKQYQTYIKLLIAAKQNVIHLMDEMLPGFKEALDTASSVQFSKVKYVDFAKEFYHVDMIKSMGKEIFRENYKQWCKEKGYRFQSEKADELFHLAEDGIPTLPTEFPSTRLCMEVATEQVSQLGYALEQILSQMQNLAKTLPEYQTIRQMGGMGEKLCVRFIADIGDVRRFHNGKALVAYAGIDAPPYQSGQYTGTKRRISKRGNSALRKTGYEVMKSLKSHPPKTDTRVYDFIIKKENEGKSKKQAKIAGLNKFLQIYYARVIEIYKNIV

SEQ ID NO: 154924 - protein, 402 aa, unidentified
MHVGWDWAGEAHDVTVLDDTGIVVDRWALTHDEEAIAGSICRLRSHGSPEELPIAIEATHNLVIDRLLAAGHPVVPIHPNAFHATRPRWGASKAKSDPGDSYKLADYLRTEGHRLRRLCPLGAQAAQLQALVRMRDDHVAAKIAATNQLNALLARHWPGATTVFARLDSDIALAFLDDYPTPASATLLGEGRMAMFCRRHSYCGRRAPGELLERLRRAPEPTEAINAETLTELVRAQVRLLRTILGTIADLDRSIGAALLEHPKAHLLAPMPRIGEINLAQVVAEVGPILDRATDIEHACAEVGATPVTRASGKSESVNFRWAVHTGARQALMTFADNSRHSSPWAAHHYRDARARGKRHPHAIRILARSWMRVIWACWHTDTAYDPTRHGAEQRLSQQHAA

SEQ ID NO: 154925 - protein, 319 aa, unidentified
MAQNDRVVVGIDVAKDKVDACIRSLSQRQTFPSTAEGQRALIRGLRKHKVGKAVMEASGGYEREWAKALRNAKIEVRIVDPKRVRSFAQSAGRLAKNDAIDAEMIAWFAETFDEVRGQAYDAAREELVQIVNARQALLEQQTQMQNRCEHTVPIPVRKMHERLLKAIALEVTKLEAVIAALTKASPHFAETAEIIESVPGLGKITSAGLIAAMPELGQVSNEAISALLGVAPYDDDSGKRQGERQIKGGRRKVRNLFYMACMGAATQHNPVLKTFYRRLIAKGKKPKVALVACMRKLIVILNIMIARREKWDASRYAVS

SEQ ID NO: 154926 - protein, 407 aa, unidentified
MELIHERCAGLDVHRDTVVASVRIASGKEVKRETETFSTTTKELLRLGDWLTEHGVTHAVMESTGVYWKPVWQVLESFIELSLANASEVKNLPGRKSDVSDAEWLADLLAHGLLRRSFVPERPIEELRDLTRTRRQTVREITRHAQRIDKLLQGANIKLRSVLSGVLRESGKAILRAMVSGENDPKKLANLAKGTARNKRAQLEEALDGFVTGHHRFLLGQHLDAVEHLEGMVAAIEARIDEVLRPFAEAAKLLTTIPGVSDTAARIIIAEVGVDMGRFPTAGHLVSWAGLCPRLDESAGKQRSTKLRKGNSWLKTALVQCAWSAIRSPGYLRARYHRVRSRAGKMKAIIAVARTMLIAVYYMLSDNQTYRDLGEAFLEARDKERIARALTRRLARLGYEVELRPAA

SEQ ID NO: 154927 - protein, 420 aa, unidentified
MSFKIFRKNCCGLDVHKTWIYGCIGITDTNGRTTYKQTRFSSFSKGLKELSTWLAKYQCTEVCMESTGKYWIPVFNVLEKADVSVILSHPKYTKPQKGNKTDRKDAKWICDLFMCDMVKPSFIPPADIRHLRDLVRYRFKLICMITGEKNRAQNCLTVSNLKLDDVFSDVFGKSSRSITEYILEHPGDLFDVTPFVDRRCKTPIEEIQAAVDGAISPEQAVKLRQCLNHIDELEKHLEEIEQEILRLSDKYQAALDLIRTVPGFDKNPMTAIQVLSEIGGDMSVFPSAKHLVSWAGCCPRNDQSNKKIKSTRISRAGSYFKPVLVQVANGLLRSKKHPEITDRYKRIKARRGHKKAIIAICRMLLTAIWHILSDLKPYTAEGFRESRPVNESKVLTTSQALNLLKQRGYIIKDDLTPAMN

SEQ ID NO: 154928 - protein, 466 aa, unidentified
MKNKQKTKKKKQRVATFELINPNAAGIDIGAEFHYVAIPKGRDPEGKDVRNFGTFTADLYALAHWLKDCQIETVAMESTSIYWIPLFELLDSEGIVVNLVNPRFIKNVPGRKTDVLDCQWIQQLHTYGLLRGSFRPEDQICILRGYLRQRTMLVSYASHHIQHMQKSMEQMNIKLNQVVRDITGVTGMGIIRAIINGECNPKKLAKLRNPRCKNDAKTIARALHGNYRMEHLFALKQAVELYDTYHEKIVDCDRKIEQHLSSFEDQSNGRPLGKARKSNRGKNKPSFDARSHLYRMTGIDLTAVDGLDTLTVLKVISEIGLDMSLWPTEKHFGSWLGLSPGSKVSGGKVISSKTKKCANRAAHALRLAAYSLQRSKSATGAFFRRKKAQKGPSKAITATAYKLARIIYNMLKNGTKYKDIGQDYYEQRYKKRLIENLKRRAKQFGYELNYIKEQQTVMKHADNLVI

SEQ ID NO: 154929 - protein, 434 aa, unidentified
MKVKQVSALRERGLRAGVCRSAEPQCLVTNANKERKADTMKTYILRPVKAVHSENYPTQPAKGPVLFIGLDVHNDSIAVSLAPSDATEVRRYGIIGGEHDDVLKLVKKLRAAHPGATLQFCYEAGPRGFALCRCLRAHGLDCILVCPSKVPRKPGERVKTDRRDADQLARLFRAGELTGIYVPEPVDEAMRDLIRARFQVGKAQHRARQQLKMYLLRHNLRYGGKSSWTPAHLCYLAKIKMPFAVQQIVFQEMLEVISEATARLERYDQEIERAVPGWRWEPVVRALMSLRGMALLHAATLVAELGDFHRFEHPGQLMGYLGLVPSEHTTGTDRQQGGITKMGNGPARRALVEAAWQYRAPARISPHLQKRQEGLPKAITDIAWKAQLRLHHRYQHLTRVGKKKSQVAVTAVARELSGFVWAIGCLVQPRAAKP

SEQ ID NO: 154930 - protein, 367 aa, unidentified
MFHRQSNPATTFVGLDVHKNSITSAVLAPEAETAVVDRFFPDAPSIRRFIDGLGDRSLLSVCYEAGPTGYALARLLDGWGVACEVIAPSLIPMAAGARIKTDRRDARRLAELYRVGQLTPIRIPTETEEAIRDLCRTRTDLVIDRTRSRHRLIKFLLRHNVVYRDGRHWTLRHDAWLANVRFDDEALTRTFARYRSILSGLDAEMAAVESDLKCYLADGPFAETVARLGCYRGVTELGALALGAEVGDWRRFPRATSFMGFCGLTPSEYSSGDRVKRGRITKAGNGHLRTQLVESAWSYQHRPSVGPGIANRQTRATDDTIARAWAAQVHLTAKFKRLSATKSSRNIVVTAVARELAGFLWAEMAAA

SEQ ID NO: 154931 - protein, 351 aa, unidentified
MSQKTEAVVAGTIGIDTGKNTLHLIGLDDGGTIVLREKLGRSRIGTRLANVPRCLIGVEAGVATHYVARELIALGHDVRQVPPVYARPFRQAHKNDFRDAYAIAEAAQRPSTRFVPVKTDDQLDLQALHRVRSRLISERTAVINQIRSFLLERVIPVRQGLRFLRQQLPEIIVKRIDVLSPRMIRIVEELSGDWRRLDERIDCVTEEIEQLAHGSESCRQLMTVPGIGPIIASAMVAAIGNGAAFAKGRDFAARLGLVPKQMSTGDRTILGRISKRGNRYLRTLFMQSARVILLRPVNWAKHSFGPWLTAAAKRLHYNVLATALANKLARIASTVLAQRRNYEARVMPSVA

SEQ ID NO: 154932 - protein, 366 aa, unidentified
MKEISTVRVNGNMIFKGHKLTIGVDLGDRWSCYCVLDEAGEILLEQKVATTPEAMKQIFEKIPRGLIALETGTHSPWVSRLLRELGHQVLVAHAQKVQLITKSNRKDDRHDARTLARLARIDPELLGPVRHRSVQAQIHLTVIRARAELVSARTALVNAARGLAKSYGERLPKCGTYQVSEKLAERLSAELRDVLGPLLKEIESLNERVKEYDERMEKIAKEVYPEVSLLQQVKGVGTQIALTYILTIDDPYRFSKSREVGCFLGLKPGRRDSGESEPQKGISKEGDRYLRTMMVQGAHYILGPFGEDSDLRRWGLKLAERGGKNAKKRAVVAVARKLAVLLHRLWVSGEVYEPLRNSQKAMRAVA

SEQ ID NO: 154933 - protein, 374 aa, unidentified
MKKRSSSQRSQKVTAVKTKGGQERVTIGMDLGDKTSRYCMLGNEGEILREGQVATAKTGIVETFGSLGRVRIAIEVGTHSPWVSRLLLKLGHEVIVANPRQVKLITESSRKDDRLDAQTLARLARIDPQLLRPIQHRSEKAQGALMIIRVRAALVAARTSLVNTARGLVKSMGERLPQCDADQMGVARAISLPPQLRQALEALLKEVESLTAKIKNSDREIEQIARKDYPETALLQQIGGVGPLIALTFILTIGDKNRFQKSRDIGCYVGLRPRRSDSGQSQPQLRITKEGDPYLRTMLVQGAQYIISRRGPDTDLKRWGLNLAKHGGKRGKKRAVVAVARKLGILLHRLWVTGEVYEPLRNHNARQEQKKAAA

SEQ ID NO: 154934 - protein, 350 aa, unidentified
MNHYAGIDVSLECSSVCVVDGAGKIVREAKVASEPEALIAWFGELGLSVTRIGLEAGPLSQWLYAALRQAALAVELLETRHVRNALKTMPVKTDRNDARGIAQLMRLGWFRPVHCKSMEAQETRALLTARRLVKTKLHDVEMSLRGILRGFGLKVGQIAKTSFEARIRELVAGHPTLASIAEPLLAVRCVMRRELAGFEKQVRALARSDVRSRLLMTTPGVGAVISLTYAAAIDDPARFTSSKVVGAFFGMTPKRYQSGETDYSGRISKIGDASVRAVLFEGAHVILTKPVKGCTALKSWAMRIADRAGMKKAKVALARKLAVIMHRMLVDGTPFVDAAEAVAAAAAAAA

SEQ ID NO: 154935 - protein, 346 aa, unidentified
MDTIGLDLHKRETQLCVGHADGTITEQRIVTSRERFTAVLGHRSPARILVEASTESEWVACHLETLGHEVIVADPNYAPMYATRSRRVKTDRRDAWTLMEACRAGTYRPAHRLSAARRHVRAELAVRDAVVRTRTRYVALAKALVRRDGLRVPSSAAERVGAHLQALTVAPTLAAELAPLLTLLPPLNATIAAADQRLAELEHTDPSVALLMTAPGIGAVTASALVATIDAVERFASAHQFEAYLGLVPGERSSGDLRRIGPITKAGNRRARWLLVEAAWRILRSKDAAGAPLRAWARPIVARRGSRIAVVAVARRLAGILYAMWRDGASYDAGKLRRPRGARPAA

SEQ ID NO: 154936 - protein, 334 aa, unidentified
MEKITTVGIDLAKSVFSLHGIDSAGRVVMRRTVRRDQLVGVVAGLSRCLVGMEACSGAHEWGRRFQEYGHTVRLMAPKFVAPYRKSGKNDGNDAEAICEAVTRPNMRFVPVKSVEQQALLAMHRVRQGFVVERTAIINRMRGLLTEFGVVLPLRSVTVRRQAAAAAEGLPELARRAIGDLLEQLRVLDERIGAYDREIETQARLCEPAQRLMKIRGIGPTTALAIVATVGNAREFKNGRQFAAWIGLTPSQYSTGGKPRLGHISKRGDAYLRNLLVQGARSVLNSAGMHQDRISRWILELQPRRGYYRTLVAIANKNARIAWALLAKNETLRSA

SEQ ID NO: 154937 - protein, 344 aa, unidentified
MIYAGLDVHKRCTQICLEDENGALVERRILTERHRLLDAFGGKQRMRILLESATEAEWVARCLESAGHEVIVGDPNFAPMYAQRSRRVKTDRRDARALMEACKLGAYKPAHRCSDAHKRVRARISARDLLVQTRTKCISLVRALLRHEGIKPERKSSATFAQRVREIGAPDALASELAPVLDLIDALNEKIRRADERVSEIARDETHQRLMSVPGVGPVTAVAFIATLDDPKRFRGPKQVRAYLGLVPREHSSGEKALRGRITKQGSSRMRRLFVQAAWAVLRSRPTPEAEPLKRWTTNVAGRRGRYVAIVALARRLAGILFAVWRDGTSYRAPGPLGGGEVTT

SEQ ID NO: 154938 - protein, 339 aa, unidentified
MCILYVGIDLAKNVFAVHGVDEHGKAVLVRPSVARAKLHELIATLPACTIGMEACSGAHHWARLFLQHGHTVRLMAPKFVAPYRLSGKQGKNDAADAMAICEAVQRPNMRFVPVKSQDEQARLCVHRVRQGLVEQRTATINRIRGLLSEFGIVLPQRAATVRREATVHLEDLPGWANTAIGDSLSDVHRLDERIAQYDHHVLQMARDDQRSRALMQLSGIGNTTASALVSTIGNAHDFKNGRQLAAWLGLVPGQYSSGGKTRLGSITKAGDRYLRTLLVLGARAVLAAARTKDDRLSRWAIALEERRGYWKAVVAIAAKNARMAWAVLAKGENFKLLEA

SEQ ID NO: 154939 - protein, 318 aa, unidentified
MAEVVTFEQIVQRGCGLDVHKQTVVGTIDGVGLKKETREFRTTTSSLKELKEWLERSKVTHVVMESTGVYWKPVYHVLEPSGMTVWIVNARHVKYVPGHKTDKRDSKWLCKLLLAGLLKPSFIPPREQCELRDLTRYRRKMIEQISSEKNRVIRILEDCNIKLSSVLSDTHGVVGTKLIDKLCKTGKISVEDIEEVYHGKLQASREEIYEACEGFVTAHHVFMLQAIKKDISSCEGIISELNARIKKMLAPYDNVLELLKEVPGLSTKSIEDLIAEIGLDMSVFPDEKHLASWCGVAPGNNESAGKKKVDAHRMVTNR

SEQ ID NO: 154940 - protein, 347 aa, unidentified
MAHIGVDLHQNSFTVCRLAADGSEAFETWQLCPADLDRFCLSLDADDEIAIEATGNSAWFREQVIACVGRVVVVNPRQFQVIRRSVKKTDRNDARALAFFLSKDMLPETRPKTVAQSELASVTHTRDLLVKQRTRLLNKIHALHNRHGIKLKKESLSSKRRLMALDIGRFSKLEQIELTVVRDQALSLSKSIAELDREIEQAAGDMDGYDGLVSIKGIGPRSAAVFLAGIGDVNDFESADKLAAYLGIVPKVNRSNETDNRGRITKRGNKLVRTTLVQCTLIAIRYSGYLNAYYRRIKDRRGAGKAIIATARKLLSIIYETLKNRWIFEDFTTFTRQQGPVPAGQPS

SEQ ID NO: 154941 - protein, 409 aa, unidentified
MIYCGIDWAEKTHDVALVDDTGQLVAKRHITDDASGYKILLDLLAEHGDSEENPIPVAIETPRGLLVAVLRIGTRKIFAINPMAAARYRDRHAVSRKKSDPGDALVLANILRTDMHAHRPLPDDSDLARAIAVLARAQQDATWNRQQIANQLRSLLREFYPAALDAVATWANGLCRPEARELLKSAPTPAKAARLTRDQIQAALRRAGRKRGIEAEADRLRDIFRGDYAHQPPLVEDALGKQMLALVVQLEAACTAADDLAKAVEETFPQHPDTEVLLSFPGLGVQLGARVLAEIGDDHTRFADARSLKAYAGSSPITRASGKKSSITRRWIKNDRLNHAGYLWAFSAITASPGAKAHYRRRRDDHGDWHAAAQRNLFNRMLGQLYYCLQEHELFDEQTAFPTGLAAAA

SEQ ID NO: 154942 - protein, 344 aa, unidentified
MATYYIGADVHVNNTELAVEYRRKIVQRYSVPTSIPAIRAALCSLQGKKFLAMEEGSMAGWLYRNLSQDVDKFIVCEPRRNKLITSEGDKDDKIDAAKLAALLRGNFLKAVHHTSDPHRAYLKHWIKLYHDRVRAAVREINKIRACCRMHGVRIPRKVVRNQLHRHLWLRGINNTVLKAQLKMFWIGYDATKEQVELAKKQFSSYARKYPIIKSWCALPGVGLIRATTIFAYLDTPWRFKNRAKLHKYCGIGLVRVSSGKDKRGRPKPAILRLPWPVNGRLKEAVIGAATSAIERTDNAFKDYYERMLANGITPTNAKHSVARKMVSTMSAMWKTGSEYNEKLL

SEQ ID NO: 154943 - protein, 338 aa, unidentified
MSLYAAIDLHSSNSVLAVMDGDGKALLRCRRPNDLPRLLTDLAPFRDELVGVAVESTYNWYWLVDGLMDHGYAVHLVNTTAIPQYDGLKHGDDDSDALHLAQLMRLGLLPEGYIYPREQRATRDLLRRRFSLVRQAVKLMLSIQSSFSRSTGKQLSGNALRRLTPVQLNDLFPELSTRYGVLIQFKLWLTLQDQITALEHWIRRDLARPDQLVRLQSVPGIGPILGMTILLESGDIGRFASVGDYASYCRMVESVRLSNGKRKGHGNRKCGNRYLCWAYLEAANYAVRFDPLIRRWYERKRARKHRVVAIKAVAHKLARACYHMLHEGTTFDLARAFG

SEQ ID NO: 154944 - protein, 316 aa, unidentified
MEATFIFVGIDVSKERLDVAMCPSGESQSVSNDGSGIKTLVKRLGEIGPALIVLEATGGLERPVMRALASAELPVVVINPRQVRDFAKATGQLAKTDSIDAGVLARFAEAVRPSVRPLPNEVTLELRTLVARRRQITEMIVAETNRLNGASKALTKRIDAHIRWLEAELGRADKDLDQSIRQSPIWRENEDLLRSVPGMGPVISRTLLAELPELGRLNRKQIAALVGVAPLNRDSGTLRGRRSIWGGRATVRAALYMGALVASRRNAVIQTFYRRLRNAGKAPKIALVACMRKLLTILNAMIKHKTHWSEIISQTT

SEQ ID NO: 154945 - protein, 385 aa, unidentified
MSSRAAVEPAAAGRSIIYLGLDVHKDSITVAVLPAGAKTPTRVERLPNDLPKLKRWLERVAREGELRACYEASGAGYVLHRALHEWGVACEVIAPSLIPKRSGVQRKHDTRDAADLARLYRAGELTAVRIPSEADERVRDVVRCRETFQREILKSRHYILKFLARRGFVFREGTNWCTPHLKWLQHLTTDGSPLAPHDRLVYREYHALLLYKLQRRDELDRQIEQLALLPTLAPMVRRLQCFRGISIHSAMVLATEIVDWRRFERPAQLACYLGLVSREDSSGDRQRLGSITKAGNSHCRHVLVQAAWSYRHRPQTSVDLQRRQQGQPPAVITHAWKAQQRLHHRFNHLAYRKRPQIAVVAVARELVGFLWAVMQEVSPVAQHVA

SEQ ID NO: 154946 - protein, 348 aa, unidentified
MTVTIVETRAITGGVDTHADAHVAAALDPIGGLLGVQEFPATPAGYARLLGWLGAFGTVCLAGIEGTGSYGAGLARHVTAAGIRVVEVDRSDRQDRRRAGKSDPLDAVSAARAAQSGRARGAPKGRDGAVEAIRTLMVAKRSARAERTQTINQARSLILTGPNDLRARFAQHDPAGLIAELAALRPRPGDVVGYATRVAVRELGRRAGFLDSQLERLDELIVPLVTARAPGLLALYGVGPDTAALLLVAAGDHPERLRSEAAWAHLCAVAPIPASSGKVTRHRLNPGGDRQANHALWRIVITRMSSHPPTRAYVARRTEEGLSKKEIIRCLKRYVAREIYPHLRAAAG

SEQ ID NO: 154947 - protein, 347 aa, unidentified
MGYFAGLDVSLEETTICIVDDAGMIVREARAASEPEVLVAFFEACGMKMERVGLEACSLTAWLHGGLTEVGIPAICIEARQAKAAMGAMPNKTDRNDARGIAQIMRTGWYRAVHVKSPSCRAWRALLTARRMILNKRRDVENGIRALLREVGLKVGTPSRRDFPARVRELAADDPVLMSLAESLLSVIEVMTREVERLTKRAIDEVRVEPTCRQLMTVPGIGPLTALAFRATIDQPSRFRKSRDVGAHLGLTPRRYQSGETDVQGRISRCGDELARTALYEAAHSLLIRSTRWSALRAWGMNIAKRRGMARARVAVARKLAVILHRMWVDGSEFRWGKQAAASAVAA

SEQ ID NO: 154948 - protein, 338 aa, unidentified
MRKFIGIDLHSNNSVVVVTDDDDRVVYEKRLPNDLAAIAAALAAHRDETVGVVIESTYNWYWLVDGLMDAGYRVHLAHPAAIKKYEGLKHSGDFADAAYLAQLLRLGLLAEGYVYPREQRGARDLARKRMQLVRYRTAQVLSIEGILMRQTGSRMKGEAVKRLTAEQVDGFGFARDVALALEANRAVSQALGQQIEVLEKRLKDRVSLRPEYRLLKTVPGIGDTLATTIMLETGSISRFAQVGNFSSYCRCVDSVRESNGKKKGEGNTRNGNKYLSWAFVEAANFALRYCPQARNFYDRKKSRTNRIVALKALAHKLARACYYMLRDQQPFDVNRCFA

SEQ ID NO: 154949 - protein, 385 aa, unidentified
MLLDHLSDGPTAIRTQFGAIFVSLELSRSTWLVTSLSPGQGEKMSRHSVEADDVAELMKLFADLRRKAEVRTGLSYPIITIQEAGLDGFWLHRVLQREGIESHVVDPASIATPRRRRRAKTDRLDGETLLRTLLAYKRGEPRVCAMVVAPSVEEEDRRRPCRERRTLIAERIAHVNRIKGLLFAQGISDYAPLRRDRRARLKALRTGDGRELPSHLKAQISRELDRLELLLTQIEAVEAEQDALLAEGKQPATPDPASMLLALKGMGANFAAVLWSEAFYRQFANRRQVAAYAGLAATPWRSGRIEREQGVSKAGNPRLRTTMIQLAWLWVRHQPQSALAIWFKAHSQRGRKRTIVALARKLLVALWKHVTQGVVIEGAVMKSAA

SEQ ID NO: 154950 - protein, 413 aa, unidentified
MGYIVAGIDIHKKVVMVVVTDASTEELRFRRFRCGTTAGEREILLAWLQKHEVQELVMESTAQYWKPVWMDLEPHFGKGKLHLAQAGSNRAPKGRKHDFADAERLARRLLAGELILSFVPDAEQRAWRTMTRARVQLVSDRVRLQNQLEAVLEEMRIKLTSVVSELLGLSARRILRAMANGETDGVKLAALGDFRLKCSPEELADALRGHVSPMHRQLLVLFLERLEMLDRQIHGLETMAAAAMKSHQDAVIRLAGVAGFGAESAQQILAEVGPEARSFDSPDQFASWVGCCPGRSESAEKNRSSRCPKGNRFVRRIVTQAAQAAVKKKGSFWHRTFRRWLPKLGYPRAIWAIAHKLCRLVWKVLHEGVHYVEQGDESSPKAKQQKAQKMIRALRRMGFAVQLSPLTTLPASG

SEQ ID NO: 154951 - protein, 371 aa, unidentified
MTDDIIFVGLDVSKATISVGIALGGSREAAHYYGTIEYRPAALRSLCRKLSRDGAQLHFCYEAGPFGYSLYRRLREWGHSCDVIAPSLIPKRPGERVKTDRRDALMLATLLRAGQLTPIWVPDATHEAVRTLVRLRALAARDVARSKQQILSFCLIHDRVYRLGRSRWTKTHRNWLADQKFEHGALAFAYAELLGRLERAEETLARTRIELKERLADWALYPLVDALQALRGFDWENATMIVAEIGDFRRFPTPGHLMSYVGLVPSEHSSGDRRRQGEITKAGNGLVRRVLIEAAWTHRYPARQSYRIRNRAHHLPEPIRDKAWKAQVRLCRRMRDLRRSGKHRNTVLAAVARELTGHVWAVARMVEPGPA

SEQ ID NO: 154952 - protein, 339 aa, unidentified
MKKRYLGVDLHRNCFTVYTRQEDGSGESREWSIRSLEAFAKTVKANDEVAVEATGNVRLFCEALKGRCCRVVVVNPHQFQVISRSVKKTDEHDAKVLAEFLSKGLLPEVRMKEEVHARVASLAQTRDKLVKLRTTLKNKVNNLLASRGILIRKERLSSEKGLAEVLSSPVSELERMELEILVGEIRHLNSSIKKLEELLRDQGPKLSGWKNVTSIKGIGGTGASILLSTVGNIEDFADEGKLAAYFGIVPRVSNSNETERSGRITKRGCKLGRTTLVQCALIAARYSPYLQKYYRRIAAGRGTGKAIIALARKFLGIIYKTLKNNWIFEDFPQFVLANG

SEQ ID NO: 154953 - protein, 341 aa, unidentified
MTAIGIDTHKDSLAACAVDDLGGVLGEATFANDPAGHADLAAWAARVAPGARLGFEGSSTYGAAAARMIERLGYAVCEVPPQLSRRERGRTRRAGKSDPGDALAIARVTAREADLPPIRQADPTTELRLLLAARTDLVGEATRVRNRLHADLVVLVPGYGATAANLVWERHLVTIARALRRLSGIHPELARDRLVELRRLQGRSRALTGRIERLIAGHPLLELPGVGHLTAAALVAATGDPARFRSPDAFAMLAGVAPIPASSGQTQRMRLNRGGNRQLNRAMHVIAQVQARCHPPAKVYVARKIAEGKSWRDAIRCLKRQLIRTVFRLLVAGSQQAKAAA

SEQ ID NO: 154954 - protein, 373 aa, unidentified
MQADTTTYVGMDVHKRTISISMLLPDGSDPERWQEAHAATVARSLARKLLRKAPGKVICCYEAGPTGYVLQRRLRAEGVMCMVVAPSRIPTAPGPRIKTDRRDASKLALLLRAGLLTEVHPPTEEQESLRDLCRCRVDVVQDLLRARHRMSKFLLRRHQIYNQSGNHWGTRHMAWLRQLRFQDPASQATFDSYLLAIDQLGERLLQLELQLAEFGSQEPYRQPVAWLRCFRGIDTVTAVSLVAELHDFRRFRSARELMSYLGLVPSENSSGERERRGPITRAGNTHARRLLVEAAWHHRHRPALSLPLRKRRQGQPAWVLTIADRAQERLWRRWCRMTFRGKPTQKVVVAMARELVGYIWAVLQGPEILGEDA

SEQ ID NO: 154955 - protein, 372 aa, unidentified
MIQRFHGLDRHKKHSTISVLNREGQEVEFLSKYPGLRGYIEQLGPEDAVVMEAATGSFFWADLVESTGATCYVLHPYKFKIIRDSWNKTHKHDARNMAKALWVYLVTGEFGIPTVYKPSVAIRELRRLFSQYYLLNRQVTLLKNTIQAILADNGVNLIYSQKTMLSSDTDAIKMLNTYDLSPASLLSIQINLELLWKVEEQKNNLKKEILLAGEPFAVEVKLLITVRGITPLTALAFLADVADIRRFKTLRKMNAYLGLVPRVKESGGRSRTGHINRESRRLTRTLFTQSVMHFADASPYLRLYYSNLISKRGVGRARIAVIRKICGMMRRMLLEQEVFRWMQPINFERKLKRYECQLKKIKKIKEEERKSA

SEQ ID NO: 154956 - protein, 358 aa, unidentified
MQSNKISFKGQKIFIGIDVHAKSWKVAIAPEVGAVKGHSQKPSAKELFDFLKKNYPDGEYQAVYESGFSGFSTYYALKEVGIECMVIHAADVPTTQYEEVMKTDRIDAAKLARSLKAGQLKGNYVPEKQYIDDRSVVRIRRTIQKQLSGYTSRVKHLLHCHGVEMPERFSKIQTHWSRAFITWLMKDVKLMSDTRTSLDLLIRQVEVIRGTLLEATRQLRKMSQMERYKRRHDLLRTIPGIGPIVSMCILTEVCDVKRFHNENEFAAYLGLVPTSHSSGEKTVHGEKTFRGNKQLGPMVVEAAWVAISWDAGLGSQYFQYKKRMEPQEAIVRVARKLSNIIFSVLKNEKEYVPYQTGN

SEQ ID NO: 154957 - protein, 355 aa, unidentified
MTSTKYIGLDVHKESISIVVMNSVGKVVMECVIETKASTILQFIDGLRGDVRVTLEEGTWTAWLYDLLKPRVTEIVVCNPRKAALLKDGSKGDRIDAHKLAELLYMNKIKSVYHGEHGLRTMKELARSYLTINKDLTRVMNRLQALYRSWAIPCGSKEVYAQRYRAEWLGKISEVGVRRRAEHYYQQLDVMHLLRQKVRKDLLAESRKHKAWKLLRQIPGIGPIRAAVLIAVMQTPHRFRTKRQLWKYSGLGLETHDSAQYHAVEGELRRSKRPATVRGLNKDHNHDLKDIFKGAAMRASAAAGPLHDFYENLLAKGRKPTMARLTLARKIAAITLIVWKKEVRFDANYLKQQAA

SEQ ID NO: 154958 - protein, 367 aa, unidentified
MASQTKQGDLKMFTNKIVVKSKKNNSSLTSPESYDHYIALDWSERNMAVARMGKKDIEPKVIDVPSDLKELKLYLSNLHGKKILTIEETTTSQWLFVELYDYADKICICDPYRNRLLSDGPKTDRIDAGKLCKLLKNGMMKEVYHSTNELYELRKLVSYYDDEVRAGVRLLNQKSAFYRAENKSWKKKEEIEPSHVNKFIVSQLDEKIESYQEKHKRYEKEFEKIVKKNKVLRSLKSIPGLGPISSVTILSIVIDGKRFKSSNHYLSYCGLVKHEKLSGGRSYGRRLPRYSRRLKGVYVSAAVRVASTENPLREYYEYLLNEKKLPVYNAKNALARYIAKISLGIIKSGEKYKPYRWRDNKKEKEAA

SEQ ID NO: 154959 - protein, 718 aa, unidentified
MKNFRSALLAAALSLVVAAGSATAAQATTKIRVGASPTPHAEILKVANDVLKPQGYELQIIEYSDYVQPNMALEGKELDANFFQHKPYLDDFNKEKGTKLVSIGTVHYEPFGIYAGKTKSLDALKDGAMVAVPNDTTNEARALLLLQSNGLIKLKDGAGLTATRRDIAENPKKLKIEEIEAAQLVRALPDVDLAIINGNYAILGGLKVADALSAEKADSIAATTYANILAVRAGDENRPELKALINALKSDDIISSCGQRISCFYLCSQVYCAQTGTSALWDVTYEPDVGAMNRFLLISQQVVTFSSTRNVRNLNMRGACTMYIVGIDIAKRKHEAAVIDGEGAVVIKPFSFTNNCSGYNRLLAMLAKAKLPLDEVSFAMEATGHYWLALFTRLQKEGFRVQVINPVQTNSIRSFYIRQAKTDPRDALLIAEVIRFGHFSESTLHPENIYELRELCRGRHAIVSMQADVKRKVVALLDQVFPEYETAFTNMFSDTSMAILQTCPTPKELSEMPLEEFCHLIEVSSHKRFRMAKAQELQALARNSFGFAMAGDVFSTMIRLYAKHLDFLKQQVREMDRKIAEIMDTLDTPITTITGIGPTLGAYILSEIEDINRFSSAARLAAYAGIDPTMRQSGEYNGVRNRMSKRGSPYLRHAIWLAASSAVLHDPALKLYFQKKRDEGKPYMASVGHACRKMVSIIYAVMRDNKAYTPCIPNEISA

SEQ ID NO: 154960 - protein, 352 aa, unidentified
MKRQGKGLDPGEVLFVGVDLHKMRWHVTIRTADLELWSGSIPGKWESLRLQLDHYRGCAIQLVYEAGCFGFWLHDRLMEYGVECMVTPPSLVPQEYGNRVKTDRRDSRKLAHLLAKGLLKRIFVPGKKECYHRQVVRRRRQLIGDRTRVQNRIKAELRFYGINLSEPVGKWTKGYVENLNRLSFEDRFMQESFNRLLEQYTFLTGQIEKQNALVRELSEMEMYRERVGILKSVPGIGTLAAMELLLELQDVSRFRQADQLAAYVGLTPSQYSSAEKVRMGRITKVGKHSVRALLVQAAWQLIRKDQAMREKYERIKIRSGAKRSIVAIARTLLLRLRRIWLDATPYRLALNA

SEQ ID NO: 154961 - protein, 340 aa, unidentified
MNTFYIGLDLGSTFCYQCVMKPDGAIVRSRPVTTSEKHLRSAFADLDGELLVHTEAGELANWVVDIISPLVKRVVVSHPRTLAWIAKDSLKNDKLDARKLADLMRSNLVHEVYQPKHNRRTFKQIVRHYDEATRAQAKCKAKLKARLRCQGIIRRDAKVFVKDERKIVLENISDKYLREMFGQFYATLDRLIEDRVTAKRLMIETSKQFPEVELLRTAPGVGIIGACRFVAYIQTPARFSNKRKLWRYCRLGITRRSSDGKLLAHPRLDINGCGALKDVSRKAFDAAMRCKEDNSFKRAFEQTLANTNDKVHARLTVQRKIVACLRAMWLNKQPYREDLP

SEQ ID NO: 154962 - protein, 347 aa, unidentified
MLIIGCDFHPGFQPVAIFDNRTGEVEEKRLQHREEAEQFYRSLADQPVRVGMEACGHYPWFERLLQERGIELWFGDAARVRASVVRKQKTDRRDAEHLLHLLLENRFPQIWVPSLEVRDARQLLVHRHKQVQARTRTKNQLQAMALSYGMQKKRKLWTQAGREQLEQLPLLPYAAERRKRLLEALDGLEAEIGELDRRVAEEARQRPEAVRLMTHPGVGPVTGLAMVLTLGPAERFGSGKQVGSYLGLIPSEDSSGGKQRLGKISKQGSSFLRFLLVEAGQTAARTDPQLKRFYRRLAGRKNRSLAKVAVARKLATRLYLMLREEWTYAQLCQAVMQVSPSHSVAGA

SEQ ID NO: 154963 - protein, 336 aa, unidentified
MIQTPPLAKQRWLGADTHADFHVLAVIDGDGRQIDSHQFDTTATGITAATDWAFAFDLSGAGVEGSSSYGATLTAALLAAGIPVVEVTRPNRQDRRNHGKSDQIDAIQAAQAVRTGQRIAPVKSHPLLHELRAHYVLRDSALKQRTEVGNQLQALAKIMGIPHGPQSKTLMHHLAQYPELTAAANRWLALDTEAKEGEKALARWLRRYAPEILQPLGAGPISASQLVLASGLNPQRTISEAGFARLCGLSPIPASSGRNQRHRLDRGGDRTANQAFWRIAFIRSSTDQRTKDYITKRLDDHRDTHAGALRNLKRHIAREITPILHTISCRMALQTT

SEQ ID NO: 154964 - protein, 400 aa, unidentified
MLSIGIDVSKGKSTVCGMKPGGEIVYAPFEVQHTIEGMSELVSLLRSSGEEVRAVLESTGSYHCPVVAALLENGIFVSVVNSLRMKRFCSQSIRKVKTDRIDAMQIALYGLAYWQELQPARLPEDTYRELQLLARQYYQMTSLLIKAKVDFNAICDQVLPGMQELMSDHAGRHKLSDFVLRYHHTAHILEMGETRFRKDYCKWAEKKGYRNCERMAALIFATAQNGIPVLPNAPSTQIVITEAIRVLHTVEASRDAILTQMQALAKTLPEYSLVREMPCIGDTLAPRLIAEIGDVRRFHSKRALIAYAGIDAPPYQSGKFCANNRHISKRGNRYLRKTGYEVMQSYVMHKPANDPIFTFIEKKRGEGKSGKLAMVAGLNKFLRVYYGKVTELYRSLPTIE

SEQ ID NO: 154965 - protein, 367 aa, unidentified
MMGWMAPLRHLSAKLLSDLNSSEWEPSMGEVTTIGLDLAKHVFQVHGVDAEGATVLRKQLRRAQVLAFFSRLPLCLVGLEACATAHYWARELRALGHEVRLMPAQYVKAYVKRNKHDAADAEAICEAVQRPTMRFVPVKTADQQAAVLLHRGRERLVRQRTGLVNALRGHLAEFGVIAPQGLRNVGKLIAIVRDEGDARLPELARQVLQVLAAQIEQLEAAVAAIEKQLMAWHKSNPVSQRLASVPGIGPIIATAIAATVVEPSGFRSGREFAAWLGLVPRQNSTGGKHRLGGISKRGNQYLRRLLINGASANLLRSKATNADPWVIGLRQRRPSLVVAVALANKTARIAWAVMHRHENYQRVAAAA

SEQ ID NO: 154966 - protein, 354 aa, unidentified
MKYFVGMDVSLEETAICVVDETGQMIKEARATSEPDALHALLASFNLPFERVGLEACSLTAWLHGELTSAGWPAICIESRHAKAAMGAMPNKTDRNDARAIAQIMRTGWFKAVHVKTPTCRSWRSLLVARRAVLNQMRTIENVVRAILRETGLKLGTPARKDFIVRAREFVAGEKGLAMMIDPLLEILATMLREFTRLTKQVLVIVRDEPVCRRLMSTPGVGPMTALAFRATIDQPERFKKSRDVGAHLGLTPRRYQSGETDIQGRISRCGDELARTALYEAAHSLLIRSKKWSALRAWGMKIAKRRGMARARVAVARKLATILHRMWVDNTEFRFGREQAANPTIKAITVVAA

SEQ ID NO: 154967 - protein, 347 aa, unidentified
MRFYTQQHPHYCGIDLHARTMYLCILNQAGAIVLHRNMKADPDSFLSAIAPFRDQIVVTVECIFTWYWLADLCAREGITFVLGHALYMKAIHGGKAKNDKIDAHKIAVLLRGGMIPQAYVFPADMRSTRDLLRRRMHLMHQRSQLLAHIQNTNSQYNLPEIGKKIAYKSNREGVAERFADVSVRSSITFDLRRIDFYDGLLNEVELEILRHAKLHNPNTLHLLDSVPGVGKILSLVLLYEIHDICRFPRVQDFVSYCRLVKPKKESAGKTYGFIGAKIGNAHLKWAFSEAAVLFLRNNPQGQAYVARLEKTHSKGKALTILAHKLARAVYYMLRRNEAFEMKRFLNH

SEQ ID NO: 154968 - protein, 386 aa, unidentified
MKRDDLSRSLVAFDQANTLVAVLELGFAGWLVAGLVPHLTRQPLKKLKPDPEALLALLGRWRDQATKAGGQIRRMVLAFEAGRDGFWLARWLRARGIEAYVIHPTSIPVSREHRRAKTDRLDTSLMMRALLGWLRGEPKHCSMAAIPTADDEDARRPNRERETLVREQTRIVNRVKSTLIRLGIRSFKVKLRRARQALGALRTPEGEPLPPNTLAELRRDVARLELIREQIAEIERSRLERLKQAPRNGAHPMIRLLARVMGIGIETADMLVHEVLRRNLRDQRALARYAGLTGSPDESGSKRREKGLARAGNARVRRGMIQLAWRWLMFQKNSALSQWYRARTADGRPGLRKAMIVALARKLLIALWRYVTSGEAPAGALLRPAT

SEQ ID NO: 154969 - protein, 383 aa, unidentified
MNDHSEAFVAFDTAKLRNAVAIADGGRGDEVRFLGEFDNTPAATAKLVRKLAAKYERLTFCYEAGPTGYGLYRQIKSLGHECIVGAPSLIPKKAGDRVKTNRRDAISLAKLLRSGDLSAVWVPDRQHEAMRELTRARETAMNDLRAKRQQISAFLLRRGVHYPPDKKTWGKMHINWLMSQKLEFTEERIVFEELMEAMRQAQGRLDRLEAAIRAAVPNWSLCKLVIALMAMRGLDIVSAATIVAEVGDLSRFRTPRELMAYVGIVPSEDSTGDKVKRGPITKTGNRRVRRMLVECAWSYQFPPRLSKDKQVKVEAVPQAVREIAWKAQSRLNQRYRALLRRGKLKNIAITAVAREFVGFIWAVAQAVGAAPAAANTKAPAVAS

SEQ ID NO: 154970 - protein, 371 aa, unidentified
MLLPRQRLKLARGAKDEEHVMSQQINARVAVVGIDIGKNSFHVVGQDTRGEIVLRQKWSRSQVEARFANMSPCLIGMEACVGAHHLSRRLKALGHNARLMPAKYVRPYSKGQKNDFRDAEAIAEAVQRPTMKFVAMKTADQLDLQALHRVRERLVSQRTGTIDQIRAFLLERGIAVRQGQHCLRAELPRILATPSDTLSPRIVRVIEALALDLRLFDQRIEGLSSEIGELAKQDVGCQRLISVPGTGPIISSAMVAAIGTGDAFAKGRDFAAWLGLVPKQISTGDRTILGKISKRGNRYLRVLFVQAAWVVLVKVKPARWESHGLKSWIEAAKKRLQRNVLAIALANKLARIAWSVLARGRAFEASKLQAA

SEQ ID NO: 154971 - protein, 408 aa, unidentified
MERYYLGVDWADEFHQVWVSDPEGNKVIEKKVVENVEGLTEFGRWLDENRAKGIELWAAIEKPHGRIVDFLLDHGVVVYPVNPKALDRARDRFRMSQSKSDSFDAYVLAEFVRTDHGHLRALEPNSDPAQELKLLTRDQYRLVRQKTRLLNQLSRTLKEYYVRPLEVFSDLETNIALDFLQEYPTPQALAKLTRRQWNRFSKREHHLGEDHCKELWEKLNQPQLEVPEHVVRAKARLLAVLVVQLKTLRDAVESYNKRVKSFFACMPAAELVRMLPGAKTGTIVATLWAELGDAKSRWESFRHLQAEAGVVPVTKASGKSRVVQFRFSCNKIMRHAAYWLAFVSLNRSEWANQYYRDQRAKGHSHHQALRALGAKWLKIIFVMWRDHKPYDENIHLANITRQKMRQAA

SEQ ID NO: 154972 - protein, 376 aa, unidentified
MEHNSEAFIGIDTSKLKNAIAIAESGRDGEVRYLGEIETTDAATRKLVKKLATKYRKVTFCYEAGPTGYGLYRLITSLGHECSVVAPSLVPKKPGDHVKTNRRDAVGLAKNLRAGELTAVWVPDTRHEAMRDLSRAREAAVDDLKSKRQQISSLLLRLGLHYPGKKTWGKSHRRWLASLKLDQREQRIVIEELFGAERQAQERVDRLVSAIIDAVPEWSLAKIVTALMAVRGIDLVAAVTIMAELGDLSRFASPRELMAFLGLVPSESSTGDSVKRGGITKAGNRRARRILVESAWSYRYPPRISRDKLAKVAAAPEPVRAIAWKAQTRLSSRYRALIKRGKRPTIVATAIARELCGFIWAIHRAVTAPGGRQLVS

SEQ ID NO: 154973 - protein, 321 aa, unidentified
MMAQNDLVVVGIDVAKDKVDACIRRFTLRQTFPNTAQGHRKLVAWLRKYQVGKAVMEASGGYEREWRNMLHNAGIEVRIVDPKRVRSFALSAGRLAKNDPIDAEMIAWFAETFSQTPGQIPDAAREELAALAKARKALVDVKIRLQAQDEHAAPEPARKAYARALKSLATEIDKLEAVISAKIKATPEFAERAEIIESVPGLAQATSAILIAGMPELGQVSDEVAAALIGLAPYDDDSGKRRGERHIKGGRRWVRNAIYMPCLGAATQYNPVFKAFYLRLLARGKEPKVALVACMRKLIIILNTMLARRQKWNPGRHAVVA

SEQ ID NO: 154974 - protein, 445 aa, unidentified
MDEPREELPDETVARVAAIDIAKNSGVVCLRLPHETREGARTQKVWTVAATTNAILELGDHLICQGVDLVVMEATGVFWQPFYYLLESRGLRCWLVNARQVKNVPGRPKTDKLDAIWLAKLLERGMVRPSFVPPRPVRHLRDFTRTRTVFVRERSRHKLRADKVLQDAQIKLSSVATDPFGLSGRAMMEALIAGERNPRTLANLAQGRLTTKHDALVEALTGQFDDHHARLLRLLLTTVDHLTAQITALDQDIATTLASLPDPRSDAPDHAPSPAAVPFGDELLARLDDIPGVGPTSARIILAEIGPDMSVFPTPAHLASWAKLCPCTIQSGAKSTTGPAGKGNPWLKGALGEAASAAARTDTFLGARYRRLVKRRGHAKALVAVARSILVIVWHLIDDPHARYQELGPDWHQRHLHPQRKPRDLVRQLEHLGHQVTLAPSADTA

SEQ ID NO: 154975 - protein, 418 aa, unidentified
MTKIYQLGTSSKQALGVETYLAPPPPFQGKIIGLDCHPDTFTAAVFVGQTPHDARKVGSRENLGLQALLQWAAKEFAAQDLFVLEAGSNSFEVCTRLHALGLRAVVLESCHVGKHAKSYADNDKMAAARIALVYLAGNAPCVWVPDEQSRQRRELLHAYGKAVSDHTAASNSLRAYLNGNAIRLAKGNLELESTRQWILKQRDWSAMQSEILGEHFADLDVCKERRKRLYQLIAAEMCAEPMMLRSMKVLGVGVVNAFALLAVIGDVRRFERPEKLVAYIGLNPGQRKSGTGKNVKLGVGNRGRADIRHLLIQGAQAVLRMGRATALGQWGWKLFARKGNRNVAVAALARKLLVQVWHMLSGNPPTALETDKSFTLKLHKLAVTLGTSLRSKLQLGDSLLQCVQELRRRALQPALIAP

SEQ ID NO: 154976 - protein, 410 aa, unidentified
MIYVGIDWADDHHDVAITDDSAKTLSQFQISHDSSGFATLHGQLAKFKQSPDQILIALETSRGLLIHELLRSDYSVYAVNPRAVNRYKDRYVLSKAKSDSLDALALAHLLRTDRQRFKALRPFPEDYRLLDRLCQDLRKLVEEKSRISNQMTSVLKEFYPKALELFSLDSRIGIAFLKTFPDPQALRSCKKKTFMAFFRKHHYTRPNKIEELWTLIQTPALEPDLVICKAGRFRLLALLDQLIPLREHLSLYEKEVKTILDKLPEAKSINSLPGVGDRLAPELTAALGPKGSGSQSRFQSAEEIMNLSGCVPVTRQSGKWKTVSFRYACVKGLRSTFRDWAFASLEQSVWARAYYDFYKAMNMPHSTILRNLGKKWARILFVLWSQGTVYNEPLYIQSLKNHNVRWAMAL

SEQ ID NO: 154977 - protein, 609 aa, unidentified
MRQAVAHVKATFGVSERRACSIIKADRKSVRYRSCRPPDTALRERLRALAVERRRFGYRRLFVLLRREGEPSGKNRIYRLYREEGLTVRKRRSRRRAIGTRAPILIEARPNARWSLDFVHDQFATGRRFRIFNVVDDVTRECLAAIPDTSISGRRVARELTALIARRGRPAMIVSDNGTEFTSTAILAWAQDHGVDWHYIAPGKPTQNGFVESFNGRMRDELLNESLFFSLDHARQKVAAWALDYNTRRPHSSIGYLTPEAFAASLTATGRAAQRSPLDENSEARHHGVSSEGQVTVRRKLRRAELMRFFRDLPPCLIGMEACATAHYWARELSALGHEVRLMPPSYVKAYLRRQKNDAADAEAICEAVTRPTMRFVPVKSAERQAILTLHRTRELLVRQKTTLIRAIRSHCAEFGLVVPQGARRITDLLQLVRETHPSTLPQAAVLTMQMLGAQLDALAVQIRTLERRLLAWHRENETSQRLATIPGVGIITSTALAASISDPKLFKSGREFAAFLGLVPRQNSSGGKERLGQISKKGDGYLRKLLVVGATSVIRRARTGVTPSAGWVQALLERRPSRVVTVAMANKTARIAWAVMARGETYRPIAKV

SEQ ID NO: 154978 - protein, 402 aa, unidentified
MCVTTRTTAWAGIDIGKTHHWICAVDADGRALVSVKVANVEAAIVAALATVTDLADQVVWAVDIVGAPSALILALLARAESPVFYASGRVVNTMSAAYTGEGKTDAKDAYVIAETLRLRRDLPMVDTVTDLTRELALLTAHRSDLIADRVRMINRLRDVMTSVFPTLEQQFDYSSHKGALILLTEYASPKRLRRLGETRLIQWLRRRQVRDAARVAARALAAARGQDIELPGQHVAEMIIAELAASLLQLDQRVHGLDQQIAATFRRHHQAMTIESMPGFGPILGAQLLVAAGDLRAYPSAGHLAAAAGLVPVPNDSGRRSGNLHKPRRYSRPLRHVFYLSAQTSMMRAGPNRAYYLKKRAGGHTHAQAVITLARRRIDVLWALLRDDRTFSIDPPSHAAAA

SEQ ID NO: 154979 - protein, 312 aa, unidentified
MEATVVGIDVAKDRLDVCVRPSGERLIIVRTGAGIEDLAERLKKLAPRVVAIEATGGFETVVAAGLAAAALPIVVVNPAQVRAFAHALGKRAKTDPIDAAVIAHFVEATKAEPRPLPDEMTRLLADMVARRRQIIEMMAAEGQRERRLTDKRLKKSIARLRKAMEKELAELDGEIDDHVRGSPVWAEKENLLASVPGVGPVIARTLIAELPELGALDRRKIAALVGLAPWTRQSGQWRGKSFIGGGRKAVRGALFMAAMVAARHNPLLKNFRDKLIAAGKPKLVALIAVARKLLTILNAILRDKRPWQLETA

SEQ ID NO: 154980 - protein, 366 aa, unidentified
MKVSTAVRKQSRNISRQTLTIGRDLGDRNSWYCVLDESGQIQLEQRVRTNAKALQEVFGAMPRSRIGLEIGTHSPWISRLLSGLGHEVIVANARKVRLIGESRKKDDRLDAQTLARLARIDPQLLYPVKHRSAQAQADLTVIRARAALVRARTGLANTARSLAKSYGERLRGCNVRNMNPEKAESLSPELQAALEPLLVCIESVSANIAEYNQRIEGLAKNSYPQVELLKQIKGVGTLIALTFLLTLEDPHRFGKSRDVGGYLGLQPGRRKSGESEPQLHISKEGDPYLRTLLVQGAQHILGPFGIDCDLRRWGLKLAERGGRNGKKRAIVATARKLAVLLHHLWVSGEVYEPLHNSSRITVAAAA

SEQ ID NO: 154981 - protein, 418 aa, unidentified
MQYALTTVLPAIPPGGVSAGLDWATDDHAVAIVDSAGQVVARFTVAHTAAGLAELVRRLATAGVTEVAIERGDGPVIDALLEAGVTIVVISPNQLKNLRSRYGSAGNKDDRFDAYVLADTLRTDRARLRPLQPDSPATLALRATVRARRDLVAHRVAVANQLRAHLQRAFPGAVGLFAKLDSPISLTFLTRFDCQDRADWLSAKRLTAWLSSVGYSGHTDPTVLFGHLTGAPRGATGEQGAALAHTTRAHLAVLRSLVDQIKALAAHIGDQLARHADAHIFTSLPRSGTVRAARLLAEIGDCRTRFPDPDSLICLAGVAPSTRQSGKHKTVHFRWAVDKQLRDAVCDFAADSRRAHPWAAQLYNQAIARGKDHPHATRILARAWLYIIWHCWHDNVPYNPDKHRALQRLLNQDQQAAA

SEQ ID NO: 154982 - protein, 329 aa, unidentified
MFYLGIDVAKAKIDCCLILENSESKKKTKTFSNMPKGFEQLQTWLNHHAANSTQTIILMEATSIYHERLAKYLFDAGYQVCVTNPARARYFAQSMSKLNKTDKADSEVLARFAMTADLHFWQPLPEHIQLLNALLDRRAVLCEDLQREKNRLEKAESTFTIEPVLQSIHKSIKQLNKHIQDIDQQIDDHIDQNPDLKNDKELLSSIPAIADRTSLLMLSFLRSHNFERASQAAAFVGLVPIQRQSGSSIHGRSRLSKAGSSKIRAGLYMAAIVATRHNPHIKAMNERLLANGKTKMMAIGAAMRKLVHLCYGVLKHQQPYQENYCINSQ

SEQ ID NO: 154983 - protein, 356 aa, unidentified
MGNSNKLDFTGQPIFIGLDVHKKSWSVSIHSAVCEHKTFSQPPEVDILVNYLRRNFPGASYRSVYEAGYSGFWVHDQLIEKGVACTVANPADVPTKDKERRTKRDRIDCRKLARSLRAGEIEGIYVPCRPKLEDRSLLRTRQGMVRKQTRCKNQIKGILFFYGIPLPEDWAERHWSGPFVRWLEKLPMERASGEVALRMHLDELKHLRQIIARLDREIRVLAQTGEYGVQVRLLKTIPGISTLTAMILLTELQEITRFRSLDELASYVGLIPDTRSSGETEHTGELTKRRHAQLRASLVEAAWTAVRKDSALLMAFQESCQRMRKTRAIVKIARKLLNRVRYVLKNQTPYRMGVVQ

SEQ ID NO: 154984 - protein, 366 aa, unidentified
MSTTSTTPERMVIAIDPHKASWTAAVVDASLQPVATIRVSVSRDGYRALRRFARRWPDPTWAIEGASGLGAPLTARLRTDGIDVVDVPAKLAARVRMLSTGHGRKNDDADAVSVAIAARSAPRLNSAAVDGAVTALRAIVDHRDDLVKTRTQTVNRLHVVLTNLTPAGANRELTAERAAELLRGIRPRDAAGKTLRSLAADLVAEIRQLDRRIAKAAADIQTAVTASGTTLTELCGVGALTAGKILGRVGTIDRFRSAAAFATYTGAAPIDVSSGDVVRHRLSRAGDRQLNLCLHVMALTQIRQDTPGRAYYLRKRTDGKSHKEAMRCLKRRLSDVVYRQLRRDANRLEAGPGGHSGAALSSSAAS

SEQ ID NO: 154985 - protein, 439 aa, unidentified
MRARDEEIVFPNAAGIDVGASSHWVAVPRHATDDAVREFGAMTGELNAMADWLIACGVDVVALESTGVYWIPVYEVLEQRGLKVWLVDARQMKYVPGRKSDVQDCQWLQKLMSLGFLRAAWRPDSEVCVVRAIARQREVLLTEQASWVQRMQKALVQMNIQLTEVLTDVMGVSGQAIIRAIVAGERDPKALARHRNGRVKASAEQITQALTGNWRDEHLFVLRQSLAMYDDIARHLGECDAKQQTLLTDLGQRKVDLGKVPRAGSKLRQEFDARQILANWAGVDLTRIDGLGLSAVMKILCEIGIDLSRFKTVKHFCSWLGLCPGTKISGGKVLSARTKRSANRVRQALKMAAMSLSHSASALGAFYRRLCSRMDKPRANTAVAHKLARMVYFMLTRGEAFVDKGQQHYEEQQRQRSVAALKRRAAALGFEINASSAPA

SEQ ID NO: 154986 - protein, 337 aa, unidentified
MSFGTVAFVTHDRTVARWAVARTRQVTVTDIICGVDVSSTHLDARIGRAGAFQRFANTADGVAALAAFCQSQGVGLVAMEATGGYEKRPFALLWAQDLPCAILNPRDVRRFAEAMGVLEKTDRIDAAMIAWCAEVKKVKPSRPADETQERLKALVLRLSQLTNLKTAQTNQRRLVSDPTALASFEEILALLARQMRALETEIAALINADPLWRALDKAFRSIKGVADRTVARLMAETPEIGRISNKAIAKLVGLAPLANDSGGRRGRRAVRGGRASVRENLFVVAEVVRRHNPDFADFHRRLQGKPKKAIRVALAHKLLVRLNAKARDVRLARQPKA

SEQ ID NO: 154987 - protein, 338 aa, unidentified
MNPSQTVETYELFVGVDIAAKTAMASTLRPGGKTSRSFTIDQTPEGYSSLLHTLQATGHAPSEVLVVMEATGSYWISLATRLVHKGFAVSVINPAQAHHFAKALLKRAKTDAIDAQTLAQLAMVLRPEPWALPPPIYYALQQRLAQRDDLLNLRQQVRNQLHALVQHPEVIAEVRARMESLLATFEAQLAEVESEITAALSQDSAWAAAAERLQSIKGVGWVTAAWTLVATLNFSSCDTIDALTAYAGLAPMPRQSGSSVWHRPSIGHTGNGRLRTALYMATLSSAQHNPVIKAFYTRLREVGKPEKVARCAAARKLLHIAWAVVKKDQQFDPYYARG

SEQ ID NO: 154988 - protein, 368 aa, unidentified
MNSVKFIGMDVHKKTITIAIAEEGSRESARVYGTINNDFDALDKFCRKMLSTSNQLNFVYEAGPCGYSIYRHLTQKGFDCIVAAPSMIPRKNGDRIKNDHRDAKSLARLHRSAELTAVYVPDAQDEAMRDLCRAREDAVIAVRKAKQRLNAFLLRHAIIYSGKTNWSKAHFNWLADIAMPHCAQQIALQEYIDAVHENLNRVQRLTEQIQQMVPDWRLAPIVNALQSARGVSLIVATTMLSEIGDLGRFQNPRQLMAYLGLVPSERSSGCTIKRGAITKTGNKHARKALIEAAWAYRMQPRVSRALKKRQETLTDPVRQIAWKAQLRLCARYRKLMAAGKSNKLAVTAIARELSAFLWAIAKQQQPIT

SEQ ID NO: 154989 - protein, 344 aa, unidentified
MGEVITIGLDIAKSIFQVHGVDEAGAILIRKRISRAKMLEFFANLKPCLVGIEACPAAHHWGRELQALGHTVKLMPPSYVKAYLKRSKNDANDAAAICEAVTRPTMRFVPIKTKEQQAALLLHRARQLLVRQRTMLSNAIRGHLAELGIVSAKGRSGTGALLEIIADAEDSRVPPVARGVLDVLARQYSALGAEIGSIDRTILAWHRSSEASRRLEEIPGIGPIVATALVAEIGDWKAFGSGRSLAAWIGLVPKQQSTGGKDKLGSITKQGNRYLRWLLVVGAMAVIRYAQKHGTLKRPWLGRLMARRPTKVVAVALANKIARMAWAIIVHGDRYKEPRASLAA

SEQ ID NO: 154990 - protein, 411 aa, unidentified
MRLFVGDDWAEDHHDVELMDAAGRVLAKKRLPEGVVGMARLHELVGQQLGEDTDDAEVLVGIETDRGPWVLALVAAGYVVYAVNPLQASRYRERHGVSGAKSDSGDAHMLTDMVRTDSHQLRAVAGDSAEAEGVKVLARTHKTLIWERTRQVQRLRHQLREYFPAALEAFDDLDAPDTLELLGKAPDPARAARLTRAQISAALKRAHRRNITDKATAILAALRGEQLGQPPAVTAAYAVTARSLIAVIAVLNEQVKTLQGQVQADFGRHPDAEIYRSQPGMGAILGARVLGEFGDDPGRYADGKCRRNYAGTSPLTRASGKKKVVAARFIHNHRLVDALNAQAFASLSASPGARALYDELRARGIEHNDALRRLANRLVGILHGCLKTRTLYDEATAWSHRQNLPQSSVAA

SEQ ID NO: 154991 - protein, 347 aa, unidentified
MLHVGLDLSRTRLDVHAMDQTGTSVAVTTAAPDTGGLASLAYRLGEFGQPVTAVIESMNGARFIHDQLELRGWTVEIADAVKVKGFAPLACKTDKIDAWVLAELSRRDLVPAIWLPSPDVRANRERARWRLHLVRHRTALKNRIHATLLAFGDPCPVSDLFGAAGRRLLDGLGLPEPWAGDVVAALRLIDVLDGEIDDCEAALRREGADHRYVPTLMTAPGIGWVLGYTIAAEIGDISRFPTAKKLVGYTGLCPSVDQSGGHDWRGSLAKNGPKYLRWALIEAATHAARHPVYRNRYQRTKTRLGRQRGPSVARVDIARKLTEAIWHMLTTNKPFAPAGATTTALAA

SEQ ID NO: 154992 - protein, 353 aa, unidentified
MNLGSIAHDHGAEVTSLGTIGTRQADLDPIVHTLPSTATHLIVVSAAGPCGSWLYRHLSQQGDHCWVVAPAFIPKQVGDRVNTARRDAVPWARLMRSGDLTPVYVPQVDDEAIRDLTRAREDTIGDIKAATSRLNAFFLRHDSRSTGRATWGAAHLRWLSEVVGPTPAQPIVCQEYGRAVNAHTERLERLDQALTEPVQSWRLNPVVEALQALRGVQCTVAVTLVAELGDLTRFDHPTELMKYLGLTPSEYTSGERRRQGSITKAGNTHARRVLVEGAWAYRYPAKVSRHLQLRLENQSNVIQAISWKAQVRLCKRYRRLLARGKHANQVVVAIARELVGFMWAIAKQVPVKP

SEQ ID NO: 154993 - protein, 349 aa, unidentified
MRFYNQQHRFYCGVDLHARTLSLCVLDATGAIVLHQTLAAGPDAFLEAIAPFRDGLAVACECMFAWYWLADLCQEQQIPFVLGHALYMKAIHGGKAKTDKIDAHKIAVLLRGGMLPQAYVYPKGMRETRDLLRRRTFLVRRRAEALVHLVNTNSQYNLPPFPKKLAYAQNREELDIPQRFADLSVRKNVEVDLALINTYDAQVGDLELYLARTAKVDDPQAFHRLRSVPGIGKVLALILLYEIHDIGRFPEVGQFLSYARLMRCAHESAGKKQGTGGNKIGNAHLKWAFSEAACLFVRESEQAKKWLARREKKHGKARALGALAARLGRAVYHLLRKREVFDRKRFFAS

SEQ ID NO: 154994 - protein, 349 aa, unidentified
MNTGEVLDERELPHDLPKVIKHLLKIEDRHGKIHTCYEASSCGFGLQRALEAHGISCEVVAPSSIPRRPGERVKTDRRDARKLATLYAAGLLTTINIPDEDQEAIRSFLRCRSDLTDTIVRTKQRILAFLLTRGFRYPDKSHWTKMFHTWVRALPMAEMDRTTLHTYLYQLEQLEHEVCSLEADLAEVANEDRYEAPVKVLMAFRGIGLVNALTLIFELGDIRRFAHPRQLMAYLGLVPSEHSSGDRTKRGGITKTGNVHVRKVVITAAWKYTSPPRCSRVLKERQRAVSAEVVGVTWKAQRRLYKRFHKLCQTKPRCVANTALARELVGFLWAALHLENPLITPNVRD

SEQ ID NO: 154995 - protein, 358 aa, unidentified
MKPISDRLRDFTGQNIYVGMDVHHKSWKVHIYSDEFELKSFSQAPDVEQLYNYLNKNYKNGNYQIAYEAGFCGFWIQRSFASKGVNCMVVNPADVPTSNKEHLRKTDNVDSKKIAKGLKNGELNCIHIPEIELELDRQLLRNRERLIKNSTRCKNRIKAFLKLHGIEIPGTYSKGVWSKKFIAWLQQLKFQADSGNKAMQIYVTELMFLEKQKKLVDKEVLILSKSPRYNGNVTLLLTIPSIGLLTAMILLTELGDITRFKGLDELCSYCGIVPNCHNSGETERTGGLSRRGNSTLKRMLIECAWVAVRKDPALLLYYKQQISHMKGQKAIIKVTRKLLSRIRYVLINQQPYVNGIIS

SEQ ID NO: 154996 - protein, 403 aa, unidentified
MLFVGDDWAQDHHDVYWMDDAGARVAARRLPEGVASIAALHELIAAHAEEPGDVVVGIETDRGLWVNALSAAGYQVFAINPMAVARYRDRHRVSGAKSDAADAKLLADLVRTDRHNHRPLDGDSPEAEAVKVLARAHQSLIWARARHIRMLRSALREYYPAALQAFDDLGGRDALAVLGRAPTPAQGARLSVSKIGTALKAAGRQRSIESRAQQIQAILRAEQLSAPEAVAAAFGATTRATVNIVIELNEQIRDLETTLANHFEKHPDADIYRSLPGLGVILGARVLGEFGDDPNRYTNAKSRKNYAGTSPLTIASGKKKAVLARHVRNSRLYDAVDRWAFATLLNSPGARAYYDQHRAAGDTHHQALRALGNRLVGILHGCLHHRTHYNEHTAWAHRITTAA

SEQ ID NO: 154997 - protein, 347 aa, unidentified
MRKIAYLSMDVHARNCVLGDMDGNGKFRGNRSFTTCEINIIKALKAIKAKKKYLVMEAGPMSNWAAQVANDHTTKVFICDPRENALIYKSSHKHDKVDTKKLCRLLRLNEFKEVYRPENDQRALFKAAVQHYQDLRDQLKALKQKTKAMYRQWGIINVFTDSVYSVSGRDKFLQQVRHRPIYLQLKRLYTLLDATAAMKQEAEKSMASLGRNYPEIKEFKKMPGMGIIGPHTFDAYIQTPHRFAKRNRLWKYCRLAVTDRTSDGKPLGFKRLDKSGVSELKAVSYRAFLSAMKGDNEVRRFYHNSLQRTHDRKHARLNTQRKILSVMLSIWKKGEAYRSELFLDPSI

SEQ ID NO: 154998 - protein, 609 aa, unidentified
MTLSQHRPPALAQHDTGVPSPVGERGECLHTPAQGPPEDPIPHATVPAHPSTPPTLTGLVPWELCTPRCGWITGRNWRRARVVATLCAAARDMRPVLLWCRVPVLWEFGPGSRAATSLVTGSVPIPLGRLLQPSPLPRSLPQSIPCHPIVERAVAQHKRKKSPAEQQLPAQLHAVNLHAAGIDVGAEAHWVAVPVEADPQPVRAFPAHTASLHALAAWLTLCGITTVALESTGVYWIPLFELLETQGFEVILVDPGTMPKNGRPKTDVHDCQWLQRLHTLGLLSAAFRPDDPVVVLRSYLRLRLTLLADAARHIQHMQKALTQMNIKLQHVVSDITGVTGLRIIKAILNGERDPRRLATLRDQRCKEDETTIAQALHGTWREEHLFALHQAVAAYEFCHQQIQEGDAKIAAQLQTFEDRSKGESLPPKPRKRHRNRLSFETRPLLYRMTGVDLTKIEGLDETTALIVLGEIGLDMSRWPSEKQFTSWLGLCPRVRVSGGRVLSSRTRPTANRAAAALRLAAASLHHAKSALGAFFRRMKARLGTPKAITATAHKLARLIYAMLKHGTAYVAGSMAEYEQKYRQRVVHNLSRKARELGYELHPVLGGPPA

SEQ ID NO: 154999 - protein, 423 aa, unidentified
MKKVSKRSNGKKLEMVGKNAAKTEKTPERPKGSRAAKQEPGKETKKLQRLNVRCLLRKLEAAKNAPKEAAPEDGIGYWIGIDLGDKHSKYCFLDKNANIVAEDSLATTVTEFEQYFKAIPRSRIALEVGTHSPWVSSLLERLGHSVIVANPRKIGGGKKKGLRKNDKLDARMLARQVKSDPNLLYPIQHRSEGARHALVLLRARHAVVGARTKLVCAVRGLVKSDGKRLPRCSAESFHKVDRAEVSEALRDTLEPMFKQIEYLTEQIKAYDKKVKRMCEETYPETELLRQVDGVGVIVALAFILTLDNARRFAKSRDVGAYLGLIPRQYDSGDSQPQMRITKTGDRMMRALLVQSAQHILGRFGKDSDLRRHGLKIAARGGKNAKKRAATAVARKLSVLLHRLWITAEAYEPLRNSTPKEKVA

SEQ ID NO: 155000 - protein, 410 aa, unidentified
MKHEQTSVVVGLDWADREHTCSLYQPDGKKLSLVTVAAAPEIFGRWLDQLRQDFPQGQIVVVIERPDGAVVEMMRERTGFVIVAVNPVVLHRFRQAFAPSGAKGDPGDAALLAELVLTHPEKFEALEAQDPQLQKLAALVQERRNWVDMSTGLVQQLNDVLKKYYPQALELTGENLGSPMTLAFLRRWPDLAAVKRARWSTLVRFYFHYHSCRDELLARRRELHAHAQSVSEQECYIAPLRLHMLTIIGQLEALAPSVERFDEAIAEIYHGVEGRQVIDSLPGAGKVMAPRLWVACQQAGPGATALDLALLSGIAPVQKQSGQSKVVSFRPGRPRFLHQTWTEFAYHSILGCGWAKAYYNARRAKGHGKHASLRALAFKWTRIVARLWRDQVPYDDAFYTCRRSARQTAA

SEQ ID NO: 155001 - protein, 401 aa, unidentified
MNAVGIDVSKNKSTIAILRPFGEIVAKPFDVKHTSSDITYLISQLKSLNDDTRIVMEHTGRYYEPMAQWLSDAGLFVSAINPKLIKDFGNNSLRKVKTDKADAIKIARYTLDNWCELKPYTNTDELRRQLKNMNRQFDFYMKQKTAMKNNLIALLDETFPGINTFFDSPARNDGSQKWVDFVTIFWHVDCVRKQSISSFSERYQSWCKKKKYNFQPQKPNDIYEFSHDLIATLPKDNVTKLLIHQAVDQLNIASKNVESLRLLMNQTAAKLPEYPIVLDMAGVGTTLGPQLIAEIGDVSRFSHKGALTAYAGVDPGANQSGDYEQQSVRTSKRGAPQLRKTLFLIMDSLMKLAPPDDPVYGFMMKKRAQGKDYYVYMTAGANKFLRIYYGRVNEYLSSLTS

SEQ ID NO: 155002 - protein, 342 aa, unidentified
MDKVSIIGLDLAKRSFQAHGARADGGVGFRKKLSREKVLGFFAEQPRCVVAMEACGSAHHWGRAIGDLGHEIRLIPPAYVKPFVKRQKNDATDAEAIAEAASRPTMRFVAVKSEGQQARAMLFRTRDLLVRQRTQLINALRGHLSEHGVVAAQGPANVKVLEEAVEDQTTSLPLLVVELARVFLDQIEGLSKNISKLEKVTAQEATGGETTRRLQTMPGVGPITALAIETFAPPMDVFKRGRDFAAWLGLVPRQHSTGGKQVLGKISKMGQRDIRRLLIIGAMAVVRSTLRKGAPEGSWLQRMLARKPKMLVAIALANKMARSVWAMLAKGEDFRVPTAAVI

SEQ ID NO: 155003 - protein, 414 aa, unidentified
MNTLVSNTSLSGTLIALDIAKKHHDAKIRHPDGRTSYLRIENTLEGFNRLLALTASPHDDIIAAFEPTADYHRNIAWWLHKQGVKCHLVSSVRCARAREMLFKTWDKNDRKDASVIMYLLEQGLSSPFYDPLANGIIDIQEISNTYHQVTLARTRCLNSLVNHYLTLYFPEAEQFLHMSRAEWFCQFLLQFPTPSCITSLNRGLFVKQSWDVVGRKQYKKQFLEHLYDVAADSIALPLSEDSLAVTTFRLQLHRYVGLSAQRLQLEKQAENYLQERSDYRHLRTIPGIGAIIALMIIAESGDLTRFAHYRQYLNFCGFNLSASQSGQKHSGYRLSKRGNARLRYAFWLAATVAVRTRENSFRYKYERYIRENGDKPDQKRKAMTAVATKVARVAHAIVKQDIDYKGYYEISHGT

SEQ ID NO: 155004 - protein, 320 aa, unidentified
MMAQNDLVVVGIDVAKDKVDACIRAPALRQTFPNTAQGHRKLVGWLRKHQVNKAVMEASGGYERVWARVLREAGIEVRIVDPKRVRNFALSAGRLAKNDAIDAEMIAWFAATFGEAPSQAHDAAHEELQTLVKARLGLIDFRMRLVSQSEHAAPGLVQKAHAHLMKSLASEIAKLEAAISAKIKSTPDFAERAEIIASVPGLAETSSANLVAGMPELGQVSDGIAAALIGVAPYDDDSGKRRGERHIKGGRRWVRNAIYMPCVGAATQNNPVLKAYYQRLLAKGKEPKVALVACMRKLIIILNTMIARRQKWDPSRYVVS

SEQ ID NO: 155005 - protein, 349 aa, unidentified
MRFYNQQHRFYCGVDLHARTLSLCILDGAGQTVLARTIAASPDDFLQAVAPFRDGLAVACECMFAWYWLADLCHEQQIPFVLGHALYMKAIHGGKAKTDKIDAHKIAVLLRGGMLPQAYVYPKGMRETRDLLRRRTFLVRRRAEALVHLTNTNSQYNLPPFARKLAYAANRAELDVAQRFTDPSVRKNVEVDLALIGAYDRHIGALELYLVRTAKVDDPQAFHRLRSVPGIGKVLALILLYEIHDVRRFAEVGQFLSCARLVRCAHESAGKKQGTGGNKIGNAHLKWAFGEAACLFLRESEQAKKWLARREKKHGKARALATLAARLGRTVYHLLRKQEVFDARRFFAT

SEQ ID NO: 155006 - protein, 423 aa, unidentified
MENTAARKRKQVPEGYLVIGIDPHKKRHAAVAITQDFTTRDKFKFDNTGEGLETMLRRARTEMVKSDCRGVIFAIETGGHYWRNLAYALDEQDIPFRFINQFTLKRRREGKDLNRRKNDYRDSEVAAQLLCTGEFTESKVPQGVYAELRTAHNAYRRLVKERTRITNLVKGLLDALFPEFTHVFKDPCALTALSVLSTCAIPSVIARMSEDEFVVTIEAQHKGRLMRKKLRALHYSARTSIGIDAGARSVSSEISFLVEKLELIRRHIRVIEGTLVKLVDETEEGKYLLSIRGLHYIAVGGLLAELGCFKAYRSAKQMIKMAGSNPTESESAGKKGAHTPMSKQGRPVLRYCAWTSVIPMLRLNSDFRAWAKQRRERPAHANPLNGREVVGAALNRLLRLAFALVKNQTYYQVSKPELTLVTV

SEQ ID NO: 155007 - protein, 333 aa, unidentified
MKITTVGIDLAKNVFQVHGIDQRGKAVLRKQLRRAQVAVFFGNLPPCVIGMEACASAHHWARTLQGFGHTVRLMAPQFVKPYVKTNKNDVADAEAICEAVGRPNMRFVPIKSIEQQAILSVHRVRQGFVKARTAQANQIRGLLGEFGLVIPKGIINVAKRVPEILEDASNELPVPFRHLIDRLTKHLKELEGQVKEFEREIISWHRSSELSRKLEKIPGIGPLAASALVASIADAHSFKSGRQVSAWLGLVPRQSSSGGKPTLLGISKRGDAYLRTLLIHGARAPILAAKNKVDNTNGWLTNLLQRRHPNIAAVETRTAVQENTPPIAQAITQ

SEQ ID NO: 155008 - protein, 339 aa, unidentified
MQVTTIGLDLAKNIFQIHGVTDEGDVAFNRSLRRAQVLTFFESLAPCLVGIEACGTSHYWAREIKKLGHEVLLIPPAYVKPYVKRGKSDAIDAAAICEAVTRPSMRFVTIKTPEQQAVLALHRVRDLIVRQRTQIVNLLRGVLAEFGIVVRQGAGHAITFAKQCLEGAEQDLPDLAREVVTNLCHQLVALHRRVLWYGRQMNRAASRDARVARLRTIPGVGPITASAIVASIGNGYQFSNGRSFAAWLGLTPLNRSSGGKERLGRISKMGDRYIRRLLVLGMTSRIKQIQKRPDQFDPWFGKILERKPAKLAAVAMANKTARIIWAVLTRKQSYRIRAA

SEQ ID NO: 155009 - protein, 409 aa, unidentified
MERVVERGAGLDVHKQSVTACVRVPGAAGSRHQDVRTFGTTAAALLTLRDWLSAHGVTHVAMESTGVYWKPVYYVLEEQFTCLLVNAAHVSKVPGRKTDVRDCEWLAQLLEHGLLRGSFVPPPAIRELRDLTRYRAVLVQDRTREANRLHKVLTDAGIQLASVASNVLGKSGRAMLTALVEGTTDPEVLADLAQGKLRRKLPALREALVGHFRPHHGVLVSHLLAHLDYLDEALDDLTAQIEAALGPFASEAARLDAIPGVGSRTVEVLIAELGVDMGQFPTARHLASWAGLCPGTHESAGKRRPVRTGKGNRWLRAALIEAALGATNVRDSALAARYRRLRLRRGHKKAIVAVAHQILSTAYLLLADGRSYREPGAGYYDARHKDRDVRRALHALERHGYRVSLELAA

SEQ ID NO: 155010 - protein, 374 aa, unidentified
MYEFNKYVGLDTHKDTIAVAVSDARGGISRYYGEIANTPEAISKLAKKLSPEGEALSFCYEAGPCGYGIYRQISKMGHYCTVVAPSLIPSRPGDRVKTDRRDSESLARLHRAGELTAVWVPDQEQEAIRDLTRAREDMKAMERQARQRLNAFLLSHGKTYDSGKSKWTQAHFRWLERVKFEVPVQQIVFEEYVGAIKQAQQRVSGLEDEMLKVMEGWSLAPVVEALMALRGIKLITAMTVMAELGDITRFDSPSQLMAYLGLVPSEYSSGKSKRRGGITKTGNGHVRRVLTESAWCYRFQARRTAHLQRRAEKTSEEVQAIAWKAQKRLCGRYQHLLGRGKLKVQFCTAIARELTGFIWAIACEVMGRQMVSAR

SEQ ID NO: 155011 - protein, 338 aa, unidentified
MTIVMGLDQHRAQITAEWMDTETGEVMRSRVTPAHRAGVRRFCERFRGQELEVALEATTGWRFVADELRRVGAVVHLAEPAETAARRGNKKRAKSDRADARHIRELLTIGRLPESWIPPDHILDLRARVRLRHTLSHQRGEWQQRIQAVLYHHGCPQRGNLLSGESRSWLAAQPLPAGAREQIAVALAVIDALDAQSAPLDRELRSFARRQPGCKALMGQFGVGELTAVTILAELGDARRFSSSREAVRFAGLDITVHQSDQRRAPGHLSRQGPPALRWALFEASMCAARSCSPDYEYYSQAAERLGSNRARLSVARKILKRSYHLLRELGEEALAPA

SEQ ID NO: 155012 - protein, 340 aa, unidentified
MTIVMGFDQHRAQITAEWIDTATGEIGRSRVRPADRAGVRRFLGRFRGQRLEVALEATTGWRFVAQELQAIGAVVRLAEPAETAARRGRKKRPKTDRADARHLRELLMVDRLPQSWIPPDHILDLRARVRLRHTLVDQRGEWQQRIHAVLYHHGCPHHHGIGLLTAKGRAWLDSLGLPPTAREQVTVGLRMIDMLDVQLAPIDKQLRAYARRQPGCRALMGHYGIGHLTAVTILAELGDARRFSSSRDAVRYAGLDITVKQSDRRRAPGHLSRQGPPALRWALYEAAQSARRQSSPDRDYYLQAAERLGGNRACLAVARKLLKRSYHTLRELGEQALQPA

SEQ ID NO: 155013 - protein, 489 aa, unidentified
MAKTKRKQSTFERLRRGELNRKQRRNLARRLAGNDPGLTIIHSNAGGIDVGNESHFVAVPPDRDANPVQEFGCWTADLKRMAEWLKACRIDTVAMQATGVYSIPLYDILTGHGIQVVLVNAQHTKNVPGRKSDVQECQWLMKLHTYGLLRDSFHLEERMEGVRTVWRLRDRHVKDASRAVQHMQKALTKMNIQLANVLSDITGVSGQAIIAAILEGERDPWKLADLKHEMVKASREEVARCLEGNWRDDLLFELQQAVDSYHFVHQQMRACDQQIESFLASLPTKILERPQQPDGAPAATAKKAKKPRKPRKVRHNQPTVDLTTALKRICGVDLTSIDGIDVITAQTIISEIGTDISKFKTEDHFASWLGLTPAKDITGGKIIGRGRKKVQNRVAGALRMAATTLLESKTYLGARYRHLRQRLPSYAAAIKAMARYLAVLVHRVLTHGEAWVDRGAAKFEQRRTESELRSLTAKALAKGFQLVPIPATS

SEQ ID NO: 155014 - protein, 353 aa, unidentified
MSQEKYIGMDVHQATISVAVMDARGKLIMECLLETKAATILEFIQGLRGTLALTFEEGTSAAWLHDLLKPHVSRLVVCDPRKNALLKDGNKSDRVDARKLAELLRTHQVKPVYHGKHGTRALKELGRSYLTITKDVTRVMNRIKSVYRSWAIPCAGTSVYTPRHRAEWLAKLVEPGVRIRAEHLYQQLDSLEPVRLEARHELLLESRKHAAVKLLRQIPSIGPIRAALLVALLQTPHRFRTKRQLWAYSGFAVEIHDSGEYRWVRGKLQRNRITVRGLNDNHNKDVKSLFKSAAISASTRPGPLQDFYVARVESGMRPTMARLTLARKIAAITLTMWKKGVSFDPKQLQRQAA

SEQ ID NO: 155015 - protein, 384 aa, unidentified
MRKSTKVVALEQHMESITVAVAEAGRQPPELYGDIPSTAEAVRKLAHRLDEGGTRPLRFCYEAGPCGYGLYRQLAQMGYECAVVAPSLIPRRPGERIKTDRRDALTLARLHRSGDLVAVWVPDEEQEVIRDLVRCREDFKHAERRAKQRANAFLLRHGRVYPGRSRWTKTHATWLQGQAFDHPVQQLVFQEYVDAVGEAMRMVEALEKDMAQALETWSLAPVVRGEMALRGVDLVVAMTLVAELGDVTRFDSPVQLMAYVGEVPSEHSTGRSRRQGAITKTGNAHVRRVLTEAAWCYRLPARQTAHLQRRAQQTSPEVQAIAWKAQKRLCGRYRHLTARGKPSGKVITAVAREMLGFIWAIAQETMPRKAAESETGHTDNANLA

SEQ ID NO: 155016 - protein, 420 aa, unidentified
MRNAGIHANSLLEVRRMYNAVGIDVSKGKSTVAVLQPGGTVIRKPFDVSHTSQNLNELADYLSSLDGTTKIVMECTGRYHEPMVKALSEAGLFVSIVNPHLIKNFGNNSLRKVKSDPADARKIARYTLDNWTELRQYSGMDNTRTQLKTLNSQFSFFMKQKVAAKANLIALLDNTYPGVNKLFDSPTREDGSEKWVDYAYSFWHADCVRKIGLKAFTERYMSFCKKHHYIFQQDKPEKLFNASKELVAVFPKEKTYKLLIQQSIQQLNLASEHVERLRREMNELASTLPEYSTVMGIYGVGKTYGPQLIAEIGDVSRFTHREALTAFAGVDPGVDESGQHKSKSNRASKVGSARLRKTLFQIMTTLLQNAPEADPVYRFLDKKRSQGKPYYVYMTAGANKFLRIYYGKVKECLRNLEQTE

SEQ ID NO: 155017 - protein, 315 aa, unidentified
MSEVQYFAADVSKRDLVIAAYPDDVGAQRIANQLAAINAWLDTLPPGCVIAMEATGTYHRRLADVAHARGFAVYVVNPRAVYYYARGMGNRGKTDPGDAKLLARYVAHERAHLHRYVPPSPLCERLTTLLERRAVLVRSRQTLSQSLAELPELTRQKQTMFKAIAALLSAIDSELAKLTRSDPITAKLSLRLKTISGVGPLVSSLLCALFKRFAFRDADALIAYVGLDPRPDESGQHRGRRRLSKQGHPEWRRLLVAAAMSAARTRAWMDYAARQRAKALPATAVHVILARKILRTAFGMYKNGQDFVPSMAQAT

SEQ ID NO: 155018 - protein, 429 aa, unidentified
MNYTQNEKIEQVTDSTIVVGVDIGSQIHYARAFDNRGRELTKRVFSFHNDLEGFNSFNLWAETLKSENKKTAVLIGCEPTGHYWFAFAKYVKDHQKRLVMVNPFSVKKIKELDDNSPKKTDSKDPKTIAKLVVDGRYSIPYVPEGIYAEIRDLVYSRDRIMKQHNISANRIQRWLAIHFPEYLGLYTRFDAASGLAVLEKAPTPKDVIALGVNGIRKIWHDKKMRGRGVTEDRAKTLVEAAHNSVGLDGGIGTKSELYMLLEEHRLWTSQLEAVNKVLEEMILKVPHVEKLLAIKGVGSITIAGFIAEVGDIRRFDSLKQIQKYAGLELVENSSGKHKGRTRISKRGRRKLRKILYQVMVPLFARNREFREIYDYYVTRVKNPLKRRQAMVAVSCKLIRVFYAVLTKGMEYDRFKMMSDIHRKSDIIAA

SEQ ID NO: 155019 - protein, 421 aa, unidentified
MNGKGDEYALLVGLDWADETHDLACLSEAGGKRSQLRIGSDPESIRQWMGEVGSRFPNGRVAVCVEQSRGAVAYALGAYAAVDLYPVNPVTLSNYRKAFKPSGTKDDPGDAALCLDLLVNHREALSRLEPDTELTRMLQLFCELRRKAVNRRAQVTNELISTLKQYYPQALTLIGDNRHSKMACALLMRWPRFESIAGADAQSVRKFYYVHHSRSERCIRKRLELIASGCPLTTDPAIVEPLMMHAKQLVSEIRALNKSVERYDDRIRKLFAAHPEAMLFRSFPGAGEQLAPRLLVAFGTNRERYGAADEIAAYAGVAPVIERSGKSEWVHWRWHCPKFMRQSFVEFAAKSVGQCEWAASHYHKQLQRGKEHNAAVRSLAFKWLRIIFRCWQQRKPYDEQRHLDALARHGSWIAGDLARPG

SEQ ID NO: 155020 - protein, 397 aa, unidentified
MYIVGIDIAKRKHEAAVIDGEGAVIIKPFSFTNNCSGYNRLLAMLAKAKLPLDEVSFAMEATGHYWLALFTRLQKEGFRVQVINPVQTNSIRSFYIRQAKTDPRDALLIAEVIRFGHFSESTLHPENIYELRELCRGRHAIVSMQADVKRKVVALLDQVFPEYETAFTNMFGDTSMAILQTCPTPKELSEMPLEELCHLIEVSSHKRFRMAKAQELQALARNSFGFAMAGDVFSTMIRLYAKHLDFLKQQVREMDRKIAEIMETLDTPITTITGIGPTLGAYILSEIGDISRFSSAAKLAAYAGIDPTMRQSGEYNGVRNRMSKRGSPYLRHAIWLAASSAVLHDPALKLYFQKKRDEGKPYMASVGHACRKMVSIIYAVMRDNKAYTPCIPNEISA

SEQ ID NO: 155021 - protein, 320 aa, unidentified
MSVLSVTVGIDVAKAHVDVCVLGVASGVQRFANDADGHSALAAALLPLGAGLVVMEATGGYEAALACALQASGLPVAVLNPRQARDFARSMGRLAKTDAVDARMLAEMAAVLVHREDLARFVRPVADECQQWLAALVTRRRQLLAMLGSERQSLQITPRKLHPSIEAIIAAIKAQLDDLEAQMMDHVREHFSGLDGLLQSTSGIGPVASATLIAQLPELGRLNRREIAALVGVAPMSNDSGNRKGRRRVQGGRFEIRRVLYMATLTAARYNPVIRAFYERLKAAGKLPKVALVACMRKLLTMLNAMVRTGKPWDASLHRA

SEQ ID NO: 155022 - protein, 393 aa, unidentified
MICVGIDVAKDKHDCFILSSEGEALADVFTIPNNAEGFDMLLQTIRRCSQPQDKIKVGLEATGHYSYNILGFLLDKGLSTYVINPLHTNLYRKSLSLRKTKTDRVDARTIAAMLMSDVDLKSYTDTAYHNEELKSLTRYRFDKVKERAKLKTSVSRLVTILFPELEKLVPTFHMVSVYALLSEFPGARQIAGAHLTRLKSLLEDSSKGRYGRDMAMELRDAARCSVGSVMPAKSLELQHTIRLIRELDAEIDDIENAIQTMMEEIPSPITTIPGIGVRMGAMILAEIGDFSRFDSPDKILAYAGMSPSTYQSGQLSLSGTYSHMEKRGSRYLRYALYNATKYVCLWDPVFAAYLAKKRAEGKHYNVALSHATKKLVRLIYAMEKSRQPYNAVA

SEQ ID NO: 155023 - protein, 414 aa, unidentified
MSELTNKFSALVGLDWANNKHDVCVQLGHDGKRTFEVISHTPEALDEWLTKLHHQAKGNIAVAVELTKGPIVYALQKYSFITVYPVHALTLARYRQAFNPSGAKDDPTDAELALDLMLKYPNKVKPLKPSSDDVRVLAQFVEQRRLLVEDKRRYVNRLINALKQYYPQPLAWFSHRDSGLFFNFISKWPSLQSLKRARENTVRKFFLSHGGNAVSLTEQRIEAIKNAVPLTEDKAVILPYSLFVETLIEQLKTVIVAIKTYDEKIYTLFTDMPDAELFKSLPGTGPCLAPRLLAALGDDRARFTSAQEIQNYAGLSPVTERSGQKCWVHWRWQCSKFIRQSFIEWSAKSVGVSYWAGLYYNQQRAKGKSHQSAVRALAFKWVRIVFRCWKTKIPYDESKYLKALKERNSPLLAA

SEQ ID NO: 155024 - protein, 337 aa, unidentified
MTLYCGIDLHAYNSVISVIDDHDTIVYEKRHANDLREIEGVLEPFRDDLFACVVESTYNWYWLVDGLMDAGFDVRLAHTGAIPQYAGIKHSNDQTDARHLAHLLRLGILPEGHIQPREQRAIRDLLRRRLLLVRQKTLHHLSLQSLIVRQTGERLSANQIKALDNDAIADKLTDPVRLGGQITHLARCWHEQAIEMLEDEVLKHLKPRKEYQLLTSMPGVGKVLASTIVLETGTIERFPDPGHYASYARCVNTAKVSNGKLKGRGNKRNGNKYLAWAFMEAAHYAAIWSPEIKRFYQKRQAKRHILVAKKTVANKLAKACYHMLKRQEPFDVKRAFG

SEQ ID NO: 155025 - protein, 437 aa, unidentified
MKTLAVLDPRAAFVDVGSEHMHVSVAGEEPAVFGTVTSQLHALRDWLKSQDVRSVAMEATGVYWLPLYGVLEAAGFEVRMVNGRQTRNAPGRKTDMKDCQWGATLHMHGLLNAGFVPPADIRRLQDYLRLRADHVASAASHVQHMQKALERMNIKLHDVIASLAGMSGLAVVRAIVAGERSPEALLALCDQQIRRAKAEQVKEALRGTWEAEHIFALRQALQSWDHYQLQIAQCDHQIQAVLPPHDPDQPPLPRPKTPKRAGVNSPDIPKLREILAQMCGGRDLTQLPAHTHYGVLQIVGEVGTDLTKWRTEKHFTAWTSLAPGNHDSGKRKGHVKRGRNRTGRLFCMMAQSLVRSKDIALGGFYRRMAARRGGLIATMALARKLAAWYWRVMVKGDDYVEQGLAHYDAQVLQTKQRALKRLAKELGQQLVPIAQPA

SEQ ID NO: 155026 - protein, 409 aa, unidentified
MIRKVMEVIHHSVGGLDVHKKMICACRRRLLGKGSVESEVREFGTTSLELRALSEWLLEWGCTHVAMESTGVFWIPIWNVLEGDFQLLLTNAQHLKKVPGRKKDVSDAEWIAQLMQCGLLKASFVPSREVRHWRTLTRQRMKLMDQHTSVVNRLHKVLQQGNIKLSSVATDVLGVSGRAMIRAMIAGESDPEVLASLAKGKLKSKHALLVESLEGRLQEGDRWVLRELLAQLEYLEEEIQAQMLAYQAALERLMTIDLIERRSAENILAEIGPEMRCFPSDDHLVSWAGLCPGSDESAKKNRSGKTPKGNRWLRRALVEVAWGAARRKDGYLAALYRGIAARRGEKRAVVAVARTILQAAWHVLSKGEDYKELGGDYFDRTGGEQTKQKLIKRLEKLGYEVELKPKQAA

SEQ ID NO: 155027 - protein, 331 aa, unidentified
MSICTVSAASSSSSSSSSSSFLGIDVSKASLDLWIEGAALGLATRTIPNRPGPIRRLVAQLRAAPTPPRLIAMEATGGYERPLLHALLDSGLPTVRINPLRVRRFAQSRGMLAKTDRIDARVIADFARSNADRLSPMRPISETARMLRELIARRRQLIEQTVACKSQLEHATYKPIRQSIDRTIKHCCAEIQKIETLIQEQIDNDPALLARYKKLLSIKGIGPRVARVLVSELPELGQLNRRKIAAIVGVAPFNDDSGSHSGARHIQGGRATVRAALYMATLVAVRHDPLLKARYQHLKQRGKPKKVALVACMRSMLNYLTSRLSTREEQS

SEQ ID NO: 155028 - protein, 411 aa, unidentified
MSHEITWLFVYGSPRVIIFTSEVIFMVFVGIDVAKDKHDLFAVDSDGVVLCDNFTFANSAAGFAAFLEQVSAWDKIKVGIEATGHYSSNLLSFLKAHDFEVVVFNPLSVSRLRSAASLRKTKTDKNDSRYIAKLLLTGEANPYQSQSYNISVLKSMTRARFRLFQEIQPLKNRFRRLLHVLFPELQGFFSNLYGNTSLNLLSALPSAKDIAECNILKLTKILSESSHGRLKRGRAEQLKSLAINSIAAYNFGDAFELKQTVKRIQFLASQMSEIESEIDSVMTELNSPITSIPGIGNLLGATILSEIGDIKNFGNPDKLLAFAGCEPSTYQSGKYTATTTPMVKHGSRYLRRALYCAADMAYVNSPSFRSYIDRKRAQGKHYYVAMSHGMKKLVRIIFAVLSRNLPFSEPA

SEQ ID NO: 155029 - protein, 355 aa, unidentified
MNDVKYIGLDVHQATISVVVLDSTGHLVMESIIETKAATILQLIHGLSGSLHVTFEEGTCAAWLHDLLKPHVAKVVVCDPRKNALLKAGNKNDRIDARKLADLLRSGLLSPVYHGENGVRTLKEFARSYLTLTRDATRVMNRLKALYRSWAIPCAGQKVYAPRYRNQWLAKITEVGVHRRAEIYYQQLDALRSLREQVRRDLLAEGRKHSAMKLLRQIPSIGPIRAVLLIALMQTPHRFRTKRQLWAYCGLALKTSTSGEYRIVEGQLKRSKKFLAIRGLNANHNHDLKNIFKGAATRAAAVCGPFQEFYAGLVARGMKPTMARLTLARKIAAITLLVWKKGVGFDAEHLKQQAA

SEQ ID NO: 155030 - protein, 342 aa, unidentified
MESTTIAVDVAKEAFEVAVSTQPGRIGEQKRLSRAAFLKFCTHQPPAVFLLEACGSSHYWARQLQALGHRVVLLPPHATRPYVFRNKTDRTDTRGLLEAFRNEDIHPVPAKSVSQQALTALHRLRSAWLATRTARLNTVRGLLREFGCIIPLGAQRVLPTTSTLLADPDSGLPDALRPALVETCNEIRDLEDRIRVVEAQLQTLADQTPAVARLRSIPGIGLLTATALVAFVGDVQRFPSARHFASYLGLTPRERSSGLVRRLGAISKRGDVYLRMLLIHGARAVLWAARKRPAPDRLRAWALRLQETRGHNKAAIALANKLARIIWAVWKNDVDFREVAAA

SEQ ID NO: 155031 - protein, 462 aa, unidentified
MTPQKGKMFRTSDDLTITHRHAAGIDVHSAVHFVAVAAEDVPAGFINPDAKLPDGVRKFGANTGDLEALAAWLKDCGVTTVAMESTGVYWIPLYELLASQGFAVILVDPRQTKHAPGRPKSDVLDCQWIARLHRYGLLTASFRPADEIVQWRGFQRQREMVIRYAAQHVQHLQKALEEMNVKLTEVVSDVVGVTGMKIIKDIVRGERDPLKLAQHRHERCKATQAEIASALYGNWRKEHLFALKQALKMYEFYQKQMRECDREIETCLRAFADKSAGAKLPARPAKRKPYRHEPKFGARALLFRMAGVDLTVIEGISDTTALVILSEIGTDLSQFPSEKNFVSWLGLCPQHRGSAGKISNRRVRRGANRAARAMRLAAQGSHHAKNALGAFYRRIQAHCGGPKAVTATARKIAERVYRLLKYGQAYVAKTAEAYEEAYRLRTLKALARKAESLGYKMVPATA

SEQ ID NO: 155032 - protein, 378 aa, unidentified
MKTVLQSKDNAFNPVLYMAFELSDKKWKLGFSNGERIRLKTINAGDWSALLAEIERAKAKLNCPADARVVSCYEAGRDGFWIHRALQGEGIESRVLDSASIEVSRRKRQVKTDRIDAGALLRLLMRYVNGEKAALHVVRVPTVAEEDQRRLNRERERLLKERGAHSARIKSLLVAHGIRLTRLSELPRLLPSAKAAVTGYALPADLKAELEREYERYVLVDRQVKALEHLQRERAASVDSVAIHMIEQLRSLKGVGWQSSWVLSTEFFSWRQFKNGKQVGACAGLTPTPFDSGDSTREQGISKAGNKRIRKLMVELAWLWLRYQPHSALSQWFEQRFGSGGKRMRRIGIVALARKLLIALWRYLEHGVLPEGAVLKAI

SEQ ID NO: 155033 - protein, 359 aa, unidentified
MNATTIGVDLAKNVFVACVGDGTGRLIETREFNRCGFLAWLSSLPCGTVIGMEACSGAHCWGRTMAALGLEPRLMAADFVRAYRKRQAVKNDRADAAAILAALHAPGMRFIPVKTEAQQQRLAWHSLRQGWIEERTALLNRIRGVLAEFGMVVEPGATRLRRWLAEHEFDTAQPMIVRQLIQSVRDQLDALDARIGQCDRQIAAQQAGDAAARRVRELPGVGQLTADAITASVGDARMFSNGRQFAAWLGLTPSQYSSGGKPKLGRITRRGDSYLRSLLVQGARSVFAATLRKARSAPDTLTRLQQWIVGLNARVGYHKTLVAIANKHARQLWAVLAKGETYNPEAWRQWGQTAEQPAA

SEQ ID NO: 155034 - protein, 367 aa, unidentified
MKKISTGTTKRVEKVVSQKLTIGLDLGDRWSWYCVLDEAGEVVLEQKVATTPKAMKEVFGGMPRSRLALETGTHSPWVSRVLSELGHEVIVAHARNVRLIGESRKKDDRLDARMLARLVRIDPKLLAPVKHRSAQAQADLMAVRARAGLVRARTSLINTARGVTKSYGERLRGCNPRNMNPVKAQELSPELKTALEPLLGAIESLSERIVEYNERIEQIAKQSYPEVARLRQVKGVGTLIALTYVLTLEDAHRFGKSRDAGCYVGLQPGRRNSGQSEPQLHISKEGDRYLRTLLVQGAHHILGPFGADSDLRRWGLKLAERGGKNGKKRAVIAVARKLAVLLHRLWVSGEAYEPLRNQRQVAMPAAA

SEQ ID NO: 155035 - protein, 373 aa, unidentified
MSTTPVQFCPMLAIAVEMSGATWLVGSCAGTKLRRKAVSDEAPLVRMRSLLAEVETALKRFGAGEHTRVVVAYEAGQEGFWLVRELRARGIEAEVIDPVSLKVDRRGKRAKTDRLDVEALARALYAWMAGDTTALRMVRVPSKEDEDNREWQRERDRLTSERRSCLDRIAKKLRTHGIWRWDRVALTQGTLRCADGTPLGRMLQETLRMELDRVEKAEARLDVLNAQVGELTDAAHSRIERLALLRGIGEIGGRGLALKLYWRDFNNRRQVGACTGLVSLAYDSGTMRQDQGISKQGDPSLRALLVEVSWLWLKHQPTSAISAWFRRRTEGQGKRHKRSMIVAVARRLAIALWRYLKDGVVPEGATFKAGRAI

SEQ ID NO: 155036 - protein, 407 aa, unidentified
MEVLYPRCAGLDVHAGSVTACARIASGAQVTYEHRTVPTTTRGLLDVAEWLAAHACTHVAMEATGVYWKPVWHVLEEHFTLVLANAMHIRNVPGRKSDMNDATWIADLLAHGLIRSSFVPPAPIQELRDLTRTRRQLVHEVARHVLRIQKTLEDANLKLTHVISNIVGVSGRAILNALIAGETDPDRLVDLTHGRLKASRADLLDALHGRVTDHHRFMITLHLTQIDALESAIATIEARIGDALGPFRAAVNLLTTMPGLSETTARVLIAEIGADMSRFPSVGHLISWAGFCPRLDESAGKRRSTRTRKTTPWLKPTLINAAWAATRKKDCYLRAQFLRIKSRRGAKKAILAVASSMLTAAYFMLRDGVEYHDLGAHHFEQHDKAQLAKRLIQRLRDLGVAVEVKAA

SEQ ID NO: 155037 - protein, 338 aa, unidentified
MFYSGIDQHKLFSYITTIDSDGKIIKEAKLNTNQFEIVNYFTSLGKDHIATVETTGGWYWLNDLLFSNGISLKLAHAKYVKAIAYAKVKTDKVDSHILAQLLRMNFIPEAYKISDELRPLRDTLRARLRLSQKRTSCLNFMNRMLEKFNINDPSCLSDFYKLQYQQFDYQVHLLKNQMLTLEKSLYPSLIPNEDIQRLLWIPGIGKMNAFTVLLEVGDINRFESEKNFLSYCRLVPSARNSAGKTKQRSSKDGNKYLKLVFSDAAVHALQYYSVIKKYHDSKLRKKKKQVAHAIIAKEIARIAFYVLKYKSDFNNHFKGVDLENKKSFQWPRITSPDV

SEQ ID NO: 155038 - protein, 386 aa, unidentified
MLQPKNDLRKSLIPFEQQKTVLAVVELSLRTWLVGGIVPGVHREPLKKLAADENALLRLVQRWRDEAVKAGHTITRIVVTYEAGRDGFWLARWLRRHGIEVHVIHPTSVAVSREHRRAKSDRLDIGQLKRSSLGWLRGEEAHCTMVAIPTLEEEDAKRPHREREHLVGRCTSITNRLKATLVRLGVRGFNPTLRKAPERLGELRTPEGELIPPNTVAELQRDMAHLRFLKDHIKQIEDTREEELKQAPKGPINSKVLHLRRVRSIGVETADMLVHEVFWRELRDQRAVSRYAGLTGSPDESGARRREKGLSKAGNARVRRGMIQLAWRFRNHQKHSALAQWFEARVTAGKRRKTMIVALARKLLIALWRFVTAGEVPEGVVLRPAL

SEQ ID NO: 155039 - protein, 391 aa, unidentified
MIYIGIDVAKDKHDCFITNSDSEVLFKAFTIFNNLDGFNDLYQKIESVMDDVTKVKVGLEATGHYSYNLLGYLIDKGLPTYVINPLHTNLYRKSLSLRQTKTDKVDARTIASILMSDVNLKSYSDISYHNEELKSLTRYRFDKVKERAKLKTSVSRLVCILFPELEKLVPTLHMASVYALLSEFPSAKHVATAHLTRLTNLLSESSKGRYGKDTAITFRDSARASIGSNMPAKSFELKHTIKLIQELDSEIDEIENEIKIIMDEINSPILSIPGINYRMGAMIIAEIGDFNRFDSPDKILAYAGFSPSTYQSGQLDGAYAHMEKRGSRYLRYALYNATKYVCHWNPTFAAYLAKKRAEGKHYNVAISHAVKKLVRVIYHLEKTKQQYIKAA

SEQ ID NO: 155040 - protein, 391 aa, unidentified
MIYVGIDVAKDKHDCFITNSDGEVLFKPFTITNNLDGFNELYQKIESVTEDATKVKVGLEATGHYSYNLLGYLIDKGLAAYVINPLHTNLYRKSLSLRQTKTDKVDARTIASILMSDVNLKSYSDISYHNEELKSLTRYRFDKVKERAKLKSSVSRLVCILFPELEKLVPTLHMASVYSMLSEFPGAKHVASAHLTRLTNLLSEASKGRYSKDTAITFREAARASIGSNMPAKSLELKHTIKLIQELDSEIDEIENEIKVIMDEINSPILSIPGINYRMGAMIIAEIGDFSRFDSPDKILAYAGFSPSTYQSGQLDGAYAHMEKRGSRYLRYALYNAAKYVCHWDPTFAGYLAKKRAEGKHYNVAISHAVKKLVRVIYHLEKTKQQYIKVA

SEQ ID NO: 155041 - protein, 349 aa, unidentified
MMIFGIDAHKRTHTVVVIDERGRELATKTTKTTTTAAHLELVRWAEQFGPEREWAVEDCRHLSRRLEIDLLSAGERIRRVPPKLMAKVRDSARTYGKSDPIDALAVARAALREPDLPVAQLDGPARELRLLVDHREDLVRDRTGHINRLRWHLHELDPSWDPPARSITSYKTLDVIVERLQGDARMVARIATDLVERIRALTIAERVLEREITQRIVAMAPCLLALVGVGPLIAAKIVAEVADVRRFKHKDAFARHNGTAPLPAWSGNPNRHRLSRTGNRQLNAAIHRIAITQLAHNPDARAFRDRRIAGGDTGTEALRALKRRLSDVVFRALLADATPAQPARLAHAA

SEQ ID NO: 155042 - protein, 339 aa, unidentified
MKDIKILGVDIAKDVFQLCGIDEWGKVIYTRRVKRAQYVSTVASLKVGCVVMEACGGANHWYRTFMGMGISTQLISPQHVKPYVKSNKNDRNDAQAIAEAASRASMRFVRGKTVEQQDVQALLKIRDRLVKSRTALINEIRGLLQEYGLTMARGAKRFYEELPLILASEAVGLTPRMKRVLNCLYTELLNRDEAIGDYEEELKAVAKANEDCQRVQSIPGVGYLTALSVYASVGDIHQFHRSRQLSAFIGLVHRQHSRGNKEVLLGISKRGNLMLRTLLIHGARALLRHVKNRTDKKSLWLKALIERRGMNRACVALANKNARIIWALLTRQETYRCGA

SEQ ID NO: 155043 - protein, 429 aa, unidentified
MTVSNDTPQRVTLVAVDIAKNSHDVLIESPTRGRRRRLRLANNLEDFEQLAGYLRSLKSAVLIGFEATGNYHRPLAYFLHRQGFELRLIPTLALARTREAMHNSWDKNDPKDAQVILHLLKTGLAQTWHDPMVKGINDIQELSKTHFQVTLARVRVWHTLRNHYFALYFPEIDRFIRSDHSVWLVQLLASFPTPASITALSEGEFQTRAWNLVGRKVSKRALLAEIYAAAKRSIGVPVPLDSAAVAMFRVVLGEYLVLHRHRGHIAERAAIVLGDNPDSRRLMTVPGIGPANALTILAEAGDLRRFRHHRQFLNFCGLNLSTLQSGKSRSQSHISKYGNARLRTALWMAAQTAIRMRENSFRRKFDNYVRGNPLDADLRRKAYTAIAAKLARVIFGLIKSGADYRPFFEHKFQVEEPSRASAVGATSTP

SEQ ID NO: 155044 - protein, 342 aa, unidentified
MNRTFDRAGISPNFSSSDCPDGKRIWRGKCASDPKLIADLIRKRAPMARRVVFETGPLSVWFYHALTAESLPAICIDARHAKAALDMAANKTDVNDADGLAHLAEAGFFREVRVKGFDSMLGRTLVAARTRLVRITTELSNQIRGFMKTFGLLIPAGKGSTFERNVRELLVDQEALAQIVLPLLEAWRSTRTHAAELGRQLVAGARESSACRILMSIPGVGAITATSFAAAVEDPENFKKSRSVGAWLGLTTRRYQSGEVDYDGHISRRGDQHLRGLLYEAATVILTRASADSGLRAWGLKLRERIGFKRAAVAVARKLGVTMHAMLKSGALFDRNAAAAAS

SEQ ID NO: 155045 - protein, 365 aa, unidentified
MRYHGVDLHKKYITISVRNEKGTEEKFVRAQADINAYVASLGSEDSVVLEASAGAMYWAEKIQSQGASCVVIDAYRFRIIRDSWQKTDKRDAANLSLALWLASRSGEMKLPEVWQPGPVVRELRRFLGLYELLNKQIRQLKNEIHGVLLDNGVRDRALGKLLADYPAKAEELLKTVELSAASRVCILSSLALLANLRDQKESLTGQIYQAGKPLEAEVKLLISIRGVTPLLALVFLAEVGDITRFRSARRLHSYLGVVPTVRSSGGVTHNGAINRRSRGLTRTLFTQAVIHLVDSSPVLARFYRELVARKGYGRARIALLRKSFSMMRRMLLAGEVYRWTESKLYEKKLGGYAKELKKGEKTPAA

SEQ ID NO: 155046 - protein, 428 aa, unidentified
MRFPSKVVTVVDVEHDDQEIIQRVAALDVGKAELVCCVRVPGPGRRRLQEVRTFSTMTRSLLMMSDWLAGLGVTRVVMEATGDYWKPPFYLLEGSFETWLVNAKDVKHLPGRPKTDRLDAVWLAKVAERQMLRASFVPPEPIRMLRDLTRYRVDLIGARTAEKQRVEKLLEDAQIKVSVVASDIFGVSGRAMMTALIAGERDPETLAEMARGRMRKKSTLLREAFIGRFTEQHAFLLTKMLARIDQLGADIADVEERTSAEIAPFTSAVALLDEIPGIGVTAAQAIIAEIGLDMTRFPTPAHLSSWAKFAPGIKESAGRKRGNGAAGHGNRYLARILGEAAVSAGRTDTFLGERYRRLARRRGKQRAMVAVGRSILVIIWHLLGQEDAQFHDLGPNYFDSRVNLNRKMRNHVRELQNLGYRVTLEPVA

SEQ ID NO: 155047 - protein, 351 aa, unidentified
MSRQSMRSAVTTIGIDLGKNTFHLIGLDQRGNIVLQLKTSREQLERRLTNIPRCLIGMEACSGSHHIGRQLEALGHVVRLMPAQYVKPFLKGHKNDYRDAEAIAEAVQRPTMHFVSIKTPEQMDLLALHRVRSRLVSQRTGVINQIRGLLIERGITVRQGPTPLRKALSDILSPSSQTLSPRLVRLIIDLAEDWRRLDDRIATVSTEIEALAEQDGPCQRLMTVPGIGPIISSAVVAAIGNGTGFKQGRDFGAWLGLVPKQESTGDRTILGKISKRGNKYLRTLFVQAAHVVLARRPSTAMRGLWPWIEQASRRLHRNMLAIALANKLARIAWAVLARGRDYQPTIMPHAA

SEQ ID NO: 155048 - protein, 342 aa, unidentified
MQITTIGLDIAKNVFQVHGIDAKERVVVRKQLRRSQVLAFFKALPPCLIGMEACATAHYWARELTKLGHKVRLMPAKDVKAYVKRNKNDAADAEAICEAVRRPTMRFVRIKSAEQQGQLMQHRTRDVLIRQRTQIINALRAHLAELGIVAAQGDAGVNELRAIVADDRDERLPIDARASVIVLAAQLEALQTLIGSIEKRIKMQHRSNETSQRVETIPGIGVLGATAIVATAADPTVFRSGRDFAAWIGLVPRQDSTGGKQKLGPISKQGDRYLRRILVVGAIAVLRRAQENPGKYPWLTQLLARRPFKVMAVALANKMARTAWALMVHGGTYRAPELAEAA

SEQ ID NO: 155049 - protein, 465 aa, unidentified
MTAEKKLWRNRKERKEWGRRLRSEDPSLQVVHPHAAGIDVGNGAHYAAVRPDRDPEPVRRFECFTADLHRLADWLESCGVRTVAMQSTGVYWIPLYEILDERGFEVYLVNARHTKNLPGRKSDVQESQWLLKLHTYGLLNNSFQPSAEIRVLRIYWRQRAEHVQGAATCIQRMQKALTQMNVQLANVISDVSGLTGQTIVRAIVAGERDPRKLAELSDPRIHASREEIAKSLEGHWRPELLFVLQQEIQMYDIYQERITECDRQLQKHLASFADPVPAQPAEETVNRKKAKPAKNAPRFDLSSELQRITGVDLTRIDGIDIMVAQTLVSEVGLDMSRWKTEAHFASWLGLCPDNRISGDKVLGKGTRRVINRAATALRMAANALMRSRTYLGAQYRRLRTKLGAPKAITAMAHRLARLVYRMLKYGQRYVDKGAEYYEQRYRLQQIQLLRKKAAKLGLRITPAGA

SEQ ID NO: 155050 - protein, 427 aa, unidentified
MAYRVSGVDVHKRMLAVVVAEVDGEGEYKFERRKFGSTPDQLHLLAQWLTQLEVEEVVMESTAQYWKPVWAALERYWKPARQQREGASKMSGTLHLCQARSNRGPRGRKDDFVVAERMVKRLVAQELVLSFVPDPEQRLWRTVTRRKHQLTGDRIRLQNQLEALLEQGHIKLSSLVSDLLGLSARRMLKAIAEGATDPAAVAALADCRLRATPAQLSDALGACTELNGIYRQLIQMALEQLKLLEEQMEQLEKVASGLLQAHQDAVQRVAEVPGFGVDFAIQAIAEVGAGAATFPSAGELSSWVGSIPGSEVTAGKSHSTRSPKGNTTMRRLLNQAAQSAVKVKGSIFDVKFRSLLPRLGYKQAIWAIAHRLCRLLWMILHQGIRYEERGPAVTARSQRTRTARMIKELKKQGYVIAGGPLPAGAQA

SEQ ID NO: 155051 - protein, 420 aa, unidentified
MKVVYSTCCGVDVHKTFLVATIIKTTKGVQPSYQKKRFSTFNSDIRRFKQWLLDNSCFDVCMESTGKYWIPVFNLLEDKINVTIANPKWVKAVKGNKDDTKDSKWIGDLFRLGLVPGSFIPCKDIRILREYTRYRFKLTCCKRSEKNRFQNAFTVCNVALDAVVTDMFGKSASSITDYLITSDEFDPETCKSFLQKSLKKKADSIIESIEGYQMTSSQKERMLMVRSHLDFVQQSIDSLDSKLDELIAPYENAVSLLCTIPGVDRTSAITIISEIGTDMSQFNSSKCLCCWVSLTPGNNESAGKKKSTKITRAGVYLKPALVQCAHAAVKSSTSPYYKNKYERISKRRGKKRAIIAIARMILTAIYQMLSNGETWNPCDLYKIDMPQEMQDKQKTKAIKQTLKLLVSEGVISPESASVAI

SEQ ID NO: 155052 - protein, 392 aa, unidentified
MFYIGIDIAKRSHQAAVTDISGNIIVKPFNFKNTAAGFTQFLSVLEANSVSKDNCVIGLESTGHYWYPLYFFLVEQKFSVKVFNPIQTAAFREITIRKVKNDNLDSIMIADFTRFGRYSETYIPSENMLALKNLSRFRLSVCDICGSLKKRTIVLLDLVFPEYASVFCDIFGTTSKQLLEKYSTPDEFSEISTTKLANFILKASRGRNGREKAELIKTAAQNSIGISYAIDTFSFEIKQLIEQIEFMENQLSEIDAEMAKLLAESEYSVITTISGVGPTLGSIIVSEIGDIERFETSSKLVAYAGLDASVKQSGEFNSSHNKISKRGSPYLRRALWMAAFMSLQCDPALYDYYSRLRARGKSHRLATTAFARKLCIIVWAIMKSKKPYSPHI

SEQ ID NO: 155053 - protein, 382 aa, unidentified
MSFKILKNNCCGLDVHKTWIFACIGITDSLKRTEYKQARFSSFSKGLQELYDWLSKYNCTDVCMESTGKYWIPVFNVLEKNNIWVTLSHPKYTKPQKGNKTDRKDARWICDLYMCGMVKPSFIPPADIRELRDLVRYRFKLTCMITGEKNRAHNCLTVSNFKLDDVFSDIFGKSSRSITEQILQHPGETFDVAPFVDGRCKTPIGEIQAAVDGAISKEQAVKLRQCLNHIDELEMHKVEIEREIFRFSDKYESVLYLIRTIPGFDKNPLTAIQVLSEIGGDMSVFPTAKNLVSWAGCCPRNDRSNHKIKFTRISRAGSYFKPVLVQIANARSNLRNILNLQTVTVASKHAVVTRKPSLLPYDPDRYLAHTHRFKAIYTGRFS

SEQ ID NO: 155054 - protein, 444 aa, unidentified
MPRDDTETFENNRRQPGGLPVVRRNVAGVDLGSERHWVCAPTQDGSVREIASFGATTAELMRLAEWLKTRQVESVAMESTGVYWIAPHEVLEGQGLQVLLVDTRQLARVPGRDKKTDPSDCEWIQRLHSCGLLRGSFRPEEAVCMLRTLVRDKANLVAESGDWLRRMQKSLDQMNVRLHRAVSDIDGVTGLAILRAIAQGERDAHKLAKLRDPRCSKTQEEIAEQLTGHWREDHLFSLQQALKMYDAVQERIAAYEKEIVRKLGEMERDEQRGQTAPPLPNANKAKMIKKRGQEAKRQALYRMSGVDITQIDAIGVETVEVVLSEYGSNLSRFPTEKQFVSHVTLAPRVPKSGGKAVKKRKRSSASTRVAAALRMAALSLRHSQTALGAYYRKLAQRIGGDIAVFATARKLATLIYRLLRWGQPYVDQGAAAYEIAIGSDASQA

SEQ ID NO: 155055 - protein, 343 aa, unidentified
MSAICGIDWASEWHDVHITDESGGVLAAERFAHDERGISDLIELLQTSQAGLCAIERPDGLLVGRLLAAGIAVLAIHPNQLAAARDRFRASGAKDDRFDAMVLCELARTDRHRFPALALCGDETLALRALVRTREDLVAARVALANQLRGQLDAFWPGARRIFADIDSPIALSFLQRYPSPEDAHRLGEKRLEGFLARHRYCGRKTPTELLARLRNAPRAVLGELETEARRNAVFGLTAALEPIVEQIGQLTSQIAGTVRSHPDGEIFLSLFRDPKSVICAAGLLAEIGDNRARYPTRDSLAADAGQTPVTIQSGKRSAATFRWACDKRLRTHVSVLADSTRH

SEQ ID NO: 155056 - protein, 343 aa, unidentified
MQTITPIGLDIAKSVFQVHGIDTDGNIVIRRQVKRRYVLAFFQKLPPCLVGIEACASSHHWSRELQALGHTVRLMPPAYVKPYVKRHKNDSTDAEAICEAVTRPNMRFVATKTPEQQSCLTLHRTRHLFIRQQTSVINAIRAHLAEFGIVAPVGRNGVEQLLGVVADSNDKRLPEVARACVIALGTQLQTLKAQILEFDRMIRAWHRSSEASRRLEDIPGVGPVLATALVASVADPRAFRSGRDFSAWIGLVPKQNSSGGKDRLGNISKRGDRYLRSLFTTGALAVVRYAKIHGTGHRPWLTELLTRRPTMVAAIALANKIARMAWAIMAKGERYKEPAALAA

SEQ ID NO: 155057 - protein, 389 aa, unidentified
MVEKLVVKIAVDPHKRINAVVAVDTAGSVLARGTFAQSTTGFADLMSFARRWQRREWAIEGATGVGKNLAQRLVVKGEVVFDVPSKKSSLVRAFSATSGRKSDDVDAYSVALASLHATDLHEVRVDERAETLRLLSNRRDELVGLRTQAVCRLHRELQILIPGGASRALTAAKAKALLASVRPRDEVGKVRKSLAQDQLADLVAIDKRLKDIGTQIKQAVAASATSLTDVRGVGPVVAAIVLGEVRDVSRFPTKHHFASYNGSAPTTWGSAGDARPCVNLHGNRRLNHALHIAAIVQLRFDCDGRRYYLRKIVDGKTPKEARRCLKRRISDAIYHQLVVDAQAAERGPGGQMGATTKISAADPAPTVDSSIKPQPGPHQKSNPAAARAS

SEQ ID NO: 155058 - protein, 330 aa, unidentified
MKKNEIIGVDVSKLKLDLYLHTTQRHFVVENNHKGFAELIEKSIVTTRCKPEDLLVCFENTGKYSRPLSTFLQSQNIRFAMLSALEIKRSLGMTRGKNDKVDAFRIANYAHQKRETLSPTILPGPMIDKMKSLLSLREKLIRHRTAYKNGLTDVNDCHYEGENDLYIQIQKDMIEQINDKVKKIEAELQRIIQGDQALERNYKLVTSVIGVGPIIAFYLIACTDNFTSFDNPRSFACFAGIAPFEVSSGIRKGNARVHPYANKQLKSLLNMGAMSAIVTPGELKNYFRARKKEGKNNMSTMNIIRNKIVFRIFAVVKRGTPYVNHQKFAA

SEQ ID NO: 155059 - protein, 392 aa, unidentified
MSQHFRFDASRSLTALEQDSTIVAVIEMSQTKWLVAALVPGVERQPLKKFDAQEEMLLKLLHRWHCEAGQAGRNIKRIVVAFEAGRDGFWLARWLRARDVEAYVIHPTSIAVSREHRRAKTDRLDTELLMRVFLGWLRGEKRHCSMVAIPTIEEEDARRPNRERQNLVTEQTRIINQIKAIFARFGLRTLRPTMRKLAEGLEDLRTAEGTPLPQNTLSELRRHLARLRFVRDQIHAVEQERLRKLAVAPAAETKSPDAMVRLIARVFGAGIETADMLVNEIFSRHWRDRKAVARYAGLTGSPDESGSRRREGGLARAGNVRVRCGMIQLAWRFVRFQKNSALAQWFAARTADGRASTRKTMIVALARKLLIALWRLVTRGEVPQGIVLRPAS

SEQ ID NO: 155060 - protein, 353 aa, unidentified
MNNDKYVALDVHKASIVYAIRDASGKIISTGVIETKAQTVRDFVRGLSGTIHLTFEEGTQSAWLYDLLKALVAECIVCDPRRNKLLESGSKSDDIDVAKLSELLYLKRLRAVYHGHEGTRALKELAHNYDALVKDSTRVKNRLKAIFRGRGISYEGDELYDCQEQQVWLAKLNECGSRERARQLYEQLVQLQAWVSAARQQMVRESRKHKSRKVLQQISTLGEISVAQLIATVDTPFRFRSKRQFWTYCGLAVVRHTSADYLFEQGELRRRVKPGPTRGLNHNYNRRLKKVFKTAAQTGSRQGPFKPFYDRLLARGLNPELAQVTLARKIAAVTLSLWKKGESFDRKKLGKPE

SEQ ID NO: 155061 - protein, 368 aa, unidentified
MKKGSTAATMQSRNFSAQQKLTIGLDLGDRNSWYCVLDEAGQIQLEQRVRTNAKALQAVFGAMPRSRIALETGTHSPWISRLLSELGHEVIVANARKVRLIGESRKKDDRLDAQTLARLARIDPELLCPVKHGSAQAQADLMMIRARAGLVRARTGLVNTVRGLAKSYGERLRGCNVRNMNPDKAEGLSPELQRALEPLLSGIEELSERICEYNDRIEALAQESYPQVALLKQIKGVGTLIALTFLLTLEDRHRFHKSRDVGCYLGLQPGRRKSGQSEPQLHISKEGDPYLRTLLVQGAQHILGPFGVDCDLRRWGLKLAERGGRNGKKRAIVATARKLAVLLHHLWVSGEVYEPLHNSSTTAAAAAA

SEQ ID NO: 155062 - protein, 436 aa, unidentified
MTSHCRYCNYKISGGVLLAFKIFRFNCCGLDVHKTWIFACIGLTDANGRTEYKEKRFSSFSRGLRDLAAWLASYNCTDVCMESAGKYWIPVFNVLEKTCNVILAHPKYTKPQKGNKTDRKDAKWICDLFMCDMIKPSFIPPAEIRHLRDLVRYRFKLTNMLTGEKNRAQNCLTVSNLKLDDVFSDVFGKSSRSITEYILAHPGETFDVTPFVDRRCKTPIEEIQAAVDGAVSPEQAIKLRQCLDHIDELEMHKKEMEREILRVSDPYSDALELIRTVPGFDKNPFTAIQILSEIGGDMSVFPTDQHLVSWAGCCPRNDQSNFKIKSTRISRAGSYLKPVLVQVANALIKSKKHPEITERYRRVKSHRGHKKAIIAICRMLLTAIWHILTDLKPYTAEGYLAPRPVKTEKILTTSQALSLLKLRGYVIKDDLPVTAS

SEQ ID NO: 155063 - protein, 343 aa, unidentified
MEKLYYIGLDIHKKTIAYCIKLQDGTVFCHGEISADRKSLRQWLSELPGPWKGAMEATICTGWVYDFLKPHALELKVAHPEMLKAITAAKKKNDRADSERITDLLRVNLLPECHMASEEIRELRRILRYRNLIVRTAVKMKNKVSGLLMEVGAEYNKKRLHGGKYFNELLGKVEDVPPSVINLLTLSRASLEMFQGVQKRLLDTLHNNELISERVKRLMSIPGVGEVTALTWVLEIGEVERFSSIREAVSYCGLCSAQRESAGKEHRGPISKKRNKHLQTVLIEAAKLSPRWNPQLAALYTKEAARGNRNRATLAVARKLVAYMMAVDKRSADFSLEIKTEAA

SEQ ID NO: 155064 - protein, 314 aa, unidentified
MKNSSQHLIAEVTRRRSRVEMTIGVDLGDVWSHYCTLNQDGEVVDRGRFRTTPKAIAKWFTDLPSTRVAMEAGVHSIWISEQLQELGHEVIVANVRELRAISHSDRKSDQVDAEKLARYARLDPNILRPISHRTVEQQQALTLIRARDLLVRLRTASVNAVRGLTKACGHRMPASSTRCFAERSLAVMPPGLQQALGPVLLHIAEMTAKIKHYDRLIQQLTQTEYPETRALLKVHGVGHITALTFVLTLGNKERFERSRDVGCYLGLRPRRSQSGERDPQLGITKAGNVYLRSLLIECANHILRPHGRDSTLRQ

SEQ ID NO: 155065 - protein, 419 aa, unidentified
MLTARWFVGIDWATKAHEVCVLDPEGQVCDRRSVAHSATALQAFVDALLERAHGDASTVAIGIEVPRGALVDVCVERGFGVYAINPKQLDRFRDRFTAAGAKDDRRDAHVIGDSLRTDPQAFRRVHLDHPLVIQLREWSRVDEDLAGDLTRMTNQLRDLVYRIAPGLLTLCPAADERWLWTLLRDAPTPADQRRLSLRRLERLLRDHRVRRLEAAQVREVLQKPSVYTAPGVVDAVAAHIQLLLPRVDLLAGQRRDAEKQLERLLDALDAQEPAAGDQREHSDVAIVRSMPGIGTRVAARMLAEASQPLVERAYHVLRATMGVAPITKQSGRRRTVSMRYACNARLREAGYHWARTGAQKDPASRAYYAQLRARGHSHGRALRSVADRLLRVLMTLLNHGQLFDLTHGQHAPAAIGAGA

SEQ ID NO: 155066 - protein, 334 aa, unidentified
MWYVGIDLHRETVVMAAVNDAGEVTKSVSVRCEDTASIVDVVKALAPFRAVIEASATYRWLYDLLQPYGTILLAHPFRLRVMVQRRAKTDKLDAQLLVNLLRINQIPLAYVPPEPYEQLRELTRRRARLGRELAEAKIHLRALLARQNRQASYRMPFGVRGLAWFRGQDFGWIENLARDELLMRLRHFGRQATILDQHIEQMAASFPQTEVLTDIHGIGIYSALLIVAEIGEPERFHRAKQVGAYAGLTARVHQSGGHCYRGSISRQGSTWLRWILVEAAMKVIREDTALRNFYTRVRKRSSAKIARVAVARKLAEICWKRLRRWQREHTKVAA

SEQ ID NO: 155067 - protein, 448 aa, unidentified
MSTLCSEEKPPYAARIGLDWADQKHFWTMLTADGKLTRGELKHTPEAIEIWAVELARSFDGRPIALALEQKRGALVAILSKYAHVHLFPIHPTKLGHYRKSVCASGAKSDPSDADLILDYLVKHPEWLPGLIPDTVETRSLQFLVEERRKLVDQHTSQLQILIYWLKQIFPQMLEWFDDMSTPLVGDLLQRWPQLPALQKASEKTLRKFFAEHNCRSEERIQQRLDEIGKAVPATTDVALLKTGDLSVHITVQVLVVLRAGIAEFDRQIEAVYQSHPDRFLVASLPGAGPVLEPRLIAALGTNRERFESASSMACCFGIAPVTVSSGNSHSVHWRWACSKFVRQTFHEWANCSLRSCGWAKEHYDKQRLKGKGHHASIRSVAFKWIRILFRCWRDRVPYSEQQYMEALRKHGASTSTPAAVVANSTSMLSGVQWESCGGFSKLAKISS

SEQ ID NO: 155068 - protein, 344 aa, unidentified
MKTMKWIGLDVHKSFTTMGLFDPATGELAHLGNVPTGQQELTQALGRVPGAKAVVLEAGRKSHWAAAMVEPCAQQVWIVDPLEVRRLQGRQPKTDRRDAAALARWAAQGALTPLWRPDAQTMDLRELTRGRAALVRTEAKVRNMIRSLCARHGQEPPKGDLLSEKLQAWLEERQLGGHAGKVLEVLRGLLPLLQAAADSLRHPVEQEAQAHPQARQLMSIPGIGPVLALTIAAEVGDISRFPSAAHLRSYSGLCPRVSASGGRTHTGPLTKSGNRWLRWGAVLGAQQIANKRNVDPRLKRLLNRVAFRHGRNPAKVACARALLDLSWHLLTKEEDWRSPLAHAA

SEQ ID NO: 155069 - protein, 417 aa, unidentified
MEIIKNKVCGADIHKKFLVATILSRDGTQISERFGMMFDDILKFKEWVIANNCEQVAVESTGVYWVPIYTVLEDKIEVIVANPYQIKHTPGRKTDKVDSEWIAELCLKGMIEPSRIFPKEDRELRTLTRARENLVNNRTQIKNRIHQILEYSCIKTSSVLSDIFGKSGRYLLDSLLEGKTIDEILIGTKSKTIRKKEQQLREAIKNSLDPAQILVIRYYLEQMEETQKKIDNLDTEIMNRIKSKKEDVEIAMSIPGIAFTSASSILAEIGNYRDFENGRKLAAWCGLVPSIYESAGKRITGSITKQGSKHVRRMLVQVAHSISRTKNSKLKSFFLRIKAKKGTKVAVVALARKVLCILHHLLVNREMYEETVNLKPKPLKFDRTSSPIQITEQDMIDALVKAGYIIKKIDKEVNTGG

SEQ ID NO: 155070 - protein, 386 aa, unidentified
MFKIESPATAIHTNLAAIFISIELSQSTWLITSLSPGNGEKMSTHSVAAGNMAGLFDLLSKLRERSRTRTGHSWQIISIQEAGLDGFWIHRTLQDNGIESHVVDPASIATPRRHRRVKTDRVDGEALLRVLMAYKRGEPRICSMVRVPSAKEEDRRRIGRERKTLTVERVAHVNRIKCLLFSQGITDYEPIRKDRRQRLEELQTGDGHRLPAHMKAQILRELDRLELVLEQIRVVEDERDALIAAQTTEEKPSPVTMLLEIKGIGAEFANILWSECFFRQFNNRRQVAAFAGLAPTPWQSGSIDREQGVSKAGNPRLRTALIQMSWLWLRHQPNSTLAQWFKARVEHSGGRMKKSAVTALARKLLVALWKYTTSGVVIEGAIMKTA

SEQ ID NO: 155071 - protein, 427 aa, unidentified
MPYQIAGIDVHKRMLAVVVADVAVEGEYTFARRMVGTSPNHLRELAAWLVAQEVEEVVMESTAQYWRPVWDALERYWQPRRQQRDGAGAMSGTLHLAQAQSNHGPRGRKKDFPDAERLVKRLVAQELTLSFVPDVEQRLWRTVMRRKYQVTRNRVQLQNRLECLLEEAHIKVSSLVSDLLGASARRMLQALADGETNPATLAGLASRRLRATPDQLCDALGACTDLHPVYRRLLKLVLEELGVIEDHIAQLDQEMAGLLSAHQPAVQRLAAVPGLGVDSAQQIIAEVGATAATFPSGKHLSSWVGACPGDHESAGVNYSHRSPKGNRQMRRLLNQAANAAVKTKGSIFEGVYRRLVPRLGHQQTIGAIAHRLCRLIWKILHQGVSYEERGPAVAKHRAHRRAAKMIRELRSLGYRVDVGPSLSGSLA

SEQ ID NO: 155072 - protein, 413 aa, unidentified
MADETIHWFAGVDWGSAKHQVCLLDGAGNVVGEREFAHGGAGLTALCEWVVSMAGDPGTVAVAIEVPHGPVVDAVLDRGFAVYAINPKQLDRLRDRISVAGAKDDRRDARVAAAGLRTDRPLFRRVLAGDPSVVELREWSRLAEELQQERVRLGHRVRQQLWRYYPQLLALSDDVTAEWVLALWTLAPTPAQAARLREATLARLLRQHRIRKLDASAVRGILRQPAITVAPGVTEAAVLHLRSLVARLRLANQEFHQAARKLEALCTALSQTQPGAQDSGPRDAAILSSLPGVGPVTLAALLTEAAGPISRRDYTALRTLSGVAPVTKRSGKSCIVIMRYAAQLRLRNAVFHWARVAVLNDPKCRSRYAALRARGHSYGRALRSVADRLLGIACVLLQRQVLFNPNHGAPTQP

SEQ ID NO: 155073 - protein, 413 aa, unidentified
MEQLIQRCAGIDVGQAESMVCVRVPDAVTGVPAELIASYGTTTPDLLELVDWLRGLGVTHVAMESTGVYWKPIYYLLEDDFTVLLVNAAHIKHVPGRKTDTIDAAWIAQLLAHGLLTASFVPPPPVRELRDLTRYRKALINEKTAQVNRIHKVLQDSGIKLTTYATDVMGVSGRAMMRALIGGESDSAALAELAKGRMRTKIPNLRKALTGRFREHHGFLLKRMLDHVEAQEADIAALDERIEAALAPFVVQVELLRTIPGVDCRSAQVILAEIGPDMAVFPTSGHLASWAGMCPGQRDSAGKRGSGKTRKGSKWLRGALVQSARSASRTKGTYLSERYRQVMRRRGDAKAIVALGHEILLAAYRVLDTAQPYTDPGPTALSKLTAERQRRQAVRRLQDLGYQVTIAPRTDAA

SEQ ID NO: 155074 - protein, 345 aa, unidentified
MTTMNYIGFDVHKKTISYCVKDVSGRIQQEGKIGSTRRELDCWMKTLPQPWTVAMEATIFSGWIYDHLLPHATQIKVAHPLMLRAIAAAKKKNDQIDASKLADCLRCDFLPECHMMPRAIRDRRRTLRYRHLLVRQMVQMKNRVSGLLMETGVEYNKQRLHKVSYFRELLSANGEVPPSLRPLLKLSRETIERCQKTEYALVSSLQRDPVLADRIKRLRTVPGVGPITALTWALEIGDVSRFGSIKKAISYCGLCGDERSSADKAMRMPLSKQRNKHIQRALVEAAKLAPRQNHEMAVIYDQERQKGNSNRATLAVARKMVAYLLAVDRQQRDFVPAEERRTTAA

SEQ ID NO: 155075 - protein, 409 aa, unidentified
MERQLERCCGLDVHKESIAACVRLGGRTGKAEQYVQTFGTTVAELLVLHDWLAAHGVTHVAMESTGVFWKPVFYALESDFTCLLVNAAHIKQVPGRKTDVQDCVWIAQLLEHGLLRGSFVPPAPIRDLRDLTRYRKALIHDRTRVANRLHKALEEAGIKLASVASDILGVSGRAMLAALVQGTTDPAVLADLARASLRRKLPALRQALANRFRPHHAFVLGQLLAHLDYLEEAITTISTEIERVMAPFAEPLRRLDTIPGINQRTAEVILAEMGPDMSAFPSARHLASWAALCPGQHESAGKHKSGKTRKGNRWLRTALIEAAAGASRAKNSALQARFRRVLRHRGPKKAVVAVAHALLRMVYHVLADGTVYREAGADYYDRHHSQRITRRALQTLERQGYRVTLEPAA

SEQ ID NO: 155076 - protein, 398 aa, unidentified
MTESSDYESVQVFIGVDVGKDTHHAVAINRSGKRLFDKALPNDENKLRSLISDLKQHGQILLVVDQPATIGALPVAVARSEGVLVGYLPGLAMRRIADLHAGEAKTDARDAAIIAEAARTLPHALRTLKLADEQIAELSMLCGFDDDLAAQTTQASNRIRGLLTQIHPAPERVLGPRLEHPAVLDLLQRYPSPEKLASLGEKKLAAQLCKLAPRLGKRLAADIAQALAEQTVVVPGTNAAAVVLPRLALQLITLRKQRDEVALEVEQRVLAHPLYPVLTSMPGVGVRTAARLLTEVACRAFASAAHLAAYAGLAPVTRRSGSSIRGEHPSRRGNKALKRALFLSAFAALRDPLSRAYYTRKMSQGKRHNQALIALARRRCDVLFAMMRDGTFYTPQGS

SEQ ID NO: 155077 - protein, 394 aa, unidentified
MNGDSMFYLGIDIGKNTHVASLIDEKGKTYFKAFSFSNSTDGADSLISKLAPYVDDLRIGMEATGHYWLSLYSFLYERGFKLHVINPIQTDGWRHGIEIRKRKTDKIDSLLIADLLRYGDFVETSLSSEDFMSLRNLSRFRSYLVSSIGDLKRKTIAVLDQVFPEYASSFSDIFGKTSKEILLSFSTSADYEDISASQLNKVLENIHHRKFAKNKIDELSLKAKDSFGITFCLDSFSLQIKLLIEQIIFIEEQISTVEEEISILMEKMDSPITTIPGIGKVNGATILGEIGDINRFSNASKLVAYAGLDASVSQSGEYESTTNKMSKRGSPYLRKALFQSALRAEFCDPVFSGYYQKKISEGKHHLVATNAVARKLCHTIYAILTKNTPYEVQL

SEQ ID NO: 155078 - protein, 341 aa, unidentified
MDFHPHQQTVAYCNTESGEAEQAALFHNPEQVRRFYEQFPKAIVGIEASCTARWFEQLMNDLGHELQVGNPTLIRARARSRHKSDKRDADLLLDLLLKGEFPALWRRSMAAQSVLELLRFRHALVKQRTQVGNRLQALAHAAGLPKRGIRTKRARLALLASNFTETQSFERDQLFEMLDDLNVRIKVIEALLEQKAAGDAQVERLLSHKGIGLLSALAVVHTLGDVARFPSSKEAVAFVGLDPLERSSAGKIRTGSISKAGSSVLRHLLGQAVQVASRYDGELKAFYKRLATRRSKSIAKVAATRKLLIRLFIMLRDEIDYQEFKRRGSAAGMPAASHGLK

SEQ ID NO: 155079 - protein, 358 aa, unidentified
MSMQHVPPHRRVVVGVDTHKYVHVAVAIDELGAVLDRRSFAADSGGYGQLIDWGESFGGKLTFGIEGTGSYGAGLAGAVRRRGIGTLEVMRTDRRDRRLRGKSDTIDAENAARAVLAGLATAIPKSADGTVEMIRQIKVAKDIAVKARTSAMISLKQVIVNAPDDLRQELQPLSKMALIHRCTALRPGQMTTIIASTKHTLRSIARRWEVLDAEISGHEKLLAELTAQIAPDLAKAFAVGPDTAAKMLIVAGDNPERIRSEAAFARLCGVAPIPASSGMTTRHRLNRGGHRQANAALYRVVIVRMQHHEPTKAYVARRITEGKTKSEIIRCLKRLLARELWAAMRPIREARPPLQIAA

SEQ ID NO: 155080 - protein, 348 aa, unidentified
MSHNFNNAVAVVGIDIGKNSFHVVGLDSRGAIVLRQKWSRSQIERLANMPPCLIGMEACVGAHHLSRKLRTLGHDARLMPAKYVRPYSKGQKNDFRDAEAIAEAVQRPTMKFVATKTAEQLDLQALHRVRERLVSQRTGIINQIRAFLLERGIAVRQGLRFLRAELPRLLATPPDALSPRMVGVIEGLAEDWRRLDERIEHLSGEITALAHQDAGCKRLVSVPGIGPIISSAMVAAIGTGDAFSKGRDFAAWLGLVPKQISTGDRTILGKISKRGNRYLRVLFVQAAWVVLIKPMSWERHGLRSWIEAAKKRLHRNVLAIALANKLARIAWGVLAGGRIFEASKLQAA

SEQ ID NO: 155081 - protein, 425 aa, unidentified
MHKTQYSRQLEKRKRIGDQTLVIGMDIGSEFNAACFMDKEGNVLGRYPTIYNSRKGFDYFYTLVTKTKRKHRLTDVLIGMEPTGHYWRKIAFFAKEKGYEVRFVRTTAVKHQRELDESSSARSDIRDAHTIGNIVREGKYIDTVIEESVFRQLRTLAHARERILRYIVGSTHGLQAHLSDYFPELRHLFWSMKARGLWRLLETYPFPEDVRNAGCAAVTALLAKGRGKKRHVGEQAAQVCKAAAESVGLTAIGKADRARLTMYLEEIKRSDARRQLLEREMEELLKEIPCAQYILSLPGMGKVGCAVFLGELGNPEYFKNPRQIIKYAGYDPKENDSGLRVGRKIISKKGRWLLRKCLFFMVLRLVHRSSFFKAYYEHNKKGFDRPLEKTEALCAVILKLIRVLFALMRDRRMFIEELPRCEQAA

SEQ ID NO: 155082 - protein, 407 aa, unidentified
MADREQPYEVFCGIDVGKEHHHACALDQAGRRVHDKVLANDEAALRAVFTKLQAHGRVLVVIDQPASIGALSIAVARDMGIDIAYLPGLTMRRLADLHPGQAKTDARDAYVIATAASEHPRTLRRVGGDDDTLAELGVLAGYDDDLAQQATRLSNRLRDALLHVHPALERLLGRHIDRGGVIDLLAATGTPQAIAELGADGIAQVMRPRSPRLAKTLPAKILTALAEQSVVVAGTEAFGRVITGVAAQLSEVRTERDRLAAELEERLDAHPLAEVLTSMPGLGFRTAIKILTIIGDGSAFATAAHLASYAGLAPVTRRSGSSIRGESHSRRGNHALKNALFLSAFAALGDPDSRDYYERKKAEGRRHNAAVICLARRRVDVLFAMLRDHTTYRLGPAALTARLPVAA

SEQ ID NO: 155083 - protein, 402 aa, unidentified
MNAVGIDVSKGKSMVAIMRPFGEIVSTPFEIKHTSSDINSLVKLIKSIEGESRIVMEHTGRYYEVLAHQLSEANLFVSAINPKFIKDFDNDSLRKVKTDKADSVKIARYALDKWQNLKQYSVMDELRNQLKTMNRQFGFYMKHKTAMKNNLIGILDQTYPGVNTYFDSPARSDGSQKWVDFASTYWHVDCVRKMSINAFIDHYENWCKRKKYNFSKSKAEEIYGKAKELVPVLPKDDITKLIIKQAVDQLNSASITVESLRTLMNETASKLPEYPVVMAMKGVGTSLGPQLMAEIGDVSRFTHKGAITAFAGVDPGVNESGSYEQKSVPTSKRGSSDLRKTLFQVMDVLIKTHPQDDPVYQFLDKKRAQKKPYYVYMTAGANKFLRIYYGRVKEYLASLPKS

SEQ ID NO: 155084 - protein, 427 aa, unidentified
MPYKIASIDVHKAMLAAVNSDVEVVGEFEFERRQFGTTDGGLHQLVDWWIEQQVDEVVMESTAQYWKPVWAALERYWKPVVQKREGARPTTGSLHLAQAQSNRARRGRKRDFTDAERLLKRLVANELVLSLVPDPEQRLWRTIARAKKQQIGNRVQLQNRLEALLEEAYIKLSCFVSDLLGLSARRMLKALADGETDPEAVAALADNRLRATPNQLSDALGACRELNPVYRRLIKAVLEELELIDKHISRLDQEMADLLRPYQEQVQRLAEVPGLGPDSAQQNMAQVGATAATFPSGKALSSWVGVCPGDNESAGVNSSSRCPKGNRTMRSLLNQAANAAIKYKGGIFQIIYRRYVSRLGHKQTIGVVAHRLCHLIWKILHQGVRYDERGPDVNRRSQHQRTRRMIYELRKLGYRVELANSQSPVQA

SEQ ID NO: 155085 - protein, 381 aa, unidentified
MQTKLYVGLDLHSNNTYVGVLDSKERRVLKGKFPNKLEVLMAVLEPHKERIVGVVVESTFNWYWLVDGLMDNGYKVHLAHPAAFKQYSGLKYTDDEHDAFFLAKMLKLGILPEGHIMPREERQLRDLLRKRLKLVRQSSTHILSFKSLVSRNLGISMPSNEIKKLEDDEVNDMFDNEHLALSAKVNIAAMNNLKWQIYEIRNSLLKAVKIKPQFEKLLTVPGIGNILAMTIALETGDINRFPSVGDFSSYCRCVGSSRISNSKVKGSNNRKNGNKYLSFAFVEAAQKARRYCPPAQSFFMRKTIKTNKIVATKALAHKLARACFYIMRDQVDFDETKIFGKPLKVDKGCAREPKWGLGHQPSPPIGKSGAAHKQHDHIFIE

SEQ ID NO: 155086 - protein, 353 aa, unidentified
MVYSPNEYDIFIGIDVDQKSFSFTVKNHDTMNNSHKIPADPENLYQHIRNRYNNKRVICAYEVGVTGYYLHDYLTSKDIRCLMVPPPSIPKASNDRTKNNRLDSERISQHLKNGDMLPIRVPDYDCRELRQLLRSREEYVNMRKVTKQRIKSLLLFAHLHTLLKDTTQYWSYLHIKRLKELPCSPATRQRLDLLLKDLEYARNQTLIILKELKTFSEQNASLKRNIHYLRSIPGIGFITAITILANIGDIEQLRNPRELAAFTGLVPSEYSTGERISRGRITHLGNSILRSLLVEAAWANISKDARLRQFYDRIRAKHHPQVGARKAIVAVARKLTLIIYRVLKEQREYITNI

SEQ ID NO: 155087 - protein, 329 aa, unidentified
MRISRIIGADLSKKTIDFALYNGGHIVVENSPSGYQQFLKWTQSQKINATEMFIVMEHTGLYSSRLEQFLHQHNLFFTKVSGLAIKRSMGLVRGKNDKIDAIRIARYGFEKQQNLVPLSATDQHLERLERLHALRDQMVKQRAALYTSASELQQVLGLSKNDDEIAIPLRLVKNYDKEIGQVEAQIAAVIQSQQPLKQNYELLQSIKGVGKVVATATLIKTGNFTRFTDARKFACYCGTAPFENSSGSSVKGRTRVSHLADKKMKALLDLAAKTAIQYDPELRDYYLRKTAEGKAKMSTINVVRNKIIYRMFAVIKRQTPFVDEYLTAA

SEQ ID NO: 155088 - protein, 438 aa, unidentified
MSNKVIFNLDELFISVGIDVGADFSWMSIALPNQQFVGKPYKILHNSIDSLTTAVSKIKEAEELYSLESRIFLESTGIYHYPLFCYLRDKGFNCSVINPIITKNSTNINIRKVHNDRFDSKKAALVGLKPDLKVSLMPSDLALNCRNLCREYYDLMDNRSAYVNKLQGELRMAFPQYLGIFSKVTINTSLTLLETYTSPSAFLEADKQEIIDIIKSTARFGLIYAQNKYNAIIQAATDANQFGYIIDSNIKRIRLYISFIRKYDEEINSILESLHELVDANEDADFVKQIHLIETFKGAGFLSAVSIMGEIGDFSAFSKPKQLFAYFGLDPAVKQSGKFEGTKVQMSKRGSAIARRVIHTLTLQSISISRNGEAKNPVLREYYLKKCDSKPKLVAMGAVSHKVCNMIFAILRDNKSFEIITPQEHIKQYNASKCDMAA

SEQ ID NO: 155089 - protein, 355 aa, unidentified
MDSKKYIGMDVHKESISIAVMNGAGKIGMECVIETKASMILQFIDGLRGDLHVTFEEGTSAAWLYDLLKPHVTKLLVCDPRKNASMREGNQSDKIDARRLAELLRLNHLHPVYHGEHGLRSLKELVRSYLTITKDLGRVMSRVKAIYRSWAIPCTGKQVYAPRHRAEWLAKITEPGVRRRAEFYYQQLDALRTVRQEVRRELLAEGKKHKAWKRLCQIPSIGPIRSAVLLGILQTPHRFRTKRQLWTYSGFGIETQSSADHRSVDGQLQRAKKQSSIRGLNRNCNHDLKNLFKGAAIVASSKPGPFQEFYTALLTKGIRPEMARLTLARKIATIVLIVWKRGACFDAQHLKPQTA

SEQ ID NO: 155090 - protein, 339 aa, unidentified
MQVSTMGIDLAKNLFVLHGVDHNGKTVLRKKLSRRQFVPFIIQLPACLIGMEACSSSHHFARLFSNVGHRVKLIPPQYVKPYVKTNKTDAADAEAICEAVTRPNMRFVQIKTAEQQGVLALHTERSFLVRERNGCANSLRAMLAEFGCVMATGFSALYKAVPEILEDEENELPHFVRVSVQRQLEHLKTLETRIRQTEHELSDWARTQPACQRVEKVPGVGLMTATYLVASIGNGRQFSTAKQFTSWLGLTPREHSSGGKQKLGGISKRGDSYFRCLLVHGARAVLRHISKNEKTMPWLAALVRRKHRNVAAVAQACKTARILWSMLFHETEYRPLTEA

SEQ ID NO: 155091 - protein, 379 aa, unidentified
MSNATTRTARSATTAICSDPFETAPGAVSAPRFPQTLGLDVSDKLTHFCLLGQDGDILDEGRMRTREPDILHRTAAFAPCRVVLEVGQHSPWLSRLLRTQGHEVIVANPHKFALIRASYQKSDRSDAELLARAGRFDPVLLSPVVHRPEEEAADLAFLHARRQLVAARTSLINHVRGALKASGVMLPRWDAHAFHSHAPGSIPAQLAPALLPLVECIAQLSASIREMEKHARTLIEERYPQAKALQHVNGVGPITSLAFVLTLADPHRFNKSRLVGSYLGLTPRQRQSGERSPQLRITKAGDTFLRSLLVQSAHYILGPFGKDSDLRRWGLAHLERGGPNQKKRTVIAVARRLAVLLHHLLVSGEVYAPLFQQGGAAAA

SEQ ID NO: 155092 - protein, 438 aa, unidentified
MRRKKNKAIKKVHFESLPLIHPNAAGIDVGSKEHLVAVPSDRDPQPVRTFQAFTPDLHELAAWLKRCGIETVALESTGIYWISLYEVLEQYGFEIRVVNARHVKNVPGRSKSDVLDCQWIRKLHSFGLLNGSFRPEAQVRKLRTYMRLKDNLVVEGTQAIHHMQKALFEMNVQLSNVISDITGESGLRIIEAILAGERDPEQLAALCSTRIKASRQTVAKSLHGNWDEALLFCLKTALDTYRFSQKKIQDCDQCIERQLATFEIKTPLPDSKQTLQTQLHQVCGVDLTKIPGIKEQTAQIIISEVGLDMSQWNTEKQFSSFLGLCPNNLITGGKIIRRSTRKVYNRAADALRLCAQSLTHSKSALGAKYRRLRARLGAPKAIVAMAHHLARLVYRMLRYGQNYVEKGIHQYELKFRLQRIKWLKKEARSLNMQLVTAQ

SEQ ID NO: 155093 - protein, 412 aa, unidentified
MEEVFTCCAGLDVHKESIEACVRRIEPNGRLHQETRHWGTMTGDLLAMAEWMTAQGVTQVAMESTGVFWKPIFNILENRFSVLLVNARHIKQVPGRKSDIRDCQWIAQLLQHGLLKGSFIPPRSQRDLRDLTRYRTQLANEKVRTANRIHKVLEDTNIKLSSVATDILGISGRAMLEALIRGEEDPVKLADLAQRRLRGKIPQLERALQGHLTEHHRFMLQLLWKQLADQEKLIDELDDKIKKQARPLAAELDRLDAIPGVDRRVAEVVLAEVGANMQPFPSHENLASWAGMSPGNEESAGKRQRRRITPGNRWLKRTLAQAAWAASHVKNSYLASQYRRLASRRGKKRALIAVGHSMLVIVYHMLKAGTTYADLRGDFFDHLEPKRLTHYYITRLERLGYKVTLESYAPAA

SEQ ID NO: 155094 - protein, 339 aa, unidentified
MYPFYLGIDLHLKRTYMVLMDANGEVVDKERISNQEIPQYLQEKVPQETYAVLEATRNWPFMYDLLHEHVQQVDLVHAKGVRAIANAAVKTDQIDASTLAHLARMNYIPKAYAATQEIRDLRQLLRHREWMVNQRSKAKNRIHAVLAAYNLVSPFTDLFGVAGREYLHEVMDHDLRTAACQVIEDHLTMIDLLTERIHVLEKNISLNEKQSHIVNLLKSMPGVGRLIALILLAEIGDISRFHSPKSLCSWAGLTPRVHNSDAVVQHGHITKEGSRYLRTAMVQAATVACRVSPKWYGVHEHMALHCGRRAARVAVARRLLTVLYFMWKKDQPYQENYGQ

SEQ ID NO: 155095 - protein, 422 aa, unidentified
MSKRRNKVCGADVHRDLIVATIRDDDNLLFQNEFGTTQAELKRFRDWLVVNNCEQVAFEATGVYWLPIYDFLSPSIDTIVANPWKIKNIPKDKTDSKDSQWIASLCLNGQIKRSRILSKNDRDLRTMTRARSGYVKTRTQFRNRIHKYLASNGIKLSSCISDIFGESGRYILGGLVEGRSIDTILDGIPSGRVRKKRDLIKAALGSGLDGISRMLIKDTMDLLDHLETKVEAASQEVINKLQTKSKDLAIVMSIPGIGFVSGSVILAEIGDYHDFKTPEQLAKWCGLSPGENESAGKKRPCGITKQGSKYLRTMLVQIAHVVARKSNTKLSRFFQRLSKRKEYNVAITALARKLICLVYHLLINQELYQEEDCERRKSKPAKSDPTSSYSPEDQLDDKVAAIVDAFYHLKAHGRKRSSDGSG

SEQ ID NO: 155096 - protein, 317 aa, unidentified
MHQHNTTYVGIDISKSKFDVRSTEGSKGVVYQYTPDGMKQFIQLLQKIQPELICLEATGGLERKLVALLHKHKFPVAVVNPRQIRDFARAKNRLAKTDQIDANTIMEFAQTMNPRITEPLIQAQQKMRDFTARRGQVCKQLLQERNRLGSAADKQVAKLINQSIRFLEKQLKAIEKELKQLIDADEESRKRSKILQSVPGIAGTTAALLISELPELGSLNRKQISRLVGVAPTNRDSGTLRGKRTIGGGRVRVRNGLYMPTVTALYHNPVISTFYKRLVKNGKPKMVALVAAMRKLLIILNTMSKEGKQWEAKVINF

SEQ ID NO: 155097 - protein, 370 aa, unidentified
MAQASTLFVGLDVHKETIAVAYVGEEREAEVVSLGTIGTRQSDIDTLIRKLQSKGKTLHFVYEAGPCGYWLYRYLTKKNLTCWVVAPSCIPKKAGDRVKTDRRDAVQLARLLRSGDLSPVYIPSVEDEAIRDVVRAREDGLKDLKAAKVRLKAFLLRQDIRYEGRANWTAAHLRWLADVVCPTPAQQIVFQEYVRAVSEQTERVQRLETELQPLVQTWRWAPVVEAIQALRGIQFTAAVTLIAELGDLTRFATPRQLMSYLGLVPSEHSSGERRRQGGITKTGNSHARRVLVEGAWAYRYPAKVSRHLQLRLEHVPKAIQDISWKAQVRLCKRYRRLVARGKQVNQVVVAIAREMAAFVWAIAQEVTVAP

SEQ ID NO: 155098 - protein, 400 aa, unidentified
MFCGWDWGSTHHGVCVIDDEGAIVKRWLVEHTDNALGELFAELAAIVDVKVLPIAIERGEGLVVGLIAGAGHPVLMVEPAAFKAARPRWGSAGAKSDLGDAFMLADYARTDGHRLRRVEPVAEATRELGALVRARTSLVEARTAASNQLWAILAEHWPGAGILFQQLISQIALAFLTDYPTPQSAMLLGEGRMHQFCRRHAYRGGKSPAVLLTRLRAAPANVNPISPVILAAIVRGSVAQIRTLNTEIAHLERDITAALAAHPKAALLATLPRVATVSLAQLIAEIGPLLERCDNPEQVAAMCGAAPVTRASGKSRTVGFRYAANKPARVAITGFADNSRHSSAWAGDSYRRARARGARHPHAVRILARGWIRVIWACWTTGTIYDPSRHRSEQLLATPT

SEQ ID NO: 155099 - protein, 418 aa, unidentified
MKEEGQARLSTRYIALDIHKHYCVVAGVDREGRVLLPPVRVEHGELEEWLKKKLRSSDQVVIESTTNAWHVYDLLEPLVERVVVANPIKVKQIATARVKTDIRDTLILARLLAANLVPSVWVPPVHVRQMRQLLSQRRQLVETHTQIVNRMHSVAHRHHLTHARGKRFNEQTTGWQKDKRLSQMEQFQWELEMENKVYIEKQIERISQAVRKLCHQQPWAESMTYLMQLPGFGVITAMTVLSAIGAIERFESPKHLASYSGLTPGLEQSGTKKRGKGITKEGRRELRWALVEAAQMAVKSDPLLKMRFQALQKRMHRNQAIVAIAHHLLELVWYVLTRRQAYRHFSQERIAYKYLTWAWQMDEAARDGLTRQQFARYYLMKLGIGHDLTRIALDPKHPRRLASEAEVLAIHPELKHIE

SEQ ID NO: 155100 - protein, 351 aa, unidentified
MASSKHHRGTTMTYYAGIDVSLEASHVCVIDGTGKVVREARVASEPEALIAWLGSVGLELTRIGLEAGPLSQWLYAAMRDAGLAVELLETRHVRNAFKIMPVKTDRKDARGIAELMRLGWFRPVHCKSMEAQETRAMLTARKLVQKALHEVEMSLRGVLRGFGLKIGKVAPTQFEARIRELVEGHPSLEVIATAMLSVRATLRREFNGFEKRLRAMARSDVRARLLMSVPGVGTIVALTYAAAIDDPARFTSSKTVGAHFGLTPTRYQSGETDRIGRISKIGDASVRAMLYESAHIIITRPVKGCTALKSWAMRIAKRAGTKKATVALARKLAVIMHRMLVDGTTFTTQPA

SEQ ID NO: 155101 - protein, 412 aa, unidentified
MSDGTVSWFAGVDWGSEKHQVCLLDAAGKVVGEREFRHGGAGLAALCDWLVSAAGEPGRVAVAIEVPHGPVVDALLDRGFAVHAINPKQLERLRDRVSLAGAKDDRRDARVAAGGLRTDPHLFRPIEAGDPAVIALREWSRLAEELQQERMRLGNRIRQQLWRYYPQLLEVSDDVTVEWVLDLWTLAPTPAKAARLRASTLVRLLQEHRIRRVDAEKVLGLLRQPAITVAEGVTEAAILHLRSLGARLRLANREFHQAERKLDELCATLREKTAAAGGAPCDAAVLRSLPGVGTVTLAILLTEAAGPISRRDYPALRTLSGVAPVTKRSGKSCSVTMRYAAQIRLRNAVFHWARVAVLNDPKCRSRYATLRARGHSYGRALRGVGDRLLGVACVLLRRGMLFDPDYGSSAAA

SEQ ID NO: 155102 - protein, 378 aa, unidentified
MSKNKYVAFDVHLATIAFCILDASGKILWEGVFANTAETIRDFLCGIRGRIHLTFEQGTQAAWLHDLVKPLVASVLVCNPRYNRVVLCGNKSDRIDARKLAEQLRLGGLRAVYQTEYSLRPLKQLVLGYEALITDSVRTMTRIRSLFQGRGIPCQGKALYNPANHDFWLAKIPEPGLRFRLQILFRQLDSLMPLREEGKKQLLLECRKYPAVRLLKRIPCLGPVRSAQIVAVVATPHRFRTKRQYWPYCGLAVVNRTTSDYEILNGRVQKKIRKASTRGLNRDYSRILKRVYKSAALQATTHKLLGPLYQSLLQQGLEPAMARLTIARRLSSTSLAIWKKEAKFDPNAFFTNRFDSTNRKEEKRKNKLSLNKGKETAQ

SEQ ID NO: 155103 - protein, 340 aa, unidentified
MDKGTTIAVDLGKRAFSVYWVDAQTGEIGAKAMTRAKLEEFMRTREPSRVVLEAGGSAHYWGRWLVGQGHEVRLIAPQHVRPFVRTNKTDEGDARAIWEAANRPEVKWVAIKSEASQAVLGLHRVRRQLMDMRRMQSNQLKALLYEFGIVAPAKVSAAKLDEWVAVGRVPELLASSLREQIERIGRLKGEELELTRRIERHNASDALAMRLMQAPGIGTLTASALSAELGEGAGSYANGRQYAACKGIAPRLSGTGGKTRPGAISKRGDPYVRTLLIHGARSVITHQRRAKRLSAWLKALLERRPMNVAVVALANKMARTAWALAAHGRSYQENYGAQAA

SEQ ID NO: 155104 - protein, 346 aa, unidentified
MEHYVGIDVSLELSSVCVVDGRGKIVKEAKVASEPEALVYFFKELGFPVNRIGFEAGPLSQWLHAGLTQAGFETVLLETRHVKAALSAMTVKTDRKDACGLAQLLRMGWFQQVHAKSIGSQEIRALLVARKQLLGKLLDVELSIRGILRGFGLKVGQVTRKTFEARIWELVTGHTTLERIAEAMLSARATLQAQYEKLHKAVLAIVREDAVCRRLMTVPGVGPVVAVTFKSAVDDPSRIAKSKAVGALFGLTPKKYQSGEKDVTGGITRAGDEMVRTALYEAANVLLSRITRFSKLKRWGMDVAKRRGSKRAKVALARKIGVILHRMWIDGTTYRWAETKPIAAQG

SEQ ID NO: 155105 - protein, 346 aa, unidentified
MKLSRVGVDLAKNVYQLHGVDRHGKTVWKRRLRRGQWLQALLDKTDPGCEIGMEACTGAHHWARELQSRGYTVRLIAPQFVKPYVKSNKNDANDAEAICEAMSRPHMRFVTVKSVEQQDIQATHRVRTELKDHRNAKANQIRGLVAEYGLVAPQTLLALRRAIPEWLEDAENGLTDYFRSVLHGLWDDLLSLEDRLKELDKAIETLARNNEVTKRLQQLRGVGPIVATALVATVGNAEQYSNGRQMAAALGLTPRQSSSGDKRRLLGISKRGDVYMRTQLIHGARAVVSQAKHRDDPLSRWATDIAKRRHPNVAAVALANKTARMAWAMLRNETDYDPSLAVAQAG

SEQ ID NO: 155106 - protein, 399 aa, unidentified
MTETREVVAGVDTHTDTIHAAVITTTGRHLDDREFPTTPAGYRAAVAFLTGHGGLILAGVEGTSSYGAGITRALTAAGVEVCEVIRPDRSDRRRRGKSDPLDAYTAARIALAGRDVATPKAADTLALRALLSTRRSAVKARTAAINQIKALLVSAPDAIREKYRRATTSVLITTLARCRPAAVGDSVAATVLTTAKALAHRVEFLENQSTTLTEQIDRLVTDLNPALRAAHGVGPDTAAQLIVTAGTNPHRLNSEAAFAALCGTAPVPASSGKTNRHRLSRGGDRAGNNALHRVALVRMSSHRPTRDYVARQTAQGRSKLEILRLLKRAIAREVFKLLTQAIAIPDYRDLRPARQAKNITVTAAAHHFGIWPTAISRIERGLQRDDDFADTYRHWLAAA

SEQ ID NO: 155107 - protein, 402 aa, unidentified
MNCVGIDISKGKSMIAVMRPFGEVVVSPFEVLHTDSELSKLAKLLKSLDGETRVVMESTGNYHAPVAWLLHDAGLYVSVVNAMLVHDYGNNSLRRAKTDKKDAVKLANYGLDHWLTLPRYVPEEDTRLMLKSCYRQYQQYSKVRTMLKNNLISLLDTAFPDANRLFTSPPRADGSEKWVDFVAAFWHCECVCGLSEKAFTAKYQKWCKKHGYNFSEDKALDIYASACGHFGVMPKTDTAKLLVEQAISQLRATSAALAALKQEMQSLAASLPEYPVVMEMFGVGPALGPQLIAEIGDVRRFHSKKSLVAFAGIDAPPYQSGQMDIRSRSISKRGSASLRRTLFLVMGVLLQCAPMDEPVYQFMNKKRSEGKPYRVYMMASANKFLRIYYASVKAYLDSLEHN

SEQ ID NO: 155108 - protein, 389 aa, unidentified
MKIYVGIDIAKLNHFAAAISSDGEIIIEPFKFTNDADGFQLLVSKLESFDKNSLIIGLESTAHYGDNLVRYLVTELYQVCVLNPIKTCQMRKNNVRKTKTDKVDTYVIAKTLMMQDNLRFVSFFDLDMMDLKALGRFRQKTIKQRTRLKIQLTTYVDQVFPEIQYFFKSGLHQNAVYALLKEAPSPKEIASMHMTHLANLLKVNSHGHFTKEQAKELRVLAQKSVGANDSAISIQITQTIQQIELLDSQLEKIEAEMTDIMKFNDSVIMTIPGIGYINGGMILGEIGDIHRFSNPNKLLAFAGLDPSVYQSGNFQAKTTRMSKRGSRVLRYALVNAAWNVVRNNATFKAYYDAKRAEGRSHYNALGHCSGKLVRVIWKMLTDNVEFNLK

SEQ ID NO: 155109 - protein, 332 aa, unidentified
MSNYSNAIGIDISRDTFDVHDYKLETHKVYPNSEPGFKQLLSQARRDHGKNLNGIIICMEHTGLYSLPISVFLTQKEVSFSMVPGLEIRMSLGMTRGKNDKIDAYKISKYAYLRREEIKEFELPSEDILKLKSLLSLRERLVKHRTSYLGHLKELKSFYKKSENPLLFKAQQKMIKELTIQIKCIETEMLKIIENDPNLKKLYYLVTSVKGVGLVVGITFLVYTNAFTAFENWRQFATYSGIAPFSDESGTSRKKPKRVSHMANKRVKALLTNSASTSIIHNPEMRLYYEKRISEGKSKMSTLNIIRNKIVSRVFAVVKRGTPYVDTLKYAG

SEQ ID NO: 155110 - protein, 400 aa, unidentified
MRNRGFTRKLVILRKPKPGITASKKGATTMRSILYVGMDVHKENYTLCCYSIDEDNVQYHQKVSPDYKLVLKYLEQIRTRHTDEVEFVCGYEAGCLGYTLYNQLTGHGVKCVILAPTTMAITNNNRVKTDKRDAGNIARCLAFRTYNEVHVPTAEDNAVKEFIRMRDDQKKALKIVKQQILAMVLRHGHRFEGGKNYWTIKHMTWLKSLDLGGLLQESLDEYLITYDYLTNKIERLDARIQELADGERYQEKVKKLSCLIGVKTHTALSAIVEIGDFNRFAKAEKMAAFIGLVPGEESSGEKQQRIGITKAGNAHVRRLLVEAAQSYTRGAAGHKSKELKRRQSGNTPQVIAYADKANERLRRKFYRMTLKNKTNRNVAATAIARELACFMWGLMTDNIA

SEQ ID NO: 155111 - protein, 497 aa, unidentified
MGCCALESGDAFLAIPFRNLTNCAAQPFRWSQQEELQMNHTRSKSKNGSKMPMVHPNAAAIDVGATMHMAAVRADRASEPVRSFGTFTADLHRLVNWFTECGVETVVMESTSVYWIPVFELLDSHGFTVCLVNARDAKHVPGRKTDVSDAQWLQRLHSFGLLRASFRPKGQIAELRSYVRQRERLLEYAASHIQHMQKALTEMNLQLHHVVADITGATGLRIIRAILAGERDPGALACLRHYSCHSSAETIAKALTGSYRAEHLFALEQALALYDAYHEKASACDARIEPVLKELSIHRGRGHGPAPRASRRRNRTDQANALTFDVREALFALLGKDITTIDGLGPYLSLKLIAECGDDLSSWPSAKHFTSWLGLAPSNKVSGGKMLSSRTRRSGGRAAALLRLAAVTVGRTDTALGAFYRRLSSRIGKAKAVTATARKIAVLFYNAVRYGMDYVDPGASAYETRYRTRVVNNLHRRAKAFGFVLQPLEPKVGAAVS

SEQ ID NO: 155112 - protein, 339 aa, unidentified
MQVTTIGLDIAKNIFQVHAITEDGTVAFNRPLRRAQMLLFFERLEPCLIGMEACGSSHYWAREMSKLGHEVKLIAPVNVKPYVKRGKSDAADAEAICEAVTRPTMRFVEVKSPEQQAILSLHRARDLIVRQRTQTINMLRGLMAEFGIVFAQGVGHAIKFAKRLIAEDMPELPQAALDVATDLSEQLLTLHRRVNWYGRRMTSAAKSEPRIALLQTIPGIGPITASAIVATVGSGEQFRCGRDLSAWLGLTPINKSTGGKERLGRISKMGDRYIRRLMVVGMTSRIKQIKSTPERFDPWFADILQRKPAKLAAIAMANKTARIIWAVLTRNEPFSARTA

SEQ ID NO: 155113 - protein, 413 aa, unidentified
MDTVISRGCGLDVHKRIVVACRRIVGPDGKVQSETRSFGTMTADLLALSDWLAEAGVTHVAMESTGVFWKPIWNMLAGPFEVLLVNAQHVKKVPGRKTDVKDCEWLAQLLQCGLLRPSFVPPLPLRELRDLTRHRAKLVKDKTAVANRIQKVLEDANIKLASVASDVLGVSGRQMLNAIVDGEGRPEVLAEMARKRLREKIPELRLALQGRVTPHHRFMLKTLLEHLAFLEAQIARIDERVEAAMRPFAQELELVDTIPGVDQRNAENLLAEIGTDMTQFPSADALASWAGICPGNNESAGKRKSGKTPKGNRWLRRTLTETAWAAAHTKNTYLSAQYQRLVRRRGKKRAIIAVAHDVLRAAYYVLTRRTSYNDLGSDYFDRMDPQRLQRYYVRRLNALGLSVTVTPVQEAAA

SEQ ID NO: 155114 - protein, 374 aa, unidentified
MRNGINWIGIDDSADKWTIAQYSGGQPAPTREFELVPSESGYRKLIGWLKQLDGEVWVVYEAGPCGYELYRKLQQKKIRCEVAAPSLTPRRPGERVKTNRRDAAKLAKLYRAGELTLIVVPDAAHEALRDLVRARRAVQRDLLRARQQLNHLLLRHGHRYRDGRHWNQRHWQWIASIELPHADAQSVIVETRLMIEQRIEQLRRYDGLIEEAAGRPQYAPYVRALTALRGIDTLTAVSILTELGDLRRFTTAPQMMAAVGLVPSEYSTGDQVRRFGITKTGNTHVRRLAIEAAWHYQRGASAGITVQRRRRDQSPVIIDIARRCDARLNRRFHRLTSRGKPSNIAIVAVARELIGFVWAIGQQLEFNRETKSSS

SEQ ID NO: 155115 - protein, 343 aa, unidentified
MQTVTTIGFDIAKSVFQVHGVDAAGQVLIRRQLKRRYVLPFFQKLPPCLVGIEACATSHYWSRELQALGHSVRLMPPAYVKPYVKRQKNDMADSEAICEAVGRANMRFVPTKTPEQQSGLVLHRTRHLLIRQQTSLINAIRAHLAEFGIVAPVGRKGVEDLLRVIADANDKRLPEVVRGCLAALGTQLLGLKKQILDFDRMIIAWHRSNQTSKRLNCIPGVGPLLATALVASVGDPKTFRSGRNFSAWIGLVPKQHSSGGRDRLGSISKQGDRYLRGLFVAGALAVIRYAKIHGTKHRPWLTALLARRPTKVAAIALANKLARMAWAMMATGARYNYPASLRP

SEQ ID NO: 155116 - protein, 417 aa, unidentified
MNETQYAAYIGIDWSDRKHDIYLLDNMTGEVEERVIGSQPDAIAAWVEGLQKRYGNNPLAVCLEQKRGPLIYALCQYENLVLYPINPRTVANYRKAFQPSRAKSDPIDARILVELLQKHGDKIPAWQPESREMRALRQWVESRRMLIQEKVRLTNRLTAALKNYYPQVLDWFEDKDTQVFCAFVKQYPDLKSAQAATAQELTQFFRSHQVIRRSAVIRRIKQIAASGIPLTEDPGIVEPMQWLVQTLMRQLKPLLVSLVELDAKIETHFAAQSDAELFAALPGAGKHLAPRLLVAFGTNRSRFENAQQMMCYFGIAPVKESSGKKSWVHWRWSCPIFLRQTFVEWANQSRHHCAWAQAYYRMQRHKGNSHPAAMRSLAFKWIRILFRCWKNRQAYDEAKYVTALQRKGSPIAKLLGV

SEQ ID NO: 155117 - protein, 393 aa, unidentified
MRYLGLDVHRDFCEVAICERGRARSVGRIDTTREALELFASSLAADDRVVLESTGNALAIAGILRRHVANVVLANPMQVRAISHAKVKNDRVDARTLAELLAADLLPQVWIADEPTRALRRLTSRRTQLIRQRTRTKNEVCAVLVRNLIARPDVSDLFGKAGRQWMATLELPADERHTLDGCLRQIDFLSDELAVIDGAIAGHVLASGDMRRLLTIPGVDATTAATMMATIGRIHRFPTPRHLVGYVGLDARVRQSGNHAARHGRISKQGASAARHVLVQAAWAAIKTPGPLHAFYCRVKARRGAQIAIVAVARKLAILSWHLLIKQQDYAYQRPQLVARKLRRLELQTGAPTRRGRAAPRPNTDPHDLQRARHAEARYADLTSNWQTHPLRA

SEQ ID NO: 155118 - protein, 370 aa, unidentified
MLDTTTFVGLDVHARSIKAVSLDVMTGEVRCATFGYDAGAVAEWVRSVDPKARCVYESGVTGFDLQKRLSGLGVDCVVGAVSKMIKPSADRRRKNDRNDAEFLARMLSVGNVVEVWVPDDECEAARNLTRALEDARDDLSRAKQRLSKFLLRHGLAFDERTPTGRRKGNWTRAHWSWIESIRFAEGADNDVLAYYVDAVRRAAEEKARLEGLVEAEARKPRWRRRVDSLRCLKGVDTATAADLVFEAGEFSRFRNARSFAAWVGLTPSEHSSGESDRRGAITKAGNKHLRKALVEAAWHYLTCSGRPKDLAKGQAPDRVARRHAAKGVRRLVERREALLARGVHNNKANVATARELACWVWAVGLMAEEA

SEQ ID NO: 155119 - protein, 382 aa, unidentified
MRKYTTYAGMDVHARSIEASAVDVETGEVFSRSFRNCPAAAEVAEWLGTLPQPVYCAYESGCTGFTLARGLRALGYDCDVIAVSTLPRSTKDKKQKCDRLDARAIRREIANPDSGYSVVWVPDEKTEAERDLARCHRVAVDGAKHAKQRLLSFLLRHGHVWDERTRTGRPKKAWTRDFERWLDSIGFAEPSAERAFAAYRRQVRDACREVKALKAEVRALASRREHKPYVDALTCLKGMEVENALLARVEFGDFSRFESGRRVSCWLGTVPSDGSSGDSRKHGRITKAGDKYLRRALIEGCSGISMWRSGRKAVPKGAEPSAACSSIASRANGRLYARYDHLAREKHKNANKAKVAVVNELVRWIWVIGLQVQREQRGEAAV

SEQ ID NO: 155120 - protein, 325 aa, unidentified
METIKRCCGIDVSHTTLDVCYQNNLGELFHLHVGNNNKGFEKILEHTGTQYHFVMEATGVYYIRLAFFLHQQNCTLSVVNALSIKRFIQMHLERNKSDKKDAKWICRYAIEQRPAAWQMPDPAYFQAKQLYNTIREYQEQIKRFNNQLHSLGLLPVVSKDAIRSLEKMKEQLRKEMKVLEEKLEALLQKWQPVQLKNISSIKGLGKRAAAMLIIFTQGFKNTHNHRQLISFAGLSPSEYSSGTSIQGKPKICKRGGKQLRDVLYMCAMNAMKTNAACKALYERLKAKGKTGKQGLIAVCNKLLKQAFAVVKNNTLYQPAYCSLKP

SEQ ID NO: 155121 - protein, 444 aa, unidentified
MVCSGMILICEVADAPVIMGISKPAGLKSPCGEVKIVNPLFVGIDVSSRSNVAYLMKPDGSKHSSFSVQNNLGGAKMLSERIVSALSSMRLSDVVIGLEATSIYGNNLVYALREDGSLSRFQRKIHVLNPKQVKKFKEAYPDLPKNDFVDAFVIADHLRFGRIAKEVYMDDSRYQALRTLTRARFDVIQNLTREKQRFANYLFLKCSGIAQEKDIQNTSATTIALMEHFETVDDLANTDLDELTDFIAQAGRGRFVDPDATARAVRAAAKGSYRLPKTVNDTVNQAMSVSIASMRALKEQVKVLDKAIEQQFEIIPNTLTSIPGIGKVYSAGIIAEIGDIHRFDSQASVAKFAGLVWTQHQSGEFEAEHSRMIKSGNRYLRYYLLEATNSVRRCDSEFRRYYDLKFKEVNKYQHKRALALTARKLVRLVFRLLKDNRLYIPSEG

SEQ ID NO: 155122 - protein, 321 aa, unidentified
MARIICGVDVSSISLEAFVAPHGATGSFHNTVEGVTTLLEFCQQQQVELVTMEATGGYEKKAVQLLWAEGVGVAVPNPRGVREFAKSLGLLEKTDRIDARVIARFAEVKKCEPSVPASAEQQRLKALSRRLQRLSKLAADQKNQRHLVDEPRVLRTFDAVLQVAKQQMREVEAEIATLLASDPLWQKLEEALRSIKGVAGRTVARVLADLPEIGTLSNKAVSKLAGVAPLAQDSGKREGKRAVRGGRRNVRAILYVVAGVVRRYNPDFAAFAERMAAKGKPKRVIRVALAHKLLVRLNARAREARAAIQLCRAGRAKCLTK

SEQ ID NO: 155123 - protein, 312 aa, unidentified
MAHIICGVDVGAATLDARIGRDGVWQQFTRTAEGITQLAQFCKTHQVSLVIMEATGGYERLPFAQLWAADVPAALVNPRSVRRFAEAMGSLEKTDKIDTGMIAWYAETKRIVPTPPASDRQRHLMALVLRMRQLTDLRTAQNNQRRLVDDPDALASFTAVVSTINRQIRTLEAKVIELIDADPLWLALDTAFRQIKAVSDRTIARLLANLPEIGTLSGKAVAKLTGLAPIANDSGKKTGKRPVRGGREAVRSILYTIAELVRRHEPDFKVFYETLRAAGKPPKAVRVALARKLLVRLNAKAREVRKQFVQAA

SEQ ID NO: 155124 - protein, 332 aa, unidentified
MDSIAQQAPNRRVAVGIDTHKHSHVAVALDELGGRLGELTVPADSGGHEQVERWATGYGRVLAFGIEGTGSYGAGVAGYLGRQGHRVIEVNRPDRRERRLNGKSDVLDAENAARAVLSGRATATPKTADGEVEMIRQIKIAKDTAVKARTQAIVTLKTLVVTAPPELREQLEGLAKMALIERCAGLRPGPMTTPLAATKHALRGLARRWQQLQVEIKWHERHLTTLTESVAPAMVAAFGIGPDTAAEMLIVAGDNLDRVRSEPAWAKLCGVCPVPASSGRTSRYRLNRGGHRQANSALYRTVIVRLRFHQPTIDYVARRTARARRRRRSSAA

SEQ ID NO: 155125 - protein, 370 aa, unidentified
MKEFSKYVGLDVHKDTIAVAVAEGGGGEVRYVGEITHTPEAITKLLRQLKKGGGRISWCHEAGPCGYGLYRQLSTAGEDCQVVAPSLIPKKAGDRVKTDRRDALSLARLLRAGELTAVWVPDQAQEALRDLTRAREDMKHLQRQARQRLSAFLLRHDRRFTGKCKWTQVHFHWLEKVKFEQPVQQIVFQEYVDTVLSLSKRVHGLDEQLERVARESVFWPVIEALMALRGVNLLSATTIVAEIGDLHRFASAPQLMAYLGLVPSEHSSGPKQTRGAITKTGNGHVRRLLVEAAWTYRHPARKSAPLQRRAERTPEAVQDIAWKAQKRLCQRYRHLTARGKQSVQASTAVARELAGFIWAIGQAMPRAAAA

SEQ ID NO: 155126 - protein, 342 aa, unidentified
MNQYAGIDVSLECSSVCIVDANGKILREARVASEPEALIAWFRSCGFELERIGLEAGPLSQWLFAAMREAGLAVELLETRHVRKAFEAMPVKSDRNDARGIAQLMRLGWFRPVHCKSMSAQETRTLLTARKLVQSKLRDVENSLRGILRGFGLKVGKTTELGFAGRIEELVAGHPHLQVIARALLSVRAVLRSEFAAFQKQTRKMAQSDERTRLLMSTPAVGPIVALTYASAIDDPTRFTSSKQAGAHFGLTPKKHQSGETDYTGRISKIGDSSVRTALYEAAHIMLTKPLKGCSQLKSWAMRIARRAGMSKAKVALARRLAVILHRMLADGTPFNPAAAAA

SEQ ID NO: 155127 - protein, 411 aa, unidentified
MVRNDTVGRDTPVIAGVDTHKDTHYAAVITSTGQQLEAAPFPATPAGYRALTAFITAHGPLARVGVEGTNSYGAGLARHLIAAGIEVVEVLRPSRQVRRMRGKTDQIDAYAAARTALSGTGCSTPRNGDGLVEAIRVTVVARSSAIKAGTDTTLQIRDLLVSAPDTLRSQFRDLSGSALINMLARTRGHESDDRLTGLTRATLRTLARRIGMLDAEIAGHDRTLRRLVAEANPALLQAKGIGVICAAQLLIAAGDNPERIKGEGAFAMMCGAAPVPASSGKTIRHRLNRGGNRRANSALYHIAVVRLHSDSRTRAYAARRRAEGRTTKEIIRCLKRAIAREVYHLITNPPQPLDTTELRPLREAADLTLAQAADALKCSISTLSTIERGHSSNRQTITTYRDYLTHHQHAA

SEQ ID NO: 155128 - protein, 345 aa, unidentified
MSIVGGLDIHRKQLTFDYVDTVTGQVARGQITPADREHLRAWPARFAGREDVAFAMEGCTGWRHVAGELAAAGIAAHVAEPADTAFARGRKRHARTDKTDSRHLRQLLAEGRLPECWIPPPQVLECRALLETYHDLRREHTAWVQRIHAVFFHQGAPRLGEGALRTAQGLAALRAASAAHLSPAGQLQVATALDMLACLEARLDVLRHQLLDAARHMSGAKVLAARLYGVGPVTALALTCWLGGARRFSSSRKAVRFAGLDITVYSSDGKRSPGRLSRQGPPVLRWAVYEAGKVHARTAAPDHGYYAAVADRKNTRRAALSEARKIIRQACHILTELGDDALTAA

SEQ ID NO: 155129 - protein, 390 aa, unidentified
MYIVGIDIAKRFHEAAIIDKAGNVVVKRIKFANSHTGFLKLMDAVRKLDSYAEFGMEATGHYWLPLYCHLRQDGQTVHVINPLQSDALRSMFIRQTKNDTIDALIVAEVIRFGRYCETQVAPENIVALRELCRQRFFVVDMASDFKRKIIALLDQTFPEYEKLFSDTFGKSSVELLANYTTPEEMLSVDSQTLADLLNKASRGRFGLDKAKQIQQTAKNSFGIVLASSSFALIIRQYLEQLKSLESSIAAFDSEIARLMADFDTKLETITGVGKTLAAVIFSEIGGNIKKFSSLPKLVAYAGLYPKSRQSGESKTDGHMSKRGSPYLRRAVWLAANVAAFKDPAISAFYQKKRSEGKVHLTAIGHVCHKILAIIFAVLRDNKTYVPASLS

SEQ ID NO: 155130 - protein, 345 aa, unidentified
MMVVLGTDAHKRNHTVVAVDEAGVEIGSVTATATPEGHLKLVKWAASWEQRRWAIEDCRALSRRLEGDLLQLGELVVRVPPKMMAGVRRSARTRGKSDPIDALAVARAALREPDLPVAQLDGPSRELRLLVDYRESLVKDRTAAQNRLRWRLHELAPGYDPPAGSLNRYKTLDNIDELLTAHTSMVAELGRREVARIRELTREANQLERDIARRVEELVPTLLEIPGCGGLTAAKLVGEAADITRFKSRDAYAMWAGVAPIPVWSANNQRFRLNRGGNRQTNAAIHRIAITQIRIHPDAQTFIARRLETGSTKREALRLLKRKLSNVVYRTRLTDSQQPALEAAA

SEQ ID NO: 155131 - protein, 323 aa, unidentified
MSSIVGIDIAKHSFDIATLQANGKYRTKSKLANQTAGFQVLQQWLVKYAEPGAWIVMEATGVYHEALAEYLHHLGYRVCVMNPAQIASYAQSQLQRVKTDRVDAKLIADYGRRHMDKLRAWQPEPQAVRRLRALVRRLDDLKEIEQMELNRLDVSHASVQDSIRSVLQHVQEQIADTLKAIQDHIDNDPDLRSKRDLLVSIDGIGDKTAALLLAELGNPLGFKSARAITAFAGLNPKLQDSGKHKGHVVISRTGSSRLRAGMYMPAVAAMIHNPAIKALKERLQARGKAGKQIVCAAMRKLLHIAYGVLKSGEPFDLEKALAH

SEQ ID NO: 155132 - protein, 428 aa, unidentified
METPTSVPEVVAGIGLDGADQRHEIRLGAAGSAATESFTIEQKPAALHAWVAQLRARFPEGKIAVALEQSRGAVIYALMNYDFLLLYPIPPKTLARYREALATSGAKSDPSDADLLLELVRTPADRLRAWQPEDALTRQRRLLVEHRRKTVGDRTRLTNRLTALLKTYFPQAREWAGDLRQPAAGEFLRAWPTLEAVQRAQRAELRGFYDRHRRLSTPEREELFRQIDQAQPLTRDPALVEASALMAQGLAEQLRAAIAVIARLESEMEKLFDQHPDHDLFDGLPGAGAALAPRLATAFGSDRNRYDSAEDVQKFSGVAPVTEKSGKTKWVHGRMACPKFVRQSFHEFAAASCKKSLWARAYYEQQRKRGADHHPAVRSLAYKWIRILYRCWKNRTPYDEQVYLKSLQRHRSPLWLAVMSLSTQEAHG

SEQ ID NO: 155133 - protein, 342 aa, unidentified
MQITTIGLDIAKNVFQVHGIDATEKVVVRKQLRRSKVIAFFEALPPCLVGMEACASAHYWARELRKLGHEVRLMPAKDVKAYVKRNKNDAADAEAICEAARRPTMRFVGVKSAEQQGRLMQHRTRDLLMRQRTQVINALRAHLAELGVVAAQGREGLKELLAIIADENDDRLPVDARASLIVLAAQLQALQTLIGSIEKRLVVQHRANEASKRLETIPGIGVLGASAIAATVSDPNVFRSGRDFAAWIGLVPRQDSTGGKQKLGPISKQGDRYLRRILVVGAIAVLRYAKQNPEKYPWLTQLLARRPFKVVAVALANKMARMAWALLAKGGTYRAPALAAAA

SEQ ID NO: 155134 - protein, 346 aa, unidentified
MEHYAGMDVSLKLTSVCVVDAQGRIVKEAKVASDPDALVAWFKALGFPLEQIGLEAGPLSQWLHAGLTQAGFAAVLLETRHVKAALSAMTVKTDRKDARGIAQLIRMGWYRPVHVKSMCSQEVRALLVARKQLLAKLGDVERSIRGILRGFGLKVGKVSCKQFEPRIRELTAGQATLERIADAMLAARATLRIEFNKLHRAVLAIVREDVVCRRLTSVPGVGPLVALTFKTGVDDPMRIKKSKQAGALFGLTPRKYQSGEMDVTGGISRVGDEMVRTALYEAANALLTRVQRFSALKRWGMNIAKRRGAKRARVALARKLAVILHRIWIDGIDFRWSRTQPIAAAA

SEQ ID NO: 155135 - protein, 406 aa, unidentified
MSAVTIGIDPHKGSHTAVAVDDQEMVLGQIRVLSNAAQTDQLLAWAAAWPERRWAVEGAAGLGHLLSQQLVNAGQNVFDVQPKLAAKVRLLESGSTNKNDPNDARSVAVAALRGKGVAPVCREDHAEVMKIWIRRRRELQRTDNRVANRLHALLCELVPGGFSGPISPAKAEKVLAQADTAGAVNAARIELAQEMIEDLRHLRQQRREVIKRLGQIVAASGTSTTEIVGVGPVVAAMVVSITGDVGRFKSIGHFAAYNATAPVEVSSGPQKIYRLSLRGNRQLNHAIHIAAVSQISHHNNPGRIYYDRKLAEGMTPKKALRALKRRISDALYRAMIADAAKQRAAHAAGPGGQSGNGSNSSAASSHPERQLFGQATPGPAKSLRPSKTTKHPQTPLTPKTRAKNAS

SEQ ID NO: 155136 - protein, 358 aa, unidentified
MNRNTGMNAGKIIGTMNGQQVVGLDIAKKVFQLHTVDMGTGEIINVQIKSGKVREHFANRKSCLIAIEACGSGHYWARELQALGHTVRLLHAKVVRPFVSGNKTDATDARAIWLAVQQPGVKFVGVKTVAQQATLTLHRQRESLMKMRIMQTNALRGLLYEFGATFAKGKKALFSEIEVTLEALVETLPQVVVDSLREQVERIKKIDEDMLTIEKRLKLQLKQDPQMQRIAKIPGVGLLTATAVIATMGDASAFKSGREFCAWLGLVPTQTGTGGKVRLGSISKRGDTYLRTLLVHGARSVVNNGKTPGPWLQGLQARRPANVVCVAQAAKVARTIWAITAKDQEYQNAHKSIRPQAA

SEQ ID NO: 155137 - protein, 315 aa, unidentified
MSKIVVIAGIDVSKDKLDIHVLPSNQTFVVDRDPRGLTGLVRRLRKAGVEQVALEASGDYERIVIETLDPDGFVVQLLNPARVRAFAEAIGILAKTDPIDARLIALYCQHFPDTGLTRRPEQARKLGEFLNMRAMLLKLAGEIRNSFEHVREPGLKALADTLSADIAAKLKDVDDRIAKLIAGHDATMRKARIIRSFTGAGPVLTSGLLARVPELGGVTRHAAARLCRAAPTDRQSGRTRHRSSIEGGRDQVRPVLHMAALAAIRSNPIIKAFAHRLSAAGKPKPLVIAACARKMVVILNAMLRDNTEWKYAKAA

SEQ ID NO: 155138 - protein, 357 aa, unidentified
MKTSNNISFDNSHFFVGIDTHLKNWKVTVRFNSIELKTFSMNPAPSELVKYLKKNYPGGIYHIVYEAGFCGFWAFRDFREIGIDCIIVNPADVPTSNKEKVNKNDPIDSRKLARELENGSLKAIYIPDIFHEELRQLMRLRYRIIQNQTRTKNRIKALLHTKGIHIPIHFTGNSRWSASFIKWLQNINLNTQAGQFSLNNLILQLQQLREHNRNLLKELRVQASNKNIAPVINALLSVPGVGFITAMTLYTEIIDIKRFSNQNRLAAFVGLVPSIRSSDDNIYNNGISFRKNKFLRPIMIEAAWTAVKSDPAMTLRYRELTNRMKPKLAIIKIAKKLLKRIRHVWIKQEDYVYSLVA

SEQ ID NO: 155139 - protein, 397 aa, unidentified
MIGIDPHKGSHTAVAVGAAEEPLGKLRVRACPDQAGKLVAWAQAWPERTWAVEGARGLGRLLAQQLVAAGERVLDVQPKLAARVRLLEAGDVNKTDPDDARSVAVAALRSAGRQEVTADGPAVVLKVWAKRHRDLSRTRNQVVCRLHAVLCELIPGGVPDEITAGQAARILEQVAPAGAVAQARCELAAELLAGIRHLDVQRREVKKKLAAAVTASGTSLTEVFGVGPVIAATVIGDVITVARFPSRDHFAAYNGTAPVEVSSGPRKIYRLSLRGNRRLNHAVHMAAITQIRHKHSDGRAYYQRKLAEGKTHKEALRCLKRRISDAIYARLRADARKAGPGGQPGNDTGSSVTGSHPEHRLFGQATPGPEPSLRAPAAFTQATLAPEPSAKKIQRAT

SEQ ID NO: 155140 - protein, 481 aa, unidentified
MVKKLRRNSDKKRRQVLEITNPDAAGIDLGACVHYVAVPSGRDPDGEDVRNFQSHTPDLKVMAAWLLKCGIKTVAMESTGVYWVPVFEILEEAGLEVNLIHAAHLKGVPGRKSDVLDCQWIQELHSYGLLRACFRPGAEIVCLRTLVRHRNNLVSSASRQILLMQKPLDQMNVLVHRAVTDITGKTGMLIIRAIINGVRDPDVLASYRDPRCKKSEAEIACALSGHFRQDYLFTLKQAVETYDHLQAQIADCDKELETTLQTWEPIVDLNEKPLPPRNGRDRRQGNDPKFELRTYLYQSLGVDLTQVDGFQASSVLSIISETGIDVAAWLTVGHYTSWLGLCPGSRITGGKSKSGRTRKVVNRAANAYRMAASSLSRSKGPLGRYYRRMKRKLDEAEVITAVAHKLARIVYSMLKNKTEYDPTLHEFDQDLLQQKAIKRLKKDAKKLGFLIIDPETGECDSPTLNEGKRPSDFNLTAVGVS

SEQ ID NO: 155141 - protein, 531 aa, unidentified
MSKVAQKITKYVGLDVHAATVVAAVAEQTPSGVGEVRHLGTIPNTPEAIRKLFKRIGKAEEMRACYEAGPTGFGLYWQLEEMGIGCVVVAPTLMPRCAGDRVKTDRKDAEKLARSLRRGELPAVYVPSPEQEAIRDLVRLRASAKSDTVRQRHRMTKFLLRHGHREDRTQTVAACLRWAGTIRFEDSTLELVLREYINELDHCAQRVKRLEQAVDEAIERAPLHMRALVAGLQALRGVAKIGAATLVSEVGTMARFPTAKSLMGFAGIVSSEYSSGSKVRRGAITKTGNRQVRTSVVEAGWSYRNPPRLSPVIRRRQKELPQEVCSIAWKAQERLNKRYRHLLSKGKSKNQAVTAVGRELLGFVWQIGRVIEDGLTRGDERYQQMAEAYRPTERARSLSRRKATENQQACCAMAEQSPGGKRVQRKASVQQPTSCTVAEQSPGGKRVQRKASVQQPTSCTVAEQSPGGKRVQRKASVQQPTSCTVAEQSQYIGPTLRKTLEKQLDPKGAEGMKASRAKRGSNVPLSAQLLG

SEQ ID NO: 155142 - protein, 389 aa, unidentified
MLKKPFPVIQSRSGFEQFYASIQEAMKEFGKTEVIVGIEPTGHYWLNLAYFLEEKGIPLVMVNPMHVKRSKELDDNLPTKHDAKDALVIAKLVKDGRFSYPRILHEVEAELRAGSTFRESLTKELNAVQNQMIRWLDRYFPEFVQVFPSFGKMALVVLEKTPFPMDIANQTVEGLMERYRQSETLKCPQKPKVQKLLEVARHSIGITEGQQMARIEIATLVRRYRQLEQEIATLTEELTALAQTTAEYEWLQTIPGLGDATIIELLSEIGSFAQYQDPRQLIKLAGLTLKENSSGQYKGQKRISKRGRKRLRALLFRVMMPLIRHNEAFRQLHEYYTTRPINPLRKKQSIVVLCGKLLKVLYAVCVKQQAFDGERMIQDIFSQSQAQAA

SEQ ID NO: 155143 - protein, 355 aa, unidentified
MNSTQCIGIDISKDTFTACLCLRDSSGDLDFTKVESFANEKTGFNQLMRWAKKYVKTEYSLSFLMEATGVYHENLAHHLHKIKKEVHVVLPNKSHHYFRSLNVKSKTDELDARVLARFGVERNHPSWRPADPVLGELRNLTRYLDQLKRHKTSLSNQQHSKEYSAEMQQHILKSNKKLITATQKEIDATQKQIEKLIKSTPWLKEKIDKLTTIKGVGIQTVATVVAETKGFQDITNAKQLTSFAGLDVVYHLSGTSINRQTRISKKGNPYIRSALYYPGMVASRHNLELKAFYTRIIQRKPAKMIGQVAVQRKLLLLMYALWKKDEVYIPNYKNKTARTKEERAARDRSVADLHC

SEQ ID NO: 155144 - protein, 352 aa, unidentified
MRKDTRKKAELSRVVVGIDVSDKWSQAYVVGEEEGPREARFRTRPESVVKFFGDLAPAQVVLEAGTHSPWMASLLEDLGHEVLVADPSRLALISRGKKKSDRLDAETLARLGAADPKLLSPVRHRGERVRLDLARLRERAQLVRTRAQLVLHVRGAVKSFGERIPSCSTRVFVRKARALLSEGLAEAYGPMLEVIESLTRKIEELDEWLVKRAREGYPEVALLQEIPGVGPVVALTFVLTVEDPRRFGSSRAVAAYAGLVPRLHESGEMRLPGRLSRAGDAELRRVLIQAGHYVLGRFGPDSRLRRWGLSVESRRGKRKAVAAVARKLAVILHRMWVTRGHWDPEHGTHQEA

SEQ ID NO: 155145 - protein, 316 aa, unidentified
MDPCGVGIDVSKAILDLACSTDPRARWQTTNDEAGWAALVTHVRALQPSVVVLEATGGYETGAATALSTAGLPVAIVNPRQVRDFAKALGLLEKTDALDAAVLATFAARIRPTPRPLPDDLQAELQAMVTRRRQLVDMLTAERNRLPLARGAVRKNLLAHVAWLEKQLGKTDRDLRTRIEASPIWRVRDAQLQSVPGIGPTTAACLLASLPELGTLSHRQISKLVGVAPLLDDSGTRRGYRHIQGGRGAVRTALYMATVSAITHNPPIRAAYRRWRAAGKLPKVALVAAMHKLLIHLNAMLKHQASWDPTPAAMTP

SEQ ID NO: 155146 - protein, 343 aa, unidentified
MEYYVGLDVSLKQTSICVVDQAGAVVREGVVDSDPEAISVYVRSKAPNAVRIGLETGPTSTWLWTELKRLGLPVICIDARHAKAVLKMQINKSDRNDAIGIARIMQTGWFKEVHVKDIDSHSVRALLASRALLVKIKRDLENHVRGLLKNLGLVIGRAKFNVFTVRAEELIEGRPELIAAIRPLLEARNAVGQQVSELDRKVMKLARHDAQVRRFMTVPGVGPITALAFKATIDDPARFARSRSVGAYIGLTSRRHASGEVDWSGRISKCGDAMLRSYLFEAAGVLLTRVPTWSAVKAWGMKLAKRNGLRKAKVAVARKLAVILHRMWIDGTEFDWSKKEIAA

SEQ ID NO: 155147 - protein, 344 aa, unidentified
MTDVSILAIDLAKHSFQVCATTAEGVIVFNRKYTRGKLSELLANHPQCLVAMEACATSHYWGREAQGHGHDVRLIPPIYVKPFVKRSKNDANDAAAIAVAVRQPDMRFVAVKSPDQQAQAMLFRTHQTFTRQRSQLLITLRGHLAEHGIIVAKGNAALIAYEKVLEAEPDLVPDLVLEAARLYFHQIAQLNNSIAAFERQMKDTAKRNDTARRLQTMPGIGPINAAAFLAFAPPMESFKRGRDFAAWLGLVPRQHSTGGKTRLGRVSKMGQSDMRRLLITGATVCLRWAVAKGIDPQSWLGRLLARKPAKMVAVAMANKMARALWAMMTKGQDYSGSLVQYAKM

SEQ ID NO: 155148 - protein, 409 aa, unidentified
MRLFVGLDVSSFDMKGCILDQEGSKVDTFTVSNDLPGATVLKERILGLAKGRKVESVKIGLESTSVYSFHPSMFLHYDEDLKVFDTQVFVINPKQIANFKKSYSDMNKTDEIDAFVIADYVGFGRNQMSIVKESQYVALQQLTRSRYHLVKMMTKEKQHFLQHLNFKCSNFSHEVDSSAFGNAMMDLFLERYSLEELAQMPLDELAAFLQEHGKNRFSDPDKVATSIQRAVRSSYRLDKVVEDSMDLLLGTSIELIRSFQKQIKEIDKAITRLMTGLSQTLETIPGIGPVYAAGIIAEIGQIERFEDESKIAKYAGLYWRKHQSGRFTAEDTSLSRQGNEYLRYYLVEAANSVRRQIPEYREFYQKKCLEVPKHQHKRALVLTARKLVRLVDALLRKRQVFAQERCVKI

SEQ ID NO: 155149 - protein, 350 aa, unidentified
MEYIAFDSHKRYTFASVEEHTGAILRDTRIEHQRGAVKEFLSEWKAGTPVAVETIGNWYWIVDEIEKAGMVPQLVHARRAKMMLASVNKTDKLDCHGLNRLQRTGTLPTVWIPPSQIRDLRDLPRTRMVLSKERTRLKNRIHATLAKYAISIEGTSDLFGKRGREELKKSLDLLPPHSRFSVERLLETLELVQKQIDLFEERMKETFSTNRELQILQTLPGVGFILAVVILLEVGDMSRFPDASRFAAYSGTTPRVSSSGGKTRYGQLRPDVNRYLKWAFIEAGNVVCLFHRRQPYRHVSRLYLRIRQRKGHQKAVGAVARHLAEATYWILKKGEAYREPQKKTVSSTKG

SEQ ID NO: 155150 - protein, 349 aa, unidentified
MRFYNQQHRFYCGIDLHARSMYLCILDQAGAICFHQNLPAQPDAFRQAIAPYRDGLVVAAECMFAWYWVADLCRAEGIPFVLGHALYMKAIHGGKTKNDKIDAFKIATLLRGGTLAQAYVYPQGMRETRDLLRRRCFFVRQRALLVAHIQNEASQYNLPAFGKKLTYPANREELQVADHFTDPSVKLSIETDLALIDALDTQIGALELYLTRHAKIDDGNTFHRLRSIPGVGKILALILLYEIHDIRRFADVGKFLSYARLVRGSHESAGKKKGAPGKKIGNAHLKWAFGEAACLLVRHCTRGKAWLARKEKKHGKAKALAILAAKLGRAVYFMWRKREVFDEARVFAS

SEQ ID NO: 155151 - protein, 365 aa, unidentified
MGERLWVGLDVGVHMTSACVLNSAGETMLEQDFATSVATVDAILRPLCCDKMGVIGMEAGSTSIHLARGLRRLEYQVAVFECRQVSAYLGIRKNKTDRNDARGIAEVARLGRGTVSEVAIKSLASQRIRSMLVTRQHLLRMRVGGEAGINALFHLYGGKLPRSTSTAVLRRNTLTEIARLQRDERVDLKEDIEPILDLCGRLRAQIENLDQSLAAMASENEVCQRFMGIPGVGPITALSFYSAVDDPERFRRSADAGPYLGLVPRVRQSGGTVARFRISKTGNTMTRQHLVGAAMVILRATTKESELKKWGLGLRERRGWGKARVAVARKLSSVMLAMWKNGSEFNPSPRKRTPIGNGLAEINSP

SEQ ID NO: 155152 - protein, 429 aa, unidentified
MEEVDELELLVERVAGLDVGKAELVACVRVPHPSKPGRRMQEVRAYATTTAELVAMAVWLRQHRVQRVVMESTGDYWKGIYYLLEAEGLDCWLVNARDVKNLPGRAKTDTLDSIWLAKVAERGMCSPSLVHPEPIRRLRDLTRYRRALVADRGREMQRAEKLLEDAQIKISSVLTEVHGVSGRAMMEALIAGKRDPHTLARLARGRAKVKTAQLEEALRGFFTDHHAVMLRMMLDNIDRMSAQITALDGRIEQAIAPFSDRVDRLVDLPGVDRVAAAELIGEIGVDTSRFPTAAHLVSWAKFCPQTHQSAGKTKRKGRGKGNPWLGGTLGRIVFGLSRTDTFLGTRYRRLAKRRGKQKAIVALGNSLLTVVYHLLADPQARFDDLGPGFYESRINTNRRARNLATQLQAITGQKIVIRDGKAVIAESAA

SEQ ID NO: 155153 - protein, 387 aa, unidentified
MIYLGIDIAKLNHVASATDSDGQILINNLCFTNDHKGFQTLFDSLDTFQKDLLLIGMESTAHYGENLISFLFNRGFQICLINPIQTASLRKTNIRKTKTDAVDSMLIIKSLMMNNYRIFSQQDLNSMQLKNLCRFRQKLIKARTKVKIQLVSYVDLLFPELQYFFKSGIHGKAVYALLKEYSHPDKIATMHLTRLSNLLNKTSKGHFKRSHAVQLKELAAQSVGTKNNTLSLQIKQSIIQIELYNEQLAEMEESIHLLMDEIDSVIKTIPGIGTLNGAMILGEIGDIRRFEKPCQLLAYAGLDPSVYQSGNYKASRTRMSKRGSKLLRYALINAAWQTSLVNQTFKDYFDLKISQGRRHYNALGHVAHKLVRVIHKMMTDDVAFNLA

SEQ ID NO: 155154 - protein, 428 aa, unidentified
MSNQELIRRKQYCQIVKEITGSDQYMVVGIDVGKDNHHAFMGTATGKSLFRKLIFENNLEGFSKLLKTSDLIKTRNNLSKVVYGLEPTGNYHKPLARHLIRCNSNVVLVSGEAVNKNRSLLDGRWDKHDTKCAANIADLVSRGRCLYYDSPSPGIIELRSLLSLRKRLKKEEHSLRMRIRNNLLAQYFPELDRFYSACESETLAIVKWCLEPDQIAGMDFEPFFQMVTRTRRGTAQLLRLRKIHQQAIESVGCPMGSAAAFEAQLLVDKLEQVRQQLKDTEAAIKDVALEFDEYRYLLTIPGFGLYISSSVIAAIANPFRFKNRKQLLRMAGYDLCAKRSGKTSDNAVPVISKKGNSNLRYALFQAAKIASARTEIFRNYFAEMLRGRERERGIITKMRVKLAAKMLIIAWTLMKKREPFDPAYLTIE

SEQ ID NO: 155155 - protein, 342 aa, unidentified
MYYIGLDVHKKTISYCVKEVSGQIHSEGALQATRAELDSWMKTLPQPWAAAMEATIFTGWIYDHLLPHAAELKVAHPLMLRAIALAKKKNDRIDAGKIADSLRCDFLPECHMASTAIRERRQTLRYRNLLVRQAVQLKNKISGLLMETGVNYNRQKLHKVGYFRELMATNQDVTARLRPLLKLCREALERSQKTEGALVRSLSRDPLLAQRVERLKTIPAVGPITALTWALEIGDVKRFPSLKQVISYCGLCGDEKSSANIAKRTRLSKQRNKHLQTVLVEAAKMAPRHSADLALIYEKEKQNGNANRATLAVARKIVAYLLAVDRGERDFVALENYKRTAA

SEQ ID NO: 155156 - protein, 342 aa, unidentified
MNKVAIVAIDLGKHTFHLHAQDDRGHELYRKKFNRAALIQHLANLEPCTVAMEACGGAHFMAQEVSRLGAYTQTHCSASRVRPYVKSNKNDFADAEAICEAATRPTMRFVPPKNQAQQALAMLNSTRDSFIKERTATVNRIHAALLEVGISLAPGFKSIKDLPALLEAHPLPDSIKKLLTRLREHFNYLHEQVKALDKEVECQAAEDDLAVRLMTMPCVGPITSSVLAAELGDGKQFKCGRGYSASIGLVPKQHSTGGKTVLLGISKRGDRNQRRLLIQCARVYLMQLDRQKGALADWVRRLWDNHHSNHVVCALANKLARIAWAIAAHHTEFDAGPGAMNA

SEQ ID NO: 155157 - protein, 347 aa, unidentified
MRKIAYLAMDVHARNIVMGDMNGAGNFLGNRNFGTCEDNIIDALKTVKAKKKLLVMEAGPLANWVARTAAPFVTEVFISDPRENALIYNSSVKKDKIDTQKLCRLLRLNEFKAVYRPENDQRAIFKAAVQHYNDLRDQLKAIKQKTKAMFRQWGVIDVFGDSVYSTSGRDKFLEQVQKRPILLQLKRLYALMDFTAQMKQDAKKSMKSLGRHYPEIKEFKKIPGIGNAGAHTFDAYIQTPHRFAKTNRLWKYCRIGVTERSSDGKPLGFKRLDKAGIGELKAVSYRAFISAMKSDNEVKRFYLKSLQTTHNHTHARLNTQRKILAVMLGIWKKGQPYRAELFLDPCI

SEQ ID NO: 155158 - protein, 470 aa, unidentified
MAQDSCLAGVGIVGVDVGRYQHQAACFSADGQLQWERGVANRLPALLAFVQELAAAPQPLVVAVEMEDDNAAALLRLLHAHGLRVLTCPPHAVKCFRRSILGEDKTDKIDARTIAAFARAGGRVHQAVDHSVPGRDALRVLSREAERLSEQSVALQNRLQALLVGWLPDVVTGGYFSSPSCPTALRFYRKYLPVARLRQAPPDELADDLRRWSRRHVPPHAAQELIRAAQLQPLSPAEDDACHQALLHLLDTLDQTQRQLKALQARLEEAVTEDPAGPALLAEDGIGPRIASTLLGEIPTIHAFTSEAAFARYGGVTPKRDSSGRREGKPRLCRHTNKRLLNAFYRSAVAAVAKGGRDAQYYQRKRRERPGTRKSSSFIALARKRARHLFRLLARHEPRPLTPSGATAGFIALGAVGTRDRDTQAPCRVRQEARAVQPPAGARVAPLRSSILLQATPTSRPAPAAPAASV

SEQ ID NO: 155159 - protein, 388 aa, unidentified
MVIYNAQKQCIFESEIKHSKPEFKKLQEKIHELIDKTGELPEIVFEATGIYSRQLERFMQDNQYTYCLLNPLEAKLQCDSLRIHKTDRSDAHRLALTHFTATRRVFTGTDNLFYQLKSLSRLYSELDSELSIIRSRMHKVIQLTFPELERMFTSKSDLFLNFVQLFPHPDCILGLSKTIIKNRIRANTNKKISNITAEKKAIQILEIAKTSYPAVSQNDVLCDQLKLYARRYQELLHQKECCINKMVYIAEQRAEYDIILSLPGIGPNTAVRLMAEIGDITRFNNNKQLNAFAGIDIRRFQSGKTFFKDKINKRGNKHLRKLLFLIIQNMIKQRRYGQNHIVEYYDKLKTQPYNKCHKVASIACVNKFLKLLFHLITHDIHYDYRLTA

SEQ ID NO: 155160 - protein, 366 aa, unidentified
MKKISTVQADGKEILKEQKLTIGVDLGDRWSFYCVLDEAGKIILEQKVPTAPEAMKQTFSRIPQSRIALETGTHSPWVSRLLTELGHEVIVAHAQKVQLITKSNRKDDRHDARTLARLARIDPELLGPIRHRSVQAQIHLTVIRARAELVSARTALVNAARGLVKSYGQRLPKCGTQQVGRELAAALSTELREVLQPLLKEIESLNERIKEYDQRMEKIAKEGYPEVSLLKQVKGVGTQIALTYVLTIEDPHRFLKSREVGCFLGLKPGRRNSGESEPQKKISKEGDRYLRTMMVQGAHYILGPFGADSDLRRWGLKLAERGGKNAKKRAVVAVARKLAVLLHRLWVSGEVYEPLRNSQKAMRAVA

SEQ ID NO: 155161 - protein, 432 aa, unidentified
MEVIHQRVAGLDVHKATVVACVRLMSNRKVSRDCRTFATTTEGLLALLAWLTECRCTHVAMEATGVYWTPVWKILSEGAFELIVANPAHIKQVPGRKTDMNDAMWIADLLACGLIRASFVPDEAIQELRSLMRTRKQLVREQTRHVQRIQKTLEEANIKLDAIISDIVGVSGRRMIEAMIAGVRNPHQLAALAHRGIKASPKELYDALHGRLTEHHRFLLKLHLGQWDVLDAAIQNVDQEVDGRIERMDAATEDAQLPPFRELILLLCSIPGVSVLSATTILAEIGRDMSRFPTAGHLVAWAGLCPGQNESAGKRKSSRLRKGAPWLKTMLVQCAPAFAGGRLWAAKRQKNSYYAAQFQRLKSRRGPQKAICAVAASIITAVYHMLNNGTSHQDLGADYFDRRSPEARARRLVARLSRLGFEVRLQPLAEAA

SEQ ID NO: 155162 - protein, 369 aa, unidentified
MEKDTTYVAMDDSKRKIVVGILRPTANEPELREIANDPRQIRRLFERLKSEGPLAACYEAGVSGYDLHRQITALGVPCSVIAPALTPRRPGQRIKTDRRDAAKLVRLFRAGELTAIHVLNEREEALRDLVRCRDDLRRDVLRWRHRVLKLLARHGRTYLAGRNWSRAHWRWIREQRFELPPLQRAFEATLFPLEQALARQAELDTELQIVATTAPYREPVATLRCFRGIDTLSAIILLAEIVDFQRFPRPRQLMAYLGLVPSEHSSGETQRRGALTKAGNSHARRVLVEAAWHYRHRPAIGPALATRSHGQPDEIIGHAWRAQQRLHRRYRHLVGRGKRSPVAVAAVARELVGFIWAAMTRPDRQPAVA

SEQ ID NO: 155163 - protein, 312 aa, unidentified
MPCCIGMDVAKAQWDLALRPSGERWAVPNDASGVATLVERVQALHPPRIVLEATGGLERAVTRALATAGLPVVVVHPRQVRDGARATGPLATTEALEARARAHCADVIRPPPRPLPDAQTHELRALRGRRQPLIVLRTAAQHRLAGTSERLTQASAAHMTWLHPGIATLDDESETLLRASPLWRENDDRWQSAPGLGPGCARTLGLALPEWGTLTRQQSAALVGVAPLTCDRGTRRGRRTMWGGRAHVRTVFSMGTLVATRDTPRIKAFSQRLLAAGKVKKVALTACIHTFLTMLNAMLKHRTPWQAREVQS

SEQ ID NO: 155164 - protein, 430 aa, unidentified
MKRGVVGNQEFSIYVGLDWGTEFHRACVLDASGEVVRECQVDHSGPAITDFVRLLNAMIHGKPERIAVAIEVPRGPVVEAFLEGGFAVFSINPKQLDRFRDRYSVAGAKDDSRDAYVAADSLRTDQHCFRRVAVQHPDVTRLREFSRTEENLSGDLRRIVNQLYQLLLRYYPQLLQLNSTPEEPWIWALLEAAPLPQRGARLTVARLKQLLSKHRIRRWTAEQLHDVLVSPPLPLAAGSADAISEHALLLLPQLRLLYRQRQDIRDRIETLLDGMVAQGREGSEFQEHRDVGLLLSLPGVGCLIAANLFTEGSDPLAQRDYLALRAHSGIAPVTRQSGKTRQIIMRRGCNERLRNAMYHWARCSVQHDPLSKVHYARLRQAGHKHGRALRGVADRLLAILIAMLKSGKPYEASRRQNGRSHDDASPANNP

SEQ ID NO: 155165 - protein, 367 aa, unidentified
MKKDNTVRKSSGVKTRASGRLTIGLDLGDRSSRYCILDAQGEVLSEGSVATTKKGLAEVFASKPRSRIALEVGTHSPWVSRYLADLGHEVIVANARRVRLITDSSRKDDRLDAKTLGRLARIDPELLSPIRHRSEQAQADLMVIRARAALVEARTMLVNSARGLTKSYGERLPSCGTGQVGENLAEPLSAPLQGALKPLLAVVESLSERIREYDGQIEQTGKQRYPETELLKQVHGVGTLTALTYVLTVEDPHRFRRSRDAGAYFGLRPRRRESGASRPQLRISKEGDAYLRKLLVQCAHHILGPFGQDSDLRRWGLELAVRGGKNAKKRALVAVARKLAVILHKLWVSGEVYEPLHVRKGGKAVAA

SEQ ID NO: 155166 - protein, 328 aa, unidentified
MCKAGPPREEDAMTTTPVFVGIDVSKDRLDVALRPTSDRWALAHDAPGVATLVARLQGLAPTLIVLEATGGLAVPLTGALAAAGLPVVVVNPRQVRDFAKATGKLAKTDALDAAVLAQFAEAVRPALRPLPDAATQALSALLARRRQLIEMLTAEKNRLGSALPPVHKGIRAHIRWLDRRLADLDADLAQAIRESPVWREKDDLLQSVPGVGPVLATTLLASLPELGTLTRQQIAALVGVAPLNRDSGAWRGKRRVWGGRAHVRAALYMSALVATRFNPPLRVFYQRLCAAGKAKKVALTACMRKLLTILNAMLKSRTRWQDHFALSA

SEQ ID NO: 155167 - protein, 337 aa, unidentified
MQMPYSAVGAAVCIGVDVDSKLLNLTRASAATLDTPVTTIANTATAIKAWLKTLPPGCRIGMEATGKYHRTLAELAVRAGHTVFVFNPAQVASYLRSLRSRGKTDVLDTRGIARYVLNESADCHPYVPPSPFHAKLAVLIGRRHQIDKQRTSLKMSLADVPECAAQIRTLKNAFKRLLATIDAQINAAFAGEHELQLQRQRLCTIHGFGPLVSAAVAARLSRVPYANSDAVVAAFGMDPRPRDSGQFKGRRCLSKRGNAEERRLIYLAAVSACNNPLFRAIRDTLLLKGMSAIQAHCVIARKLLRIAFAVWTSGQPFNPGLIGKAVDSKRAMSPEHL

SEQ ID NO: 155168 - protein, 338 aa, unidentified
MHVYAGIDLHSSNCYLGVINQKQQRLFEKRLPNAMDQVRAALKPFRKQLVGVAVESTYNWYWLVDGLQEDGIRVHLANPAAMQQYDGLKHTDDRTDAIWLAKMLRLGILPEGYIYPKAKRPTRDLLRRRMLFVQQRTSHLLSLRALVERWTGRRLPANRIKQLSPEAAEALFEPAHLALSARCQLQTIGFLTGQIRAIEKAILAAMKLHPHFEVLTSVPGIGKILALTIMLEVGDIRRFPAAGNFASYCRCVKSQKLSNRKKKGQGNRKNGNRYLGWAYVEAANFAVRHSPRAHAFYQRKRAKTKNVVAIKALANKLARATFYLLRDQTSFDEEKLFG

SEQ ID NO: 155169 - protein, 346 aa, unidentified
MAKSSVAVLGIDLGKNSCSLVGFDPAGTVVLRRRARRETIVGLTAKLPACVVAMEACCGAHHLGRLLAAQGHTIRLMSPEYVRPYVKAQKNDDRDAEAIAEAATRPTMRFVLLKAQEQLDMQSLHRVRSRLVGMRTMLMNQLRAILLERGLVFPQGRRKFETAVGILLTDPQAQIGARIQALVAEIREEWASLDGRIEALDREFVAHARADEAARRLVSIPGVGPMTATALRAAVDDGSAFASARDLPAWLGLVPRQHTTGGKPKLLGISKRGNAYLRGLFIHGARAALASLSKVEDATGRWLRGLLARAHYNVVVVALAAKLARIAWATLRKGVSFERQPEPALA

SEQ ID NO: 155170 - protein, 408 aa, unidentified
MHVMYPRCAGLDLGKDELVACARIHGAAIERECRSFGTTTRGLLELSDWLSTHGVTHVAMEATGSYWKAVWHVLEGAGYELLLANAGHIRNVPGRKSDVNDATWIADLLAHGLIRGSLVPPVPIQDLRDLTRTRKQLTREVVQHTQRIQKVLDTANLKVTGLITDVMGVSGRAILRALIAGKTDPEYLADLVQGRLKLKRAQLVEALRGRVSSHHQGLLKLHLGLVEALESAIADLDRRIAEAVAPFRGLIERLDVIPGISLVVAPAVVAEVGLDMTRFATYRHLLSWACLCPRLDQSAGKVNSTRTRKGAVWLKTMLVQAAWAAVKCKNSYLRAQFFRIKARRGPKKAIVAVAASILTAIYFMIRDGVDYNDLGFAHLDGLDRAKATSRLVHRLQSLGYKVRLEVAA

SEQ ID NO: 155171 - protein, 335 aa, unidentified
MKDIIYDHYIAIDWSMINMAIARMTKKSNKITVIDVPSDTVELKVYLKNLSGTKIVTIEETTTTQWLYTELKEYADKIVICDPLRNRLLSEGPKTDKIDASKLVQLLKANLVKEVYHSTDTFLYLRRVISGYEDLVKAGVRLKNQRHALLRACGKKGDKDKKLESHGDQFVLECLDRQIEAYSNEKKGYEEEFKRLVKKYPEIKQQKSLPGIGDINAVKIVSRIVTPYRFIDNGHYLSYAGLIKLDRISGGRSYGKKTPRFCRQLKSVYKSGVLAAIGGNNPINDYYEYLMKEKGYPEFNARHKACRRLAILSLGVFKSGKKYQPYRRDHVEAVN

SEQ ID NO: 155172 - protein, 321 aa, unidentified
MQKDLLYCAIDVSKDKLDVDGAALALPAQLGNDQAGFRQLIKAAKKYPGAVQFVFEATGPYHLGLALALWEAQIPLSVLNPARVRYYAKAQGKAKTDPLDKQVIGDFARSFRPPPTPAPDPVRRELTELLQRRDGLISTRAAEQNRLGQCRHKIIKGQIRRLMAQLAEQIGQIDGLMKKLVNSSQELKAKVQALCQVKGVGHLTAVTLLITLPELGTLGRNRIVRLVGLAPLNDDSGTQKNKRYIQGGRARPRCALYMPALSASRHNPVLKEVYERLLKAGKLKKVALTALMRKLLICLNALLRKLADQHPSPQGLCLAKP

SEQ ID NO: 155173 - protein, 333 aa, unidentified
MSIMNMDPQGGVATGKDRPNAGIDVSKHHLDVCVGAEARRMPNDASGWGELTAMLGAAQADLVVVEATGGYERGAVCAMQSAGLSVARVNPRQARDFAKAMGVLAKTDQVDARTLRAFADVLARHEERAKYITPLLEEAREQLAALMTRRRQLVDMRVAEHNRLEHASAVTARSIRSVIKLLDKQLALLDANIDDHMNRHFGKQRELLDSVKGVGPVTILTLTAALPELGRLQRRQIAKLVGVAPLADDSGQRQGKRSIWGGRAQVRAVVYMAAIVAMRHNPVIRAFYERLVNAGKPKKVAIVACMRKLLTILNAILKSGRPWQPSYPQPVSA

SEQ ID NO: 155174 - protein, 363 aa, unidentified
MKRIKYVGLDVHKEMIQIALIEEGRSDFEMEKSIPNEDKKITNFFRSLASENNTVIACYEAGCLGYGIYRLLTKMGIECKVVAPGKIPRMRSDRIKTDRRDARLLAKMLKANELTSIYVPTEEDESVRDYLRAREDVRIELMTQKQQLSKFLLRNGHKYSERQWTLTHWKWMSEIKWSHNALSLTLDDYRLRIRQSEDRVSSMDKTIEGIAVSPGYAEAVSKLRCFKGIDYLTALSLVCEVGDFRRFNSAKNFMAYLGLVPSEHSSGGSRRQGGITKSGNVHLRRLFIESSWHYTRKARYTGKRLTERRRGQAYEVIQTADNAIHRLNKKFLGMIMRSKNKNTAIVGVARELSGFVWGAMTTA

SEQ ID NO: 155175 - protein, 371 aa, unidentified
MGEYSGAFVAFDVAKTKHAVAVAEGGRTGEIRFVGEIENTPAIVARMIKKLAGRHGRLHVCYEAGPTGYGLYRQITELGHDCMVVAPALIPQRPGERVKTNRRDAVTLARLHRAGELTGVWVPDAKHEAIRDLVRAREAAGDDLRRKRQQLLSFLLRHGRLYTAGRDHWTQAHRRWLARQSFEHPAQQIVFQEGVDAIDDAAQRLRRVDEQLVAIVPSWSMAPVVEAYQAMRGASFLVAVTFAAEIGDVRRFDTPRQLMAFLGLVPGERSTGTTVRRTGLTLAGNRRARRMLIEAAWTYRFPARVSETLRVRLEGLPKPVRDIAWKAQVRLCARYRRLSSAGKKLPVVVAAIAREIAAFLWAIGREVEPAS

SEQ ID NO: 155176 - protein, 349 aa, unidentified
MGEVSTIGVDIAKSVFQIHGVDADGTVVIRRRIGRARVLEFFADLPPCLVGMEACATAHQWARELMKLGHDTRLMPPTYVKAYVKRGKNDSADAAAICEAVTRPTMRFVPIKNVEQQSALMLHRARDLLIRQRTQLINALRAHLAELGLVAAKGREGLHQLVTIVMECGDERLPSNARFACQAIVTQLHAVQIEISGLDKRITQTHRANADSKRLDTIPGFGVILSTAVVATMTDPKAFKTGREFAAWIGLVPRQNSTGGKERLGSISKQGDRYLRRLLVVGATSVINSARARPYKYPWVIELLGRRPTKVVAVALANKMARIAWAVLAKGETYRAPTRSSNTAIAAAV

SEQ ID NO: 155177 - protein, 350 aa, unidentified
MSNHKFAAADVHAATTTFAVLDDSGKFVMETVVETKAESLLSVVKSISGAVHLTYEEGTHAAWLYDLLRPHVAELLVCDPRKNRNNSGNKSDRIDARQLARWLRSGDLSPVYHGQDSTRVLKELVRGYENLVVDSVRTKNRLKAIYRSQGEATSGGNVYGIEKREEWLSKLRSSGLRSRAEWLYSQMESLDDLRGEAEKAVLREAKKHRPCSLVKSVPGIGPIRSATIVAHVATPFRFRTKRQFWSYCGLAVVTWGSSDWEIDVETLLQKRRPVATRGLNRNHNRYLKKVFKGAVHDARAFRPHLDSLVGSGMRESMARLTVARKIAATTLAIWKKGEKFVLSKAVIKSE

SEQ ID NO: 155178 - protein, 366 aa, unidentified
MFIIGCDYHPSVQQIAWVHTETGECGEKRLMHSDGEAERFYRELNRKGVQVRVGMEATGHSRWFERLLAELGFELWLGDPAEISARRVRKQRNDRRDAEHILKLLMEDRFPKIWTPSPENRDVRQLLLHRHRLVGMRTRVMNQLQAIAMNEGLRRKKGLWSKKGRARLESFSLAPWASRRRQELLELLDRLHPMIDELSKAIEQEAERRTEVRLLMTHPGVGSITALAFVLIIGTPERFHCGRQIASYLGLIPCEDSSADHWRLGHLSKQGNALMRFLLVEAAQTVARCEPEWRQYYFHLVLRRGRAIAKVALARKLAVRLFWMWRKGQDYQQVKKFGSHAGQLETPNGVKSITVKLIEHPAPSMA

SEQ ID NO: 155179 - protein, 366 aa, unidentified
MMWQTDNPQVLKKPLESDGRHISPHLTRTVARNLRFRIYKAEKLGTIIVTKIIYKFNIGIDVSKKKLDISFNNNETACYNNDLKGFKQLLKLVSNKQTTRVVMEATGGYERPLAHFLQDHDIAVSVVNAKRVRDYAKALGKLAKTDKIDSHVIRLFSEAINPRTSEKLTESQQSLNSLTLRRSQLVKQRAMEKQHFETVTNKDTKGSINRSLKFFDKEIERVEEKISEIIELNLAIKEKVNLLATFKGIGLVTSATLVSDLPELGTLSNKEMSALVGVAPFCRDSGTMRGKKTIWGGRAHVRSELYMATLSAVRYNPTIKEFYDRLVSKGKPKKTALVACMRKLVIITNSMIRNNMEWNPNHGKLA

SEQ ID NO: 155180 - protein, 342 aa, unidentified
MSEAYDGKQIVGMDLHRRRSVLVRMTEAGERLETVQISNDPEYLRAVMARAGEAPEVVLEATYGWYWAADVLAELGARVHLAHPLGVKMFSYRRVKNDERDAADLADLLRMGRLPEAWIAPPATRELRELVRHRAKLVALRSSLKCQIHAVLAACGVVVPMTDLFGAGGQGLLERVALAPAFQARLDSARRLIEALDFEVELFTKLASGRLRGDPGYTAVQTISGVGPVLAAVFVAEIGEVSRFPRAAQLASWAGLTPKHHESDTTVHRGAITKQGRRLVRWAAVEAIQRTDKHGRLGQVRDRIGARRGNNIGKVAAARELIELVYYGLRDGEIRCLNHRSA

SEQ ID NO: 155181 - protein, 370 aa, unidentified
MKKHSSSEKSPKRGKAALERDPVTIGIDLGDKTSWYCALTGSSDKGVEGSVATTRKAMAQKFGAMPACRVAIEVGGHSRWVSQLLASFGHEVIVANAREVKAITASSRKNDQMDARMLARLARVDPALLRPIRHRGEQAQAHLMRIRVRAALVETRTSLINTARGLAKSAGERLPGCDADQMGMARTEDLPEWLAGQLEPLLVQVEQLTVQIKKCDRELEQIARTEYPETKLLEQVWGVGTLIALTFVLTIEEPNRFRRSRDVGCYLGLRPRSSQSGEREPELPITKEGDGYLRVLLVQAAHRILSRPGPDTDLKRWGWKLAQGGSKSKKAKKRAIVAVARKLAVLLHRLWVTGEVYEPLRNSGAVAAAA

SEQ ID NO: 155182 - protein, 424 aa, unidentified
MNLTQNDRLKQVTSDTLIVGVDVGSKTHFCRAFDWRGFELSRRVFKFSNTGMGFLTFLRWTEELMNKTEMKKVIVGCEPTGCYWLTFQKFLQDHDIQLVTVNPFTVNRSMELDDNSPEKSDLKDPKTIALLVKDGRYSTSYLPSGVYAEIREASVCRDQIMKQHVRLSNQIQGWLQKFFPEYFECYAEWDSTSGLMLLKEAPLPQDILKIGAGGINQIWRDAKVRAAGIKRAQTLVEAAQNSVGLEAGEAARLEIWVLVNDYILKAEQLKRLDEYLEEKVKEVPNVEKLLAIKGVGMSTVIGFIAEVGDIGRFTDPKQIQKLAGLEIVKKSSGKKKGQPRISKRGRRKLRRTMYESARALMQWNPAFQDVFLYYRNRTRKPLGSMQAKIAVACKAIRVFYVVLQTGCDFDEEKFRRDIIRPEAA

SEQ ID NO: 155183 - protein, 309 aa, unidentified
MKQSVVYIGVDVAKANLDVAWAAASRRFPNDRNGHAALVLWIKQSAAPVQLICEASGGYEQALLESLEQNNLAVTLVQAIRVRQYARAAGILAKTDTIDAKVLAAFGAAMQPKPTPPFSAEQKRLRQYEAQRRHLSKVLLAEQNRLAQVSCAELRSLSRSLISKIKKQIDTLDTGIANLIAQDQVLCVKAQKLTAISGVGARTAALLLAQMPELGQLNRGEAAALAGLAPFNHDSGSIRGKRAIFGGRRALRSGLYMAALSAARYNPILSSFYQRLRAKGKPHKLALTAVMRKLLLALNSSLKPEPILA

SEQ ID NO: 155184 - protein, 404 aa, unidentified
MKGPIVSIDVSKGKSDYQAFKNLNVKYTGSRSIKHTKEGFDEIVNLVREMEKKLETEVCVVYEATGVYHRVLKKVLEDNNIKQFIINPLLSAKTRKNDSLRCPKTDKLDPKSIAKTYYSHSLHNSHKQETIYHELRELSRYYEDILVHIRKDKVAFRAQLDIVFPGYDTLYDDLYGPVALAVIEKYPHPEMLQKKKINTVSKVIQSKTCHRQAASDTMADKAIEYSKTIYSGCDKDDIEVLILQRFIKKLKEDMAEAERTIGEMIKLAQELPDFSIIKSIPGIGDNLAARIIAELGDMTRFKKKNELVAFAGLDPRISESGQDDGDHMHITKKGNKRLRCLLYLAVTCSIRLKRDDNSIKDFYIKKKQQSNPMCSKAAKTACASKLVRIIYSMCKTGELYQYNK

SEQ ID NO: 155185 - protein, 366 aa, unidentified
MEKSITPIGTPVGVDVHKRRCKVVEFHDGEIKVRKPMANTREEWREMLTELPPDAEIGLEVSTAGYFAMSVLEEAGWRDRAHWVHTAGIDSHRRQKNDRLDAERLARKLAAHHLDPLPEAWFPPPEIRALRLRARARCWLALLRTQGKNHLQSLLQMQGLLAPGSDPFGVAGQKWLEEQKLPLPLRESLPQIQRLLKLLEEEIEISEKHLQAVEGQFPQLALLRTIPGIGAILAPVIWSEIGSIERFRSAKALANYTGLVASYYDSGDVQVSGPITRQGSRWLRWALVTAANVAIQYRNPFARRYHRLRRGKKPNVAKAAIAHSLARCVYGVLKHGCPYREDRWGRKVGALEQETRDCARSIKTVL

SEQ ID NO: 155186 - protein, 393 aa, unidentified
MKLVGIDIEKKHFFCIMDKDSGEVLLQPSSFSNTKDGFDSLIQKLSSYSKDSILIVMEDTGHYHFALLKYLLEKNFTVALINPKTTDYTRKIQNGITKNDKLDTLTICDVLDTPVRKKQYRITKVNSFDLYEQKQLTRHHHNLKEELNVYTNRLQKCIDIVFPEFNSLFSSKYGIIYMNVLKTFGSAENIASTDIRTIRKCFEIKGRGNRISLTAQQLKDSAKSSIGISSAAEVIKIKHLISQIELINEQLAETDKKIEEFSIQNNSPILSIPGISHFSGTSILAELGEISNYSKPSKIIKAAGVAPYHYESSQYNAQHTAITKKGSPYLRKTLYQIILPVINNNPVFKQYYDLKISQGKGHRCACGHCVRKLLRIIYHLSSTNQQFDDALLR

SEQ ID NO: 155187 - protein, 505 aa, unidentified
MIASVGIDLGRTGRHQVRALDEGARPCDSFAFQHTLEGLEALEQRIFQDGASPVIVFEPTGLAWLPIAMYLRARHPGCRLVRAKLQKVAALRRYLRGGAKSDRIDGLTLAKMPFIDAEHLDEVYLPPAELHALQRLTRQRDRLERGVTSRKNRIGSIVDGFLPGLREAFDDPWSPRARALLGQRLNPFAVVRGTVEELAAFLRETDRRTRGAGAEASRVYQACRQLVALYERCTAAGAVNEEFFNDLQEEVTCELRLMEAEEAEEERVAGRIAELYRRLHPEDHLRTIPGVGEHTASVFLAMVGDADRFRSQKAFANWSGVVPGARQSSNTEGKGLRMTRAGPALMKRALYQAGNIGRRYDPQLANIYYQQMVNHGKTHHQAMGAVMSHLDARVLSVLREGRPYQLRDVQGNPVTSAEALSLVRACYTVPQELRRQRRQRNPKPKRRRNVQQVAGRNERETVSATTCKAAIAPQRGASTVPRIVVYEVSHPDATSARRRHKAPPS

SEQ ID NO: 155188 - protein, 410 aa, unidentified
MLFVGDDWAEGHHDIEIMDASGRALTKARLPEGVEGIGQLHGLIAERIGPDADPEQVLIGIETDRGPWVAALVAAGYRVFVVNPRQTYRFRERFSPSGAKSDAADAHVLADMVRTDSHQLRPVAGDSELAEAIKLLARAHQSLIWDRQRLVARLRAQLRDFYPAALAAFGEELAATEALDLLGQAPDPDKAMKLSLAKITAALRHAGRRKIDERARKIQDGLRSEQLRLPAAVQQAYATTVRSLVAMTATTAEQIDYLERELTERFHEHPDSAIYLSQPGIGVVLGSRVLGEFGDDPDRYAGPKARKNYAGTSPVTIASGCRSTVNARYVRNTRLIDALMRQAMAALAGSPGARAYYDRQRARGLPHNAALRHVSNRLVGILHGCLATHASYDEATAWGHLHRGVRGLIP

SEQ ID NO: 155189 - protein, 465 aa, unidentified
MARKSKNVKSKDHKRLPRSLKTIYANAAGIDLGSREHWVCGPMREDGTPNVERFGTTTPELFRLADWLKEQGVKTVAMESTGVYWIPLFEILDSRGLEVLLVNARHISNVPGRKTDMLDCQWIQLLHACGLLRGSFRPSDDICRLRALMRERNTMVEQRSDWVRRMQKALDQMNVCVHHAVSDITGVTGMAILRAIVEGERDPFALARLRDARCRKSEKQIAEELTGNWRPEHLFNLRQALKMYDQLCTVIEDYDVEILTYITKHQPEQAASHLAPAHGSKSKARALAKRGQEPLRQALYGFSGFDLTTIDGIGVDTASVILSELGLGFTMFPDERHFVSYLRLAPNLSISAGKKVPSKFKPTTCTRVSTALRMAALTLRNSKSALGGLYRRIAWRKGASVAIFATARKLAQLIYRLVRYGQAYLNTGTEAYDARFNQRRLKFYTKALKEMGYTLQPLTENTLTA

SEQ ID NO: 155190 - protein, 372 aa, unidentified
MIVPIMTCERSTLVNSEKYIGLDVHQATISVAVMDSRGKLVMESILETKATTILDFLAGLRGTLAVTFEEGTWAAWLYDLLKPHVAKLVVCNPRKNALLKHGNKSDKIDAHKLADLLRLNDLEPVYHGETGVRMLRELARSYLTIVKDLSRVMNRLKALYRSWAIPCAGRDVYYTHHRSEWLGKIPEAGTRRRAEQLYQQLDMLQHLRQQARGELLTESRKHAITAKLRNIPSLGPIRSALAVALIQTPHRFRTKRQLWAYSGLALETRTSGEHCYVHGQLRRSKKQISIRGLNQDHNHDLKGLFKAAATRASVQPGPFQDFYQRSLTKGIKPTMARLTLARKIAAITLSMWKKGENFDAEKLKSQPLERLR

SEQ ID NO: 155191 - protein, 372 aa, unidentified
MENSITYVAMDTHKKDHKVALHYPGDEQIVEFSVKNTARDIRKMVNKIKKQAPALVEFCYEAGVCGFTLKRQIESLGCHCAVIAPSLIPIRPGDRVKTDRRDAKKLLAMFKAGLLTEVHAPDPEQEASRELTRCRQTVQENLQRIRHQLLKCLTRHGYVYSDGNHWTQKHLRWLRGLDFELPLLRDVFDSYFTEMQHCLQRLDSLGKDVEKLAQSSPYKEVVGFLRCFHGIDTLTAITVITEIFEFGRFSSPGQLMSYLGLTCSEDSSGQKERKGSITKAGNKRVRRLLIETSWHYRHPCHVGKTLRQRRKGQPQWVVDIADKAGQRLRKRYWYLIHHGKTPCTATVAIARELAGFIWSVFHEYEARNKKAA

SEQ ID NO: 155192 - protein, 428 aa, unidentified
MNYTQNRKIKQVKIETLVVGVDIAKKTNFAKAQDYRGIQYGKAFKFKNDKLGFKNFLYWIKVMMEENDKTEVIVGMEPTGHYWLNLGEHLKNKKMKFVLVNPAHVKKTKTLDDNSPTKTDKKDARVIAQLVKDGRYSEPNMLEGLYAELRVAMTHRERLNKDLMRIKAKVHQWIDKYFPEFLDVFSKWEGKASISTLREIPLPDQVNKLKIEEIVKVFKKGAKRAVGKKKAKKLKVAAKRTVGIKKGLKMAKIEIKNLIIQYKMLNTQKEELEKEIEEMVIDLPGAKEMESIKGVGIMTVAGFISEIGDIRNYDHPRQIRKLAGLNLVENSSGKHKGKTKISKRGRPKLRSILYRVTWPLVGQNKEFRQLHEYYTTRDKNPLKKKQSLIVMACKLIRVFYALGKKRVKYDGEKLMKDIKRNKHVEKVA

SEQ ID NO: 155193 - protein, 345 aa, unidentified
MTEAYDGRQVVGMDLHRHRSVLVRMTEDGRKLETVRIANSPAALRAVIARAGTNPRVVVEATYGWYWAVDVLAAAGAEVHLAHPLGVKAFSYRRVKNDERDCADLADLLRLGRLPEAWIAPVEVRALREVTRYRHKLVQQRTSCKDQVHAVLAKSGIPVTRSDIFGPGGGIWLDGLPLPQPYAGKVASLRALTAVLDGEIARLEEQAAGLLAGDRGYAAIRQLPGIGPVLGAVITAEIGDITRFRTPGQLASWAGLTPRHYESDTKVIRGHVSKQGSRMLRWAVTEAIQRQPAGTRPRQVKDAIIDRRGAGARSIAKTAAARILLTQVFYGLRDGHIRRVTSQAA

SEQ ID NO: 155194 - protein, 341 aa, unidentified
MEKVTTIGLDIAKQVFQVHGVNGAGAIVCRRRLRRDDVVGFFKALPPCLIGIEACATGHHWARVLMALGHEARLMPASYVKPYVKRQKNDATDAEAICEAVTRPTMRFVPVKSEEQQSVLMLHRVRELLIRQRTMLVNALRGHLAEFGVVTRQGIAGVGKLIALVEDGDHDVIPPLARSALLLLVGQLREVHEKVSEMDRQIHAWHRSNELSRRLETIPGIGPITASAIAATVTDASLFKSGRQLAAWIGLVPRQNSSGGKDRLGRISKQGDPYLRRLLVVGAHAVLRFSRNGKTAPTRWAAELLAKKPYNIVAVALANKMARIVWALMATGRRFEAAPAL

SEQ ID NO: 155195 - protein, 346 aa, unidentified
MSMIKVVGIDIAKSVFQVCVWMVDGSVAWNKKISRSKLLDTIRQFEPGTLVAMEACATSHFWGRTISSMGYCVRLIPAQHVKAFVRSQKNDANDALAICETALRPGIHFVAVKTTEQQDIKALRNTRQLMVEQRTALANQLRSLFAEYGVSLPAGILHLQQQLPEVIEDASNELTFTLRRLLYSLREDMQALNERVTGLDKEITALSSQQTAYRHLLTIPGVGPLIAAAFISEVDAGQFSSGRELSAWCGLVPRQHSSGGKQRLSSVTKNGNRSLRTLIIHGARSVMRCVKKRDDCMGLWLQRLEARRGFLKTTVALANKLTRIIWRVLVLTDQVDFNMSKAFSMI

SEQ ID NO: 155196 - protein, 314 aa, unidentified
MGTKRVYAGIDVGKKGLDIAVLPSEEAWHAGNDAGGIAQVVRRLRKLKPQLVVMEATGGYERAMAKALHEAGMPLAVMNPRQVRDFARASGQLAKTDSLDARLLALFAQRMEPPAQPAPDEKEEALGELAARRRQLVGNITAEKNRLEHAQGAVRDSIRSHIGWLQGELKRIEGSIKQALSLAPELKRKAEQIQTVPGAGPVLATTLVTELPELGKISGKELKALVGVAPLNRDSGQMKGKRTIWGGRANVRAVLYMATVSATVWNPIIRTFYEHLLAKGKAKMTALVACMGKLLLILNAMLRTGKNWNASYAQ

SEQ ID NO: 155197 - protein, 471 aa, unidentified
MSTTPPSSKQRRGVRIVSKTKVPLPPQLKRVNLDAAGIDIGAEEHWAAVPPGRDTEGQDVRRFGAFTGELCALADWLKQCGIQAVAMESTGVYWIPLYELLVERGFEVRLVDARQAKNVPGRKTDVLDCQWLQELHTYGLLRGAFRPVDQVCILRSYLRQRSMLVAYASHHIQHMQKALEQMNVKLSHVVSDITGLTGMGIIKAILSGERDPVKLAKLRDPRCKSSEATVARALEGHYREEHLFALRQAVELVEFYQQQMTACDRQIEACLQQFEEKSSETPVTTRRRKRRRGGIAFDACSYLYRMTGVDLTRIDSIEANTALTVISEIGLDMSRWPTEKHFGSWLGLAPGSKVSGGKRLSGRTKPSANRAAAALRLAAQSLNQSQSALGAYFRRLKARLGAPKALTAAAYKLARIVYRMLKYGAGYVDQGEAAYEERYRDRLLRNLKRRAAELGFQLTAVELNSGQAALT

SEQ ID NO: 155198 - protein, 375 aa, unidentified
MEQATKIHVGLDVHKDSITVAAAEPGRSAARVVGKLVHDVNKLVKVLDKVGPPQRLHVVYEAGPTGYGLLRSLRARGYPCDVIAPSQMPKRPAAARVKTDGRDSVALAECSRAGQLRAVWVPEPGDEAIRDLTRAREDSINTRTAARQQLKSFLLRHDVRYAGKTSWSKMHYRWLAELNFGAGAAQTAFTEYLLAVQAADERVQRLSQALQASIKGWRFEPVVAALQALRGIDFVNAVGLVAEIGDLSRFEHPRKLMGYLGLVPSEHSSGERVRRGSITKTGNAHARRLLTEAAWNYRFGARISRRAQLRQEDLSEPIRAIGWKAQLRLTKRFATLKARGVQINKVCVAVARELTGFIWAIGTLAQQQAAAQPAP

SEQ ID NO: 155199 - protein, 352 aa, unidentified
MPKRTRIVIGGVDTHGRTHHAAVLDEQGRLLGDQEFPANRGGYRQLLSWLGHHGQVGVVGVEGTGSYGAGLARYLLDQQVRVVEVDRPDRRIRRQRGRSDPIDAEAAARAVLAGTATAAPKRRDGIVESIRALRTARSGAVKARTAAINQLKALLVTAPANLREALDGRSTPALIAACGRLRPDQNALADPAHATKAALAMVAQRIQLLEAEITLADQRLAILVGRAAPRLLGLLAIGNDHAGQLLTTAGQHPERLRGEAAFAHLCGVAPIPASSGKTHRHRLHRGGDRDANRALHLAVVVRMRFCPRTRAYVQRRTREGLSKPEIIRCVKRYLAREVYHALVADFEALHTT

SEQ ID NO: 155200 - protein, 345 aa, unidentified
MEPMYYIGLDVHKRKISYCVKDGSGKIYAEGSLPATRLDLDLWMKTLPQPWSAAMEATMFTGWIYDHLKPHAAALKVAHPLMLRAIAAAKKKNDRVDASKICDCLRCDFLPECYMASTAIRERRRTLRYRNLLVRQMVPMKIKISSLLMEAGVSYNKQRLHKAGYFRELLATNPDIDEGLGSLLRLCRETVVRLQKAESAMVRSLEHDSLLMDRVERLMTIPAVGPITALTWALEVGDVQRFSSIKKAISYCGLCGAEKSSGSTVQRTPLSKQRNKHLQTTLIEAAKMAPRNSPELAMLYDKEKQKGNANRATLAVARKLVAYLVAVDRRQKEFLTVENGNRTAA

SEQ ID NO: 155201 - protein, 324 aa, unidentified
MTTQSIGVDVGKTELVASLRRSDGKTDASTMFANSNVGLKQFLVYLKTNTVSSDDPILFESTGPYHWMAARTLADEGYFVKVANPLHTKQIARLSIRKRKTDKIDSQNLAFLASQNYGYRFVETEDMARKKALIRHYWKLRQSATDHLRHSQYLKNYRGIKDESVTKFMIKRCEALKKEIVKDWSKGNDIKYLDSIPGITPFLGATILSELLPLERFKTIDQIVAFSGLDPSIKQTGGKAGHHGHISKRGSPTLRETLFLAAFGSFQREPMKSIYVRYKARGLHHNTVLCILGRKILRIAVSLLKKRRVFDPKKLSTEESLTGT

SEQ ID NO: 155202 - protein, 312 aa, unidentified
MAKIICGVDVSSKTLDARIGQDGPCRSFDRTPEGIQALAAFCKSHDVEFVAMEATGGYEKLPFGLLWLAGVPCAILNPRSVRRFAEAMGILEKTDEIDAGVIAHFAEVKRIVPQPPASATQQELEALVTRLRQITDLRASQTNQRRLVTDARVLEDIDELVALLNRQTRALEAKIAQSIDADPLWKALDAAFRSIKGVADRTVARLMADLPEIGTISGKKATKLVGLAPLANDSGKLKGKRSIFGGRAHVRSILFVVAELVRRHEPDFRKFHETLTAAGKPKKVIRVALARKLLVRLNAKARDARKELGLAV

SEQ ID NO: 155203 - protein, 350 aa, unidentified
MIIIGCDYHPGFQQIAYVNTDTGELSEARLGHKEQAEQFYYDLKTHGVPVRVGMEASGHARWFERLLAELQFELWIGDAAAIRTKRVRKQKTDRQDAQLLLGLLLEDRFPRIWVPDAENRDVRQLLWHRHRLVQMRTRVMNQLHVVALNEGLRRKKALWRPAGRRELEALSLAPWASRRRQDLLDLLDRLTPKIHELNEKLEQMVARRPVTRQLSTHPGVGPLTALAFELVIGTPERFACAKQIASYVGLVPAEESSGDRRRLGHISKQGNALLRFLLVEAAQVTVRSDAQWRSQFFHLAMRRGRKIAKVAMARKLAVELYWMWRRGWDYHEMQQLGSHAGAPGNRHGVQ

SEQ ID NO: 155204 - protein, 413 aa, unidentified
MDVLHPRCCGLDVHKSSISACILLREAGRVQKHQRRFGAMTQELRELAEWLRQFGVTQVAMESSGVYWKPVWNILEGQFTVVLANAQHIKNVPGRKTDQKDAEWIAQLLQYGLLRASYIPCEIIRDLRDLTRMRASRSQEASRISSRIQKVLEDANVKLASVATNVVGKSGRAMLEDIITGEDNPEHLASLALGHLGVKIPQLRLALEGKIRSHHRFLLRRLLDQIQFVEHEIALLDERLEDIGRQRPDLAQAVARWDTIPGVDRVAAWALLAEIGDNMAQFPTAEDLASWAALCPGNHESAGKRLRGATRQGSPWLCRMACQCAWAAARTKNTYLSSQFRRLAARRGKKRAIIAVAHTLIVIGYHLHKNHSNYEDLGGNYFDRLHSDGLRRYLVKRLEQLGHKVTLEPIEAL

SEQ ID NO: 155205 - protein, 335 aa, unidentified
MKKIHVGIDISKEKCNLCYRSGLEIVCEEECANDVKTLKRAFKAALKALDASMEEVLVCAEYTGRYIYPLTVACQELDVFLWMDDPTRIKNSMGLTRGKNDVIDAARIAEYAYRYSDKAVRYCIPDAALVSMKNLLADREFLLIDRKRYQSQLSDQKKYMAPCDFKHKNSRWKKVIKSIDEQIAAIDAEIESLIAANPVLARQKELLVSIDGIGDRIAINMIAITGGFTRFQNARQFCSFAGLTPYKYDSGTSVRSKAKISKRANQTMKALLHMSAVNVATRMKAGEYKDYYERKLKEGKHIMCILNVLRAKLVHRMFSVIKRDTEYTKEYKPAC

SEQ ID NO: 155206 - protein, 321 aa, unidentified
MTYVGIDVSKATFVIAYSSAKSSETKTFKNTTKGIREFIRTISPKENHCVLEATGNYSMLLVYLLSKAGVTVSMENPLKIKNFARVMLSVVKTDVIDARLIALYGERMQPAPFKLRSDSLLLLKQKRTVLRQLKKQLTANRNLEGSLKVLPFIDSKCKKVLEKTIKFLEKQIEEMEEELTSLAEIEYKKQMNLLTSIKGIGATLAAALIIATGGFTYFDNAKQLTRYLGLSPTYQQSGTSVNVKGHINRNGDAYLRSQLYIGAMASLRCNTECKACFDRLRSNGKPGKVAIVAVANKLIRQAFAVVTHEKKYIDGYKSVKP

SEQ ID NO: 155207 - protein, 352 aa, unidentified
MRKSTCETMGIDLGDRFSHVHALSARTGEVLGEQRVRTRVEDMEELFAGVPPLRVVIETGTHSNWVARLAARHGHDVVVGQARRLRMIYENPTKSDAVDARMLAELGSTHPELLHPVKVRSETVQAHLAVLRARENLVTARTQLVNTARGLVKSLGDRVPKCSTRAFPRTAWTSCPKILAPALRPLLASIAALTRQIRVADREVSRLMREVYRKETKRLLEVPGVGELIALAFVLVVGDPSRFPKNRDVGAYLGLVPRRDQSGESDPQLPITKCGDAMLRRLLVQGAQYVLGPFGPDSDLRRWGQARVERGGRNAKRRAVVAVARRLSVLLLALWKTDSAYEPLRRSTPAAT

SEQ ID NO: 155208 - protein, 452 aa, unidentified
MPRARKTKVQRVQPVINPHAAGADIGAREIYAAIPVELDERPVRRFDTFTEDLQKLVAWLKERGITTLAMEATSVYWIPLAELLEAAGIEVCLVNPRHVKNVPGRKTDVVDCQWLQYLHAVGLLRAAFRPPVHVRAVRALWRHRDALVRHSAWHIQHMHKALDQMNLQIHHVIADITGKSGTAIIESILDGRRDPATLAELGDKRLRASKATLRAALTGDYREEHLFCLRQAYAGYQFVVKQIAEVDTQLEAKLAAMAAAPQPATTASAPKPRPSASNRGQPAYDAGKLIARTLGVDLTTIPGINVITAQTLWAELGSDLSAFKSGKHFASWLSLCPDNRVSGGKVLSAHTKPSANRAARALRLAAQGLHHAKNELGDFYRRMRAKLGGAAALVATAHKLARIVYAVITSHQPYKPELHAQAEQRRLARSLQHLRSKAKILGFQLTSIQPNT

SEQ ID NO: 155209 - protein, 314 aa, unidentified
MNTQGVVAGIDVSKDWLDVAISNEASRVANDAAGIGALIERLRSADVQWVVMEATGGYETQAASAIAGAGLRLAVVNPRQVRDFAKATGRLAKSDRIDARVIAAFGEAIEPQIVRLPDEQTRELQGLLTRRSQLVGMRAQESNRLALMEGAMRKQIKSHIAWLDKAIDEVNTDITARLRKSPVWREKDELLRSLKGIGPITSSTLMASLPELGQLDRRAIAALVGVAPFNRDSGTFRGRRAIWGGRAQVRQMLYMAATAAIRFNPVIKPFYERLIARGKPHKVAIVACMRKMLTILNAMTRSNTHWTPALHGAN

SEQ ID NO: 155210 - protein, 343 aa, unidentified
MDYFAGLDVSVKDTSVCIVDDTGKIIREVKVASEPDALLAVLTNRAYHFKRIGLEAGPLSQWLFSALAEAGLPVICVETRHMRAVLKAQINKTDRNDARGIAQMMRVGLYRPVHVKTLRSQKLRMLLTHRKLLQAKAIAVENDLRATLRNFGLKVGVVGTVKFEARIKELIENFPDLVALVEPLLVVRRVLREQISILQRRVLAAVRNDEVCRRLMTVPGVGPIVALTYRATVDVPARFRKSKSVGAVFGLTPSRDQSGERDRPGAISRCGDEMMRTTLYEAAQAMLFCSAKWSWLKAWAMKIARHRGIKRAIVALARRLAVIMHRIWIDGTEFRWTREAAAA

SEQ ID NO: 155211 - protein, 347 aa, unidentified
MTIVEAARTVTGGIDTHGETHVAAVLDEVGGLLATESFTAHLDGYAALLSWLAGFGVVGKVGVEGTGAYGAGLARFLARAGVEVIEVDRPNRQDRRRTGKSDPIDAVEAARAALSGRANGHAKSRDGAVEAIRVLVVAKRSARQARVKALTQMRQLTFTAPDQLQCRIKGLPAPQFIAAAQSLRPTTRSADPVMVATKASLSSLAHRIGDLDEEIAALDARITPLLQAHAPELLEIYGVGIDTAATLLVTAGDNPERLRSEAAWAHLCGVSPLQASSGKVTRHRLNRGGDRQANRALWVIVISRLASDPKTQAYMERRVKEGRSKREVVRILKRYVAREVYRSLPRG

SEQ ID NO: 155212 - protein, 372 aa, unidentified
MGTTDRYHQGQADRLTAEGRRAPVSPEPEQLMGPTRPDNARKGGWNDKRQMEARDMDKVYAGVDVGKATLEVGIYGERWVGQYNYDVAGVAQLIGAVQGREVGLVVVEATGDLERRLVTALVVAGVPVAVVNPQRVRYFARADGQLAKTDRLDAQVLAKFGWAMQPTLYEAQSAEGEELSAVVTRRKQLVEMLAAEKNRLNTATGSVRRQVEAHIRWLEEEVKALDEAISHLIQTAPQWQERDALLHSVPGVGAVTASTLLAELPELGTLSRQKVAALVGVAPINHDSGRRRGERHILGGRATVRRVLYMAALTATRVNPVIRSFYQRLLAAGKCKKVALTACMRKLLVILNAMLRDHRRWNPDLTLMPSPA

SEQ ID NO: 155213 - protein, 448 aa, unidentified
MSQTKRSRKSRDFSTVNPAAAAIDIGATIHVAAVDPNRDKEPVHTFRTFTDDLYRLADWFAGCGIRTVVMESTGVYWIPVFEILEQRGFEVMVVNARDAKHVPGRKTDVSDAQWLQRLHEYGLLRASFRPQAEIAGLRAYLRQRERLLDYAAAHIQHMQKAMMQMNLQLHHVVTDVTGLTGMAIIRAIVAGERDPNVLATHRDRRCHASVETVCQALVGNYREEHVFALTQALELYDVYQTKVTACDKQIEAILKRLKKNAAPPAAKLLPVRRRTRQPNAPAFDARAALHAILGVDLTQIAGIGPSVALKLVGECGTNLAAWPSAKHFTSWLALAPHNKISGGKVLSSKTRRTSNRAASLLRLAAGTVGRTDTALGAFYRRLSARVGKAKAITATARKIAVLFYNTLRHGMSYADPGNILRRPLPAAGAAQSATTGKVARVRPDRSAA

SEQ ID NO: 155214 - protein, 347 aa, unidentified
MRFYTKQHPFYCGIDLHARTMYVCILSQDGEIVLHRNMPASPDALLKAIAPYRDNIVIAVECIFTWYWLADLCVQEGLPFVLGHALYMKAIHGGKAKNDKIDSQKIAVLLRGGMLPQAYVYPAEMRATRDLLRRRLHLTRQRAELLAHIQNTNSQYNLPEIGKKLAYKGNRDGVAERFPDPAVQKSVEVDLALIDYDDRLLSDVELTLVQTAKQHNAQTLYRLQSVPGIGKILRLVLLYEIHDIARFPRVQDFVSYCRLVKCAKESAGKRYGTSGAKIGNAYRKWAFSEAAVLFLRNNPAGQKYLARLEHKHGTGKALTILAHKLARAVYYMLKRDTVFDMQKFLNG

SEQ ID NO: 155215 - protein, 345 aa, unidentified
MKNTIAGVDLAKNVIQVCLVNNNKVISNEELTSQQFMIWLHNSKPITIVFEACSMSNYWKQEALKRGHDARLVSARLVSMIRQNQKTDRNDALAVAQASQLTDVNFINGKTFKQQEMQSIMRMRELSVKHRVAVQRQISALLLEFNIRISPKAGGLSGVVESVLEDAENEFTTAFRLALDATWRCYLVHVENIKAYEKALELAVKDHPQCQKLFALEGVGLINAVNLYITIGCHDSGVFKSGRDVAACIGLTPVQHSSGGKTKIGSISKRVRNGSLRSCLVNGSMSMVKQVDKREPRTEKERWLKQLIDRKGKLCAAVALANKTVRTAFAMLTQDTAYKTQPLVA

SEQ ID NO: 155216 - protein, 351 aa, unidentified
MDYRVYCGVDFHARQQTISCLTTEGGVVSTHELKHQNKAALKAFYAQFRRPVLVALEASGYSPWFEQMLEELGHEVWLGDASEIRRRARRRQKNDRRDAELILDLLLHDEFPRIHRPSVKSREILRMLRYRHKLVQMRTIIKNSLQALSIQSGLSLRARLFTGAGLDQLRSLTMSPVMQYQRDQWLVALEALNQHIVAATNWLGEQAADDARVQRLRTHPGIGLLTGLALVHTLEPVIRFRNQRKVAAYVGFDPQERSSGEKKRYLGISKAGSRVLRYLLVEATHTAIKSDPDLKRFYLRLLHRHGQAKAKVAAARKLLIRSYILLRDHLDYAEFGRRAVAARLARLASKA

SEQ ID NO: 155217 - protein, 355 aa, unidentified
MKYYTSTTQYNCGIDLHARQMYVCVMDRQGKKLVHTNVKNNDFGFFLKLVEPYKHDLTVCCECMFGWYWLAEACQAAGLTFVLSHALYVKAIHGGKNKNDRIDSEKLTHLLRSNLIPPSYVYPSEKRPLRALLRQRLFYVWRRAELLARIYSHQLAHNRTPAKQTRRVRDSWEEQLLAAEDNPLRQLALKNDLAMIKHFDHQISQLEEELQRQTKKVASREYALLQTVPGIGESLGLTILYEVGDIERFPTVKDFLSYCRLVKGTVASAGKIKGLRGAKLGNPYLRWAFGEAAVIAKRDHFLIRPLAQRLEQQMGGNKFKANTVVAIKMARAVYFMLKNKTVFDPERLVAALAKK

SEQ ID NO: 155218 - protein, 368 aa, unidentified
MSRLAKVDKFFKNVNLTSDDEVFVGVDVHKKSYHVALFLNDMPAIDFQMASEPKQLNKKLQPIACAIKDIVYETGPTGYGLARNLIKNNLPASVVATSRIPRPAGAEDKTDRLDSRKLAEYSAKGLLCPIRIPTPKQEADRQLYRMRHRQALQFAKVKVQIKSFLLMHGIKEPDGLGNWTIAGVGQLRDMCLIDTLRLSLDELLSDYDYFNNRIKVLNKILADNLNKGVLGQRMDLLKTHPGVGPVVACQFTTELYHYRDFSSTRQLYKYLGLSPRVSQSGEKSSTGSINKAANGRLRNNLIQAAWSWVLTDIEAKKCFYRICDNCGGIRQKAIVAMARKMSGHLWAMLMNDQPYDKNKAKCRHNNKR

SEQ ID NO: 155219 - protein, 426 aa, unidentified
MAVVMIGGDPHKASHTAVAISAAEEPLDQLRVRASAVQAERLLEWAQAWPERAWAVEGAGGIGHLLAQQLLSAGERVLDVAPKLAARVRLLATGNVNKNDPNDARSVAVAALRSAQVRDVRRDDHAAVLKVWSKRYRDLGRARTQVACRLHQVLCELIPGGVPGEITAGQAARFLGSVTPAGAVEAARWELAAELTEDLRGTDARIRETRKKAAAAVAAAGTSLTTLFGVGPVIAAAVIGDVRHVSRFPGRDRFAAYNGTAPIEVSSGGRKVYRLSRRGNRRLNHAIHMAAVTQIRYRHTKGRAYYDKKLAEGKTPKEALRALKRQISDAIFACLQEDARRAAAAVAKSPGGQPGNHSATRAAGSHPDHRLFGPATPGPATHPTTTAPFPAPLPSRASEQPGPGPGAARPRSGARRASSTRPPASR

SEQ ID NO: 155220 - protein, 414 aa, unidentified
MKVVYDRCAGLDVHKKTVVACRITRTETGEWRMETRTFGTMTDDLLLLADWLRIAGVTQVAMESTGIYWRPIFNILEGEFAVSLVNAKHIKFVPGRKTDVKDAQWIAELLQYGLLKASFIPDAPQRELRELVRYRTHLIDERTREINRIQKVLEDANLKLASVATDIMGVSAREMLTALIAGQDDPAILAQFAKARMRPKIAELERALTGRVKDSHRLLLKLHLEHIDDLNAKITALQGEIDKLLPPFDQADLLARLQTIPGVGEKVAQIIVAEVGIDMSRFPTAHHLAAWAGLTPGKKESAGRNYSARTSKANRYLKASLVQAATAVGRSHDNYLAAQYHRLAAKRGKKRAAVAVAHSILVIVFHLMRRGTSYIDLGADYFDQRKSETIQNQLVKRLERLGLKVTLEPTPTAA

SEQ ID NO: 155221 - protein, 345 aa, unidentified
MKSTLIAVDTAKLVFEIGESDHLSRISRRLRVNRGTFSEYIAKHDKAEFVLEACGGAHYWARQMIAAGHTVRLLPGQYVRAYRQRNKTDRADCRAMLEAARNPDILPVPVKSETHQAIQGLHRCRSAWMETRTARINTLRGLLREFGILLPVGAKKALALLPEALDDTALPSALRPALCSLLDELRSLQIRIDDVEAHLEAVCQQTPAADHLRDIAGIGLLTATALYASANDARHFRNGRHLASWLGLTPREHSSGNTRRLGSISKKGDRYVRMLLTHGARSVLTTAERAQTAGKPLNNLQRWALALKQRIGFNKATIAVANKLARIAWATWRHGTAFNPDQAAA

SEQ ID NO: 155222 - protein, 403 aa, unidentified
MNSVGIDISKGRSTIAVMRPFGEVAISPFEVRHTDSELSELARRLKSLNGETRVVMEATGNYHASVAKLLHNAGLYVSVINAKLVHGYGNNELRRVKTDRKDAVKLANYGLDRWLTLPRYIPEEDTRLLLKNCYRQYRQYSKVQTLLKNNLISLLDTVFPNANRLFSSPIRGDGSEKWVDFVAEFWHCKCVCERSERAFINKYQRWCRKHGYNFSETKAQTIHAVASGHIGVMPKSETTKLLVEQAVAQLRATSAALAALKHEMQTLASQLPEYPVVMDMFGVGPTLGPQLIAEIGDVRRFYSKKALVAYAGLDAPPNDSGDVTGRHKSMSKIGASSLRRTLFLVMSVYLQTAPLDEPVCQFMDRKRAEGKPYRVYMMASANKFLRIYYATVKAYLESLEHTA

SEQ ID NO: 155223 - protein, 340 aa, unidentified
MDNITILGIDIAKSVFQLAGLNKNGKKIYSERVSRKDFVETILKQSKKITIVMEACSSSHHWARRFSELGFNVKLIAPQFVKPFVKGNKNDAHDALAIAEAASRPDMRYVPIKSIEQQDILSIHRARALMVKTRTALANQIRGLLAEYGIIIPKGITRLRAELPYILENKDNELSVSICHLLNTIYENFKNIDKQILAYEKQIKAIAKKEPRCQFLLKVPGIGEMTATALVASVGNAAEFQNGRQMAAWMGLVPKHSASGNKQKIYGISKRGDRYLRTLLIHGARAVIQRCQNKVGKRYEWIQNKYATLGYTKASVALANKMAREAWAVLNKGDKFNFSF

SEQ ID NO: 155224 - protein, 437 aa, unidentified
MSEEKSLELRVSVDVGYRRHSVAMGLSSGEVLEEFEIDHRIEGFEEFFSRIEKQRKKKNCAVAVAMEGYNGYARPLDSMVRQRGYRLYNLNNLKFARFKEIFPAAAKSDRIDARKGLELFQLSDHLPLAKEVLQEVSGTPPENEVLKRLTRRRRRSVNERVRVVNSLQADLQAVCPGLLEITVEASNQWFLNFLLSAQTLPQLARLRRNTLLKIPSVGVKCVSIIEGWQKCAHFSQEVEWVGEMIQEDANRCLDLDGKIKRLEAKIAEVAKGSKIAKILRSIPGFGAVCTSELAAEIGTIERFASEASLSLYLGMSTLDNSSGKYQGTKTPKHVNTRAKAAMMIALDRHRKYVPESQKYYEKKRSEGKKHNQAIRALGRHLSRIIYKMLKEERDYEIRPEKSNTKTKVASRSCVKTQIRRPKISGKGKNTKIYQQSA

SEQ ID NO: 155225 - protein, 382 aa, unidentified
MPDGIRWVGLDVHARESTLAIFDQASGEVTTKRVVGRPHELLAWLRDVERPARMVYEAGPTGYGLARRALAEGIELAVCAPGKTERPPADRVKTDKRDAVRLARLLAGGELVLVTIPSVEREQLRDLVRCREDIRHDLARARHRIGGFLLRREIYWEGPGESWTRKHRAWLTSVRFADHASQATLADYLHAHDVLIARRDQVEADLGKLAITAPCAQTVARLRCLRGIDTLTALGLCSEIGEWERFDHPDQLSAYLGIVPSEHTTGRQRRLGAITKAGSTHARRLLVEGAYHYRRGAVVGAALERRQRGQPPEIINISWKAQRRLNARWRQLKDARRKPAGVVAVAIARELAAYCWEIATYPITTPAPTPTPTTRKRLTNSR

SEQ ID NO: 155226 - protein, 359 aa, unidentified
MDNNEDGTRHVVGGVDTHKDLHVAAVVDGQDRVLGTACFATTRQGYRQMLVWMRSFGDLRRIGIESTGSYGAGLLRFMQQAGIDVLEVTAPDKHDRRRRGKNDDLDAQNAAHAALAGRRTVTPRSRDGMVESLRVLTVCRKTAVAARRVAIQIIQTTIVSAPDGLRDTLRSMTRMQLVRTLAAWRPDLTAYREVEAAYRISLKSLARRYLELHDEIADLDAMISAIVDDLAPELIARNSIGYTGAAQLLLTAGDNPERLRSEASFAALCGVSPVPASSGKTIRHRLNRGGDRAANSALHIIAIGRIRTDSATKAYVARRTSGGHSKLDAIRALKRYIAREVFHIITRRHREINQTRIAA

SEQ ID NO: 155227 - protein, 334 aa, unidentified
MKKFEFFLGIDISKNTLDYCLLDDQCKVLEKGKVNNEPVSLSKFFLKFENEYCCKTTLLIVFENTGIYSKPVARFLNENKWCYSEVSALEIKRSKGVSRGKSDRVDAHQIAQYGFRNLDKIMLCTEPELIHQQLKILNTEREKMLSAISSFSRTGEAEEFLGKEVFKVVKTHNRQTLSALRKQLKQLDDKISALLRSNEDLKKKQELLKTIPGIAEVGSLYLLLATKGFTRFKNWRKFACYCGIAPFEYSSGSSIRGRNRVNPLADKKMKSLLHLLALTSIRHDPELKLYYERKKEEGKHSLLALNNVKCKLVSRIFAVIKRETPYVKTHQYAN

SEQ ID NO: 155228 - protein, 475 aa, unidentified
MNVNGKRKKNQVVTANIFEQQELLKKAEVIRENLTASTWRELETNGKFDKNEKLSFISDDMLILGCDVGSEIHYLRAIDTRGRELSKSAFSFSNESEGFQSAKEWAVKIAAEHNKNQIVRGLEPTGHYWFCLATWMISNGISVVQVNPYAVKQTKEVEDNSQMKDDRKDPKLIANLVKDGNFGMPYLPEKLYAELRRLSMFRDQLNEDRIRTINRMHREMKIYFPEYKDALGKVDGAFSLELLKQAPFPEDLTALGEDGIGQIWHDAKLRGRGYSRAGAILRYAKTSVGIKDGAAAGKTAVKWFVQKIMELDVELAVIEEQINQKCQEIPHAGNILEISGIGENTLSGILAEMGDISRFDDVKEIQKLSGLGLVACSSGKHKGETKISHRGRKRLRYWLFQAAKSAVAHAEEFKELHMYYTTRADNPLKKMQSLIVIACKLLRIIYTILKNGTVYDPKKMLMDIRRPEKKEAIAA

SEQ ID NO: 155229 - protein, 318 aa, unidentified
MNRLIERCAMLDIHKSQITACVRVPDGEGSRRQEIREFAATTSGLLTLADWLRSFAVTVVGMESTGVYWRAVYYLLEDEFECRLYNARHLRHVPGRKSDVQDAEWGCQLIEHGLVRPSFVPPRPLRELRDLVRYRKAKIQERTREVQRVEKTLQDAGIKLSSVASEVLGVSARRMLDALISGTHDPEILAELAKGTLRKKIPALREALQGRFTGHHALLIGQMLAQVDFLDETIATLSERIEELTRPFSRELELLDTIPGVDRRAAEMLLGEIGPDMSQFPTEHHLASWAGLCPGQRESGGKQHSGKTRKGSKCCAAC

SEQ ID NO: 155230 - protein, 380 aa, unidentified
MKAGLQCIEWRKKEGAVFMNYVGVDIHKKYSVLCAVDERGRKLREARIEGNSGCGFAQFFASLEGPSKAVVEACWNWGLVHDELEEIEQVEEVVLAHPYKTRLIADAQIKTDRLDAHALGTLLRGNLVARAHVPRGETRVRKNLLRQRLYWARLRTMLRNRIHALLDRQRGLELPQCSDIFGVRGLSFLRRLELPETDAALLGEQLALHDLIAQQMKAQEKRIGLEFGSEAMHRQLLSVPGIGPTLAAVIACEVDSIERFSSAEKLCAYAGVVPTTHSSGGKTRHGQLLPFCNKWLRWALIEASWVAIGCSPYFGALYKQHRARGKKANSAVLIVARRMCRIIWQLLHEKRDFEKRPLRPNFNFPGCSVVRLTAATAARP

SEQ ID NO: 155231 - protein, 340 aa, unidentified
MEKITTIGLDLAKHVFQVHGLDEADGVVVRKQLRRGQMLMFFAGLPPCLIGMEACATAHYWARELTALGHEVRLMPPQYVKAYVKRNKNDAADAEAICEAVRRPSMRFVPVKTVEQQATLMLHRGRELLVRQRTMTVNALRGHLAELGVIAPQGLNKVVELIAIVRDSSDERVPEEARPVLLTLAEQIEGLKVQIDGLELRIKAWHKSNPVSQRLASIPGVGPIIASAIAATVADPSVFRSGREFAAWLGLVPRQNSTGGKARLGGISKRGDGYLRHLLVTGAHAVLLRYKPARLDSWLIGLLRRRPRMVVAVAVANKMARIAWAIMSRNDSYRSSTAAA

SEQ ID NO: 155232 - protein, 361 aa, unidentified
MFCERTSVGLDVHARSVVAAAIDGRSGEVFRARLTPAHAEIIEWVGKLPGPCAAVYEAGPTGFGLARALSAAGLRCEVAASSKLLRPAGDRVKTDRRDALILARLLRLDEVVPVRIPNESEEAARDLVRAREGARVDLMRVRHRLSKLLLRHGIVYYDGKAWTERHDRWLHHQRFDAAPTQSAFEDAYEAVVLATARRARLDEKIITLAAESEFGPMTRRLACLRGISTLTGFALAVEIGDWERFSGGSIGAYLGLVPSEYSSGTSRVQGAITKTGNTHVRRLLVEAAWHHRSTYRPGVALRRRWDQAPAAARARAHAGNQRLHDRWVGLNLRRKRAVVANVAVARELAGWCWSLAVLPPD

SEQ ID NO: 155233 - protein, 311 aa, unidentified
MEQVFVGIDVSKRQLDVHVRPSGEAFSVARTSDGIEDLIARLCGGAGPQLVVMEATGGFETVVAAALAAAKLPLAVVNPRRIRHFAEALGLLAKTDRLDATVIAHFAEAVRPHAQAVPEPAAQRLGELVARRRQIVGMMTAERNRRGQTTNGRIQRMIDRMLAMLQDQLSEIEKEISDEVRASPAWVARDTLLESVPGVGPKIACTLIAELPELGALTRRQIGALVGVVPYNNDSGRKQGRRNTKGGRPAVRGALFMAVMVSIRRDLPLAAFYRRLRAAGKAGKVAVVAVMRKLLTQLNAIVRDNAQWRAA

SEQ ID NO: 155234 - protein, 361 aa, unidentified
MHATTVAVDLAKSVFQIAIADDNWKVIEQLRLTRSQFERWFHNRDVGLVVMEACGSAHHWGRWLNRLGIEVKLLPAAYIRAYVKHNKTDAADACALLEAARCADIVPVRVKSLEQQALQGLHRIRSRWMGTRTSRINTLRGFCREFGLVVPQGARTGVEAMSRALADPNAAIPLLIRESMKLLIEEIRLLELRIAQLEKELTSLARQSPACTELLTIPGIGLLTATAMVAATGGSVTHFKDARHFASWFGLTPKEFSSGNSRKLGRISKKGDRYLRMLLTHGARAVLRAAELARRAGKPLDGLRTWATEIQSRTHHNKAACALANKLARVCYAVLRDHTPFGSPQPRQEKKLTRSAFAIAA

SEQ ID NO: 155235 - protein, 341 aa, unidentified
MSNANSYIGVDLHKKMCFVTVMDKEGKIKKQTEISTDADKVAKFFSKHTDASVAVESTMNWIPFYENLEGLGCKVVLSNPLATKAIAAARIKNDKVDSKILADLLRTNLLPLSYVQPREIRDLKELVRQRMSYVEMRTQIKNKIHSVLFKNNLKHDFTCLYGKAGMIWLKQLELRDIYRQEMDRYLTTLDLLDKQIEELSATIMETAKTDYDCQLLMTIPGISYFTALVIKSEIGNIERFPSAKKLCSYAGLIPSTYASADKVRHGRITKRGSKWLRKALVDAITSGSRHPSKLSCLYRKLKKNKGTGKAKVATARKLCTIVFAILTDKQPFREFVSVKQR

SEQ ID NO: 155236 - protein, 357 aa, unidentified
MKSQEIKYVGIDCGKKTLEVIRIGNNSLHQRQQFSTTEIGISKLINWLNPNDVVGLEAGSQSFRIAKSILNKGIQVIVLNPGDLATIYQSLKKTDKEDSLKIARLIQRFPIEELPTVPIPNDEEEDNRRLCTEQENWTRQLTQSKNRLHSLFTQAGLTHITKKHLRTKANREISVALLPSRYQKEAERILKVLDLVELNLKLIEEEIKEALKKNKAYAQTIMSMPGVGMITSLAIMSYMGNCKRFSSAKQAAYYVGLVPRVDISGDSAYYGRIVNRGCHSIRRVIVQAAWSLVRCQYGGKIKEFYQRLYPKKGAKKSIIATSRKMIEILYTMIKTGELFDSMPEKVLNRKLTQYGLM

SEQ ID NO: 155237 - protein, 475 aa, unidentified
MICAEIERCAGIDVGKERLSVSVMVGPLAGEPRVEYREFGTITAELEHLRQWLQAEGVTHVVMESTGSYWKPVFNVLEDSVRVYLANPQDVKNRKGHKTDKKDSWWLAHLLRHAMIRPSFVPSRGLRELRDLTRRRGKMIGVGTSERNRVDKMLQDANVKLSSALSDIFGVSGQLMLEALLEGKAQPAEIAQFAKNRAQRKIPQIVAALEGHRMSDHHRQMIRYSLEHLRFLEQHILDLDEQIVAKIEALGYTPQWKLLQTVPGLRENSAASVLAEIGPDMGQFGSEKKLSSWAGVCPGNNRTAGKNMGSKTTKGNRWLRAALTECAWGVSNRKNCFLKEKFWRLATKKHRKPPATMAIAHTLLVLCYQVLKSGKPYQERGMPPMDQTQRDRLICHHVRRLGKLGIRVRSLTLPEDSKKVKPKKVPADSGKPKTKKTRAKRNRCSCSRRDIFGRTHFISYGRAVPNHTAGHDEAR

SEQ ID NO: 155238 - protein, 373 aa, unidentified
MSAAFKPTTKEWMKEEEMSVYVGIDVHKRFCQAALMDEGGAILHELKFENTVEGAHRLASLARSVNPQVKAVLEPSANYWIKVYDKLEDEGIEVKLSNPSRTKAIAEARVKMDKIDAKMLAYLLRGDLVAESYVPTKKNRERRSLIRHRASLMRMRTEIKNRIHAILDKHDLPYEYTDLFGKQGVEWLRNLQLPTPDHQILQSNLQILETLSAEIQNADIQIAKDVVTEDQAKLLMTMPGVDYYAAMILLSEIGDIKRFASPEKLTSWVGLAPQVHQSGETQWTGHITKKGSKRARWILTQCAQSARQHDPRMREFCMRIERKHGSSKAIVAVARKMLAIMHVMLTRNEPYQGENRQLTEQKHKRLDRIANTA

SEQ ID NO: 155239 - protein, 348 aa, unidentified
MEYYVGLDVSLKQTSICVVDQSGSVVREGVVDSDPEAISVYVRSKAPGAVRIGLETGPTSTWLWTELKRLGLPVICIDARHAKAVLKMQINKSDRNDAIGIARIMQTGWFKEVHVKDIDSHTVRALLASRALLVKIKRDLENHVRGLLKNLGLVIGRAKFNVFAVRAEELIEGRPELIAAIRPLLEARNAVEQQVSELDRKVMKLARHDAQVRRFMTVPGVGPITALAFKATIDDPARFARSRSVGAYVGLTCRRHASGEVDWSGRISKCGDAMLRSYLFEAAGVLLTRVPKWSAVKAWGVKLVKRNGLRKAKVAVARKLAVILHRMWVDGTEFNWSKKEIAAKQVEY

SEQ ID NO: 155240 - protein, 437 aa, unidentified
MIQAEIERCAGIDVGKKWLAVGVLVGPLDREPRAETRRYGTNVADLEQLRDWLQQQGITHVVMESTGSYWKPVFNILEETLTVYLANPQQVKPRKGHQTDNRDGHWLAHLLRHAMIQPSFIPPRPIRELRDLTRRRKKLIAAGSSEKNRIQKVLEDANVKLGNVLSDVFGVSGQRMREALLEGHAGPEEIARLAPRRARQKIPALVAALQKHRLSEHHRRMIRFRVEHMELLERQILRLDEEIATQIRQIGLARQWELLQSIPGVREDSAATILAETGADMQAFGDAAHISSWAGVCSGNNRSAGKNKSSPTNKGNPWLRGSLTECAQGAAKTKNCFLKEKFWRITAKHGGKRAAAVMAVAHNLLRLVFQVLSTGQPYQERSAGPLEPRQRERMIRHHIRRLGRLGIAVRGPEPAPRRPRRCTTITTKGIARLPASS

SEQ ID NO: 155241 - protein, 417 aa, unidentified
MRNDHELAAYIGLDWGDQRHAVQMQAADGGPVELIELEQRPDALHAWVAQLRQRCGGRPVAIAIEQRKGAVMHALMQYEFLVLYPINPKSLARYREVFHPSGAKDDPTDAALLLDLVRTHRAPLRPWRPDTVTARRLQLLCEHRRKLVNLRGGLTNRLTSLLKQYFPQALDWVGALDSRQACDFLQRWPSLAAVQRARPTTLRRFYQQHNCRRAAVIAGRLEQIATAQPLTTDPAIVDTLALAVQSYAAQLRPMLEAIHAFETQIAAVFADHPDQALFASFPGAGPVCAPRLAAAFGTDRTRWETAADVQAYAGIAPVTERSGKSVWVHHRLACPKFLKQTFHEYADQSIRFSGWARRYYDQQRGRGNTHHAALRSLAFKWMRILFRCWQDRTPYDEATYLAALRRHGSPLVMQENA

SEQ ID NO: 155242 - protein, 397 aa, unidentified
MGMVAGIDWASETHVCCVIDDAGGVVERFDVTHDVSSLRAMTKRLVRLGVSGVAIERGDGPVVEVLMDAEVPVFVVPSRQVKGLRSRYGSAGNKDDRFDAYVLADTLRTDGHRWRQLREDRSDTKALRALCRARRELVAMRVAALNELRCNLELALPGAIGLFSRPDSPITLTFLRRFPTAAKVAWLSPARFAGWLHSVGYTGGIAADVLFSRLTDAAPGLGGAEGEARGSITLALVDTVEMINARIAGIEERIGEVFASHPDRVIFASLPRSGTVRAANLLAEIGDCREKFPTDGALAALAGVSPSTRQSGKREQAVFRWACNKKLRFAVIDFANGSRAVDPWAADIYRRAIERGCRHNHAVRILARAWIRIIWRCWQDGVAFDPTLHRARQPVAA

SEQ ID NO: 155243 - protein, 423 aa, unidentified
MDVIHDRVAGLDVHKDPVVACVRTMSGTKATRECRTFATTTEGLLALRQWLNANECGLAAMEATGVYWLPVWKILNEGAFKLVVANAAHIKAVPGRKTDMNDAMWIADLAAHGLIKASFVPEEEMQELRTLMRTRKQLVREQTRHVQRIQKTLTEANIRLDSVLSDIMGASGRRMIEAMIAGVRDPRKLAALAARGVKAAPKELYDALHGRLTDHHRFMLELYLGQHDALSGAIARLDQAVEALIARMDEEVAAGQATFLSLIMLLCTIPGVSILSATVILSEIGRDMSRFPTAGHLLAWAGLCPGQNESAGKRKSSRLRKGAPWLKTMLVQCAWAASRRKDSYYKAQFNRLRSKRGPKKAICAVAASMLTAIYHMLKDGTLHQDLGADHFDRRSTEVKAKRLVAQLTKLGFQVELQPLPQAA

SEQ ID NO: 155244 - protein, 363 aa, unidentified
MVSPILAQWTTLSEDFVLLGAIMDTVSLIGIDLGKHCFHLHAQDGSGRMVLRKKLTRNQMFTLLSNFPSCTVVMEACAGAHWIARRLQTLGHEAKLISPHFVKPFRQGNKNDFADAQAICEAASRPSMRFVSPRNEAQQVVSALHRVREALVRNRTGTINQIHAFLLEFGISLPRGMAVMRRLPAVLEAQALPPRLVAVLERLQAHFKYLDEQIGQVEHELLTQLHEDERSERLLEIPGIGPITASVLMSELGDARQYGSARQFAASIGLVPRQYSTGGKPTLLGISKRGDKGLRRLLVQCARVIMLRIERRTDSLGVWVRSLLARRHSNVVACALANKLARIAWAILAKGTHYRSAPTALPA

SEQ ID NO: 155245 - protein, 416 aa, unidentified
MELVVERAAALDVGKDEVVACVRVPDPAGAGRGRGRRRQEVRTYPTFTSSLEALADWLQTEGVTQVVMEATGQYWKPIWYVLEERGLALLLVNARHVKILPGRKTDVGDAAWLCELLECGLLRGSFVPPPQIRELRDLVRYRKRLIQAHSAECQRIQKTLEDAGIKLGSVATDVLGVSGRAILKALVAGERTPKTLAELAKGKLRKKLPQLRQALRGRFGEHHGLLVGLALDHLEHLEGAIAALDGRIDEVIAPFAVARDRLDTITGVGKRAAECIIAEIGVDMTVFPTAGHLASWAGRCPGNNITGGKRRSGKPTKGNRWLADVLTECAWAAARSRDTYLAAQFWRLARRIGKKKAAIAVGHSILVIAWYLLTNDCDYHDLGGDFFIRRDSDRARQRAVAQLQALGYQVTLQPAA

SEQ ID NO: 155246 - protein, 478 aa, unidentified
MQDRRLVGIDLGITSAHTVRVLAGDGGLVCRRKAVPTVESLGEVEQAALAGAAAGTRLEVVVEPTGPAWLPIAVFFAARGHTVYRVSSAKAHDLRRFLRRHAKSNGIDADTLARLPLVDPAGLHPLQLPDAARAALDRRVRACDRLTRQAADHKRRIKGLVRQLLPASPLVGELGQADLAVLERWADPQALVAVGRARLQQVLASASAGQQGAQRAEQWLAAARAALELYGDHPAIAWQDLAAEVHSEVRLLRATQAELAAHAREREACYRRVDPAALARSLPGLATIGGPALVATMGKASRFATAGKFRCFTGLAPKASETGQTDRKGQPITKAGNRLLRTTLVRAADHARRQDPQLARIYWTQMVQRGKDHLGAVCVVAAHLAERAWTVMDRATPYVICDTDATPVTPAQAKQIIAERWTVPEEVRRRRRHKKGKAPQQVLQGHVHGAQGATRRPSPSSATLGQPPSRVKPTQPQP

SEQ ID NO: 155247 - protein, 310 aa, unidentified
MEAVRFEQVVSKGCGLDVHKKVVVATIDGVGIRKVTREFGTFTSSLKELRDWLLEHGITHVAMESTGVYWKPVYHILEPTGITVWIVNARHVKYVPGHKTDKKDSAWLCKLLLAGLLKPSYIPPKEQRELRDLTRYRKSLIQSTASNKNRIIRILEDCNVKLSSVLSDTSGVVGTKLINKLIDGKTVTMEDIDEVYHRKLQASKEDIWEACNGYVTEHHVFLLQTIRGDIASTEKIIAEVTARIKEMLLPYENVLELLKQVPGLSSKTVEDLVAEIGLDMSVFPNEKHLCSWVGIAPGNNESAGKKKAAE

SEQ ID NO: 155248 - protein, 372 aa, unidentified
MPDVSSNQPVDVCLWVALDVHKLSIVVAVLPAWGGEPEVWQIPSTDSAIRKLIKRLGGPAGLAVCYEAGPTGFELYRRLSELGVGCDVIAPSLIPVRKGDRVKTDRRDAKRLVRLYRAGELSYVLAPSPETEGLRDLMRCREDLVRARTAARNQVAKQLLRYGRVFREGKKLWTVTHRQWVARQQLDDPLAQAAFDQMLLYLQGLEVQLAQFDQALERVATGPRWAGTVDALRAFRGISTRTALGLIAEIGDFARFSSPRELYAWIGIVPTEYSSGEQVHRGHITKTGNQHARRLLVEAAWHYRHRPRKTAGTSPHAWQAQIRLHHRHTHLTSHGKRSTVANIAVARELAGFIWAAATNQPLRTPTPTTAAT

SEQ ID NO: 155249 - protein, 307 aa, unidentified
MKEEVVYCGIDVGKSHLDIALLQQRWQVANTQAAINGLVQQLKSESLNLQVICEASGGYEQALVRALHRASVPVTLVQAKRVRQFARAAGILAKTDCIDALVLARFGQAIRPVPTPSQPLHMARLRELNRERCHLSRLLVAEQNRLEQLSSPELRRLARSLIKKVEKQILLIDQAIAQLIGQDQILRTKAKTLTSFCGVGERTAALLLAQMPELGRLNRRQVAALAGVAPFNRDSGSMHGKRCVFGGRRVVRNALYMAALSAARRNHILAPFYQRLLAAGKPPKLALTAVMRKLLIALNSALTHSPA

SEQ ID NO: 155250 - protein, 406 aa, unidentified
MKRFFAGLDWAAQTHALCVIDEHGAVRDRFEVTHDAAGLRELLGRLRGFAREAAQLAIAIERPSGLLVDTLVEAGYPVVPIHPNVVKATRPRYRSHGAKSDASDAYLLADLLRTDGARFAPLNPQSDAIRALRALVRGRDDLVATRLQLANQLRSLLESFWPGAAVIFADIDSPIALAFIQRYPTPQAASHLGEKRLAAFLAQQRYSGRRTPAELLERLRAAPGAHSGELELEAKGELVRALARTLEPLVAQIAELSARIEHTIVELPDGHIVMSLPRAGRLCAAQILAELGDVRERYPTDDQLAAEAGVCPVTYESGKHRSVTFRWACNHRLRRAVTCLADNSRHACPWAASRYAAARRRGCDHPHAVRILARAWVRVLWRLWTDRCVYDPAQHRAALAFNTARG

SEQ ID NO: 155251 - protein, 361 aa, unidentified
MFTERTSVGLDVHARSVVAAAIDGVTGEVFRARLTPDYGEIARWVVGLPGPSAVVYEAGPTGFGLARALTAAGLRCEVAAPSKLQRPSGDRVKTDARDAMHLAKLLRLDEVTSVVVPSQSQEDARDLVRAREDARGDLMRARHRVSKLLLRHGIVYSGGTAWTLTHQVWLRSQVFNSVGVRMAFDADLEAVLLAAARRHRLEVAIEAMAADSEFNQVVTRLCCLRGVSTLTAFGLAVEIGDWHRFTGNTIGSYLGLVPSEYSSGASRVQGSITKTGNTHARRLLVEAAWHHRKTYRSPGAVMRARWDKAPAAARARGHAGNHRLHQRWFTFTERRKRPVVANVAVARELAGWCWSLAVMDE

SEQ ID NO: 155252 - protein, 353 aa, unidentified
MVQSSRVEAQEVVGLDVGDRSSQICRLDRATGAILEERRLSTTTASVQRYFGALGPQLIALESGTHSLWLTRLLKSLGHEVIVANPSKVRAISSSLQKTDERDARFLAQLARVDPQLLSPVHPRSEESQQAIAVVRAREGLVKARTMLINQVRGMVKSFGFRLPAVSSAGFAGKIQKDETLPSSLKSTLEPLLRVIAEVSQEIARFDKEVESLARRWPVTQRLRQIKGVGALTALVFVLTLGDPYRFARSRAVGAYLGLVPGNRSSGQSTPQMPITRQGDRMLRRLLVQASHYILGPFGQDSDLRRFGLQLAEHGGKSGKKRAVVAVARKLAVVLHRLWVSETDYLPLRAAAA

SEQ ID NO: 155253 - protein, 353 aa, unidentified
MSVQTASVNNLAVVGIDIGKDVFHIVGFDGDGQIVVRRKIKRLALVKVFEALPHCVVGLEACLSAHFVSRTLRGLGFEPRIIPAKYTKPFNKGQKNDYNDAEAIAEAALRPNLKVVPEKSQDQLDLQALHRVRARLVSRRTATINQIRAFLIEQGITVRSGAAALRSSLLTILENRADEISPRMSDIIVGLYEDWLWLDERIEATTDEIELISKREGHCQRLMTVPGIGPIISTAMVAAIGTGEAFDRGRDFGAWLGLVPRQYSTGGKTILGRISKRGSKYLRTLFIQAAHIILMRPHNWLKFSFGPWLEQASQRMHKNKLAAALANKLARIAWSVLRHDRDFDAHRTELTAI

SEQ ID NO: 155254 - protein, 432 aa, unidentified
MESITRRGRGRQVVPDAQRGRVVAIDVSKGRIDYACFAWGKASRTQRLPQSRAGFEALEGVLRECRERAEEVWVALEPTGPYGLCLQAWLMEREWKVVLVNPYHVKRTREVSDNSPASSDAKSPQVIADLVWRGRYYEARVLEGPYGELRAAGGEWQALRKDRTRLRNQVQAQVELWFPELLRLFRDALAKSVRAVIRAYVSPGQVRHQGSRRLRRVLAKATSGRGQRRAGEILAAAGQSVALRHGEQARQRYLVGLLDRLELVERRQAELKGEMAVLLAECPEARFLVSVPGVKTLTAARLLGECGRFSDFPTEGRLEKFVGLNLVAVSSGQLQGEVHISKRGRAEARAALCQAVVGMVRTGGRYHAEADQLRGRGMKWPEIRVALARKLLELLYALARDQRDYDGARVVAGVRTEDGHRIICGTPLPAAA

SEQ ID NO: 155255 - protein, 396 aa, unidentified
MGHHSEAFIGIDTAKLRNAVAIAEAGRRGEVRYLGEVDSSEAATRKLVAKLAAKYERLSFCYEAGPTGYGLYRLITSLGHECQVAAPSLIPKKPGERVKTNRRDAEGLARLLRAGELTAVWVPDDRHEAMRELTRARDAARQDLTRKRQQVSSMLLRLGRHYPGLKTWNARHRSWLANLKLDHREQRFVLEELLQAERQAGERVERLEQAIREALADWSLGPIVPALMAMRGIDLVGAVTILAEIGDLSRFKNPRQLMAYLGLVPSERSTGESVKRGSITKAGNGRARRALVEAAWAYRHPPRVGYEKQPQVAAAPRRAREIAWKAQVRLCKRFRMLSRGGKKSTVVATAIARELAASCGQSPGSRTRAGHNASSSSIAHRLINRKDRARRSYRAS

SEQ ID NO: 155256 - protein, 381 aa, unidentified
MDVLYHRCAGLDVHAETIVVCALLGEEDHIQKEIETFPTFTKDLFRLLKWLEDRGVTHIAMESTVVYWKPVFNILEDYFDITLANAQRIKNVPGRKTDVSDAEWIAKLLRYGLIEKSFVPPADIRELRDLTRLRKKWIGQLTAEKNRIQKVLECSNIKLSSVISDIFGVSGRKLLERLMKQGYIEEPEIDACIHGRMKGKRQQIQDSLFGTLTEHQLFIIRQSWKHIESLESLLREIEERIDQLLQAYKQEMELLVTIPGVKKETAAVIIAEIGVDMGQFPTSQHLASWAGVAPGNHESAGKRKSTRTMKGNPHIKSALCEAAWALSRCRNQRLAAKYLLVTGGTQGKEKSTRCDGAPNAYNHLLHAFSKRTVSRTANLLV

SEQ ID NO: 155257 - protein, 312 aa, unidentified
MSSASVYVGIDVSSQRLDVAIGDDPVESYDNDDAGVVALCQRLRTVQCELIVLEATGGYEALAVATLAGEDLPVRVVNPRQVRDFAKATGLLAKTDALDARLLRQFAERIRPVVLPHKSEATRELAALVARRRELVQMLTAEKNRLKLATRAVGRDITAHIRFLEKRLHDSDDELKRRIETHDDFRVTDELLRSVPSVGRVSSSTLIALLPELGALPHRQIVALVGLAPLNDDSGRRVGRRRIWGGRSEVRTVLYMATISALRSNPVIRTTYQRLVAAGKPKKVAIVACMRKLLTILNAIVRDQTPWNPAIA

SEQ ID NO: 155258 - protein, 370 aa, unidentified
MLNTTTFVGLDVHARSIKAVALDAMTGEVRSATFGYDAAEVAGWVSSVDPSAKCVYESGVTGFDLQKRLASMGIDCVVGAVSKMIKPPADRKRKNDRNDAEFLARMLSVGNVVEVWVPDDGCEAARDLVRALDDAREDLKRCKQRLSKFLLRHGYAFSETTPTGRRKGSWTAAHWAWIKSISFPEKADNDVLAYYVDAVRQAMEDKARLERLVEAEASKPRWKRRIDSIRCLKGIDVTSAADLVFEAGEFSRFKSARSFAAWLGLTPSEHSSGESVRQGGITKAGNKHLRRVLVESAWHYLGCSPRSKDLAKGQVPDPAARRHAAKGVRRLVERRRAMLERGVHKNKANVATARELACWCWAVGRMIENG

SEQ ID NO: 155259 - protein, 363 aa, unidentified
MEHIAIDLGAKESQICVRSADGEILEERRIATRPEKLRRYLVGRPKSRVILETGAEAFWVAEIARECGHDVRVVASMLAPSLGVGRRGLKSDLRDARVLSETSCRVDLPSVHIPRVETRRLQSRLAMREALVRNRTQLLNVVRGYLRTIGERAPRRTAEGLIVELREKLAYAAEQLKPVLESIEVLNRSVKTFDEELKRLASKDELAKRLQTAPGVGVVTSLRYMATLDVANRFANGAAVGSYLGLVPSDHSSGQSQRRGSITKAGSPAMRAVLVQASWAALLSRRHRNDPMMIWAREVARRRGKKIAVVALARKLSGILFAMWRDGTDYDATRAAKVIPAAPRRLVLNEDSRRSRHPESVPA

SEQ ID NO: 155260 - protein, 338 aa, unidentified
MTTYAGIDLHSNNIFLGIIDSNNRRLFRKRLANKIDIIKKALQPFKKALAGIAVESTFNWYWLVDGLQDDGYKIHLANPAAIKQYEGLKHTDDKSDAFWLAHMLMLGILPEGYIYPKDERPTRDLLRRRTLYVRQRTAHVLSLKSMASRCLGKTISTNTIKTLRPQEAETIFHQKHLILAGRHALATVQFLSSQIKSIEKEVMKHSKIKPAFASLLTMPGIGNILGLTIMLEVGDISRFPQAGNYASYCRCVKSQKLSNEKKKGAGNRKNGNKYLAWAYVEAANFAIRYNPRARRFYDRKRSRTNNTVARKALANKMARASFYIMRDQVAYDENKMFG

SEQ ID NO: 155261 - protein, 315 aa, unidentified
MTITSQIYVGIDVSKESLEVAKLGKKPTERFSNKKPGIAKLVRHLKPWKPKLIVVEATGGYEEALVLALFEAGLPVALVSPQRVRQYAKAKGLLAKTDPIDAQLLAEFGKHLQPRLFVGKSEERRRLSALVGRRKQLNDMLQAEKNRLRTSSVEVKHSLKRVLDYLQTEMKQLEEEIHKFMQVHEDFGDQEKLLCTAKSVGPVTAATLLADLPELGTLDRKQIAALVGVAPMNKDSGKKRGYRKTKGGRPAVRNVLYMSALSGIRYNPILKPQYQQLRKRGKEKKVAITACMRKMLTILNAMVRDQQPFRYPTMA

SEQ ID NO: 155262 - protein, 343 aa, unidentified
MGEVSTIGLDIAKSVFQIHGVDAGGAVVIRKRVTRAKLLEFFATLPTCLVGIEACPSAHYWSRRLQGLGHTVRLMPPSYVKAYVKRGKNDANDAAAICEAVTRPSMRFVATKSEQQQSGLMLHRSRQLLVCQRTMLSNAIRGHMAELGIISAKGRNGTAELLKIIADEQDDRIPAAARFSLGVLARQYAAIRAETVAIERRIHAWHRSSEESRRLEEIPGVGPIVATALMAEVGDWKTFSSGRSLAAWIGLVPRQHSSGGKERLGRISKQGNRHLRWLLVAGAMAVIRYARQHGTKRPWLARLMDRRPLKVAAVALANKIARMAWAMMVRGERFKEPKLLPAA

SEQ ID NO: 155263 - protein, 411 aa, unidentified
MEVVHVRCAGLDVSKKDAKVCVRVAGAGRRKTVETVTTWGSMTNQVLALREHLIAEQVTCAVMEATGDYWKPFYYLLEDAGFEVMLVNARQVKNLPGRKTDVADATWLAQLGAHGLVRGSFVPPEPIRQLRDLTRARTAITRERGREVQRMEKLLEDAGIKLSSVASDIMGVSGRLMLQALINGQGDPAVLADLAKRRLRSKIPALTEALTGRFTDHHAFLAGVHLDLIDRHTQAIEEITARIEVVIEPFQGFRDLICTIPGIGPLTADVIVAETGADMTRFPTAGHLASWAGTTPGSNESAGRVKSTKTRPGNPYLQGALGAAAMACSQNPGTYLGARYRRIASRRGPMKANVAIQHSMLIAIWHMGRDGTLYDDPGADFFTRLHPERVKNRALHQLEAMGYQVTLGRAG

SEQ ID NO: 155264 - protein, 342 aa, unidentified
MEHFAGLDVSVKETSVCIVDETGKIVREVKVASEPEALLAVLKNPAYHFKRVGLEAGPLSQWLYSTFAEVGLPVICVETRHMRAVLKAQINKTDRNDARGMAQMMRVGLYRPVHVKTLRSQKLRMLLTHRQLLQSKAIAIENDLRGTLRNFGLKVGVVGKVKFEARIKELVENLPDLAALVEPMLVVRRVLREQIVILHRRLLAIVRDDEVCRRLMTTPGVGPVVSLTYRATVDVPARFRKSKSVGAVFGLTCAKYQSGEVNWDGRISRCGDEMTRVMLYEAAQSMMRSKKWSWLKAWAMQIARRRGMKKAIVALARRLAVILHRIWMDGTEFRWTRETAAA

SEQ ID NO: 155265 - protein, 315 aa, unidentified
MASAEVFVGIDISKAQLDLAFRPEGRFAAPNDEAGFAQVLERLSAVPPTLVVVEATGGLEIPLTGVLAAAGVPVVVVNPRQVRDFAKATGRLAKTDALDAQTLAHFAEVMQPELRSLPDEQTQALAAILARRRQLVEMLTAEKNRLGTARKPVRKSLRTHIAWLERELSHTDRGLAHAIRESPVWREKEELLRSTPGVGPVVTTTLLATLPELGTLTGKQIAALVGVAPLNRDSGTWRGKRTVWGGRAQIRAALYMAALVAARFNPVIRAFYQRLRAAGKAKKVVLTACMRKLLIILNAMLKHRTPWRAELVQCA

SEQ ID NO: 155266 - protein, 396 aa, unidentified
MDSSKTQRVKRINPRTMIVAVDIGKGFHVGYFRAPNGEEGKPFLFANSAKSFNEFWHSAQEFSRKHDLEEIVVGFESSGPYAEPLFHYLRKKPVTLVQVNPFHTKRVKELTGNSPNKTDRKDPRVIADVISLGHALTLVVPKGPAAHLRRLTQARERAIKRRTAALNQIQDLIKKHPTAESVVALGLESLATIIKTTSRGKLGLQRAQELFHAAQSCVGVQEGKRSILLEIEYLVSQIGADNRFVGSLEKQMEEHLEEIAYSESILSIKGIGKVTTAGLIGEVGDFRQFGTISEITKLAGLDLFEISSGQHRGRRRISKRGRPLLRKLLYFAAINVVKTNGILHEPYQWMHRRGMPKVKALVAIARKLLRIVFALARDNTVYKEDHCHGHHLKLAA

SEQ ID NO: 155267 - protein, 483 aa, unidentified
MSAGKKDAKNNNAGDGARGTMPVHGGEGAEVAEESTQVVKYAAAIDVAKGFGMVCTRAPGSRPDRRRQKVWRVEATFKEVTALMDHLRCEGIQRLVLESTSDYWRIFYYLAEAAGLEVWLVNARDVKHLPGRGKSDRLDCVWHCKLNERGMLMRSFVPPEPVRDLRALTRTRARLAQDQARHQARVEKILEDALVKVSAVISDLFGTSGRRFLDALVAGERSPKALAALGDYRLKASTAELEAALAGRFRDIHATEIAVHLRLIDAINAEIALLDEQIEQHLPSVPRTAPVCTACGEIGGCHAPGCGSHGTAPPSLAGRLDEITGIGPVNAPAIIAELGTDPSQFPTPGHAAAWARLTSRSRQSGESAKPGRTGKGNRYLRGALGQAAMTAANTDTRLGAMYRRIARKRGKQKAIVAVSRVICEIAWILICDPGARYEELGADYYHPRSPARQTRDKIREIERLNPGKKVILADAGPQADAAA

SEQ ID NO: 155268 - protein, 360 aa, unidentified
MRLITMKYYTSTTQFNCGIDLHARQMYVCLMDRQGQKLVHTNIQHNDFDFFLKRIEPYRHDLTVCCECMFGWYWLADACEAAGLTFVLAHALYLKAIHGGKNKNDRIDSEKLAHLLRSNLIPPAYVYPAEKRPLRALLRQRLFFVWRRAELLARIHSHQLAHNRPPIRQTRRTRDPWEAQLLAAEDHPLRQIALKNDLAMIKHFDHQIFQLEEELQRQAKKSAAREYALLQTVPGIGENLGLTILCEIGDLTRFPTVKDFLSYCRLVKGTVASAGKIKGLRGAKLGNPDLRWAFGEAAVIAKRDHAVIGPLAQRLEARMNGNKFKANTVLAIKLARAVYYMLKGKTVFDPDRLVAALARN

SEQ ID NO: 155269 - protein, 319 aa, unidentified
MAQNDLIVAGIDVAKDKVDVCIRPLSLRRTFASTAEGRRELASWLRRKKVGKAVMEASGGYEREWAKALRDAKIEVRIVDPKRVRDFARSAGRLAKNDTIDAEMIAWFAETFDEAPGQAHDAAREELAQVVTARLGLLDLQTKLLNRGEHAGPEPVQKMHARMLKKIALEIAKLETVIAAMIKATPRFAELAEIIESVPGLAKTTSATLIAKMPELGQVNNKIGAALLGAAPYDDDSGRRRGERHNKGGRRKVRNLFYMACLGAATQHNPVLKAFYDRLIAKGKEKKVALVACMRKLIVILNIMIARRQKWDPNLHVVG

SEQ ID NO: 155270 - protein, 310 aa, unidentified
MTKNYVGIDVCEKKLDIFIHPSKKYVQFNNTQQGIMQLYEYLKAFDIELIVLEATGKLEALCADILMDLGYKVSVVNPARVCYYRKSLGYKAKTDLIDAEVIARFAEALRPDASNPSSATERRLRELSARRKQLVILRDSERNRLRRVRDEYAKEDLQINIAFLNGRLHKIETVMVELIKQNKAKKEVFEILQSIPGIGEIMALTLMSYLPELGQLNQKQIASLAGVFPLNMESGSSKGHRKMCWSGRPKIRSTLYLATLVGIRHNSFIRSKFNDLVAKGKAKKVAMGACMRKLIIIANSMIKEKRCWHD

SEQ ID NO: 155271 - protein, 428 aa, unidentified
MDELNRNRLEEFRQLRQEVRHSEEYLIVGIDIAKDQHHAFFGTATGKTLLRRLVFSNDHEGFRKLLDHAEALRVRHGLKKVVYGMEPTANYHKPLGEYLIILGRTVVLVSGVTVKRNRESLDGRWDKHDAKDSANVADLISQGKCLYYEHPSAELRGLRGLLSLKRRLKKQEHGYRVRIRNNLIAQYFPEMDRDYDRLGAEGLSIMRWCFPPSQMTVLDVDPFIERVTSRRIRIEKRRRLEGIWEKAGESIGCDGVPGVEHEARVMVKGLKQIREMIKETEDKIEELCKEFPEYKYLLTIPGYGPDVSAKVLGAIGDPDRFQNGKQVLKLAGLDLSADRSGKDSAKAIPQISKRGKADLRYALYQAALIASTRNQDFMRYYTRKLQGREREKGIHTKMWVKLSAKMLLIAWTLMKRKEVFDPAYLNVE

SEQ ID NO: 155272 - protein, 350 aa, unidentified
MIIIGCDYHPGFQQIAFVDTETGELQERRLQHREEAEKFYRDLAAQGMKVRVGMEASGHARWFERLLSELQFELWIGDAAEICAKRVRKQKTDRQDAQLILRLMLKDDFPRIWVPSWENRDLRQLLWHRHRMVQARTRMMNQLQAVALNEGLRCKKKLWREAGREQLEAFQLAPWASQRRVDLLELLDRLNPTIAKLTQAIDGEVEKCPAARRLQTHPGVGPLTALAFVLIIGKADRFQCGKQIASYLGLVPLEKSSGNQRRLGHITKQGNSLLRFLLVEAAQVTVRSLPEWRSKYCHLTMRRGRKIAKVAMARKLAVRLYWMMRKEWDYEQLRKFGSHAGKPGTGDGVK

SEQ ID NO: 155273 - protein, 360 aa, unidentified
MDFLPIHKDQETLVILGIDTHADVHVAVALDGHGRCLGHKSVPSTEAGYAALVAWVEEFGTLEHAGIEGSGSFGVGLARFLRARGVEVVEVNRPNRQHRRRFGKHDTADADAAARALQANTATGEPKSADGPAEMVRTLHVVRRSALKARTQAANQLRALLLTAPEELRAQLRGLSTAKLVTTAACFRPGCFPDDVRSATKLAMRTVARRHRWLSEEIVELDEQIGRLVSEAVPALVALRGVGTDTAASLLVAVGDNPERLKSEASFARMCGVAPVPASSGKTVRHRLNRGGNRDANRALHVLALGRMSWDERTREYVARRTTEGKSKREILRCLKRYVAREVYRILTAPGALPSSVSVP

SEQ ID NO: 155274 - protein, 270 aa, unidentified
MLHTGLDLHKSFSYVTTMNNKGQIVGQKKLPSNSEVVEFLKEFGESVEVAIEATPNWYWLYDLLEDEGFDAKLSHPLKTKAIASAKVKTDKVDSATLAHLLRSDLLPLLYVPEKPVRLNRELLRYRASLVKVQIGIKNKVHTILAKNNISHGYSDLFGKEGMTFLHSLSLPENYEIALEGYFSVLDTVRQEIKVASRKVQRLAEDDQDSMLLMTIRGVGYYSALLIKSEIGDVKRFPSAKQLCSYAGLVPSTHASGNVCYHGHITKQGSR

SEQ ID NO: 155275 - protein, 351 aa, unidentified
MGEYIAFDSHKRYTWVDRQDHLTGQARGHRLEHAPGAVREYLSGCEPGTAVAVEATGNWYWIIDEIEQAGLQPRLVHPRKAKLMMGQINKTDKLDAQGLNRLQRNGTLPTVWIPPGPLRDLRELTRTRLVLVAQRTRLKNRLSATLAKYGAPASEASDPYGKRGRAELEKHLERLPEQTRWVSGQLLAQLDFVGGQVRQLEQRLEELVEITPEMQWLLTMPGVGVILAATIALEIGEVQRFPSAMHLASYAGTTPRVHASGGKVRYGALRADVNRYLKWAFAEAANSVAVNHVRCPERHVSQLYRRLRQRKGHPKAIGAVARHLAEAAFHVLRQKQMYQDPVLGRGRTSPV

SEQ ID NO: 155276 - protein, 343 aa, unidentified
MQAVTTIGLDIAKSVFQVHGIDGAGKVVVRQQLRRSRVLAFFKKLSPCMVGIEACASSHHWSRELQAFGHTVRLMPPAYVKPYVKRQKNDAADAEAICEAVQRPNMRFVPTKTPEQQSCLVLHRTRHLFIRQQTAVINSIRAHLAEFGIVAPVGRNGVEELLYAVADEKDRRIPEVARECLEALGALLGKLKAQILEFDRQINVWHRSNETSRRLDALPGVGPALATALVASVADPKVFRSGRDFSAWVGLVPKQNSSGGKEKLGNITKQGDRYLRSLFCAGALAVIRYAKIHGTKSRPWLAKLLERRPTKVAAIALANKIARMAWAMMAKGESYREPVALAR

SEQ ID NO: 155277 - protein, 412 aa, unidentified
MLKIVYPICCGIDVHKSFVVACIASTNGKGVTTYQTKRFSTYTKNLHELSNWLAANNCKDVCMESTGKYWHPVWNVLERTCHPVLAHPKYLKAIRGKKTDKKDAKWIADVFKHDLVSGSFIPPEIIRKLRDLVRYRVKLTNCTSGEKNRAQNCLTTSNIQLDHAFSDIFGKSATAILDYILEHPGEKNFDVAPFVDPRCKTPIEEIQLSIDGDISPEQAEKLKIIRYHMNSLEYCKLSLESAILTLADPLLPQVNLVSSVPGIKDFSAISVIAEIGFDMSVFPTAKHLCSWAGLAPQCNESGGKKKSSRVSKAGAYIKPLLIQCANAVVKSDKHPEIKNRFLSIKKRRGHKKAIVAIARMLLTAIFHILSKSEPYNPDLYRLSDASPIDPVEQAVKMLEKRGFVVSQPVVNG

SEQ ID NO: 155278 - protein, 312 aa, unidentified
MPSQESPVYIGVDVAKPTLAIQFPDQSWSTANTAAGHAALIAKLDSLRAGHVICEATGGYERALVLALHQAGIAVSVINPRQVRDFARACGRLAKTDAIDASVLIEYGRKLQPSADLPPPEGQDTFAELIRARQEVVTLITDETNRREHVRLPVLLKLSHARQKQLERQLATLDALIDTQVATQTALAAKAQRLQQVAGVGRVSALTVLALLPELGAIGDAQAAALAGVAPLNRDSGQHRGQRHIHGGRAPVRRVLYMAALTATVHNPILKAFYQTLRTRGKPAKLALTAVMRKLIILLNRLLKNPHFNLVS

SEQ ID NO: 155279 - protein, 340 aa, unidentified
MTITTVGIDLAKNVFAVHGVDQNGKTVLIKPKVSRAALPELIASLPPCVIGMEACSGAHYWARLFRQYGHEPRLMAAKFVSPYRMAGKSGKNDAADAQAICEAVRRPHMRFVPVKDESQQAMQCLHRTRQGFIEEKTATFNRLRGLVSEFGIIAPQSTDALRHVVSEQKYSLPLQVQQCVIDLLEHIDRIEDNIAEYDRILSKAAKTDHRSQRLMTLKGIGPTTACALVASIGNAHDFKNGRQLAAWLGLTPSQYSSGGKSKLGRITKAGDSYLRTLLVQGARSVLIGADKRTDSFSRWVCMLVERRGYWRAVVAIAAKNARLCWASLHYGDDFRLYSAS

SEQ ID NO: 155280 - protein, 344 aa, unidentified
MHVPIRTKGVNAMPSLAERVDVVIGVDTHKYTHTAAAVAAATGGKLDELTIGTDSDGYAALLTWAQSHPGDRVWSLEGAGGYGAGLARFLAAAGEVVFELDRPVRAARRNGAKSDPLDAVRAAREALSREHLAEPKTDGPRAQLAALMAARRSAVEAATLAQHQLHALVIAAPDSLRALFRGQTTAVMLATAAKLRPHTGWDPTTVTTAQVLRRLARRSNALTEEAAEHEKAITTLVKAWRPDLLELPGIGPIVAAQVLTAWSHQGRIRSEAAFAMLAGTAPIPASSGMLTRHRLNRSGDRQLNRALHVVALSRTRYDQRTRDYIERRRAEGKTDREIRRCLIG

SEQ ID NO: 155281 - protein, 417 aa, unidentified
MKHVVALDVSMGKSTMVIYNQYRQCEVEKEIDHHRPSFEQLHELLQALAHQDGQAPEIVFEATGVYSKTLERFFQDNGYTYCRINPLEANLQMASMRRQKTDKSDAHELAKSHFRVEREQTYQEESYYQQMRGFTRYYDELNSEITHLYCRLHAILQWSFPELEQLFTKRSALFLNIVQLYPHPDEVLNHSKTVICNRLKANTRKNLSLKRAEEKGIALLEAAQISYPAITKEDVRCEQVKDYARRIADLKEKKEQLVKHMVELSNERIEYQVLRSFPRIGETSAVRIIGELGDIRRFKNHKQLNAYVGIDIMRYQSGNTHYKDKINKRGNNKLRKILFFMIKTMITLRKKTKNHLVEYDDKLKTQPQRKPHKVASIACINKFLKVAFHLITHGIHYDYETASPNSESITYNISQLT

SEQ ID NO: 155282 - protein, 358 aa, unidentified
MAVTGGTRRIVGGVDTHKDLHVAAVVDEQDRVIGTRSFATTRQGYRQMLAWMRSFGELQRIGIESTGSYGAGLLRFMQQAKVAVLEVTTPDKQDRRRRGKNDDLDAQNAAHAAFAGQRTVTPRSRDGMIESLRILVACRKTAVSARRVALQMIHNTIVCAPDGLRDQLRSLTRMQLVRTLASWRPDLTAYRDLDSAYRIGLKSLARRYLELHDEIADLDVMIAAIVDELAANLVARNSIGHIGAAQLLLTAGDNPERLRSEASFASLCGVSPVPASSGKTVRHRLNRGGDRAANSALHIIAIGRLRTDQKTKDYVARRIAEGHSKLDAIRALKRYLAREVFTLITQRRKEINATRIAA

SEQ ID NO: 155283 - protein, 450 aa, unidentified
MMREVQEIEDEEHEQILERVCAIDVAKASGKVCTRVPHPSRPGARRTRVWDVDATTNAILELGEHLAGEGIEKVTLESTSDYWRIWFYLLEASGLDVQLVNARDIKNAPGRPKTDKLDSVWQAKLTERGMLRPSFVPPAEIRRLRDYTRLRTDLTRERTRYWQRLEKLPGDSLIKVSTVASSLDTLSVRDMLEALIAGERDPKVLAGLARGRMKAKHAALIEALTGRFDDHHAELARMLLDQVDALNAQIGKLTTRIGGLIAAIPSAQGVDADGTTGPAAGTSPGAPVLPAAARLDEVTGIGLDGAQAIIAEIGLDMSRFPAAGHLVSWAKLSPRTIQSGTSSRSGRTGKGNPYLKGILGEAAAAAARTGTFPGERYRRIVKRRGKLKALVAVARSILVIIWNLLANPAARYHDLGSGYHASRTDTGKKVRNHIRQLEAPGYTVALTQAA

SEQ ID NO: 155284 - protein, 317 aa, unidentified
MTPAKFYVGVDVAKDWLDVAQRPEGAPWRVSNDERGIAALVERLVQLRPALVVLEATGGMEMPVVGALVIVQLPTAVVNPRQVREFARATGRLAKTDAIDAQVLAQFGEAVRPELRPFPDAATQELSALLTRRRQLVGMLTAEKNRLRTAAKAVRADVQEHIRWLERRLSDLDGQLAQSIRSSPSWRELDNLLKSTPGVGPVLSVTLLAELPELGTLGRKEIAALVGVAPLNWDSGHLRGKRRVWGGRSRVRAALYMAALVAARRNPVLRAFYERLVEAGKPKKVALTACMHKLLTILNAMIRHRTPWSVEHHALQP

SEQ ID NO: 155285 - protein, 390 aa, unidentified
MIYVGIDVAKDKHDCCILGPDTEELFPVFTIRNNSDGYGELFHKIESVSKDKSQIKIGLEATGHYSYNILGSLLDHGYHTFVINPLHTNLYRKGQSLRKTKTDKVDARSIAEMLVTDKTLKPYTGTSYHSEELKSLTRYRFELVKERAKLKTSVSRLVNILFPELESLVPTLHMNSVYRLLQELPGAYFIASSNLTHLKALLADASKGHYGREKAIEIRETAKSSIGSLMPAKSMELRQTIRRIDTLTSDIKEVEQSIQKIMDECGSPITTIPGIKYRMGAMILAEVGDFARFSNADQVLAYAGLSPSTYQSGQLISSYARMEKRGSKYLRYALFNAAIYASVWDERFRLYLSKKRAEGKHYYVAISHVVKKLVRTIFRMEITHTSYQPL

SEQ ID NO: 155286 - protein, 314 aa, unidentified
MPEQMFVGIDVSKARLDVAVLPSGEIFAVENTAAGLTELLIRLSEVQPHLVVLEATGGLEQAAMLALHDAGLAVTVLNPRQVRHFCRALGKHAKTDRMDAVLLAKFAQTLQPQAQVPGDAPQRALEALLARRRQMVDLLTMERNRLHSSRDSYVQRDVQEVIQYLEGRREQLDQALQEAILNSPKFQGTYALLTSTPGVGPVVALTLLAQLPELGSLSRQKVANLVGVAPLNWDSDKSRGHRCIWGGRAEVRQVLYMAAVTAVRWNPTLKTVFNHLIQKGKPKKVALVACMRKLLVYLNAMVRDQTPWHAPSAA

SEQ ID NO: 155287 - protein, 388 aa, unidentified
MPEDAPRPAQAAIRTDLGAIFVSMELSRRAWLITSLSPGGGEKMSKHSVSASDVSGLLRRFAELRRKAAARTGRDFPIIVIQEAGLDGFWIHRVLQSEGIESHVVDAASILTSRRRRRAKTDRIDGETLVRTLMAFKRGEPRVCSMARAPTPQEEDRRRVCRERRTLVGERVQHVNRIKGLLFAQGMFGYEPLRKGRRERLEDLRTGDGRLLPVHLKAQIVRELDRLEVVLEQLKIVEAERGALLKPATDAAASPPAMLLQLKGIGPETAAVLWSEGLFRQFDNRRQVAAYAGLAPTPWQSGSIDHEQGVSKAGNPRLKTTMVELAWLWLQNQPTSALSLWFHERVRRLGGRMRKTTIVALARKLLIALWRYTTAGVVIEGAVMKATI

SEQ ID NO: 155288 - protein, 348 aa, unidentified
MLIIGCDFHAGFEVLAIFDNRTGVVTEKRLEHAQEATGFYRQLQEQGEVVRVGMEAGPPCQWFRRLQAECGHELWIGDAARIRAAAVGKKKTDREDARLILQMMREERFPRIWVPTEEERDLRQLLLDRHHRVRARTAAKNQLQALAMNQGVQKGRRLWTEAGRELLAGLTMSEHTARRRDYLLRRVAELDREIAAMDVLVAGEARRREAVQLLQTHPGVGPQTALATVLTLGEVSRFHSARAVSAYLGLVPTEHSSGGKQRLGHISKQGSSLMRFLLVEAGQTAVKKDPELKRAYQRMWVRKGNKAVAKVMVARRLAVRLYWMLRKQWTYAELVKHVGKPESSCGKR

SEQ ID NO: 155289 - protein, 355 aa, unidentified
MAATARSSPPKGRIRPVCGLGIDVHQDFYVVVEQVGGTNPKPPQRFGKQAFLHWAAKLTQSGVEVYAVYEACGFGFSLQRQLSALGIVCHVVCPQKLDERNKRVKTDGLDAKALCLKLDRFVQGNRDAMALVRVPTEQEEQQRAIHRQREQLVKARKQLEAQGRSLMVNHGLEPVKSWWKRGNFGALQVPEWMKELLGNSQPLLLALQEKIGALTLQLQVAAASKQPRGLGAMTSVIIDREIGDWRRFNNRRQVGSYTGLCPGEYSSGNTRLQSCVTKHGNPRLRAALVELAWRLVRFQPNYKPVVKWRQILAKAALATGAARKKAIVAVARQLAVDLWRVRTGRCKPEVLGLEI

SEQ ID NO: 155290 - protein, 425 aa, unidentified
MSCLLHPTRVIDLPESSRKAVPIMTAPARPAPVVVGGSDTHADTVHVAAISTLGREVADREFPTTAAGYRAAVAFLTSHGPVDQVGIEGTSSYGAGLARAVTNAGLQVIEVNRPSRADRRRQGKSDPLDAYHAARAVLSGRATSDPKDQSTEAIRSLHNTRRSAVKARTAATNQITAMLITAPDGIRSKYRALQGQPLITALAKCRTAVVDSVDAAVLTALKALAHRHQFLTAQAEELSTLIDALVTTANPALRAAFGVGPDTAAQLLITAGANPDRLRSEASFAALCGVSPVPASSGKTTRHRLSRGGDRHANNALYRIALSRMAHEPRTKQYVARHVAAGRSTKEILRMLKRAIAREIHRLLTHKVALPEYADLRPARQAKNITVTAAANAFNIWPTVISRIERGLQRDDDLANRYRTWLQAA

SEQ ID NO: 155291 - protein, 423 aa, unidentified
MMKLKYSICCGLDVHKNVIVATIVITNKDGISEYLQKSFSTINSDIQRFHNWLIENNCYHVCMESTGKYWIPIFNYLENDIDVCLTHPKYVKAIKGKKTDKKDSKWIADLYKFDLVRCSFIPPKDFRQLREIARYRFKLVCMKSSEKNRIQNCMTVSNVGIASVLSDPFGKTATEIMSYLLEHTADSIDEKAVRKLIKKGAKAKSDEIIEAIKGYNIETDQAKKLELACGHLEYLDDMITQTEVELYVRIKPYYEFVEFVSTMPGMTELSSTIVLAETGVDMDIFDDAKHLCSWCGLSPANNESAGKKKSVRIAKAGDYLKPMMVQCALAAIKSKKQPYFAIKYGRIKKRRGHKKAIIAIARMMMVCIYHMVSERNPFTPTDYEELMDPQNHVERVILNENNVFAYLESLGYDSSKLVKRNDN

SEQ ID NO: 155292 - protein, 341 aa, unidentified
MNIKRVGIDLAKSVFQIHGVDGQEKVVLRKQLRRAQLLDYFKKLPPCLIGMEACGGAHYWARELQKLGHTVKLMAPQFVKPYVKSNKNDANDAEAICEAVARPTMRFVAIKTIAQQDIQAVHRIRSELVQQRTAKVNQIRGLLAEYGIVVGRRVEVLRNALPLLLEDAENGLTSDFRVLLEGLQQDLTMLNGRVDDLDKTIKTLASSNTDAKRLQQIPGIGPITATALVCAIGDGNQFKRGRDLAAWLGLTPRQHSSGGKDRLLGISKRGDAYLRTLLIHGARAVLKVAGKKDDPRSCWLQNLCSRRNKNIAAVALANKNARIAWALLSKKTDFLPEGEPV

SEQ ID NO: 155293 - protein, 343 aa, unidentified
MAIVAGFDVHRAQITFDAVDTETGELSRGRIDSSRGAVSAWVKRFPGKRVEVALEAATGWLFVCEQLSEGGATPHLAEPAETSARRGNKRRAKTDRADARHLRELLSEGRLPEAWLPPAHVCEWRTRTRLRRTLVGQRTEWLQRIRATLFQHGVPAGEVPARLLGPQGRAFLTRLELPRAAAERIEVSLALIKAIEAQLAPLERQLRRLARSQPGCQALLRQHGIGELLAPTILCELGDVSRLSSSRKAVRAVGLDIGVHRSDRRSRVGKLTKQGSPHARWALYEAAQSACRRTSPEHASYLALKGRGLSHTRASLTIARKLARRCFHELQRLGPAALEPVGD

SEQ ID NO: 155294 - protein, 337 aa, unidentified
MKYCGIDLHSNNSVVIVSDEEDRIVFSKRLPNDLGQIRAALEPHREDLAGVVIESTYNWYWLVDGLMDTGYQVHLAHPSAIKKYEGLKHSGDFADATYLAHLLRLGLLAEGYVYPREERGARDLARKRLQLVRYRTAQILAIEGILMRQTGARLKGEAVKRLTAEQVDAFAFAPDVSLAVEANRAVSQTLSQQIEALEKRLQQRVILRPEYRLLKTVPGIGEVLATTIMLETGTISRFTRVGNFSSYCRCVDSLKESNGKRKGQGNTRNGNKYLAWAFIEAANFALRCCPQARSFYDRKKSRSNRILALKALAHKLARACYHMLQDQKPFDVHLCFG

SEQ ID NO: 155295 - protein, 431 aa, unidentified
MFYSVAAPPAVARSIDGVSVVDTLYPCCAGLDVHKQVVVACVRKSNGAKVHKEVRTFRTETNALLEMADWLTDEGVTVVAMESTGVYWKPIWNLLEGVVELVLVNAEHIKAVPGRKTDVKDSEWIAQLLQHGLLRPSFVPDKPIRQLRDLTRQRTQLTRQKVQVANRIQKTLEDASVKLASVASDVLGASGRDMLKAIIAGEQDPIRLADLARQRLREKIPQLREALSGQIEDHHRFLLGTLMEQVEFLEAQIGKLSRRIEEVMPAPFAEAIAKLDTIPGFDQRAAQNVIVEIGADMDRFPSAGHLASWVGICPGNDESAGKRRSGRTTKGNRWLRVVLVQCAWAASRAVGTHLRQLYGRLVGRRGKKRALVAVAHRLLVIVYNVLKKGQVYEEPVQATPDHRRDRERLKQRLLRRLEKMGVKVQEVEAVA

SEQ ID NO: 155296 - protein, 437 aa, unidentified
MHPDAAGIDIGNESHYVAVPPSRDSQPVRRFGCTTAELKAMADWLKQCGIRTVAMQSTGVYWIAVYDILEQAGLEVYLVNARETKNLPGRKSDVQESQWLMKLHTYGLLRNSFRPSQEIRRMRTYWRQRNDLVRAAGRHIQRMQKALTQMNLQLANVLSDVSGVTGQAIIKAILAGERDAHKLAAFRDCRVKASEEEIARSLEGNWQEDLLFVLKQEQAGYEFCQKQMTECDRQIEQYLQQREDRSRGASLPEEKRKERLKKKKGNAPQFDLRAELFRISGTDLTRIDGIDVMTAMTILSEAGWDRSKWKTEHHFVSWLRLCPDNKVSGDKVIGKGRLPTNNRVTIALKMAASTLWASNTYLGAQFRRLKTKLGAAVATKAMAAKLARLVYRMLRYGMPYVDRGAEFYQAQHRQLQIKYLKWKATSLGFQIIQVPAA

SEQ ID NO: 155297 - protein, 330 aa, unidentified
MIVGVDVSKEWLDIAVKGIKPQRFYERRLENDAGGFQRLLSWVQERTGSTPKELTLVMEATGVYHEAAALALYEAGCRVIVANPKRVRDYASGVGLLNKTDRADARALWRYGSEQHGELIPWEPPPAEIRVLRALYTRLSAVQEDLRRELNRKAQAELSGQPVPVQESMQQSIGHLQADCERLKQAIEDHFDQHPPLRSQRELLQSIPGVGPVSADRMLCLLARHRFASARQAAAFAGLVPRLHESGSSVRKQPRMSKRGDRSLRATLYMAAVVACRHNRQLSEHYRALLTAGKCKMSALGVLMRRLLHIAFGMLKHNTTYDSTKVALTA

SEQ ID NO: 155298 - protein, 368 aa, unidentified
MHELITGFVGLDAHAESTAIAVAEVGREAPRFVGTVGARLSELTKALSRLGEPQSLQVVYEAGPCGYTLARELIRLGYRCEVVAPSKIPRRPGERIKTDRRDALNLAGLARAGELVAVTIPDERDEALRDLSRARVDAVRARLKARQQLKALMLRHGRRYSGKTSWSAAHERYLAEVSFAHPAQDIAFAEYRQAVSEGEARVQRLSESLTREVEHWRMHSLVSAVMTLRGLDLVGAATVVAELGDLRRFAHPRELMGYLGLVPSEHTTGSKRRLGAITKTGNPHVRRVLVEAAWNYRFPARISRALQWRQEQQPAEIRAIAWRAQLRLNHRYRRLRARGLQHNKICVALARELAAFVWDIGRHVAPSP

SEQ ID NO: 155299 - protein, 407 aa, unidentified
MRLFVGDDWAEDHHDVEVMNEQGKVLARRRLPEGVAGIAQLHELTGRYLPEDAADAEVLIGIETDRGPWVAALVAAGYAVFPVNPLQASRYRERHGVSGAKSDQGDAHMLADMVRTDSRQLRPAAGDTPEAEAIKVVARTHKTLIWERTRHIQRLRHQLREYFPAALDAFDDLAAPDALELLAKAPDPARAARLTRAQISAALKRARRHHIADKTTAVLAALRGEQLGQPPTLTAAYAATVRALISVIITLNEQISSLEEQVKDHFGRHPDAEIYLSQPGMGAILGARVLAEFGDDPHRYTSAKARKNYAATSPVTRASGKRKVVAARFVHNDRLIDALMSQAFSAMKAPPGARAFYDDLRNHGIEHNDALRRLANRLVGILHGCLKTRTLYDEATAWSHRDKSLAA

SEQ ID NO: 155300 - protein, 356 aa, unidentified
MLNSNKLDFTGQPIYIGLDVHKKSWSVSIHSAICEHKTFTQPPEVDILVNYLRRNFPGATYHAVYEAGYSGFWVHDQLTEKGVACTVANPADVPTKDKERRTKRDRIDCRKLARSLRAGEIEGIYVPCRKKLEDRSLVRTRQSMVRKQTRCKNQIKSILLFYGIGLPEEWAERRWSGPFVKWLENLPMEKASGEVALRIHLEELKHLRQILARLDREIRVLAQTGEYRVQVWLLRTIPGISTLTAMILLVELQEITRFRSLDELASYVGLIPDTHSSGETEHTGDLTQRRHAQLRASLVEAAWTAVRKDPALLMAFQESCKRMRKTRAIVKIARKLLNRVRFVLKNQTPYRMGVVQ

SEQ ID NO: 155301 - protein, 389 aa, unidentified
MSQPFDARKSLTALEQHNTIIAVIEMSQSKWLVAAVVPGIKRQPLKKLDADQEALLKLLLRWRKEAEQAGHPIQRVVVAYEAGRDGFWLARWLRSRGVEAYVIHPTSIAVSREHRRAKTDRLDTELLLRALLGWLRGEKRHCSMVAIPTIEEEDARRPNRERASLVTEQTRIVNQIKAILIRFGIRSFRPKLRKAEEQLKQVRTAEGSPLPDNTRAELCRRLACLRVVRDQIQAIEKARLQKLTADHGRRKGPNAMVRLIARVLGVGVETADMLVTEVFSRQFRDRKAVARYAGLTGSPHESGKRRREKGLARAGNARVRTGMIQFAWRFLRFQKDSALAQWFQSRAGDGRGGTRKTMIVALARKLLISLWRLVTTGELSDGIVLRSAS

SEQ ID NO: 155302 - protein, 420 aa, unidentified
MRVGINAKVQKLWGERRRAAHSPPLRTTKGAPLMPEQNGLGRSLVALKQDSTLIAVIDMSQSSWLVAGIVPGVERQPLKKLEADAAALLRLLERWRGEAAKAGRTVTRIAVAYEAGRDGFWLARWLRARGIEAHVIHPTSIAVSREHRRAKTDRLDTELLKRAFLGWLRGERGHCSMAAVPSLEAEDAKRPAREHESLVGERTRVVNRIKAALARLGVRGFKPMLRRAPEHLETLRTPEGVGLPPNTLAELRRDLARLRFVREQIKQIEDARAERLEKAPGEGGSAMVRLLAQVVGVGLETADMLVHEVLSRGLRDRRAVARYAGLTGSPDESGATRREQGLAKAGNARVRRGMIQLAWRFLLHQKGSALAQWYRARTADARPGTRKTLIVALARKLLIGLWRLVTTGELPEGIVLHPTA

SEQ ID NO: 155303 - protein, 385 aa, unidentified
MKNVYENVACAGVDVHYKSSDVTFRDSQAQVVRRERLDHRDREKLRRQLSRWPEGLPVVMEASFGWAWLSDVMLEVGLEPHLSNCYKVEQMRKARGLAKTNKKDADLLSLLWFERSNWWEVWLAPPAVRQQRELMRYRSGLVRVQTGTKGRIHAIFHCHGIFHEFSDLFGVAGWRFLRQLCAQGDAELPAVTVRVLGGQLALLEQLRKQLGEVGRDLQKQLETTPLTRRLDMVPGFGLILSHTVRAEVGVLGRFRGHRRLASYSLLAPMSHDTGEMDGRRAPLGRHLGRRGNLTLKWAFIEAAHGAVRTGGRWRAMFDRHTQGGKSNCNRGYIKVARELVKVIYAVWKNGTTYMATPPPRPGSGRRHRKSRSGTGQPSRPMVAAE

SEQ ID NO: 155304 - protein, 344 aa, unidentified
MEGNLRRARFEVAAYPLLVSHLLGGEMEAIRTHVAGVDVHKEILAITVLRGKADEAPEVIQFECKTFTEDLMAAGQKLLELGITHVAMESTGVYWKPIHNVWSPMGIDITVGQAAHVKNVPGRKTDMNDSHWLAELHRFGLIRPSFIPEDKFQRMRLLSRHRTNLVADLGRIKNRVQKTLEDGNVKWGSIVSNVFGKSGLAVLQLLADGVTDAARLSSAVTTKIKRREEARKSLTNCFTKEHCFLIRELMEQYYYLESKITKTENELFDLARPYRHLVERLKEIPGIDDALAYGILSEATDDMSNFEDERKFAAWAGVAAGNNESAGKKKDQNAAKVTRTSDES

SEQ ID NO: 155305 - protein, 325 aa, unidentified
MDIVGIDISKAKFDAALLVGERARHGTFSNTEAGFEQFVAWLARHRPDPAVPLHACMEATGNWGLDLAAFLHGRGVLVSVVNPARIKAYGASELARNKTDRLDAALTARFCRAHAPSAWVPPAGAMRELRELVRRCDALKAARVQEMNRRAAGFASPAVAASIKAHIDWLDEQIETVMGEVRSLVASDLVLSKNFALLRSISGIGEVSAVVLLAELPNIADFSPKALAAFAGLSPSEHSSGSSVRRPGKISRVGSRRLRGLLYMCALSAKRANKALADFVQRMADAGKPPKVILVAVARKLLVYAHAVVRTQKPFQPLPDAPSSI

SEQ ID NO: 155306 - protein, 393 aa, unidentified
MAIIDEHGKVVGRRRIDTGLPGFTELMALLAEHTENPTSVPVAIETDKNLIVVALQAAGLTVFAINPRAVARYRERHGQSGKKSDPGDAALLADVLRTDAHQHRPLPNISDGGRAVKALARQHQEAVWAVHQTTSRLRSVLLEFFPQALQAFPNLKHKAALTILATASTPELGTKLTRRKVVALLQRCGRRNDPALVEQILADLKTPALRQPAAVEAALGHTVVSLLGVIVAMHAAVEQLEQALSAQFNDHPLAVVLRSAPGLGPVLAARVLAETGDDPTRFSTAAGLRAFAGTAPVTRASGRSRRVMARRVRNKRLADACHWWAFAALTKSAGARAHYDRRRAAGDHHNAALRNLANKLLGRMWWCLQNNQVWDDQTAWGNPATNQPAAVAA

SEQ ID NO: 155307 - protein, 401 aa, unidentified
MDNIKMFYVGIDVSKDKSDICIKDEKGNDLIHRFEITNKKADLEMLYETVESIKRNIPGNSDVVFGMEATGIYSLPLYSALKRDGYKVKLYNPIQTNGYRKINIRKTKTDPIDSAIIAEMLRHSEAPQVSEIQDMHLFQLRELVRVRHRLIEKQALCKVQMVRNIDTIWPGYGGVIKRVFGAASLAILKKYSVPSKLRSESFEHFYELVKKKSRSKISRSKAEEIYANAGNVLTIPELDSVIAIEIKTLITQLELYDEQIQSVEGKIDQMMKLTDTKIMSIPGIADILGPTILGEIGIIERFSNVKKLVAFAGLDPVVNQSGRFENKSGKISKRGSPLLRHALFLAANSAIQNDENLKRFYTKKRSEGKHHFSALNAVAAKLLRIVYWVLKNNKEYQIQLN

SEQ ID NO: 155308 - protein, 462 aa, unidentified
MSEDSRYATQPQKAEAREGIPTLGRRVAGIDIGSKQHWVCAPAREGSGREVEVFGATTPELHRMAAWLKERNVESVALESTGVYWIPVYEVLEGHGFEVWLVDTRELARVPGRSKTDRRDCDWIQRLHNCGLLQRAFRPAEQICLVRTLVRDRATLVAQQGDWLRRMQKSLDQMNVRVHRAVAELDGATGMAMVRAIVNGERDARKLAKLRDPRCYQTEEQIAEQLTGHWREDHLFSLGQALKMYDAIQDRIQEYERAILSRLAQMERDDCRGKSAPELSNREKAKTIRRRRQEPLRQALYRVSGQDLIQIDAIGVETVQTVIGEYGPDLSNFPTEKQFISHVLLTPRQAISGGKPIKKKKRRGSASSRVSAVLRMAATTLRHSQTALGAYYRRVARHKGADVAVFATARKLATLIYRLLRWGKQYVDEGADAYERRYQQARIRGLIATAKELGYQLTPAAA

SEQ ID NO: 155309 - protein, 318 aa, unidentified
MPQRTRIVGLDVAKRKVDGCIRSLGQRRSMPSTPEGQAELVAWLRTNRVGTAVMEASGGYERSWAEALRAAGIKVRIVDPKRVRYFAKSAGRLAKNDPIDAETIAWFAETFADDVARPHDPEREALDRLVKARAGLKELETQIAQQGEHRQPPIVAKAHAAIAKTVRAELRKLEAAIAAKIKANPVLARRAAIIQSVPGLADQAVAGVIAWMPELGHITNQAATALLGAAPYDDDSGEHKGARHIKGGRRKLRNLLYMPVMGAATQHNPVLKAYYQRLRTRGKEAKVALIACMRKLIVILNTMLARDQIWNPPARAAA

SEQ ID NO: 155310 - protein, 390 aa, unidentified
MKRGGLAWAWHRILRLKTRGTNRLKEATMNVAGIDAHATYLVVAIVSKAGDLLHAPMRITNKNASKLLALLERFRPIEAVVETSPAWPWLYDMLTGHGFGFVLAHAKRLRIIAESNYKRDEIDAELLARMRLAGLIPYVHPKDIETREQATLIRHRERLTRLRTGAASRIHAELHSVGLYLGRGRLLTRAGRRWVREHAWPVFGPEQQRLVRTHWVLIRTLSSMIQRLDRRIERVGAELPAVALLRTIPGIGPYRGLLIATEVLPIERFSTPAKLVGYAGLAPRSARSGLRPTRTGHIPAGANRRLRNAFVQGVVSHLKHAPDSWLSRYYEAHKKRLGWQTARVATARKLARATHAMLRTGEVWRDESDTPSGERSELQGTHVAPTTSVS

SEQ ID NO: 155311 - protein, 359 aa, unidentified
MSTITLGVDLAKSVFSACEMDGAGHVRRRQDLRRDAFIAWLPQLPAGTVVAMEACSGAHHWARRCQAYGLQPKIMAAQFVKPFRKSSRSKNDRADAEAIATAARQGNMRLVPIKGIDQQVRLSWHRVREGYKVESLAIGNRIRGLLAEFGVIVAQGDRALRRRLADLDAQLALPAEFKELLRDLADHWTQVRLHFDACDARIEAHARQDARCVQLRAMVGIGPITADAAVATVGNAREFKQGRQMSAWLGLVPTQHSSGGHAQLGGISCRGDAYLRTLLIQGARSSLQRAKAVATEKATPEQRWIRSLDGRLPFGKVIVAIANKHARQIWAVLAHDVDYDPHACLNHPMHRQSHARHVA

SEQ ID NO: 155312 - protein, 312 aa, unidentified
MDAIFVGIDVSKDRLDVAVQPIGEGFFVSRTGAGIEELAKRLKAMSAKVVAVEATGGFETVVAAGLAGANLPVVVVNPAQVRAFANALGKRAKTDPIDAAVIARFAEATKPQIRQLPDETTRMLADLVARRRQIVEMIAAESQRARRLTSARLKKSIARLRKALEKELADLDGEISDHVRGSPTWAEKEDLLASVPGIGPTIARSLIAELPELGSLDRRQIAALVGLAPWTRQSGQWRGKSFIGGGRANVRRVLFMGAMVASRFNPTLKLFRDRLVAAGKPKLVAIIAVARKLLTILNAILRDKSPWQLKNA

SEQ ID NO: 155313 - protein, 312 aa, unidentified
MVEHCYGGIDVSKDRLDVQVLPQGRCFSVDNTAAGWCQLIDRLRGLSIAALGIEPSGGYERGIIRALLAAGLSVRRINPNKLRQFARARGVLAKNDRLDARLIAEYVAIMPTRVVHRDPAAERLAAVVTMRRQLSDEHVAVENQSTHIEDAMLRRLNKRRLARLKADILLLDKRMAEIVASNANLARRYDLLTSMRGVGPTLAFTLIALLPELGQMSRKQIAALVGLAPYDFDSGRLKGHRCIYGGRMPVRNVLYMAALSAARYNPALKTLHNRLATANKKPKVVIVAVMRKMITILNAMLRDNIAWQPKSA

SEQ ID NO: 155314 - protein, 345 aa, unidentified
MDKVITVGVDLAKSVFQVHGVDAAGAVVVRRQLRRGEVINFFGKLSRCLVGMEACGTSHYWARQIAALGHEVRLLPPAHVKPYVKRGKKNDAADAAAICEAVSRPHMQFVPVKSASRQAMLLLHRTRDLLVRQRTMLINAFRSHMAEFGFIAGTGRANFADLMAGLESADEEALPEVARMALRQLAAQIEDADARIAALDKEVVARHRRCEASRNLATIPGIGPLIASALDAAVPDASHFRSGRQFAAWLGLVPRQNSSGGKEKLGRITKTGDRYLRRLLVIGATGLIRYKRKNIPGGLDWLTGLLAHKPVRLVTVALANKMARIAWAVMTSGEVYREKSAVGIA

SEQ ID NO: 155315 - protein, 420 aa, unidentified
MKPIKTKKRSFVNGKLLIVTADIGKDKHFGYWRCPDGADVKPFAVENNGACFWNFWERVSRAQKLHNLDGIIFGYESTGPYAEPLAHFMRARGAQLVQINPLHTKRFKEVTDNSPNKTDQKDPKVIADIVAMGRFLTVVIPEGPAAELRRLSQARERSTRRHTALANQIQCLLASIFPEFLQVMKGVTSASAKYLLKHYPTPQEIAAYGFPDLTKTLRKVSRGKLKEDRAQALYDGAKSSVGVAEGQASVVMEIHELLSLMEASERFTESLEQEMITHLASVPYSDTLLSLKGIGEVTAAGLIGEVGDFRKFRTMGEVMKLAGLDLFEVSSGRQRGQRHISKRGRPLMRKLLYFAALNTVKKGGAMHQWYRSACDRGMPRLKALVAVGRKLLGILFALVRDHSEYVSNYSETQCQLKEAA

SEQ ID NO: 155316 - protein, 396 aa, unidentified
MLDDGSQPAKLFNADNNQLGAETLVERIYSIAKEHCISDILIGTEATSMYDWHLLEYLAESKLALEFNLKLYRFNAKWIKNFKKSLAPRGKSDPIDSFAIAERLRMGRLPKEYIPDTKYQPLRKLTRFRFHLMQQIAREKNFFLANLFLKASAYSRVSPFGSTFSATSLSVINDFFSVDELAAMPVEELTEFILEKGKSHFSKPAEIADNLKRVARESYRLKPELAPTVNLILASTFNNIRCYNNQVKLVDEAIAENLKAFKHTLDSISGIGPVYAAGILAEIGDVHRFLNDSSLAQFTGLTWPKHQSGKFQAEETRMSHAGNQYLRYYLVEAANSVKRCDATYKAFYEKKYKEATKHHHKRALVLTARKLVRLVWTLLTRQVLYQPGYSSTSLTV

SEQ ID NO: 155317 - protein, 410 aa, unidentified
MEVMVSRGCGLDVHQATVVACLLVGAPGALPRKQVKTFSAMTEGLIELRDWLKSAGCTAVAMEATGIYWKPVYNLLEGYFDLVVANARHIKAVPGRKTDVKDAEWIADLLRHGLLRPSYIPPPELRELRALLRYRVKLVNARSGERNRVTKLLESCNIKLSSVASDVFGLSGRLMLDALKRGQATPEEMAELAKGRMRSKLPLLKLALDGRMEDHHRQLLSMQLDRLDRFDRDLKQMDAKLEAKLKPYERQMELLDGIPGVNWVTAATVIAEIGIKMSQWPTVGHLTSWAGLCPGQNESAGKRGKSNIRPGNPYLRSALVEAAIAATCAKDSYFREKYYRLKARRGHKRAVVAVAHKILTAIYYVLSSNTPYQELGADYLERLEPERLKRNLVRRLERLGYQVNLEPKRA

SEQ ID NO: 155318 - protein, 397 aa, unidentified
MNTPTCGLDVASTSACVCVQAADGTILHELTVPATRAGEDQLLALLPPGTRVFMESTGRYHLPWARRLAAAGFTVYVVNALLAKRLMGAANALRQNKTDKIDARELARMGRLHGADLTTYRFRDDPARVGLRTLCAVRVHQRRLLTDTLKSAGGLLGTMLPEAPGLKLAESRGLATLFLQIDSLGQLQRMRLSTLETHANGKAAALHAALRQPLSAAAMFEALLPALQGQLRLIEALRDQQLALLAAIRAAVITAKRGDEVALVETIPGYGEKTAATLVACVPEDLRSWGPKQKVARKLQAYFGADPKLCESGKWKGRVRMSKRGIELARTALFQAATCAMLHDPDMKAVFDRKRAEGKFYLVCVSHVMRIQLRRLVAVLYDRKPFVRLPLNLSPAA

SEQ ID NO: 155319 - protein, 449 aa, unidentified
MGKSKTKNEQVKRISQLQVINLKAAGIDVSDTEMMVAYPVNHEQLEVRAFGCFTADLHGIAKCLKANGITSVAMESTGVYWVALFLLLQEDGFDVCLVNAKHVKNVTGRKDDESDAEWIQKLHSCGLLRASFQPDSMTRTLRSLVRHRKNLVRTSSAYLNRMQKALELMNIKLHTIISDIDGKTGLRIVEAMLAGERNPEVLADMRDRRIKASREEIVKSLEGYWTIEHLFELRQCYKLYCEHRSMIEECDKEIEKQLVGQIASKNEGVIPDMAEVKRKASNGKHKIPYNLTANLKEVIGVDITQVFGISEVSALTIMSEVGTDMSKWKTEHHFTSWLGLAPNTKISGGKIISSRIMKKKHYAGQAFRMAANSLYHSKSPLGDYYRRLRAKVGAAKAVVATARKLAIIYYKMVVNQEAFNPKALEAYQHTYKARKINQLKKKIAQLEAA

SEQ ID NO: 155320 - protein, 309 aa, unidentified
MDTIVVGVDVSKDRLDVHVRPAGTVLSYSRDAAGIEALIGVLVAVPPQLIAVEATGGFETVVVASLAAAGLPVVVVNPAQVRAFATAIGRRAKTDPIDAAVIAHFAEATRPQVRPLPDAATQALADLVTRRRQIIQMIVAEGQREKRASPRARKSITRLLKTLRAELSDLNAEIDETVRGSPLWREKEDLLASVPGVGPVTVRTMLAELPELGSLDRRKIAALVGLAPFTRQSGKWRGKSFIGGGRASVRAILFMAAMTAMRRNPTLRAFHHRLRAAGKPKMVALIAVARKLLTILNAILRDKTKWQTA

SEQ ID NO: 155321 - protein, 377 aa, unidentified
MSKVLFVGLDVHAETIAVAVAEQGGEVRSIGTIPNRLESIRKMVPKLGPVKDLGVCYEAGPTGYVLYWQLTQLGVACEVIAPSLVPTKAGDRVKTDRRDALKLARCYRAGELTAVWVPNAAQEALRDLVRAREAAKRDQLKARHRLGKFLLRHGRQRPEGVKAWTKKHREWIKSHVRFEEAALEATLADYVDEVDHVGARIVKLEKAIDEAIQQAPAEIREVIEALQALRGVAQTTAASIVSELGCLSRFPTAPQLMGYSGLVASEHTTGNRVPRGGLTKTGNSHLRRVVVEAAWAYQHRPNVIGHLLRRQKDLAISDEVKDIAWKAQQRLHKRYKAMDARGKNKNQIVAALGRELLGFIWAIGVKTEQQRKLAKAA

SEQ ID NO: 155322 - protein, 363 aa, unidentified
MNFIGVDLHKKSITICVLNENLKVLARKTVFCDQTDQIVEFFRPFRPFKVVVEATASYLWFVELVEPLAEEVVLANPKKLRVIAESTKKTDRLDAQVLAEFLARDQIPRAYMPTPRQRQHRRLVRHRQYLRQRMTSVRCKIRHILSDYNADRKGLFSTQCGPAYFKEIALSDADRFVIKQLWSEWQDHQSRILALTKKIKAFIVKAPNREKETRAILKTAPGVGFVTAEVIVSEVGDVSRFRNAKAICAYAGLVPTVRQTGGKKSKDLRITKEGSGLLRWALVESAWRLVKTSPKWSAFFSQLRKRSGSKRAIVAVARKLLCVLYAMLKTSTPYKIVATETKAPKPTRRRLVRKSSPKETVTT

SEQ ID NO: 155323 - protein, 391 aa, unidentified
MDPEGKTLGSQTFSNTLSGAEAIESWLLKIMKENDFSDLKIATESTSFLDLHLVDFLAQSTKLAPFHPSIYQLNPKLVRNFKRVYPDKEKTDKVDAFVIADRLRFGRLPEPYENHKPYLPLRRLTRYRYHIVQSISKEKAYFLTHLYLKFSGFSVEKPFTSLFGATSLTLITEFSPDELVNLPIEELTQLIIKTGKNRFEDPEGVVEAVRRAARESYRLRPALAPSIDLILGSILQTIRALQESLKKVEQAIEKEFQAFPNTLQSIKGIGPVYSAGIFSEIGDIRRFPKEDALAKFSGLYWKRYQSGNFEAEETKMSKGGNEYLRYYLIEAANALRVHNAEYRAYYETKFKEVTKHQHKRALVLTARKLVRLVYALLKKGQLYKANYQQEA

SEQ ID NO: 155324 - protein, 357 aa, unidentified
MPEYVAFDSHKHYTWVEHWEANTGELRQYRLEHEPGAIQRALGKCDPGTAVAVEATANWYWITDEIERAGCVPRLVHPRKAKMMMGQINKTDKLDTHGLNTLQRNGTLPTVWIPPGKLRELRELTRTRVVLVAQRTRWKNRITATLAKWGLPASEYSDPYGKKAREELEQRLERLPEQTRWVTRQMLAQLDGLNAQVKTFEKRLEELVEVTPGMQLLETLPGIAVILSATIELEVGDIGRFGNAEKLAAYSGTVPRVHSSGGHTRYGRTRPDVNRYLKWAFAEAANSIAVHQRQHPDWHVSQLYVRLRARKGHSKAVGAVARHLAEAAFHVLSHQRAYRDPAYKVGRSNGGVSANVS

SEQ ID NO: 155325 - protein, 428 aa, unidentified
MDVIHERVAGLDVHKDTVVACVRIMSGARAGRTCRTFGTTTAELTELRDWLDGSGCTQVAMEATGVYWKPVWNILSDGGFDLILANAAHIKAVPGRKTDMNDAMWIADLAACGLIRGTPGLDPGAEQKQADLRGPMRTRKQLCREQASHVQRLQKTLEEANIKLASVISDILGVNGRRMIEAMIAGVRKPHKLAELADRRLRASPKQLYDALHGRLTDHHRFLLGLHLRQYDALTEAIAAIDDQVEAQLTAMDQEEAVSGQARFRTLITLLSAIPGVSALSATTILSEIGRDMSRFDTAGHLVSWAGLCPGQNQSAGKRRATRLRKGAPWLKTMLVQCGWAASRAKNSYFSAQFRRLKSRRGPQKAVCAVAASLLTTIYHMLRDGTAYQDLGTDHFDRRPVEVKAKRLVGLLTKLGFDVELRPIAEAA

SEQ ID NO: 155326 - protein, 397 aa, unidentified
MRTRNVYDMVSAGGMDVHYKFSQVTMRDEQGQVVRRERLDHPNRQELRDRLAQWPKGVPFVLEASFGWGWVADLMKEVGLTPVLSNCLKVERMRKARGLAKTNKKDADLLSLLPAEKDDWWKVWLAPPEVRDQREWMRYRSGLVRIGTQTQNRIHAVFHRHGIFHEFSDLFGAKGRVFLAGLCKDGRVPDVQLAPGALTGLRGQVQLLGHVRGQLADVAKKLRGQLNRSPLAKRLDGIPGFGLILAHTLMSEIGEIVRFGNHRKLASYSLLSPISDDTGEDDPRRPPMGRHLGQRGNLTLKWAFIEAAHGAVRSGGKWRKIFDRYTDGGKKNRNRGYIKVARELVKVVYVVWSKGVDYTDNPPARPKASGRNKVKRFFGSTRSGTGQPCPAMAAAQS

SEQ ID NO: 155327 - protein, 430 aa, unidentified
MGKSIIDTSSVTRVGLDLAKRVFRIHAVDATGSVVIARSVNRRTLLKFFDALPRCVVAMEACSSAHHWGRQLQALGFAVKLIPPAHVKPYVRRNKNDAVDAAAICEAEGRPGQRFVPVRSVENQAALMLHRTRELIVGQRTAALNALRSHLGEIGVVAAQGVQNAYALKEMADEGFDENGEFVVPDCVRLALAPLVRQIDALDEAIEAIDKELEASAKADETARRLMTIPGIGPVTASALLATVQDFGAFSSGREFAAFLGLTPREHSSGGKPRLGRITKMGDRYLRKLLVVGACSALAARKGHNDALRRWASGLLRGGARQQAGADRLCARDQRRPLRRPSGRRLNQQAQQERGFAARRSASRATAKRCEPTERLGSPRERQRRHEREPLIGRRAMRTSIRASGTFDFPRQQAGDMTAPEAFAKPQPNP

SEQ ID NO: 155328 - protein, 456 aa, unidentified
MNPKRSKPKNDRTMPMIHPNAAAIDIGATMHMAAVRADRTPEPIRSFGTFTTDLHRLVDWFTECGVETVVMESTSVYWIPIFELLDARGFAVFVVNARDAKHVPGRKTDVSDAQWLQRLHSYGLLRASFRPKGQIAELRAYVRQRERLLEYAASHIQHMQKALTEMNLQLHHVVADVTGATGLRIIRAILAGERDSKVLACLRDYRCHSSAEAIEKALTGNYRAEHLFALEQALALYNVYQDKASACDARIEAVLKELSISRGRDAGPLPSPRRRLHGKANGPDFDVRAALFKLLGKDLTQIDGLGSYLSLRLIAECGDDLSAWPSAKHFTSWLCLAPSNKISGGKVLSSRTRSGSRASALLRLAAVTVGRTDTALGAFYRRLSARIGKAKAITATARKIAVLFYSAVRHGMEYVDPGSSYYETRYRTRVVENLHRRAKAFGFVLLPLESKAGAVS

SEQ ID NO: 155329 - protein, 390 aa, unidentified
MILVGIDVAKDKHDCCIINSDGEFPEEVFSILNNREGYETLYKRICSLTVDFTKVKVGLESTGHYSSNLLAFLLDKHLTAYVINPLRVNLFRKGQSLRRTKTDKIDSRNIAHLLMADSSLKPYSLSSYHMEELKSLTRYRGTKVRERTKLKTSIARLVTILFPELEQLVSSIHIHSIYATLEKFPGSAYIAATHLTRLTALLLKVSRGRFGRETAIRIRDTARRSIGAVSPAKSMELQHTIAHLRVYDQEIGEIESEIEKIMDDVNSPITSVPGIGMQMGAVILAEIGSFRRFDSPDKILAYAGMSPSTYQSGKLTGSYSRMEKRGSRYLRYALFNVTRYVCHYDPGFTAYLSKKRKEGKHYYVAISHAVKRLVRVLYAMEISGNRYQTA

SEQ ID NO: 155330 - protein, 338 aa, unidentified
MAIVTLGIDLAKNVFAVHGVDAAGQAALVRSSVARGKLLELVAALPPCLIGMEACSGAHHWARLFRAHGHTVRLMAPKFVVPYRLSGKRGKNDAADAAAICEAVTRPNMRFVPVKGLQQQSELMVHRARQGFVQQRTATINRIRGLLSEFGIVLPLKATTVRRAAMQQLEDLPGWANTVIGDLLSEVHRLDERIVQYDRHIETIARESAPARQLMQLPGVGPTTATALVAMIGRGHEFKCGRQLAAWLGLVPGQYSSGGKQRLGRITKAGDPYLRMLLILGARSVLQSAKDKSDAVSRWAVQLAARVGYWKAIVAIAAKNARMCWAALNRGETFKLPA

SEQ ID NO: 155331 - protein, 348 aa, unidentified
MNYCGIDLAGVSSYAFVTDEKGNRLWSSPIATEKTAFERLVKKFAGGGLSIAIEAGNQTAWVHEELVKLGAEVTVVNPTKVKLIAESRRKTDKIDAKILCELLRLNALPHPVHMPGPQARELRGLLVARRQLVSARSKLSNVVRGMLRQTGVRLPAGGLSSLAGWKRLLAGGFEQEHLLLIVSAYYDSFLALTKSIRELDQQLAQREKNEPRAQRLKTMPKVGRIASLTFLAAVDDVKRFSSSRKLVGYSGLAPTVRQSGERTEYGAISREGRRELRAVWVQIAHLVARDPTKATQPLRTWFNRVARKRGKKTALVALARRLLVIAYQLLKTEQDFDVGRLKKKRRAA

SEQ ID NO: 155332 - protein, 414 aa, unidentified
MIVDEKHERAAGLDISKKDAKVCVRVPSKRAGFSSYTVSTYGAFTNEIQRLRRDLEQAAVTIVVMEATGDYWKPFFFVLSESLNVMLVNAKQAKNIPGRKSDVSDARWLAELGAHGLLRASFVPPEQIRQLRDLTRTRTNLTREQTREYSRLEKHLEDANIKLSLVASSLTTRSAHSILTAMVDGERDPHVLADLAHVSMVHKVPELVEALTGRFSEHHAFMVKLHLHRIAELAASIATLDARIGEVMEPFQAARDALAMIPGLSKRGAENILAEIGTDMTVFPSPGHLASWAGVCPGQNESAGRVKSTKTRPGNRYLKGYLGIAALTISRSNTTFLSAKFRRIQSRGGNLKAVVALEHTLLIIIWKMLTTGEAYTDLGPDCRQLSNPDKIRDRAIRQLNALGYDVDVTPIVAA

SEQ ID NO: 155333 - protein, 433 aa, unidentified
MSYRIAGIDVHKKMLAVVVSDVEIESEYQFERRMFSSNPEQLRSLATWLVEQKAEEIVMESTAQYWKPVWETLERYWKPLCEKREGARRRSGTLHLAQALSNRGRRGRKRDFVDAERLVKRLVARELTLSFVPDTEQRLWRTITRKKYQLRRDLVRIHNQLEALLEEAHIKLSSLVSDLLGVSARRMLKALADGETNPAALAALAHERLRATPEQLCDALGACTELKPVYRRLLKMTLEHLQIIEQQIGQLDQEVATLLHPHQDAVERLAEVPGFAGPGCAGDSAQQIIAEVGPAAATFPSEKCLSSWVGACPGEEESAGVNYSHRSPKGNRHMRRLLNQTANAAVKAKGSIFEIIYRRCVPRLGHNQAIGVIAHRQCRLIWLILHQGTRYEERGPAVTKRSRYQRTWRMIRQLQQLGYRIESPNPQASQAQA

SEQ ID NO: 155334 - protein, 428 aa, unidentified
MSYKIAGIDVHKKVLAVVVSDVEIESEYQFERRMFNSNPEQLRSLAAWLVEQEAEEVVMESTAQYWKPVWGALERYWKPMCEKREGARRKSGTLHLAQAQSNRGRRGRKRDFVDAERLVKRLVARELTLSFVPDAEQRLWRTVTRKKYQLRRDRVRLQNQLEALLEEAHIKLSSLVSDLLGVSARRMLKALAEGETNPAALAVLAHERLRATPEQLCDALGACTDLKPVYRQLLKMALEQLQLLEQQIGQLDQELATLLHPHQDAVQRLAEVPGLGVDSAQQIIAEVGPTAATFPSGEQLSSWVGACPGDEESAGVNYSHRSPKGNRHMRRLLNQAANAAVKVKGSIFEIIYRRCVPRLGHNQAIGLIAHRQCRLIWLILHKGTLYEERGPAVTKRSKYQRTWRMIRQLQQLGYRIESPNPQANQAQA

SEQ ID NO: 155335 - protein, 451 aa, unidentified
MDQGNDGLSRGDRNRNARLAVLRAVLPRDHAILGIDLAQSRQAAVLADHDSRVIARWRPRCSPWRLGELLDRARRKALSAGYAGITVACEPTGHRWMVIAQLAAERGIPMVCVQPLVVARAREAEDYTRGKSDDRDAVLIARQAAQLHCYLPERAGQAWARLRHLGARRSRLIESATACGQQLRDLLEVAWPAALGAAADPLGSATWLACLSVVLEGSAGDPGGVHVMGRDGFTAAARARLGAFGARRICQRIAAAVYAALADPAGVAAQRPGALERAFSVLGDWTTVRGELAEVNARMLQALDRLGVAEVAGSIPGVSALQVAAILAETGDPSRFATARAMVKHAGLAPCENSSGNHAGEAVISRRGRPALRLAAWRAVWGALRHNPVYAARHDGLTRRARDPLTDQQARAAIAAALIRQIHAIITRRVPWDADIAAGRRRPGQEVNAAA

SEQ ID NO: 155336 - protein, 346 aa, unidentified
MEHIGIDVHKNQSQICILTPEGELIEKTIRTERGRFAAFLGDRAPSRVVIEAATESEWVARCVESLGHEVIVADPNFAPMYARRSRKVKTDRRDARALAEACRLGAYRSAHRASDEQRHVRGHLAVREALVRTRTKFICVVRSLLRREGLRVRSGGATTFVERLAELELPEHLRLEIAPLLELMSSLNPQIKQAGKGIREIVRQDPVVQRLCTVPGVGPVTATSFVATVDGFERFRGAHQVEAYLGLVPRELSSGEKQRRGRITKTGNGRTRSLLVEAAWTVMRSKDPRVASLRAWADRLAARRGRRVAVVALARKLAGILYAMMRDGTEFKAQRQNKVERTSEVA

SEQ ID NO: 155337 - protein, 364 aa, unidentified
MDVHLRSTTVCALDAETGEAVTRRFRGNPWGEVAEWMSGFPGPSLAAYESGYLGFAPQRELSGLGVDCVVAAVSKVPRSAADLSSKNDRNDAARMAKAILSHDVTPVWVPSPEIEGLRDLAAAHDAATARLAAAKQRLLAFLARRGYVYGGTTPAGNPRKYWTYGFLRWLDGIHPADDGGIRALAALRNEVEAADETREALLAEYRAAVAAGPLSAEVEALQSIKGCGFALAAAFASEVGDFSRFRSGRQVTAYFGLAPKQRSSADSVRLGGISGAGNALVRKLAVEGSWRYAQAGHQPKLMPKGSGVPLEIRMHGRKGSERLLRRREEMIARGMPQAKANAATAAELVRWLWALGAMCREAGE

SEQ ID NO: 155338 - protein, 399 aa, unidentified
MSYQTLYVGIDVSKYKHDIAIVNEQKQFVGRPFVIKDDLNGYQHLIGKVDELMRRYHTQQFYIGLESTGDYWKNIYYYLKQQPQPFVVTVINPVQTRAHAKSELRRASTDAVNARDIALFMAEKQPKASFDRAPILDNIKDLDRQIYQLKKQQTMTVNKLRIELTKVAPEIEKNVSNIQGKQILALLAEFPTAELIANSSFQQLATIRYGKNNWTLSAPFVEKIKSLSQHSIAYKTGLGAGYAVQSLVRCIWQFQREIQWLKSQLVKLYQRVTDQESLLATIPAISRETAILLEAYIGDVHRFPNAKKFVAYFGMNPTVCTSGKSKRSSYLQKKGNAMVRHKLFMAVLGMIRREIDPIHGYYKRLIDAGKPKLVAIGAAMRKLLVIMYYMLSKNEPFKN

SEQ ID NO: 155339 - protein, 387 aa, unidentified
MKSIIAVGIDVSKEKLDVSFYDGKNHIIKVYSNKEDGIAKLINDAEAIKKKVEQKDKNQDDMKQVDKNHLYDCELHFIMEATGSYHTKVLFELSNKDYTVYLLNPLISKRYSEEQLRRTTTDKVASKLLAEYAYSSISSYLLGIQNERYNILISSKFDSREKDELDLKILLKTLEGLKKTRTRILNQIEALNQYPKGYGIDASKSLNNVLKEIDKEIKEIENKISGILNNGEKRDLYERLKTIPGIGDRSASVIIAYFGSFSTFESPKQVPCYTGLTPLIKQSGKSVGAKEIYHISKIGSPYIRQVMYMAALSAARYNKQCNILYNRLLNKGKSKKLIYVAISCKLLRQAFGIIKNGTVYDPDFGLILDEENKRNNNKEGLRCTASC

SEQ ID NO: 155340 - protein, 455 aa, unidentified
MAKSKKAKASDKMISMPVVNPNAAGIDIGSRSHFVCVAQDNVKEFPVFTHDLHEIARHLQSYGVKTVALESTGYYWRPLYILLQDYGFEVTLVNARHLKNVKGHKTDVVDSRWLQLLHSIGLLSNSFQPDIITHQLRTYARHRKSLLEDASKYITKMNKTLVLMNIQLKAVLRDIAGVSGMRVIEAILSGEREASKLEKLVSIRCESERKDILKALTGDWREEYLFELRDCYDLYHYFWGKISNIDKEIERLLIENSKRNQHEVSKSDYKPDKKKKQHQKNDPKFNVGGFAYEMTGGVDLLQITGVGINTVLTMMTEVGFGMSKFKSGKHLASWLGYAPNRKITGGKLLSSRTRKKTNPLAKVIRDAANSAGNSKSRLGDFFRRIAYRKGRSVAITATARKICVIMYKMLTTKQSFSYDLSKEETEKIKTRKIKNILKSIKGHDISKYELETAWV

SEQ ID NO: 155341 - protein, 341 aa, unidentified
MVEVVTIGLDLAKNVFQVHGIAADGKVLVCRQLRRSEVLKFFQNVPPCLVGLEACGTAHYRTREIAALGHTVKLMPPAYVKPYVKRGKTDAADAEAICEAVTRPTMRFVAIKTVDQQAALMLHKTRDLLVRQRTMLINGLRGHLAEFGIIAAKGPEGVKVVTAALHEAQDRLPELARLALHGIVDQLRQLEAEIDRLEKRILAWHRASEVSRRLATIPGIGPITASTIAAAVPDGTLFRSGRQFAAWLGLTPKAHSSGGKERHVGISKQGDGYLRRLLVVGATAVMRLARKDNASRSWATKLLERKPAKLAAVALANKTARIAWCASACNTGPVSGVIGVQ

SEQ ID NO: 155342 - protein, 344 aa, unidentified
MKNLNVLGIDLAKNVIQICKVSIEGELIYNKAVSPNKLKQLLAKEKASIVAMEGCGSCHYWSRLSEEYGHDARIIAPKKVKAFLQGHKTDANDAVAIAIAASQFGLKYSQIKSEEQQSVQTLEMSRKLLSKDMTALGNHIRAYMYEYGITSSKGQKGLRECVADVLDVEDKRLPVCLKGTLSLLWQRYKQTAEQLKQAEKEKAALVKQLEPCKRLLDLESVGVVCAALLYSSIGNGKNFKNGREASVYVGVTPKQYSSGGKTYIMGIDKRGGDKALRAALFQGAFSVIHKLPEKPKTTKQAWLIDLVARVGVKRACIALANKTVRTAWALLAKEQVYKAVPIAI

SEQ ID NO: 155343 - protein, 419 aa, unidentified
MSFKIFKFNCCGLDVHKTWIYACIGITDSNNRTEYKQARFSSFSKGLHQLCVWLAKYNCNDVCMESTGKYWIPVFNILEQHKIRVTLSHPKYTKPMKGNKIDRKDAKWICDLYMCGMVKPSFIPPADIRELRDLVRYRFKLTCMITGEKNRAQNCLTVSNLKLDDVFSDVFGKSSRSITEQILQHPGEKFDVSPFVDSRCKTPIEEIQAAVDGNISKEQDVKLRQCLDHIDELQKHISEVEQEILRLSDKYEAALNLIRTVPGFDKNPMTAIQVLSEIGGDMSVFLTAKHLVSWAGCCPRNDKSDRKIKSTRISCAGSYFKPVLVQIANALIKSKKHFEFTTRYKRIKTRRGHKKAIIARCRMILTAIWHILTDLKPYTSDGFLESRPVKKEKVLTTSQALNLLRQRGYLIKDEPSPVS

SEQ ID NO: 155344 - protein, 412 aa, unidentified
MEVVHVRCAGLDISKKDAKVCVRIAGAGRRKTIETVTTWSAMTNQVLALREHLVAEQVTCVVMEATSDYWKPFYYLLEDLHGVEVMLVNARHVKNLPGRKSDVSDATWLAQLGAHGLVRGSFVPPEPIRVLRDLTRARTAITRERGREVQRLEKLLEDAGIKLSAVASDITGVSGRLMLEALIDGQRDPSVLANLAKRRLRSKIPALTEALTGRFNEHHAFLARVHLDLIDQHTAVIEEITARIEVVIEPFQGFRYLIATIPGISTLTADVIIAETGADMTRFPTAGHLASWAGTTPGSNESAGRIKSTKTRPGNPYLQGALGAAAMSLAKSPNTYLGARYRRIASRRGPMKANVAIQHKVLTIIWHMATTGTLYDDPGADYFSRLHPERAKNRALHQLQAMGYEVTLDRTG

SEQ ID NO: 155345 - protein, 428 aa, unidentified
MNYNTQNAKIASITEKTLIVGIDVGSETHCARAFDWRNYEYSKKPFAFNNDEAGFAAFKVWMEDIAEKHEKEAVIPGMEPTGHYWLNLGAYLQEQGMKPVHVNPHHVKKSKELDDNNPNKNDRKDPKTIAGLVNEGRFSYPYIPTGIYAEIRNLSNLRIQTQEELTRIKNRIARWFSIYFPEIKDVYKNPDAVSGMMVIKKAPLPCDIKELGVDGVNQVWRDAKLKGAGLKRARTLVSAAEHSIGSTEAPGSARIEIRNLLSDYEVYKNRMDDLMQEIEGKLSEIPYIDKLMGINGIGLKTVSCFIAEVGDIRRFDNPKQLQKLAGYAIVADSSGKHNGESRISHRGRKRLRYALYEAAISVIGKNKEFREIHDYYRTREKNPLKKMQSVIAIACKLIRIFYTILTKGVDYDGQKMLSDIVRPDVMAA

SEQ ID NO: 155346 - protein, 408 aa, unidentified
MEVLHERCAGLDVHKDSVVACARVVADGVLSQQVQTFSTTTTGLLALSDWLVEQACRHVVMEATGVYWKPVWHILEESFELVLANAMHVRNVPGRKTDVNDATWLADLLAHGLIRGSFVPPTSIQELRTLTRTRKQLVREKSQHVQRIQKTLEDANIKLDSAVSDVMGMTGRAILNALVEGEADPKVLAGMARGNLRAKRGVLEEALRGRVTHHHRFLLKLHLDQVAAIEQAISTVETELGALLEPFREKVQRLITMPGVSDIVAQVVVSEIGLDMGRFPTAGHLISWAGLCPRNDESAGKRRSTRLRKGAPWLKTVLVQAAWAAVRAKGTYLRAQFLRVKSRRGPKKAILAVAASMLTAIYFMLRDDVDYRELGASHFDRLDQKKTIGRLVRRLEELGCAVELKPAA

SEQ ID NO: 155347 - protein, 332 aa, unidentified
MKDITAVGIDTAKTTFYVVGFSETGHVVGRKKFSRQSLKKWLIKQIPLTIYIEACGGSHEWGRYLTKMGHTVKLIAPHFVSPFRQGGKNDWNDALAIGIAGAQPTMRYVAIKSIDQQTIQSLHRVRSRLQRDRVAVANQLRGLLAEFDVVLPRSIATLRKRVPEILDSGKFIGVQAELFQGLLEELKQQDDKVKQYTKWIEQLAKADPVAANLMKLNGIGVLTASALSAEVADARVFRNGRQLSAYLGLVPRQFSTGGKNRLGSITKRGDRYIRQLLVHGARSVIRHLGDKQDRTSCWIRQLIARRGMNKAVVALANKQARWAWAVMAQAQT

SEQ ID NO: 155348 - protein, 321 aa, unidentified
MTYVGIDVSKVTFVVAYSSVKTNKTRTFKNTVNGVHEFVQTISASEHNCMLEATGNYSALLVYLLSEAGITISLENPLKIKNFARVMLTVTKTDEIDARLIALYGEKMQPAPYKLRSDAILVLKQKRTVLRQLKKQLVATRNLKGSMEVLPFFDPKCKKTIEKTITFLEKQIKEMEEELASLAQGEYKKQMDLLTSIKGIGVTLAAALIVATGRFSYFDNAKQLTRYLGLSPTYQQSGTSVNVKGHINRNGDSSLRSQLYVAAFSSLRCNTECKACFDRLRSNGKPGKVVVIAVANKLVRQAFAVVTQGKPYVDGFKSEKP

SEQ ID NO: 155349 - protein, 339 aa, unidentified
MKLYVGDDLHANNNFLALVDGEGKRVDQKKLPNDLFVIRDFLKPYRKDIVGIAVESTFNWYWLVDGLMDSGYKLHLANPSAIQQYSGLKHSDDKHDAFWLAQMLRLGILPEGYIYPREERPTRDLLRKRRHLVRLRNSLLLSLQNIISRNCGVQFRANEVKRLKEDRVSPLLESNEDLALAGKTSKEMIDQLTRQIYRIETFIVQRVELKEFYRYLLTIPGVGKILALTIMLETGPIGRFAEVGHYASYCRKVSSRWTSNEKTKGKGNQKNGNKYLAWAFSEAAEFARRYDAQARDYYTRKMRKTNFMVAHSALAHKLARAAYYLMKEQVPFMPEKLFC

SEQ ID NO: 155350 - protein, 362 aa, unidentified
MTCTIYILTPLFQRIQSVSDDLTKVKVGLEATGHYSYNLLGFLLDNGLPTFVINPLHTNLYRKSLSLRKTKTDKVDAHTITSMIMSDVNLKSYSDTSYHNEELKSLTRYRFDKVKERATLKSSVSRLVCILFPELEKLVPTLHMASVYALLSEFPSASAIASAHLTRLTNLLSESSKGRYHKDTAITFREAARNSIGSHMPAKSLELKHTIKLIRELDAEITEIENEIKIIMDEINSPIVTIPGINYRMGAMIIAEIGDFSRFDSPDKILAYAGMSPSTYQSGQLDNCYAHMEKRGSKYLRYALYNATKYVCHWDESFSLYLAKKRAEGKHYNVALSHATKKLVRTIYAMEKSGQTYNSKSE

SEQ ID NO: 155351 - protein, 440 aa, unidentified
MKSVQLQHKRSLINGKIIIGIDPAKTKHQAAIIDTHGVQLGKSFSFDVSLDGYTKILWQKLTQILSTYSRDTSVFAIETSCNLWLTLAFYLHHEGYHVLLVSPLTTYHSRPMVNHDFSRTDPKDALLVASNARQGFFDLYEDFPPLGNAMHRLTITYCKLRKELAQNRARLRASLEQLFPEFLEIVEPDTQTALYLLKRYLFPSDFLDLDLASEANAILAISRKQFGLQTLLQLQKAARHSIGVLKSQEEAIAERLSVKCWLALIESLSAQMQTVFTALADYAARLPEYTILRSLKGVSDLTAALLLGELRDIHRFTHYKQLEKKAGLNLRLNQSGKYVGARHISHIGSKRLSWLLYTMTEETARWVPEIRAKYLRRQLHRRNHRKSIVASIPQLLKLIMVLVKEQRQYEIYPDSVIQMQALEKQYSQLKVQRKTTKQAA

SEQ ID NO: 155352 - protein, 340 aa, unidentified
MHATIIGLDLAKNVFQLHAEDRSGTVLWKRRLRREELEAFLRKQPPALIGMEACGSAHHWARVFTAMGHEVRLMHAKYVKAYVKRGKSDVRDAEAICEAVQRSSMRFVPIKSVEQQIDRSLERARDLLVKQRTQLMNATRALLAELGVVARAGLRGFTTLADKIAAGDAVIPRPSLTALKPLVEQWRALQASIDQLEARLVARAHSDERMRRLMKIPGVGPLTAHAVVTAIGDPKRFSTGRDFAAWAGLTPLTDSSAEKTRIGHISRQGDHSLRRLMVLGAVNMARHARAKPCEANAWLNGVIARRPVKVAMVAQAAKTARIAWALLCSGENYRGRTAAA

SEQ ID NO: 155353 - protein, 340 aa, unidentified
MKNGLKLLGIDIGKNSFHLIGHDAGGHQVLRKCFNRNRLLQFAAQIEPCTIAMESCGGSHWLARKLASLGHRVKLIAPQHVKPYVTGNKNDFIDAEAICEAASRPRTHYVAVKTVEQQVLSVQHRLRQSLVCHRTEAINRVHGFLLEFGIALPATKAAITKVPELIDDSRSDLPLQFKRVMEHLLEDIHRLDTEIKACDAQIKQQLAQDDAGTRLMTIPGIGPITASAFVADLGDASNFRASRDLSAFLGLVPRQFSTGGRPVLLGISKRGDRHLRTLLVQGSRALMIRIERRDDALGQWVRDLLARKHPNKVACALANKLARIVWAVLRRGSTYNASMI

SEQ ID NO: 155354 - protein, 351 aa, unidentified
MIIIGVDYHPSFQQIAFLDQETGECGERPLNHSDGEAEKFYRELKPRGVSVRVGMEATGHSRWFERLLAELGIETWIGDAAKIKRQRIRKQKTDREDARLLLKLLLENRFPRIWVPSPENRDLRQLLWHRHRLVQMRTRIMNQLQAVAMNEGYRWKKKLFSAQGRALLENLWLAPWASRRRKELLELLDQLDPKIAELTAAAEREAKKQPDVVRLMTHPGVGPLTALAFVLIIGTTVRFRCGKQIGSYTGLIPCEDSSARKQRLGHISKQGNTLLRFLLVEAAQAAARCNPDWRRRYVHLAMRRHKNIAKAAMARKLAVRLYWMWRNGWDYSQLVEFGSNAGKLATGHGVN

SEQ ID NO: 155355 - protein, 450 aa, unidentified
MAKRKKKGKTVKTLHTLQPNAAGIDIGATEIYIAVPEDRCSETVRHFGTFTEDLHQAAQWMKQCNIESIAMESTGVYWIPVFQILDRYGFDVSLVNARHVKNVPGRKTDVQDCQWLQYLHSVGLLRGSFRPGQDICAVRSLLRHRDTMVKSASSHVQHIQKALTQMNFQIHNVISDIVGVTGLAIIDAIVAGERDREKLADLTNPRIKADRQTILKSLEGDFRPEHLFTLKQALSSYRHYQQMIRDCDLEIGNHLNSFDSHPDFDETSLPPSNRSKRKSKDTEPAFDLKSHLHRLFGTDLTQIDGVSTLTGQVILSEIGPDLSMFPTANHFCAWLGLSPQNKISGGKILSSKTRPGSNRAAHALRLSANALFRSKSYLGNYYRRMRSRHGAPKAITTTAHKLARIIYHLIKNRKPFDETVFAEQERKHQERMKRSLIKRAKSFGLQVVPA

SEQ ID NO: 155356 - protein, 456 aa, unidentified
MSNSTGTPRKPRSKLTVINPRAAGIDIGSRFHVVSIPSELDDQPTRQFGTFTGDLLELASWLKVHGITTVAMESTGVYWIPAFEILVKTGIAVALVNARHVKSVPGRKTDINDAQWLQQLHSYGLLRGSILPEGSLAHLRSYMRTRENLTRGRARYLQLIQKALMQMNLQLHHVVTDVLGETGRRIITSILAGERDPLVLAEHRDARCKQTQQTIAKALEGNYEDDHLFELENAFSLHEYYSERISRCEDRINELLQTLVESTSEENRHFINDKKLSSAKLDSRNRIRSLNFNPRPLCAALCGRDMMELPGMGHGTLLTVISECGTDMKRWPTAKHFTSWLGLAPRNKVSGGRLLSSDTALGANPARTAFWMAAQVLARTQTSLGGFQRRLASRIGRPKAIIATARKLAELYYRALRDGISLADPGLSRYEAEQRQIQINAIKKRAQRLGLTLTEA

SEQ ID NO: 155357 - protein, 364 aa, unidentified
MEEPTHIGLDVHKETIAVAVLRAGTVECDERVIPNTPEALRKLLSRYPDRSLLRTCYEAGPTGYDTQRLITSLGIACDVIAPSLIPRRSGVRVKTDRTDARNLARLHRAGELVAVRVPTPAEEALRDLVRAREDLKNDRRIARQRIRSFLLRYGKRYPAPGSRWSFRFEVWMRALRFDEPASQAAFDHLVGAYFVRDSQLGAVDAQITELALLEPLAEPVARLRAFRGIDTLTAVTLLTETCDFRRFATAGSYMAFTGLTPSEHSSGASRHQGSITKSGNAHIRRVLVEAAWAYRYAPAVRGKLRARQIGQPPEVVAYSWAAQCRLHGTYRRLAAKKGPNKAVVAVARELAGFVWGAMTDNMAV

SEQ ID NO: 155358 - protein, 427 aa, unidentified
MVVEVEQVDVDSEGQEIIARVAAMDVGKAEVVCCVRIPGPGSGGRRMQEVRTFTTMTRSLLGLGDWLAELGVTRVVMEATSDYWRAPFYLLEDRFETWLVNAKDVKHLPGRPKTDRLDAVWLCKVAERQMLRPSFVPPPAIRQLRDLTRYRVDLIGARTSEKQRVEKLLEDALIKVSVVVSDVFGVSGRVMMAALIAGERDPKTLADLARGRMRSKTDRLVEAFTGRFSDHHAFLLATMLHRVDAITADIATVQTRIDTQITPFAPAVTRLDEITGVGLTAAQTIIAEISIDMSRFPTPAHLVSWARYAPGISESAGRIKGNSSTGHGNRYLARVLGEAALAASHTDTFLGERYRRIARRRGKKRAIVAVGRSILIIIWQLLSDENTRYIDLGSGHYQTHTNLNRKMRNHIRELQNLGYRVTLEPAA

SEQ ID NO: 155359 - protein, 339 aa, unidentified
MKLIRVGVDLAKNVFQVHGVDRAERTVWRRRLRREDWIKVLRERVEPGCEIGMEACGGAHHWARELQKLGYRVKLIAPQFVKPYVKSNKNDANDAEAICEAMGRPGMRFVPVKTVEQQDVQAMHRVRSGLVEQRTAKASQIRGLVAEYGLVVPRELVQLRRALPRWLDDEANGLSSAFRRLLEGLRHDLVLLDERVKELDREIEQLAQRDPSARRLMQLRGVGPITATALVATIGNAKQFANGRQMSAALGLTPRQQSSGGRERLLGISKRGDAYLRTLLIHGARAVIRTAPSKDDRLSQWVTRLAARRHINVAAAALANKTTRIAWAMLSRGTDYQPA

SEQ ID NO: 155360 - protein, 381 aa, unidentified
MKIASGLDVHKDSVFLCILHENGEKIQQKFGVLTEELELMRDLMLSEGVEECAMESTSIYWMPVWRVLERDFKLHLVNPYFIKQLPGRKSDVRDAEWIATCLIKRLISSSFVPEEKIQRLRQYNRRIFDLSASISRNLVKLDACVQRCNIRISNYVSTVDSKGYRTVVKMLSQGITDPEVLVGALHGRTVNKHGREVLVGALTGVINDTDIDIISQLMEEIELLQRHKDEAQQKMTELCRQWFPQELESLQTIPGVKERSATSIIAETGTDMSKFQTPKHLVSWVGLRPRNEESAGKIKSRRIVHGNKFMRKTMIECGWAAPRTKGSFYSAFYQRQTIGRRKNKMKVQVAIARKLLTVVWHVLHDGCPYVPYKDLSTQGTL

SEQ ID NO: 155361 - protein, 310 aa, unidentified
MDAIYVGIDVSKDRLDVHVRPGGETFAVERNGKGLENLVDRLRDLSPLLIAVEATGGFETIVAAAVAGAGLPLAVVNPAQIRHFAQAVGKRAKTDPIDAGVIAHFAEAVKPEPRPVPEETAVLLAELVGRRRQIIEMLVAERQREKHASNVRVRKSLARHIAVLERELPSIDQDIDGLVRGAPVWREKENLLISVPGIKNTLARIFLAEAPELGSLDRRRIASLAGVAPYTRQSGRWRGKAMIGGGRTALRSALFVAALTVSRHNPLLKIFYQRLLTAGKPKKVALVAVARKLLTILNAMLRDNRKWQSA

SEQ ID NO: 155362 - protein, 348 aa, unidentified
MLHAGLDLSRRKLDVCLLSDAGELVDEFAVPPDADGLAGLVRRVGRQPPQAVIESMTGARFVHDRLEELGWDVRIADAAKVKGIGSLAAKTDKIDARVLAILSQRDLVPEIWLPSLEIRQERELARFRLHLVKHRSMLKHRVHATLVSFGKPCPVSDLFGIAGRRMLAELNVPEPWRSTLQASVLAIDQLEAQIDQCNTQLRAMRPDHKYLPTLMSAPGIGWVLGYTIAAEIGEIERFATADKLVGYTGLCPRVIQSGDSDRRGPLTKSGPKFLRWAMLEATMHALRHEAYAERYQRTKRRLGKQRGAKVAQIDIARRLTKSLWHMLTYDTPFSPQTAAGGAAFRLVA

SEQ ID NO: 155363 - protein, 407 aa, unidentified
MGRYYLGIYWGDRVHQVHVRDEGGSRVAEMRVEESVEGMAEFGRWLDERRAGGIELWAAIEKPEGRIVDFLLDHGVEVFPINPKALDRARDRFRQSGSKSDPFDAWVLCEFLRTDHMHLRPLKPDSEQAQELKILTRDHQRLVRHKTRVLNQLEVTLKEYYVRPVEVFGALDTPMALDFLKQYPTPQALHELSFRRWKHFAREHRLTEKHSAELWERLSQAQLRVPDHVIRAKVQLVEVLVEELEVLVRAVQKYGQKVERFFASMPAAKLTKKLPGGRSGTVIPTVWAQLGDVKGRWESFKHLQAHAGTVPVTKRSGKSQVVHFRYACNKEMRHAVYLLAFISLRQSEWAAAYYRRQRERGHSHHQALRALGAKWLKILFVVWRDQVPYDENYHLANIARQHLRQAA

SEQ ID NO: 155364 - protein, 345 aa, unidentified
MEQDMKQKVNNVGIDLAKNVFHLVGTDTRGTILWRKRLARNALMPFMAQLPPVTIGMEACGGSHYWARQFRQQGHDVKLMAPQFVKPYVKSNKNDMRDAEAIAEAVTRPTMRFVPIKEVDQQDIQALHRIRARLMKERTALINEMRGLLGEYGIVLPKGVTQLRKGLLGKLEEEQAKLTPLSEELFHRLFNELVKLEEQIAYYDAKLKAMATSHPECLRLLTIPGIGPLSATALVAAMRDASAFKNGRQFAAWLGLVPRQHSTGGQTNLLGISKRGDSYLRKLLIHGARATLRWADLKTDRRSQWIRELIARRGSNRAAVAVANKNARIVWALLSRGGVYQEAAD

SEQ ID NO: 155365 - protein, 388 aa, unidentified
MLKYCIGLDVSSNDFHACLSVIDRLQKVTVKGSSKFTNNAKGFSEFEAWLIKQHKQKEIPLVVVMEATGVYYENLALFLHLKGYNVSVVLPNKAKKYLQATGLKSKNDSIDAQGLSRMGSEQALELWQPKDEYFYQLRSLTRQHQSLQELKTNISNQLHADQHGMYQNKVVTSQLKLLIKTINHQIEDIENAIEDHLNKDKHVAELVVGITKIKGLGALTVAVILAETNGFALFKNIPQLVGFAGYDVVENQSGKHVGKTCISKKGNGHIRRCLHMPAFNVVRYEQTPFIQLFNRTFQKHGKKMKSYVAVQKKLLVLIFTLWKKEEAYEPIRINHSGDQEQTSSSLLSFQEAGETDTKQNSATQKATLHKVNILSNESQHASSLLLQK

SEQ ID NO: 155366 - protein, 342 aa, unidentified
MIYVGIDVAKLNHYASAISSDGEVLLEPFKFTNDNDGFCLLVSKLSSFEMDQIIIGLESTAHYGNNLLMFLVPKGYKGCLINPIQTSTMRKNNIRKTKTDKVDTFIICKTLMMHPHRFVTLYDLGLIQLKNLGRFRQKTVKQRTRLKIQLTSYVDQVFPELQYFFKSGIHQKGCYALLKEAPAPESIASMHLTHLTHLLKSASKGHFKKETAVELRVLAQKSVGTSDKSLSIQITQSIEQIELLNRQLESIESEMKDIVASLDSVIMTIPGIGYINGGMILGEIGDIHRFSNPSKLLAFAGLDPSVYQSGNFQASHTRMSKRGSRALRYALINAAHNVVKKQ

SEQ ID NO: 155367 - protein, 334 aa, unidentified
MEEAPSSSSNLAFSLGIDVGKANLELALRSKEDTVERTTVPNDSEGHSTLVDWLSKQGASPEETRVCMEASGDFEEAIAQHLYDNGYRVSVVNPRRIKGYASSQLQRTKTDAADASLIARFGQREDPRPWEPASAAESRLQELTRARQALQKEKTRTQNRLDEAEDEAVQKAHQNLLDEIKRQIEDLEEEIEERVEENSELNDQCSLLETIPGVGLQTAAIVVSELGSPEQFESARQAAAYAGLVPRHRKSGTSIRGKPRMSKVGNGRLRRAMYFPAMTALRFNSAVKAFGDRLKERGKEKMVVIGAAMRKLLHICYGVLKSGRPFDPSLHPGT

SEQ ID NO: 155368 - protein, 372 aa, unidentified
MQRRPAYEKEYHCGSERKQIFSEKKLTIGLDLGDCWSFYCVLDEAGQIILEQKLPTTPEAMKQTFGKIPRSLIALETGTHSPWVSRVLTELGHEVIVAHAQKVQWITKSNRKDDRHDARTLARLARVDPELLGPVRHRSAKAQIHLTVIRARAELVSARTALVNAARGLVKSYGQRLPKCGTYQVNEKLAEGLSAELREVLVPLFKEIESLNERVKEYDERMEKIAKEVYPEVSLLKQVKGVGTQIALSYVLTIEDPYRFPKSREVGCFLGLRPGRRNSGESEPQKGISKEGDRYLRTMMVQGAHYILGPFGEDSDLRRWGLKLAERGGKNAKKRAVVAVARKLAVLLHRLWVGGEVYEPLRNSQKAMREVA

SEQ ID NO: 155369 - protein, 340 aa, unidentified
MRVIIGIDPHKASHTAVAIGCDEQQLAEIRVRATCQQTAKLLAWAEPLGERTWAVESAGGLGYLLSQQLVEAGEHVLDVPATLASRVRVLGTGRSNKNDPNDALAVAIAALRSPGLRSVEPANHTEVLRLLAKRNHDIGRLRNIVVSRLHAALANLSPGGIAKELNASDAVRLLGDFNPKTAVEQTRYDLALELLDDVRRLDVQLKESHKRIKTAVQASGTTLTELYGVGPILACELIGYTGDVRRFTTRDKFASYAGVAPIELSSGGRIVHRLSRRGNRQLNHAIHMVAICQIRQTNSEGRAYFERKVAEGKTKREAIRSLKRHVANAVYRQLLVDTNK

SEQ ID NO: 155370 - protein, 327 aa, unidentified
MNSVYERCAGIDVHKRNVVVCAITPDQQGQRRKEQATFSTMMPDLLRMRQWFQRLGVTHVAMESTGSFWKPIFNVLEGQMEVLVVNAQHLKAVPGRKTDLKDAEWIADLLQHGLLRSSFVPPAFQRELRELTRYRTSVVEERSRTINRLQKILEDTNLKLSAVATDLMGLSAREMLAALLAGETNPTVLAEFARGKMRAKRDLLVQALQGQFKPHHRLLIGEQVAHIDALDEEIERLSTDIAQRLRPYEAQLKRLETIPGIKRRLAEVILAEIGPDMQRFPSARHLASWAGMMRLRIVRTPTFLHNTTASCSGEEERRRRLRWDTPC

SEQ ID NO: 155371 - protein, 323 aa, unidentified
MSNKKTVEFEQVVSRCCGLDVHKKEIVATVDGDGIQKETRSFSSATRSLTELKEWLLELGVTHVAMESTGVYWKPVMNILEPGGFTILVVNARHVKYVPGHKTDKKDSAWICKLLLAGLLKGSFVPGQSQRDLRDLTRYRRKLVQNLAAEHNRMIRIFEDANLKLSSVFSDVTGKTCTKVIDHVIAGETDPELLASLCTHWRLKSTQEEIALAVEGRFREHHKFMLQAIRRSMGHLADDIKALEEEISRRMQPFEEEIARLCQIPGISRTSAKDLLAEIGVDMEVFPSAAHLSSWAGVSPGNNESAGKKKAHAPTMATSKPKR

SEQ ID NO: 155372 - protein, 392 aa, unidentified
MVVSVGIDVSKNKHDCFIVSSEGEVLADVFTIPNNMNGFHYLLQRIKDCTTPQDKIKVGLEATGHYSYNLLGFLLDNGLATYVLNPLRTNLYRKSLSLRKTKTDRVDARTIASMLLSDAGLKPYTDTAYHNEELKSLTRYRFDKVKERAKLKSSVSRLVCILFPELEKLVPSLHIASVYALLEEFPGAKQVAAAHLTRLKALLETVSNGRYKRDMALEIREAARNSIGSRMPAKSLELQHTIRLIRELNAEITEIEEQIQSVMDELHSPITTIPGLGFRMAAMILAEVGDFSRFDSPDKLLAYAGMSPSTYQSGQLKNCYPHMEKRGSRYLRYALYNATKYVCHWDPAFAAYLAKKRAEGKHYNVALSHAAKKLVRLIFAMEKSGMPYHLAA

SEQ ID NO: 155373 - protein, 338 aa, unidentified
MQIKKFIGIDVSKKTLDITIVDSQGKQIYYERIANESKSIKICFMSFMKNLNLNYNESVFCMEYTGIYNLPLVKWLKKQSALIWMESGTQISKSQGLVRGKNDKVDSLRIALYAFSNRHNIKLWKAPREIIEKLSVLLSLRNRFIKAKKQLSVTIEEQKLYLDKNTIKTLKKLNADPVNELMKSIQKVEKEIMELIKTDERIFRIYKIATSVDGIGMITAVNLITTTNEFLSITEAKKYACYSGVAPFEHSSGSSVRGKTKVSHMANKKTKTLLHLAALSAIQVKGEIKEYYKRKVEQGKNKMSVLNAVRNKIIQRVFACVKQDRFFEKNYQFNLVKP

SEQ ID NO: 155374 - protein, 342 aa, unidentified
MKQIKIVGLDIAKSVFQVHGVDADGEVVVRRRLKRSRVVPFFSSIAPCRIGIEACATSHFWARELGALGHDVRLMPPAYVKPYVKRQKNDAADAEAICEAVSRPTMRFVPVKTVEQQSVMVMHRTRELLTRQRVRLSNAIRAHMAEYGLVAPIGRNGLQALIEVIGDETDGRVPPEARLCLKMLVAQLQLVNVQVLENDRRIRASARSTEVGRRLMEIPGIGPVIASALVATVPDPHVFRCGRNLSAWIGLVPKQSSTGGKDRLGSITKQGNRYLRQLLVIGALAVIRYAQRNGTRRPWLVQLMTRRTTKVAAIALANKTARMVWAIMVSGERYREPVVQTA

SEQ ID NO: 155375 - protein, 324 aa, unidentified
MFFLGIDVSKAKLDCALLGSDANKRKTKVVPNSIAGVQTLLQWCAKQGAEPAQLHAVLEPTGQYHEQAATALHDASVSVSLVNPAQVRDFAGALAVRSKTDGIDSYVLARYGQALNPGLWRPAPLHARQLRALLARRDALAKDLQRELNRQEKTQFSDPPVLVEGSIAKTIAFLREEIKRLDHAINDHIDRHPDLKEDRELLTSIPGIGDRAGNSILSIMHNRPIESAESLASYLGVVPVQRQSGTSLNSRPRLSKTGPSTVRATLYMAAIVGKRFNPHVAALYARLLAAGKSKMAALGAAMRKLVHLCFGVLKTRTPYRPDYA

SEQ ID NO: 155376 - protein, 346 aa, unidentified
MLYAGLDLSRKRLDFHLLDGEGASVEVGASPPDADGLRGLSERLARHGAPIRAAIESMNGARFVHDRLELHGWHVEIADAQKVKGLAPLACKTDRIDAWVLAELARRDLVPAIWLPDPLVRAERERARWRLHLVRHRSSLKQRVHAVLLTHGKPCPVSDLFGLRGRQLLSQLGLPEPWQGTIEASLRLIDELDREIGQCERELRRLGADHRYVPLLLTVPGISWVLAYTIAAELGDISRFPTPRKLAGYSGLCPRVYQSGERDLRGPLSKQGPRYLRWALVEAATHACTHPVYRDRYQQTKARIGKQRGAKVAQVDLARRLSQAIWHMLTRNEPFAPKSATDPLAA

SEQ ID NO: 155377 - protein, 321 aa, unidentified
MYKVIGIDVSKATLDGCFLDGSQKESFVVSNTQQGFKKIALKAKGALVVMEASGPYYLQLSNYLHTHGIEVSVVNPLVIKRFSQMNLQRAKTDKKDAETIANYGRIYDPKRWSPNSKNTNSIGQLYSAMELLDKQIRQLKGQQEAFDNSGELASLLRKELKSMVNFLVKQKQKLSLEVERLAEQEFGEKIDKITSIPGIGKKTAIMLNVITDAFTKFEHHKQLTAYIGFSPRVYQSGTSVKGKGHICKMGNAQIRKLLYLCSWTAKFCNKACREMYERLKEKGKPERVIKVAIANKLLKQAFAIGKSQMNYSENHGDNICF

SEQ ID NO: 155378 - protein, 353 aa, unidentified
MMVIGVDPHKQSHTAVAADELGRKKAQKTVRARRDGHRELIAWARQACPGGRAWAVEDVRHVAGGLVRELLAAGETVVFVPPKLMAGERRGGRERGKSDPIDALAIARLALREGAGLPAARLDEPVLEVRRLADYRDGLVAERTRAVNRLRWMVHDLDPELAPAPRSLGSGRARARLQAGLAALPASAGQRVALGQLARITALSAEISALEKDLAGLVTVLVPDLLAIPGVAVLTAAKILGETGDIRRFRSPAAFARHNGTAPIPASSGTGHDGPHRLNPGGNRQLNAALHRIALAQARCHPGAAALLARRGRDKHETRKASFRVLKRHLSDTVYRALNADAWRLDDPNQHAA

SEQ ID NO: 155379 - protein, 422 aa, unidentified
MVMDEITEEPGALVERIAALDIGKATLTACVRVPHEDKPGARRQEVRTYATLTPALLELRDWLICQGVTLVVMEATSAYWKPPFYLLEDDIECWVVNARDVKNVPGRPKTDKLDSVWLCKLAERGMLRASFIPPRPQRQLRDLTRYRRTLTQERTREKQRAEKLPGDAQIKLSSVISDIFGASGRAMLDALIAGRRNPHALAALAYKNMRAKTSVLQEALTGHFTDHHAFMLGMMLARIDALTTQIDTLTTRIGQAIAPFAAQVAQLDEIPGIGITAAQDLLAETGTDMSRFPDAGHLVSWAKFAPRARQFAGRSKAASTGKGNPWLGGTLGEAATGAARTKTFLASRYKRIVRRRGKQRALVAVGNSILTIIWHLLSDPAARFTDLGPDWHDRLAPLRRKRQLIAELERLSGKKVTLQHTV

SEQ ID NO: 155380 - protein, 316 aa, unidentified
MENQLGMCSIGIDVSKGKLDIYFHPGGRYEQIDNTDEAVKAFCQRVQQESKDVRICCEATGNYEHILVKEAEGKGLPLALANPRQVRDFAKALGLLAKTDKVDAKVIALFNEKVQPRIKMPVSKEQEELGEYRKRREQLVDMLTMEKNRLDRSKGAITKSVKKLIKTLEQEVEAIEKAMQRIVEEDIELQEKSRLLQSCKGVGQVLSHTLLAYLPELGKLNRGSIAKLVGVAPLNQDSGRKQGKRKIWGGRSAVRKSLYMAALVASRYNPQIKALYMRLITAGKAKKVALVACMRRLLLTLNNMLKNKTTWQAIYG

SEQ ID NO: 155381 - protein, 412 aa, unidentified
MDVYCGIDWAEDHHDIAVVDRDGQLLARRRISDDAAGLAQLLGLLAGHGDTPQDPIPVAIETPRGLLVACLRATGRQVYPINPMSVARYRDRHSVAGRKSDHGDSVVLAGVLRTDIAMHRPLPADTELAQAIAVLARAQQDAVWDRTTAHNKLRSCLREYFPAFLAAFADARGGITRPEARAVLAAAPTPADAAKLTVTQLRAILKKAGRSRALDTEATRIREAFRTQQMRQLPLVEQAMGRQALALLGQLDAACAAADDLEHAVTQSFNLHPDAGIITSFPGLGALTGARVLAEIGDDRSRFQDAKGLKAYAGAAPITRASGKTRSVTRRRVKNNRLNAAGYIWAFSALTASPGARAHYDRRKDAGDRHAAAQRNLFGRLLGCLHHCLITGQHYDEATAFPAATKQSRRAA

SEQ ID NO: 155382 - protein, 391 aa, unidentified
MSMYFIGIDISKYKHDCCIISAADQKVVSKVTIKNNKAGFNELLTIIHSLANPADIRIGFESTAHYALNLELFLENSLLTFMEVNPALISEYKKSKTLRRTKTDSVDCESIARWLMTVEYKPHSKGFYHAYSLKSLTRLRDKLIRQRSFYLVKITNVLDHTFPEFKPFFNERLSKTALYLLENYGSAEKMARMNSASYEKLRSLSRGKFSPQQFLRLKELAANTVGVNNSIFDVELNSLLSLYKSLVKEIDTIEKEINKLIEEVHPHYMSVPGIGPLSAAVIYSEYGDISNFTNPGQMLAFAGIEPGINESGTESHGGKMVKRGSSQLRYTLINCRLPLIRFDMTFATYYAKKREEGKPHRVAITHVAKKLIRVIYTLESQDIDFNAQKLR

SEQ ID NO: 155383 - protein, 356 aa, unidentified
MKVFYLGVDVSKKKLDLCLRSNGKDILYDVIPNDLSSIKSWLTRTFEKFFLSEDSLVVCAEHTGQYTYPLVCATKSIGVYLCLEDAAKIKYCHGIPRGKNDKIDACRIAMYAERYNDCLQPYTASELIIQKLKNLSTERSMLVADRAKYQSQLKDQVDYMEHSIYIAKCNRVEGIINTFTDYIAQIDLEIKELINQAPVIAHQMDLLMSVDGVGERVALKMIMETDAFTSFTDPRKFCCHAGVVPFVYVSGSSQRSKNRVSNRADKSIKHLLHMAALSVSQVKNSPLKKYYDRKVEEGKNKMSVLNAVRAKLVTIMFAVIRTDAFFSRNYQNSLINKKRGGPQRPPPTSFPCTTTA

SEQ ID NO: 155384 - protein, 379 aa, unidentified
MLPVSTLPESAVVSFASSAGVDLHKCTVSLDAVDPLGKSIARLTCSTKCVEKIDAFLAVLPRPSHLAVEAVGFVEWFIDRFRGSVDRIEIADATRLSDLRGKRRKTDRNDAHDIAVRLARGDCPLGFVAPEEVMQLRKLGRHWRCLSRSLSRAKHSMSSILLAANLKGPTLDGAGAQRWLLAHGHLLKDAQRDAFGDFVDLIELLERKRGVLKRKIIQANGSERFDGLITILRSVPGIDHIWACIIASEIGDFARFPNADALEFWAGMTPDNLTSAGRTTSGHITKAGNATLRWALCKAGVTLCRSDAKQEAIRQRLIAKIGKPRANVAMGRRLLRILYAMVRDGSLYQGQVKTGHEAKANIVRLKKIQRVKEGQMQTV

SEQ ID NO: 155385 - protein, 387 aa, unidentified
MTSTSAAAHPAPPDYDITLVLAIELSNTSWVLAAQVPGLPRVKAKRSVKPTAEGLMAAIEAYRERAREVGHTVERVIAVYEAGWSGFWLARWLALRDVEVHVVQPSSIPVDRRARRAKSDGIDAELLLRSLLAWLRGEPRVCSMVPVPAEFDEDARRCIRERAELVAERVSLVNRIGAVLATLGVSDFNPLLRNRRKRLEELRTGLGTAVPQHARAKIIRMIDRLELVLEQISELDRERDAVLEEKAPDKAALMIQELVKLRGIGVQSATVLVHEAFVREFANGKALGSYAGLTATPYSSGGTEREQGIDKAGNRRLRTVMVELAWLWQRYQPNSAEVCWFRKRIAGTGARMRKVMVVALARKLLITLWRFVTLGVLPQGAVLKTEF

SEQ ID NO: 155386 - protein, 410 aa, unidentified
MSAEGLWVGVFRSRGKGDAMGRAWIGVDIGKDFHWALAIDETGREIFSRRVENEQGDIERLVDQATTLECELVWGVDMSHGPVVLLVASLLAAGQEVVFVPGLMVNRCRGAFVGANKTDALDARVIAENARMRHDLAVFGVKDDLLVPLRMLVERRKDLVADRTRSITRLRSVLITVFPGIERGLKIKNKGVLVLLTHYQTPEAMRRAGEKRMTEWLANRKVHGAAKLARKALDAARAQTIVLPGTDTAAALVARMAEELLDLDVRLTTATKELETCFFSHPQARIVTSLPGMGPSLGAEFLAAVGDIGRFKNADRPAAYAGLAPVSRDSGKTQGRLVSTRAGNHSLKRVFFQAAFASLHEPRSRAYYDRKRSEGKRHNQAVLALARRKVDVLWTMLRDDTLFKSSARAA

SEQ ID NO: 155387 - protein, 311 aa, unidentified
MDKTIEFAQVVDRCCGLDVHKKVIVATVEGTGIARQTREFESTTRSLTELKEWLLELGVTHVAMESTGVYWKPVINILEPAGFTLLVVNAQHIKYVPGHKTDKKDSAWICKLLRAGLLKGSFIPDRAQRDLRDLTRYRRKKVQEVTAEKNRMLKVFEDANLKLSSVFSNVNGVTCTRIIDEILKGNTDPDYLASLCTHGRLQSSKEQIRDAVEGVFTEHHKFMLKAIRRSIASLEEEITELETEIDRRCEPVQEEIERLCTIPGIDKTGAKELIAEIGVNMEVFPTAANLASWSGVSPGNNESAGKKKART

SEQ ID NO: 155388 - protein, 344 aa, unidentified
MVHVGVDLDKRSSQIAVLTEDGEVAQQRLPNDVARLEKFFAELPPHTPVAIEASGTWWWLVDLLEHLGHDPILSHPKQTKAIAAARLKNDRVDAERLALLLRGDLLPTVWIPSAALREARELVRHRVQLVWLRGIVRNRLHAMLARRNLQPVSTKTWLTQRGQRELQRLPLADTPSRIREDCSALLPLLDAQIRRLDSELGARWGGDPRVQRLTTIPGIGPFIAIVLVLELGDIARFPSAKQVASYVGLTPRIRASAGRIRAGHISKEGNRLLRWVLVLAATQAVRRPGPLRTWFHAVKKRRGKKVARVALARRLAEIVFHVWKHECDYFTVVRHGVVRGELGR

SEQ ID NO: 155389 - protein, 468 aa, unidentified
MKRKNRGAKCQKGSPFDGELKLIEADAAAIDVGSRSHWVAVNPQRDREAVREFGAFTTDLMRLADWLAQCEVKSVVMEATGVYWVGLYDLLESRGFKVYVVDAHTVRHLPGRSKSDVKDCQWLRRLHSYGLLRGSFRPPAQIRQLRNYLRSCTKIVEAAAQQQLRMQKALTLMNIQLHHVISDISGLTGLSIVRAIVGGERDPKQLAKLRDPRIRASKETVEKSLQGHWQEELLFDLKMALESYDHFQGQIAAYQEQMRRALQEVPSKVDVLEEPLPAARPKVSHKRPGMSREDQLDLRVELYRISGVDLTRIDGIGLQTAQTVFFEIGTDVSAWPNEEAFSSWLGLSPNHRISGGKVLKRGSRKVVNPLSIALRLAARTLRNSQSALGANFRRLIAKIGMPKAITAMARKLAVLIYRMLKYGTQYVDKGMEHYEAKYRETKLQYLRSQAAKLGMSLVTNDSALTAPC

SEQ ID NO: 155390 - protein, 339 aa, unidentified
MGEVSTIGLDIAKSVFQVHGVDVAGAVVIRKRVSRAKVLEYFGELPPCLVGIEACPSAHHWGRELQALGPMVRLIPPSYERSKNDANDAAAICEAVTRPSMRFVPIKTKEQQTALMLHRTRQLLVRQRTMLSNALRGHLAELGIVSAKGRNGTAELLRIIADGADNRVSPAVRGILNVLARQYGAIGIEIASIDKSIMALHRACEASRRLAEIPGIGPIGATALVAEIGDWKTFSSGRSLAAWIGLVPKQHTSGGKDRLGSITKQGNRYLRWLLVVGAMAVIRYARKHGIRKRPWLARLMERRPTKVAAVALANKIARMAWAIMVHGERYKEPKLLPAA

SEQ ID NO: 155391 - protein, 345 aa, unidentified
MKKIIIGIDFSKETFDATLLDCRNSELSEAVQSAVHEKFTNNKEGFQAFVKWIKSSVKKITPDELLLCGEKTGKYSLSLSNFLYAKGYSIWLDSGLRIKRSLGISRGKSDKADSLKIALYAYRYQDMAVCYVPLSKNVSRLKELFLYRQHLVSQVKAMAVRKNVTDDFKKELGDVKFIVDSAAKIIQQIKATIKKCEEKMQELIEEDDELKTTHDSITSIKGISLINATAFIAYTNNFKDFGGNAKKIATYWGVAAFAQESGTSVHKVARVSKIASKMLKSLLTQAARITVRWEPKFRQYFEQLISRGKHQGVALNNVKNKLIHVITALAVSKEKYNREYEYIKR

SEQ ID NO: 155392 - protein, 455 aa, unidentified
MKPTLEELSIVHPNAAGMDLGAEEIWGGVPADRDAEPVRAFGTFTPELQARVDWLVQCGVDTVAMESTGVYWIPIDELLEARGLKPYLVDARQVKNVPGRKTDVLRAACQGLQKLHRLGLLSASCRPEAEMVTWRAYLRHRAELIERRAPHILPMHKALLQMNLQLTQVLTDITGPTGLAIIRAIITGERDPLKLAQLRNPACQSSTEEIGKALTGTWKPEYLFVLKQSVEGYDFYTQQLAACDAEVERLYAVLNPRWEMPADLPKLPPRKFHSHRKNQPAGEVRQAMYRIVGVDLTAVDGLKEASVQEILSEIGTDMSPGPTVKHFASWLRLAPHNDISGGVVLRSRGLKSNNRARQAFRQAAESVARSDNAFGEFYRRKRAQYGPKVANMATAHKIARVVYFMLKKHVPYEAGKAEEYVAKQRERELTRLKRQAAYLGYNLTPHPTATESPVA

SEQ ID NO: 155393 - protein, 402 aa, unidentified
MNAVGIDVSKGKSMVAIMRPFGEIVSTPFEIKHTSSDINSLVKLIKSIEGESRIVMEHTGRYYEVLAHQLSEANLFVSAINPKLIKDFDNDSLRKVKTDKADSVKIARYALDKWQNLKQYSVMDELRNQLKTMNRQFGFYMKHKTAMKNNLIGILDQTYPGVNTYFDSPARSDGSQKWVDFASTYWHVDCVRKMSINAFIDHYENWCKRKKYNFSKSKAEEIYGKAKELVPVLPKDAITKLIIKQAVDQLNSASTTVESLRTLMNETASKLPEYPVVMAMKGVGTSLGPQLMAEIGNVSRFTHKSAITAFAGVDPGVNESGTYEQKSVPTSKRGSADLRKTLFQVMDVLIKTHPQDDPVYQFLDKKRAQGKPYYVYMTAGANKFLRIYYGRVKEYLASLPES

SEQ ID NO: 155394 - protein, 365 aa, unidentified
MKKSSTTKAAINKNFERKLTIGLDLGDRSSWFCVLDETGEVVSEKKLGTTPKAMKEVFSGMPRSRIALETGMHSPWVSRLLSELGHEVIVAHARNVRLIGESRRKDDRLDAKMLARLARIDPQLLSPVKHRSAQAQADLTVIRARASLVRARTALVNTARGLTKSYGERMRGCNPRNMDAEKAQSLSPELQAALGPLLQALESLSERIAQYNQRIEAIAQQSYPQTALLKQIKGVGTLIALTYMLTLEDPHRFRKSRDAGCYLGLQPGRRNSGQSEPQMHISKEGDPYLRTLLVQGAHHILGPFGADSDLRRWGLKLAERGGKNGKKRAIIATARKLAVLLHRLWVSGEVYEPLHNTKRTRLEAA

SEQ ID NO: 155395 - protein, 387 aa, unidentified
MARARFPGGAFTRQLSILTDADGFQRLAEHIVQWQRQAECTDAVVGLESTGVYWENLACWLKGRGYRVVQVNPLHVHRSKEMLDNSPGKTDGKDSLFIADLVAQGKYLSFVMPRGDFAELPQLAGLRRRLVVERTTYLSRLHLQVGQMFPEFGGVFRDVATRVARRLLYYFPTPTDVIGHTVAAMARRVRRDGGIRLRESKLVLLKERAVATVGIREGGSTLVLALRDTLTALDALDQRIGQIESWMSEVLGRIDESPYPLSIGGVGSVSAAVLLGETGGLRRYVSAEAILKLAGLNLFEVSSGMHKGARHISRRGRPLLRQILYFIALHHAQPGMPLYPHYARLVDRGTPKPNTLVALSCRLVRIMYALVRDGRCVSAQAPQPQLA

SEQ ID NO: 155396 - protein, 324 aa, unidentified
MIDGILGIDVSKNTLDASVSSCRKVRARCFANSPDGWRHLLDWLIIQKIRRVHACLESTGRYSLGIACALYEAGHVVSIVNPAQIRDFARTKLGRNKTDGVDASHIREYCELFKPQPWAPPSEAHRRLAELQTIRAGIIAGLTEWKNRKNSGMVDAVAQSLADVTISHFNNQLEAVDEAIAQTIDNDSGLRGKRDLLLSISGVGEILAGVVLAELPGPDVLRSSAAVVAYAGLNPRQHQSGTSIDRVTRISKIGNAVLRAALYMPAMSAMRFNPAIVALVTRLKSRGRLNPKQIVVAAMRKLLVLCFGVLKTGKPFDPTIAMGC

SEQ ID NO: 155397 - protein, 312 aa, unidentified
MDAIVVGIDVSKDRLDVAVRPTGETFSVARDAEGLDALLARLTPLGPKAVAVEATGGYEIVVAASLGAGGLAVVVVNPAQVRSFANALGKRAKTDPIDAQVIAHFVEATKPEIRPLLDAETRLLADLIARRRQIVQMIVAEHQRQKRLTEKRLQKSIVRLLAALQKELSTLEAEIDTVVRGSPAWREKEDLLASVPGVGKIIARTLLAELPELGSLDRRKVASLVGLAPWTRQSGQWKGKSFIGGGRADVRAALFTGAMVAARHNPDLKAFRDRLVQAGKPKLVAMVATARKLLTILNAIVRDQQPWRQQNA

SEQ ID NO: 155398 - protein, 319 aa, unidentified
MGTVMNQTSSSVYIGIDVSGSTLDVAIHDTTEHFSVDNETVAIDQLVQRLITLGPTLIVMEATGKLELAVLKALCQAGLPAVAVNPRQVRDFAKATGKRAKTDRIDAFVIAHFAAVIKPVVRPLNDVQTEQLQALLLRRAQLIDMLVAEKARLERAHAAAKESLNDHIKWLKQQLTVADKDIDSFMRSSPAWRQREDLLRSVPGIGPGAAATLIAFMPQLGSLNRREIAALTGVAPFNCDSGKHTGKRRIHGGRAIVRRALYMACIPALRFNPVIRAFYDRLRKAGKPFKVAMTACIRKLIVTLNTMVHNSTPWRPSAD

SEQ ID NO: 155399 - protein, 387 aa, unidentified
MQASTVDTPTAGHCGTIFVAIELSQKSWLVTLHSPDKDKISRQKLEGGDHAELLALIGRVRERAARALGAVPAVVSCYEAGYDGFWLHRLLLAAGITNYVFDPASIAVDQRARRVKTDRIDGEKMLRTLMAYLRGEPQVVRIVRVPAAEQEDARRASRERGRLIKEQTAHTTRIKALLRLLGMAVGNPRRRDWLNWLAAQRDWQGQAVPPRMLSEIRHEHARLMLVRERLDEFMQASAQADPAPAAAQMAERSELLLRLKCLGPAFATTLASEVFYKDFRNRREVASYFGLTPSPWQSGGIDRDQGISKAGNPRARCAAIELSWLWLRHQPESALTRWFRSRTHNNASKRNKRIAIVALARKLMVALWHYLTTGLVPEGALLKAVKA

SEQ ID NO: 155400 - protein, 359 aa, unidentified
MSSEIKYIGMDVHKEAITIAIRNGSGKLVMESIIETKAATILQFIQSLRGELHVTFEEGTWAAWLYDLLQRHVHELVVCDPRRNALLKEGNKNDKVDARKLSELLRAGLLRPVYHGENGLRMLRELARSYSTLSKDMTRVMNRLKALYRGWGIPCGGIQVYDPRYREQWLEKIPEAGVRRRAELFYGHLDGLHALRQQARRELLSESRRHKASKRLREIPCIGPIRAALLVALMQTPYRFRNKRQLWNYSGLGVTTRDSAQYRYVCGQLQRSKKPQQLRGLNQNHNHQMKEIFKSTATSATYCAGPFQDFYTRLLAKGMAPEMARLTLARKIAAITLTIWKKGDRFDPNQLNQLNLQAA

SEQ ID NO: 155401 - protein, 347 aa, unidentified
MIGEKYIGLDVHQATISVAVMDSKGKVVMESILETQAATILEFFAGLRGTLWVTFEEGTWAAWLYDLLKPHVAKLVVCNPRKNALLKHGNKSDKIDARKLADLLRLNDLEPVYHGETGVRMLRELARSYLTIVKDLSRVMNRLKALYRSWAIPCAGRDVYYTRHRSEWLGKIPEAGTRRRAEQLYQQLDMLQHLRQQARRELLAESRKHTITAKLRQIPSLGPIRSALAVALIQTPHRFRTKRQLWTYSGLGLETRDSGEYHYVQGQLRRRKKQVSIRGLNKDHNHDLKGLFKAAATRASVQPGPFQDFYQRSLAKGIKPTMARLTLARKKKVKWAVSGRAKGSVSP

SEQ ID NO: 155402 - protein, 342 aa, unidentified
MDYFAGLDVSVKETSVCIVDDTGKIVREVKVASEPAALLAVLKNPAYCFKRIGLEAGPLSQWLFSALAEAGLPVICVETRHMRAVLKAQINKTDRNDARGMAQMMRVGLYRPVHVKTLRSQKLRMLLTHRKLLLSKAIAIENDLRGTLRNFGLKVGMVGKVKFEARVRELVENLPDLAVLVEPMLIVRRVLREQIVILHRRLLAIVRDDEVCRRLMTTPGVGPVVSLTYRATVDIPARFRKSKSVGAVFGLTCAKYQSGEVDWDGRISRCGDEMMRTMLYEAAQAMMRSKKWSWLKAWAMQIARRRGMKKAIVALARRLAVIMHRIWVDGTEFRWTREAAAA

SEQ ID NO: 155403 - protein, 331 aa, unidentified
MDHCAIDLGGRKSQVCVRSPDGRLLFEGPYDTRSLPEFLRLLPRSRVIVETAAEAFRVADAAKEAGHEVRVVPGTLVRSLGVGARKTKTDRRDARTLSEVSCRIDLPSVHIPSARSREWKAICGMHDALVTARTKLINNLRGWLRGQGLQIGKGNADSFAVRMAKLEPLPEYVRSQVQALAALTEKIGGSDKRIKALAKDELCQRLMTVPGIGPSSAVRFVAAIDEIARFESAHKVESYLGLVPGESSSSERQQRLSITKAGPSSVRWVLDQAAWSLQVRCRDPAARPLQLWAAEIARRRGGRIATIALARKLAGILYALWRDGTAYERRP

SEQ ID NO: 155404 - protein, 421 aa, unidentified
MSNSTLSKKLASVKPGTLFVGIDLALDRNVAVVLSERAEQLTRFGFPNERDGYDYFYRRLEAIQEQQQAPAVLVGMEPTNYFWKLLAADMEQHRPDYGYRLVNTYTVKKNREGAQLDRSKDDNRDAFTIGDLVRTGKYTETRLLHGAYAELRQYVTLYARLRRDVRRQKTLIRNVAGQLFPELPGVFEDLTGMTALAMLHNHAAAAVVRKMSQDAFIASVRLNLPGQRVQVAKLRRAHVLARRSVGLSDAVEALQLALRLHIEALAGLEQQLEEVCKALVDAFLALPESAYLLSVHGLGIITAATILSEIGDPSHYTNARQLVKLAGTQPVPNTSGRKSRSKTPMSHKGRPRLRTALFFAVMRLVQVDQAFARDYQHLQTREENPLTKMQALGALMNKLLRILWALMRHRSFYDPELQLAD

SEQ ID NO: 155405 - protein, 413 aa, unidentified
MGNCAGIDWASEKHDVLIEDPAGEKLLAATFAHDEDGISGLCAALECFDVEVVAIERPDGLLVDRLLDAGVRVLALHPNQVKAARDRFRASGGKSDRFDRFVVCELARTDRHRFRMREPDSDQTKALRALVRAREDLVGARVALASQLRAELDRFWPGPIGLFTKLDSPISLAFLARYPSPQDARGLGEKRLAAFLKAHRYSGHQPSARLLERLRSAPAGRAGETETARRRSIVVHLTRTLQVMVEQISELESEIAAALHAHPDGEIFTSFFRSPDSVICAATLLGEIGDSRARYPHRDAIAADGGQAPVAVESGKRKNATFRWACNKRLRNALEVLANTTRRWHPWAADRYANARARGHNHRRALRTLGRAWSRIIWRCWHDHTRYDAQRHTGRNSTSPSPSRLRRAPGPTS

SEQ ID NO: 155406 - protein, 332 aa, unidentified
MNNFYFIGVDVSKKKLDFCVMFENKVVHEEVVANHPKAITALIHHLEDEFGISNAQMLVCAEHTGQYTYPLVCACEAVECKLWLENPSDIKYSSGVQRSKNDRVDARRIAVYAARFEDKVRLYERPDQKIERLKQLEAERSLYVVDLAKYKAQMKDQKEYMPESIYKDKEKRMKKLVKDLQEVIDSITEEMEDIVNSTEVLSRQYKLLQSIDGVGPVVALNMIVVTEAFTRFDNARQFNCFAGLAPFSYTSGSSQHSRARVSHRADKSIKTLLHLSAVSIISRADGEMKEYYLRKVEEGKNKMTVINALRAKIVARMFAVIKRNDFYKPIFS

SEQ ID NO: 155407 - protein, 279 aa, unidentified
MSSSARTVAWALSPNRARKGADDGTRWSRCRCPSTAQGQRKLVAWLRKHRVAKAVMEASGGYERDWARVLRQAGIEVRIVDPKRVRSFALSAGRLAKNDTIDAEMIAWFAETFREAAAQMHDAAHEELQGLVKARVALVDHKRRLQARNEHAAPGLVQKAHARVLKNLASEIVKLEAAIAARIKVTPHLAERAEIIESVPGLAETTSANLIAGMPELGQVSDDIAAALIGVAPYDDDSGKRRSGRPARSIRVSRSGGNDARPRGHDRRRNDRPRRWRRR

SEQ ID NO: 155408 - protein, 342 aa, unidentified
MYFIGLDVHKKTISYCVKDAAGQVHREGKIGSTRRELDCWIKTLPQPRTIAMEATIFTGWIYDHLLPHAEKVKVAHPLMLRAIAAAKKKNDKIDAGKIADCLRCDFLPECHMVSTEIRDRRRILRYRHLLVRQMVQMKNRVSGLLMETGVEHNKQRLHKVGYFHELLSTNQEVHPCIRPLLKISRETIERCQKTEYALVSSLQRDPMLAERIKRLRTIPGVGPITALTWALEIGDVSRFQTIKQAISYCGLCGEEKSSADKMMRTPLSKQRNKHIQHVLIEAAKLAPRQSYELALVHEKEMQKGNRNRATLAVARKMVAYLLAVDRQQRDFVPAEERRAGAA

SEQ ID NO: 155409 - protein, 337 aa, unidentified
MEHIAIDLGGRESQICVRASDGTVLAEERWPTGSLKKYLARRPKSRVVVESCAEAFSVAEAVEECGHEVNVVPATLVRALGVGARGLNTEVRDARNLSEGSCRMARLPAVHIPAKASRERKPLCSLRENLVEVRTKLANGVRGWLRSEGLRSPRVGQPERLWLRVQEHLKQRDRVMPGYVERNLKAINFLTEQIEEADRELGATAKADPTCRGLMTVPGVGPVTAVRFAGAVDQVERFPNSHALESYVGLVPGENSSSERKRITGLTKAGAQKLRWTLIQAAWSARRCRRNDPLVAWALQVEARIPQNALPNPMRSCGNVSSLEHGGLGAPQSPVIQ

SEQ ID NO: 155410 - protein, 420 aa, unidentified
MRNAGIHANSLLEVRRMYNAVGIDVSKGKSTIAVLQPGGTVIRKPFDVSHTSQNLNELADYLSSLDGTTKIVMECTGRYHEPMVKVLSEAGLFVSIVNPHLIKNFGNNSLRKVKSDPADARKIARYTLDNWTELRQYSGMDNTRTQLKTLNSQFSFFMKQKVAAKANLIALLDNTYPGVNKLFDSPTREDGSEKWVDYAYSFWHADCVRKIGLKAFTERYKSFCKKHHYIFQQDKPEKLFNASKELVAVFPKEKTYKLLIQQSIQQLNLASEHVERLRREMNELASTLPEYSTVMGIYGVGKTYGPQLIAEIGDVSRFTHREALTAFAGVDPGVDESGQHKSKSNRASKVGSARLRKTLFQIMTTLLQNAPEADPVYRFLDKKRSQGKPYYVYMTAGANKFLRIYYGKVKECLRNLEQTE

SEQ ID NO: 155411 - protein, 368 aa, unidentified
MMGWMAPWRHLSAKVLVDRKPPANREPSMNEITTVGLDLAKHVFQVHGVDAEGTTVLRKQLRRGQVLAFFSRLPRCLVGMEACATAHYWARELRALGHEVRLMPAQYVKAYVKRNKNDAADAEAICEAVVRPTMRFVPAKTAEQQAAVLLHRGRERLVRQRTMLVNALRGHLAEFGVIAPQGLRNVGRLIAIIRDEEDARLPGLARQVLQVLAVQIEQLEAAIAALEKQLMGWHKSNPVSQRLATIPGIGPIIATAIAAMVAEPSGFRSGREFAAWLGLVPRQNSTGGKNRLGGISKRGNQYLRRLLINGASANLLRSKATNADPWVIGLRRRRPSLVVAVALANKTARIAWAVMHRQENYQRMATAA

SEQ ID NO: 155412 - protein, 341 aa, unidentified
MQKNFYFIGLDIAKETFVASIYHKPNEPVLTKEEIPNNPKGYDHLLLWLGENRINKDNCQICMEATGVYSQGISYYLLVQGYQVSVESPLKVKRAFHPAGHKTDPVDSRQIAEYTYRFCDQLIPWQPKEELLEKIRQLLSVREQFTKQKVAIKNAMRAYSQQKVQVRLINKAHKETLAQLEKQIARIDKELDKMIKQDPDISRKFDHLKSIPGFGMLLSAHLLVMTESFSKISEYKRLAAFIGIVPYQYQSGTSIRRKDSIRHYGPMASRKLLRLAAQSVATHDKTFRQYYLRKLAQGKAKALVLNNIANKLLKVSCAMIRNNTGYIKEHRSVHPMYVKSA

SEQ ID NO: 155413 - protein, 375 aa, unidentified
MREKVRFLGLDVHAETIAVAIAEPEGEVRSLGTIPNREDSLRKMIKKLGPPDKLRVCYEAGPTGYVIYWQLAELGVKCEVIAPTLVPVKSGDRVKTDRRDAEKLARCYRAGDLTAVWVPDEGSEALRDLVRAREAAKQDQLRARHRLSKFLLRSGQRPPSGVRSWTRAYLIWVAQLRFTQMAQEATRLDYLHEVEHMRERVERLEQAITEAVKLASPALQQVINDLQALRGIADISAVTIAAELGQVSRFDSARKLMGYCGAVPSESSSGKRTRRGSITKTGNAHLRRIVVEAAWSYHRPPGIWYGLRKRQESISEEAKEIAWKAQHRLHKRYLRLAAAGKDKRKITTAVARELLGFIWAIGTRAETEVRQRIAA

SEQ ID NO: 155414 - protein, 323 aa, unidentified
MIVVLNDDGDRVSWSRIDNTAANLAAEIVAAGGAEAEVAMEACWGWYWAADVITECGARLHLAHPLGIAGYENRRVKNDIRDATLLADLLRLGRLPEAWVAPPELRQLRELVRYRAKLARLRSGLKAQVHQTLGKEGVIPELDDIFRGQGPRWLDDLQLGDAYLERIVSLRELIELYDRQVRHCDAWTHRRLKGHPGYEAIQALRGVGPVLGAVFVTEIGDVHRFNSAGHLCSWAGLTPRHRESDTHIQRGNITKQGSRLLRWAAVEAVSGAVRDPMITSVKARVGARRGRNIGRVAAARHLLTLVYYGLRDGEIRCLTTQTA

SEQ ID NO: 155415 - protein, 344 aa, unidentified
MKKHKYFIGLDVHKKKTTYVVRDNIGTIIIQGETSTQYTDLLPILQPFLKEGIMGLEASTSYYTLYQNFLKNGYTIKVANTIQLRQLIAKNDKLDAKRLADMLRLGTFPCSYIPPEDIQHLREFIQTRHTLVEEKTRCKNRIHAILDKHHTIILPATKPFGIKWKKALQQYIASNPISLELRHSVDHYHYLEQKTNQIDQELIGYTKTHWNNEYQLLQSITGIGPILSCYLIANIHPITRFNNKRKLRRYAGVIPVFKQSGEHTSKGRLPKTSSRKLLRWALIQAANTIAKTQTPLGNYYRRKKKQKKNTGIAKVAVASSLIDIVYKVLTTKEPYHNHTSITST

SEQ ID NO: 155416 - protein, 447 aa, unidentified
MLRRTVGIDLAISAVQVAQIFDDGRPVGKAIRFRLTAADLRAFVARVVDGVPSGTPIEAVMEPTGMAWFPIATWLQRAGVKVIRVKGQRVKALRKYLSEHTKSDAADTHVLGAIPGFGGPALDPVHVPSPDHHALQRFTKQRHRYQDAICSSRRRMLDLIRWACPALESVLPDTVTRLTLALLSEFFDPQRVLKTRRDVLARFVAEHAAGNHPHSGPFVDELVESLKQAARETVALHGEQVDFAALQFEIGQEVELLRFLDHNIAELERRIELLYQRLHPSDALRSIPGIGSTLAPLFIGVLASSSRFRNERHIRGFCGLFPTKNSSGGVDRPGQRITKSGSDRIKRALYVAADTARKIDPELAAVYWRLMVHKGHHHKQALCAVATRLVNRIHRVLKTGQVYALRDLEGKAISVAEAKQLVRDRFTVPEEIRQSRRRHAEISLVTT

SEQ ID NO: 155417 - protein, 374 aa, unidentified
MRFYNRVHRFYCGVDLHARTMYLCILDHGGAVVLHREVPAEPGAFLEAIAPFREGLVVACECLFRWYWLADLCQAENIAFVLGHALYMKAIHGGKAADDKIDSSKIAHLLRGGNLPIAYAYPKGLRETRDLLRRRMYLVHKRAEVVAHVVNANSQYNLPPFGKKLIYARNRQVLKIAQRFGDASVRKNIELDLALLDSLDELIGDVELYLDRTVKVDDADSFYRLRSIPGVGKILALVLFYEIHDIGRFASEGEFLSYARLVRPLKTSAGKVKGGGGAKIGNAHLKWAFSEAACLLARESDQAKRFLARKEKQHGKPKALGILAARLGRAVYHMLRQKRAFDRNRFWNGEPKVAPEKLGRQKVAPRAMQPLVNK

SEQ ID NO: 155418 - protein, 407 aa, unidentified
MDLLKTVFGIDVSSRKSNVCIMVNGQKVNDYAISNDMVGFNQLLGDLKQVTKPQIIFEATGVYSRRLQAFLDMHELRYVMMNPLEAKRKTKDDLHQNKTDKLDALYLAKLQSEHPQRLAYVQSEEYQELMANNRIYEQASHDLITNRNRLHKAIQLTFPEIEHLMVNPRGKNYWSIVLRFPHPDIVLETKEADIIDFLKGLTGIGKKRANDIAQSLIWLAKVACPAVKKNSAHIRGLKMAINNILSAEEEYQSALQEMAKLAPKRDLEILTSIPGIGENTALRIISELGDIRRFNNPSQLNAFVGVDPQVYESGNLTAHLSISKRGTAIGRKVLYLAINQIQSAKKAGNPCHIADYYEKRKRSSETASHKKAAIASIHKLLRTIFALIKNDQLYSYDVAKHNQRLLS

SEQ ID NO: 155419 - protein, 429 aa, unidentified
MSYRIAGIDVHKKMLAVVVSDVEIESEYQFERRMFSSNPEQLRSLAAWLVEQKAEEIVMESTAQYWKPVWGTLERYWKPLCEKREGARRRSGTLHLAQALSNRGRRGRKRDFVDAERLVKRLVARELTLSFVPDAEQRLWRTVTRKKYQLRRDLVRLNNQLESLLEEAHIKLSSLVSDLLGVSARRMLKALADGETNPAALAALAHERLRATPEQLCDALGACTELKPVYRRLLKMTLEHLQILEQQTGQLDQELATLLHPHQDAVERLAEVPGFAVDSAQQIIAEVGPAAATFPSEKCLSSWVGACPGEEESAGVNYSHRSPKGNRHMRRLLNQTANAAVKAKGSIFEIIYRRCVPRLGHNQAIGVIAHRQCRLIWLILHQGTRYEERGPAVTKRSRYQRTWRMIRQLRNLGYRIELPNPQAGQAQAQ

SEQ ID NO: 155420 - protein, 357 aa, unidentified
MLSSNVKYIGLDVHKEAIAIAVLNGAGKLVMESIVETKSSTVLDFLHGLRGELHVTLEEGTWAAWLYDVLKPHVREIVVCNPRRNALLKEGSKSDKVDARKLAELLRAGLLRAVYHGENGLQTLRELARCYLTISKDLKRVKNRLKALYHSWGICCAGKQVYAARHREQWLSKIAQVGVHRRADLFYEQLDGLLVLRNTVRGELLAESRKHQAVKILRQIPSIGPLRAALLLALMQTPHRFRGKRQLWTYSGLAVVTHDSAQHRYVDGQLQRSRKPQQIRGLNQNHNHAMKEIFKSTALNASRCTGPLQDFYARLLARGMKPDMARLTLARKIAAITLALWKKGGSFDAEHLKSQAA

SEQ ID NO: 155421 - protein, 343 aa, unidentified
MKITTIGIDLAKNVFQVHGVDEHGKTVLKKQLKRDQMMPFFANLPHCRIGMEAYGSAHFWANKLQELGHTVKLMAPQFVKPYVKTNKNDAADAEVICEAVSQPNMCFVPIKNGGQQAVLALHRARQGFVKARTVQANQIRGLLAEYGIIIPQGIVHIGKRLPEILEDGENGLPGTFRQLIDRLGNHLKELDKQVNELEVQIQTWHRENAASKKLAQIPGLGPIAASSLVASIGDAKNFENGRQLAAWLGLVPRRNSSGGKPTLLGISKRGDTYLRTLLIHGARAVIRVAERKAAHAGSWLAGVMERRNKNVAAVALANKNARIVWALLVHGRDYQVDYGSAAA

SEQ ID NO: 155422 - protein, 358 aa, unidentified
MVDKVTEAAVVGGVDTHKDLHVAAVVDQNNKVLGTQYFSTTRQGYRQMLAWMTSFGTLKRIGVECTGTYGSGLLRYFQNAGLEVLEVTAPDRMERRKRGKSDTIDAECAAHAAFSGIRTVTPKTRDGMIESLRVLKTCRKTAISARRVALQIIHSNIISAPDELREQLRNMTRMQLIRTLGSWRPDASEYRNVTNVYRISLKSLARRYLELHDEIADLDVMIAAIVDELAPELIKRNAIGYESASQLLITAGDNPQRLRSESGFAALCGVSPVPVSSGKTNRYRLNRGGDRAANSALHIIAIGRLRTDAKTKEYVARRVDEGHTKMEAIRCLKRYISREVYTLLRNQNRRINSIPITA

SEQ ID NO: 155423 - protein, 373 aa, unidentified
MKKVRFLGLDVHAETIAVAVAEPDGEVRSLGIIPNREESVRKLIKKLGPAEQLQVCYEAGPTGYVLYWQLTALGVKCEVVAPTLVPVKAGDRVKTDRRDATKLARSYRSGDLTAVWVPNEEHEALRDLVRAREAAKQDQLRARHRLSKFLLRRGQRAPEGIKMWTQRYLQWVQEQVHFEQPAQEYTLLDYVHEVEHVADRIQRLEQALTEAIKLAPAPMQEVVQALQALRGIAQISAVTIVAELGKISRFEGARQLMGYSGAVSSEHTSGTRVRRGSITKTGNAHLRRIAVEAAWAYRHRPAIGSALRKRQEGLSQEVKEIAWKAQHRLHKRYRTLTAAGKEKQKVITAVGRELLGFIWAIGVQVERNDPRNA

SEQ ID NO: 155424 - protein, 364 aa, unidentified
MPEPTHIGLDVHKESIAVAVLRPGASECDERVIPNTPEALRKLLRRFDDPAALRVCYEAGPTGYDTHRFVTSLGIDCEMIAPSLVPRRSGVRVKTDRLDARNLARLHRAGELTSVRVPSSAEEALRDLVRARECLKDDRRIARQRLRSFILRYGVRYPHGPDRWSHRFEVWLRALRFGEPACQEAFAHLLGAYFVRDTQLGALTAQIEERADLEPLTGPVAHLRTLRGIDTLTAVTLLSEVCDFHRFGSAASFMAFTGLVPSEHSSGASRRQGGIAKTGNRHLRRVLVEAAWAYRHAPAVRGKLRARQEGAPPELVAYSWAAQCRLHTTYRRIAARKGSRIAVVAVARELAGFVWGAMTDNTAA

SEQ ID NO: 155425 - protein, 333 aa, unidentified
MVTAAIDIHKQVLQAVVLDGESGELAEERLAGREALADWAMRWRGRVEAVAIEATTGWRWVARELQAHGLEVRLADPGQAKALQGRKKRAKTDRLDARWLALLLGKQMLPQAWLPPAEIQYLRDQTRLRKALVDDRTRWAQRLHALLQQEGWPCRRARLLTVAGRRWAQALALPDPARAQVELYLRLLETLEAEIRPLEHELCRFAKQDRRCQALQRIFGVGPILACHLLAEIGEAGRFRRSRQLVRLSGLDPVVEESADVRRRGKLAKQGPPTLRWALVQAAQHAPRPSSPDRHLYTSVASRCGSQRAKLTVARKIARRAYHLLSTLEAEAA

SEQ ID NO: 155426 - protein, 420 aa, unidentified
MPNIEIGVDFMVKENFIYVGIDLHKETHTAVMIDCYNQKLGEITFPNRPADFPKLVTKVKKCNTDGKEVVYGLENAYGYGRALAVWLIDKGYLVKDVDTAISHRQAKHRGAMYRKSDSDDAKAIALATLNMLDKLPDACPNDAYWSLGQLVHRRDNIMKQRTRLVNQLHEQLCIAYPSYKQFFNDISRPTALYFWEHYPSRKYLKGKSVEDLRAELVPVSHNKCSTKTCEKILDAVASDKVKNNAYQDARDMVTLSIVSDLQHYDSQLTEVDKMLEQMYKMLGCTLTTIPGVNVITAVKILAEIGDIKRFSNANKLAQFAGIAPLHLSSSGKGKDVATKQGNRRLQATIYFLAIQMVQVSSKGTPRNSVVRAYYEKRKAEGKTSQQALICISRRLISIIYGMLKHGTEYRMPVVESAGEK

SEQ ID NO: 155427 - protein, 400 aa, unidentified
MWYAGVDWADQHHDALVINEQGQQVGSIRVDHSLQGFAKLTTFLQQIIGSEPKEQMACIIETTHGLLIAALLEAGWPVYPVNPRTVDRRRSASGAKTDTIDAYLLAKTGRADFADLHRLTPDSAQVAELKTLTRDQDGLIQMQTRLVNQLTACLKAYYPVALELFAKLQQHTTLVFLQTYPTPQAASAASQEQIASVLKQAGHPNPSKAAPAIFATLKLPHLTADAVTTRTKSRLMLALVSQLMPLLEQIAAYDKEITTLPDHEIFSSLPRAGKRLAPRLLAEVGDDRTRYVDAASLQALAGTSPVLFQSGMYSKAHRRLGCIKPLRNALHQFAWQTTQSEPWAMQYYQRKRAEGKSHTVALRALANVWVRIIFAMWLHHRCYEAITFETAQQRHARRAA

SEQ ID NO: 155428 - protein, 398 aa, unidentified
MTESSDYESVQVFIGVDVGKDTHHAVAINRSGKRLFDKALPNDENKLRSLISDLKQHGQILLVVDQPATIGALPVAVARSEGVLVGYLPGLAMRRIADLHAGEAKTDARDAAIIAEAARTLPHALRTLKLADEQIAELSMLCGFDDDLAAQTTQASNRIRGLLTQIRPALERVLGPRLDHPAVLDLLQRYPSPEKLASLGEKKLAAQLCKLAPRLGKRLAADIAQALAEQTVVVPGTNAAAVVLPRLALQLITLRKQRDEVALEVEQRVLAHPLYPVLTSMPGVGVRTAARLLTEVACRAFASAAHLAAYAGLAPVTRRSGSSIRGEHPSRRGNKALKRALFLSAFAALRDPLSRAYYTRKMSQGKRHNQALIALARRRCDVLFAMMRDGTFYTPQAS

SEQ ID NO: 155429 - protein, 411 aa, unidentified
MEEILCGIDWASDHHDVALIDVEGIKLGRRRISDDAAGLGELTGMFAGHGAGPGTVKIAIETERGLLVASLRAAGYDIYPVNPKAVDRYRDRHHLARGKSDAADAMVLAHILRTDAHLHRPLPADSPAARAIEVLARAHQDLVWSRQHEVNRLRSLLAGYYPAALAAFGDLTTRTAMTVLAAAPTPAAAAQLTTSDLLDLLAAAGRGRRRADARRLAEVFAAPQMRQPAAVEQAMGDAATAVITTITAMNTAVTALAQRIDASFEQHPDAAIYHSMPALGPILSARVLGEFGDDRTRWPDPASRRAYAGSAPITRASGKKRVVLARSIRNRRLYDAAHWWAFAALSVSPGARAYYHQRRAAGDGHQAALRRLASKLIGQLHHCLQHRVPYDEATAWTRHQEQSQPAPPAAA

SEQ ID NO: 155430 - protein, 337 aa, unidentified
MKSYLFIGIDISKAILDVCVISPSETVTNHYHQFCNNLKGFIQLLKWLKQKSEAVVVEDWRVCMENTGIYSLELNCFLHEQGILQSMENALQIKRSMGVVRGKTDKADCKTIALYAYRFYDKLKPYVLPGETLLRLRALFSQRERLVSIHSQLLAANQSMKGYARELVKDIQNQNEILLKNLAGEIKAIDKSLKECLQKDRELRSKARLIQSVPGIGQQTAAYLLIVSRGMKSFATAREFACYSGCAPFEHSSGTSVRGKTKVHYIANRKMKMLLHMAALNAITFNEELKTYYQRKVASGKNPMSVLNAVRFKLICRIFSVIKRNEEYQKEYRKNAA

SEQ ID NO: 155431 - protein, 457 aa, unidentified
MSKDKRKKEAGKTKKTTKAIQGIPVLYPKAAGADIGDTQHDIAIPDGQGGLIVRVFKTFTADVEEAVNWLKQEGITTIAMESTGVYYLTFYLLLEEAGIEPYLVNARHVKNVTGRKKDDSDAMWIQRLHSCGLLQKSFQPDNDFRTLRTYVRQRKGLIIRCSDEVRRMQKALEQMNIKIHTVISDLLGKTGLQIVKAIIEGNFDPEELSKLRDPRIKASQQEVFKSLQGLWKEEYVFTLKQAYNTYCFYQQQVKECEDKIHEQLLKQIAQVNQGDITVDKPIIEKKNKPRKNQFSFPVAPLLCRLAGVDLCKIPGLSEVSILEFLAETGADVDKWNSSKHFSAWLNVVPNTKITGGKIISSRMLKKKNTAGQTLRMGASSLYSNKTAMGDYHRRMSAKYGGKGAALASAHKMSRIIYKMLKDKVEFNFQMLVDADQKYREKKIKHLEKLLAQLKNVA

SEQ ID NO: 155432 - protein, 434 aa, unidentified
MKKHLPVLDPMAAFIDVGSEHMHVSVGGDVPVVFGTMTSQLHALRDWLLAQGVHSVAMEATGVYWLPVYGVLEAARLDVRMVNGRQTRNAPGRKTDMHDAQWGATLHMHGLLRAGFVPTADIRRLQDYLRLRADHVCQAASCVQLMQKALERMNIKFHDAISDLTGVSGMAVMRAIVAGERNPVALLALCDVQIRRAKAELVIESLRGTWSEEHVFALEQALQSWDHYQRLIIDCDRRIQSVLPPHDPTQPKLPKTVKRGGTNAPHIDMLREILAQMCGGRDLTMIPAHTQYSALQLIGETGTDLSKWPTEKHFTSWTGLAPGNHHSGKRKGRIKRTRNRAGKLFCMMATSLVRSKHIALGAFYRRLAMRRGGLVAMKALARKLAAWYWRVMVKGDDYVEKGIAHYEEQVRKQKERALHRLAKELGRQLVPQPA

SEQ ID NO: 155433 - protein, 323 aa, unidentified
MNKYKETFGVDISKDVFDSYGSLSGHHQFKNNETGFNKLLKQLPVHSLVVMEATGYYHYRLAQFLYKNGVSVSVVNPLSVKRFIQMKLAKVKTDKSDAKAICEYAVINEVPLYTALTDVQSECLQLFRLLDSYLKKRTATKNKMHGEEVLGLPSKFVYRSLRRNRKHLDKEIKGIEEKLLSLVKQEQQHQLTLLTSIPGIGIRTALFLIVSTDGFKKFETASQLCSYVGITPTIRESGSSVRGRSRISKVGNRKLRNLLFLCSFNACKHNKACKEVYERIVNKGKSKKLALIAVSNKLLKQSFAIAKSGRPYDETYISVLPVK

SEQ ID NO: 155434 - protein, 424 aa, unidentified
MKPHTDIEFAAFIGIDWSDTKHDVCLQAGNSGEREFSVLKHGAVAIDAWACALRQRFQGRPVAVCLELAKGPLVYALQKYDFLVLFPVHPATLAKYREAFVPSHAKADPSDAQFALELLLRYRAKLKPLTPQSVPMRTLLRLVEQRRRLVGDQSRISNRLTDALKQYFPDVLAWFADRNTLLFCDFPSRWSTLKQLKRARRTTLLSFFHDHHVRSQARIDERLRAIKSATPLTDDPAVIVPNQLLVLALIEQLRATLQAIERFDAEITTVSESLPDYALFRALPAAGPAFAPRLLAAFGEQRERYHSAAEVQRYTGIAPVTESSGKKHWVHWRLQCPTFLRQTSVEWAGATIPRSFWAAAYYQQQRNKGCSHQAAVRALAFKWIRILYRCWQTRTLYNESTYLNALKRRGSPLLASMMASAKNT

SEQ ID NO: 155435 - protein, 459 aa, unidentified
MRQKSKRTKGIEQAHPFDGLSKVNPHAAGVDIGAEEIVVCVATDPSTQLVRGFGNYTVDLHAIADWLTEHRIKTVAMESTGVYWIPLFELLEQRGFECLLISSRSLRRVSGRKSDVTDAQWIQTLHNYGLLESSFRPQADLVALRSLLRHRRNLIDHRSPHVLHMQKALLQMNIQLSQAVSDVTGVTGQAIIRAILSGVRDPQELAALREPGCKKDEAEIAKALTGTWREEHLFVLKQAVALYDFYSQQILECDEEIERMSAETRPDGDGGELPPLPPRKRNSHSKNRHHESEKIRGHLKRISGVDLSLVDGMGVSLAQTVIMECGTDMTKFPTEKHFGSWLGLAPKHEISGNKVLNNQVLKTKNRAGQAFRMAAQSVKQADCPFGVFYRRLRARLGPAQATVATAYLIARVVYRMLKYQIEYDPLSVNEYQQQYEAQQIRYMQKRAAKLGYQLVPALA

SEQ ID NO: 155436 - protein, 466 aa, unidentified
MLTPISGHLHVGVDIGSRCHAVAIGLSDGRLLEEFEIAHSAAGFEDFFSRIEAQSESHPYPVVVAMEGYGGHARPLDGLVAERGWSLFNVNNLKLARFKEIFPAAAKSDRIDTRKTLELLQLREHLPLAGDVLQEVMARPEENDVLKRLTRRRRRLVNERVRLTSVLHSDLQAAAPGLVEITRDVANLWFLNFLTCRKDLRTLARIRRASLLKLPAIGACYADRIQAWQKCTCFSRDAGLVGTMIRQDALRVLELKRQIKALDDEIARVAETSSAARRLASIPGFGAVCSAELAGEIGSIARFKSEASLALYLGMATLDHSSGKLRGSKSPKHVNTRAKAAMMNALDRHRKEVLQSQRYYETKRAEGKTHNQAIRALGRHLCRVIFKMLRSDRPYRIDPPGDLADNQMADNQMKASAREPGSNSGSQPSNPPAADRENGPPGGGPSNVTSSPLAAIGSPACTAGPP

SEQ ID NO: 155437 - protein, 347 aa, unidentified
MNFYDNMHPYYCGIDLHARLLYVCVIDNTGLILVHKKIKDDPNALLNLLTPYLGNIVVGVECMHCWYWLADFCKAHNIDFILGHALYMKAIHGGKTKNDKIDSYKIAKLIRGGNFPLAYVYDKNMRATRDLLRRRTKIVRHGADLKAHVANTASQYNLPAHNVNLKNICDRDKMRFYFPEPVVQRSINLDMAILDCYQKELKPLEHYIEQMAKQHNPVHLHILQTINGIGRILALTIIYEIGDIQRFPTVQKFASYSRLVKCKAESAGKVYGTQGNKIGNAHLKWAFSEAAVLLLRHNHNANRYIEKLQKRMSKAKALSALAHKLGRCVYFMLKKETVFDEARFLKG

SEQ ID NO: 155438 - protein, 444 aa, unidentified
MKKANNVKSTIDVVRPNAAGIDIASEVHYVSVPDDRDSPSVRKFGSFTEDLHKLAQWLKQCKIDTVAMESTGIYWIQPYLILEEYGFDVYLVNARHIKNVSGRKTDVQDCQWIRQLHSYGLLNRSFQPESLTRELRAYMRHRRHLVQSTSNQILHMQKAFEQMNIKLHDVISDITGQSGTRIIKAILEGERNANELAKLASGRIKAPKEHLAKSLTGVWREEHLFELKQAFDLYQYLILKINECDEKINKVMARLASTGSSSNIKRHKRPHKNSFNFDGTMYLKQITGIDVTKIYGISELSASEIISEVGTDMSKWPTDKQFVSWLNLAPNNRTSGGKKLPPKRTNKLNKAGQAFMLAASTVKGSDNWLGAFYRRIKSRHGVGVAVKATARKLSLIFYKMLKYKMEFEPIAINVYNEYFKNQKLKYVEKQARTLGLKLVPNFVS

SEQ ID NO: 155439 - protein, 428 aa, unidentified
MKYNTQNAKIASITEKTLIVGIDIGSETHFARAFDWRNYEYTKKPFELSNNKEGFQAFESWMEELSAKHGKTAVIPGMEPTGHYWFALGKFLQDNGMRPVHVNPHHVKKSKELDDNNPNKNDRKDPKTIAGLVNEGRFSYPYIPIGVYAEIRNLSNLRFQAQEELTRAKNRLARWFSIYFPEYKDVYRDIKAVSGRMVLQMAPLPEDIRKLGVEGVNRIWRDAKLRGAGMKRAKTLVSAAEHSVGSKEAPEAARYELRNLLNDMDVYASRVEELLGMIGEKLKEIPYIDQLMAIKGVGVITVSGFIAEVGDIRRFDDPKQLQKLAGYAIVANESGKYKGESRISYRGRKRLRYVLFEAALSLVARNPEFRKIYEYYRTRENNPLKKMQSLVAVACKVIRVFYVMLTKGVDYDPEKMMRDIRRPDLQAA

SEQ ID NO: 155440 - protein, 356 aa, unidentified
MISTKYIGMDVHKESISIAVRNAAGKIVMECVIETKASMILQFFDGLCGDLHVTFEEGTWAAWLYDLLKPHVTKLVVCDPRRNALLQDGNQNDRVDARKLSDLLYMNKLNAVYHGNHGLRTLKELGRTYLTVTRDQSRVMTRVKAIYRSWAIPCTGKQVYGTRHRAEWLGKIHEPGVHRRAELYYQQLDALRSLRQEVRRDLLAESKKHKVWKRLCEIPSVGPIRAAELLSILQTPHRFRTKRQLWTYCGLGVVTSSSADHEVANGQLRRKKRKHVEIRGLNENYNHDLKNLFKGAALIASIKPGPFAEFYAALVDNGMRPEMARLTLARKIATIVLMVWKKGVRFDAKHLKPQTA

SEQ ID NO: 155441 - protein, 345 aa, unidentified
MQPMYYIGLDVHKQKISYCVKDSSGKLYAEGWIPATRFDLDRWMKTLPQPWSAALEATMFSGWIYDHLKPHATELKVAHPLMLRAIAAAKKKNDRIDANKICDCLRCDFLPECYMAPTAIRERRRTLRYRNLLVRQMVQMKIKIGTLLMEAGVSYNKQKLHKVGYFRELLTSNPDINEGLRPLLRLCRETVVRLSKLESALVRSLERDQFLVARVERLMSIPAIGPITALTWALEVGEVQRFSSIKKAISFCGLCGAEKSSGNTVQRTPLSKQRNKHLQTTLIEAAKMAPRYSPTLALLYDREKQKGNANRATLAVARKLVAYLMAVDRGQTHFLVVDQETRTAA

SEQ ID NO: 155442 - protein, 324 aa, unidentified
MFYLGIDVAKAKIDCCLILENSANKKKTKTFSNTPKGFEQLQIWLNQHAATSTQTIILMEATSIYHELLAKYLFDEGYQVSITNPARARYFAQSMSKLNKTDKVDSEVLARFAMTANIHFWQPLPKHIQLLNALLDRRAVLCEDLQREKNRLEKAESTFTMEPVLQSLHKSIEQLNKHIQSIDQQIDDHIDQNPDLKNDKELLSSIPAIADRTSLLMLSFLRSHTFERASQAAAFVGLVPTQKQSGSSIHGRSHLSKAGSSKIRAGLYMAAIVATRHNPHIKGMNERLLANGKTKMMAIGAAMRKLVHLCYGVLKHQQPYQADY

SEQ ID NO: 155443 - protein, 406 aa, unidentified
MKLFAGLDVSSFDIKVCLLDGEGEKLKSFTVTNDLPGATKLRDSILECVTGQPVETLKIGLESTSVYSFHPSMFFHNDDSLKALGTQVFVINPKQIANFKKSYSDMDKTDEIDAFVIADYLRFGRLSMSIVKESQFVALQQLTRSRFQLVHQVTKEKQHFLQHLSFKCNTFKEEVDSSVFGNAMMELFFEKFSLEELAQMPVEDLAAFLQAKGKNRFGDPDYVAKSIHKAVRSSYRLDKVVEDSVDIILGTTIEVIRTLQKQVKEIDKAIERIMAGLTETLQTIPGIGPVFAAGIIAEIGQIERFDDETKIAKYAGLYWRKHQSGRFTADDTSLSRNGNQYLRYYLVEAANSVRRHVPEYQAYYAKKYEEVPKHQHKRALVLTARKLVRLVDALLRNHQVYTPKGA

SEQ ID NO: 155444 - protein, 314 aa, unidentified
MYHYIGIDVSKKVLNIFDGKKDLIFDNKENLSSFKKYLKKRYPDLSSLVILFEATGIYSYHLKAFCAVHKIKAYIINPQASHNFAKSLGTRSKTDTRDARTIWAYHKLISDKDIRIPKVDPILITLSSYLASYRLTLKQRLSLANHLEGVKDKTLYRLLKKEQERLCKLEHELLIRMDTYIKQHPKLNQDYQRLISISGIGQKTAISLLTLFQTYPDTNRNQITALIGLDPIQRQSGTSVHGRSRISKHGNQMMRKSLYMPTLVSIQYNHKIKVFYERLVSKHKPKKVAVIAAMRKLLLIAHAIYKNKTVYVPG

SEQ ID NO: 155445 - protein, 376 aa, unidentified
MERGSLMLNTTTFVGLDVHARSIKAVALDAMTGEVRSATFGYDAAEVAEWVGSLDPAAKCVYESGVTGFDLQKRLAALGVDCVVGAVSKMIKPSADRRRKNDRNDAEFLARMLSVGNVVEVWVPDDGCEAARDLVRALDDAREDLKRCKQRLSKFLLRHGYAFSETTPTGRRKGNWTAAHWAWIRSIEFPEKADGDVLAYYVDAVRQAMEDKKRLEKLVEAEASKPRWKKRVDSVRCLKGIDVTSAADLVFEAGEFSRFKNARSFAAWLGLTPSEHSSGESVRQGGITKAGNKHLRRVLVESAWHYLGCSPHSKDLAKGQVPDPAARRHAAKGVRRLVERRRAMLERGVHKNKANVATARELACWCWAVGCMVEGA

SEQ ID NO: 155446 - protein, 370 aa, unidentified
MQRILYIGLDVHKATISATIAEEGRDGPVRYLGVIPNTPNDVTKLASRLSKDGNRLEFCYEAGCCGYGIYRHLVELRHGCTVIAPSKIPSKPGDKIKTDRRDSQNLAILHRSGDLTPVWVPDETHEAMRDLVRARIDASMQLTRCRQQLLAFLLRHGRTFEAASHWTVLHRSWLAGQTFEQPAHQIVFQDYLEAIWTTQERRDALIKRITAMVPQWSLGPLVEALRGLRGIDLISAATFVAAVGDLSRFETPSLLMGYLGLVPSERSSGDTIRRGGITKTGNREARRMLVEAAWCYRFPARVAKDKAEIIVRLPKSVRDIAWKAQTRLCSRYRRLGAKGKKPTVVVTAIARELAGFVWAIGQEMRPDKVS

SEQ ID NO: 155447 - protein, 482 aa, unidentified
MAMRKLSTFERLQPGRWNRQQRRELGRRIAAADAGLAVVHPDAAGIDIGNQSHFVAIPPDRDPVPIREFGAWTAALQELAQWLTAHGIRTVALQATGVYWIAVQDVLEQAGLEVYLVNARGTKNLPGRKSDVQECEWLRKLHTYGLLRNSFRPPEVIRAVRTIWRQRDRWVQEAARAVQHMQKALTTMNVQLANTISDLSGVTGQAILRAIVAGTRDPWVLAKLRDRRIAASEEEIAHSLQGTWREEVLFELRQALEAYDFYQGQLAACDRELAKYTAAVPSRERPAPPEGPAGAAPRLPAKPARRAKSRRQGHPGFDLAGELHRTLGVDLTRIDGIDVLTAQVVFSEIGPDFSAFPDENHFASWLTLAPQRDISGGKVIRHVPAAGRNRVANALRMAAQSLCRSDSYLGARYRRLRARLDGPVAVKAMARYLACLVYRLVTKGQAYVDRGAAHYEAKRQERERRALERRAATLGLTLVPAA

SEQ ID NO: 155448 - protein, 440 aa, unidentified
MDLLHTHGAGLDVHKKTVVAHARITDTRGRVERHTRTFGAMTADLLALAAWLLSLEITHVAMESTGEYWKPVYNILEGSFTVLVVNAQHIKNVPGRKTDVKDAQWIADLLCHGLVRGSFIPPQPQRDLRDLTRQRTNLVRDRATVVNRLQKVLEWANIKLAAVVSDVVGVSARAMLAAIVDGQSDITLLADLARGRMREKRADLERALSGRVRDHHRFVIASHLEQIDFLDAQIASFDAQIVACVAEQAPPSPPAAGAASPPAPPSSGDGNELSWEAAIQIWDSVPGIGRRLAEQLVAEIGPQPDQFPSAEHLARWAKVAPGNRESAGKRLSGKTGKGNRWLRSSLVQAAHGAVKAKGSALAVYYRRLAKRMSGKKAMMAVAHKILTIGYTLLCKREWYREPDLSERETRRTEQLLAQMQRRIERLGYRVNIEPPTAVAA

SEQ ID NO: 155449 - protein, 317 aa, unidentified
MSTEQQVVDVGIDVSKATLDVAIEPTRERWQVANDEAGIQQLVQRLQQVQLHRIVLEATGGYELPALAALACVGLPAVAVNPRQVREFAKATGRLAKTDALDAQVLAQFAAAINPALRALPDAATRELAGLLARRRQLIDMRTAESNRLSMAVDQVRPEIREHMRWLDKRIHQLDRDLHDRLRASPLWRENDNLLRGIPGVGPVLTLTLLADVPELGGVTHRKLAALVGVAPFNTDSGKHTGARHIWGGRAAVRAALYMATCSAVRHNPVIRALYQRLVASGKRKKVALVACMRKLLTICNAVIASRTPWRYQPLDN

SEQ ID NO: 155450 - protein, 407 aa, unidentified
MDQISFPQIVGRGCGLDVHKETIVATIRGSGLEEETRTFGTFTEDLELFRDWLKGHSVTHIAMESTGVYWKPVFNILEKHFEILLVNARHIKYVPGHKTDKKDSAWITKLLLSGLLKGSFIPPQVNRELRDLYRYKRKLVSQTVAERNRLQKILEDANIKLASVVSDVFGVSGQAIIDALIKGETNPVALAALAKGTLRKKQTELQAALRGNLTPHHQFMLKTIRKSLDNIEQIIAEVDNQIEQYLQQFRQEVELLQSIPGVARETATCLIAEIGTDMNVFPDQKHLSSWAGMCPGNNESAGKKKSEKTTKGNKTLKTALTEAAWAASHRKDCYLQRKYYSLIGRRGKKRALIAVGHKILCAAYFILKYKTPYQEPNDVELAEKRKQALIRRSIQRLHELGVDLRLN

SEQ ID NO: 155451 - protein, 453 aa, unidentified
MGRKKKEQTSMPIVNPNAAGIDVGSRSHFVAVGQRAEDVREFGVYSDELQALCLWLKEKGVTAVALESTGTYWQNLFIALLDHGLNPILVSGKFTKNVQGKKTDVQDCQYIQKMHTMGLLPASYQPSAEVEQLRQYTRHRQSLIESGADCIKKMQKAMRQMNIRLDIAISDVTGQSGKAIVQAIIAGKTDAKYLASLANYKIQKSKEELERALTGIWKAEYVMELKHSFELYEFYHQKVAECDAAIEVLLEKQIEDNEKKDGEQRPKMERTERKKQNKNRPKMDIERLAFQLTGGIDLSKIDGVSGQTLLSIISEVGTEVDKFPTAKQFASWLRLAPNNRKTGGKVMSSHTPKRKNRLSLALQRAANVIGNNLKEGALHQFFVRIKIKKGYMEAVVATARKLAVIIWNMLSKKEQYQPTEDAAYTEKLKAQTIKNMQRKLKRLNISPEELVFN

SEQ ID NO: 155452 - protein, 451 aa, unidentified
MSGTKKARRKRDISPTHPHAAAIDIGATLHVAAVGPDQDPEPVRSFGTFTGDLHRLADWFQQCGVRTVAMESTGVYWIPAFEILDQRGFEVILVNARDAKHVPGRKTDISDAQWLQRLHEYGLLRASFRLKGEVAVLRGYLRQRERLLDYAGSHIQHMQKALTQMNLQLHHVVTDITGTTGMAIIRAIVAGERDPAVLAAHRDPRCHASTETIRQALVGNDREEHIFALTQALELYDVYQAKMALCDVRIEAVLKRLRKASSSPAGKPPPVRTPKKQANAMAFDVRTALHGLLGCDVTQIHGLGPYLALKLVGECGTNLSAWPNAKHFTSWLCLSPSNKISGGKVLSSRTRRSGSRAAALLRLAAVAVGRSETALGAFYRRLSARVGKAKAVTATARKIAVLFYNTLRHGMEYSDPGASHYEERYRRRVLTNLERRAKSLGYVLQEAPAPV

SEQ ID NO: 155453 - protein, 348 aa, unidentified
MTIVEPARLVTGGVDTHLDVHVAAALDELGALLGTESFATTPAGYVELFDWFESFGPLGRVGVEGTGSYGAGLARSLLARGVEVVEVDCPNRKARHRAGKSDTIDAISAARGALSGQAKGQPKGGTGPVEAMRVLLIAKRSARSERVRTLNQMRHLVFVAPDDIRARFHGLNVYNLTRQAAAMRPRPGNQVDYVTLMTLRELGRRALGLEDEIDRLDDLLEPIVADHAPGLLNMFGAGIFVAATLAVAAGDRPDRIRNEAAWAHLCGVAPIPASSGKTTGRYRLNRGGNRQANSALHRIVLVRMGHHEPTRVYFERRRAEGRTTLEIMRCLKRYVARETFKQLPGGSD

SEQ ID NO: 155454 - protein, 350 aa, unidentified
MEVQTIGIDLGKSVFHLVGLNRSGEVVMRKKFSRAQLLRFTANVQVGLIGMEACAGSHFLGKALRDQGHEVRLMPAQYVKPFVKTNKNDFIDAEAIAEAVNRPSMRFVPIKTDEQLDMQSLHRVRERWIMRRTAVVNQIRGLLLERGITVRTGRCHLDAALPGILEDGSTSLSGALRFLLAELKQELEQLAVHIEQAEALIQRAAQQSEACQRLDAIPGIGPLTATALIAAIGNGQAFRKGREFAAWVGLVPREHSTGGKQKLLGISKRGNCYLRKLFVQGARAVLQFSDKQCCGLRHWLAQLKSRTHYNVVGVALANKLARMAWAVLARGEVYRPPTQTDMTGLQMAAV

SEQ ID NO: 155455 - protein, 347 aa, unidentified
MKILALDLGKYKTVGCDYERESGKHRFRGSSTTPAALQQLVKEVKPDRVVIEVCNIAGWVCDLLRGMGVEVQVANTSDDAWRWRKVKKNNDRCDALKAAQLSAVNQLREVHIPIIEVRQWRALIAFRQQLVKRRSKVKNHIRDLLVTEGQLLPRGAKCWTQLGVTHLEAMAKPLAEVGLNELWRGQLHIELRQLREVQAEIAVAEEKLDAIAAADPRVALLRTIPGVGPRLSEAIVALLDRPERFHHGREVSAYIGMVPKELDSGETERRGRITRHGSRLVRSLLVEVAWAGLRYNPWVRETYQRISGGKKSRKKIAIVAIGRRLLVRCWAMLRDGTSWRAPVSPAA

SEQ ID NO: 155456 - protein, 411 aa, unidentified
MKKLYVGIDVHLKQHVVSIVPFTMFQDNKTGWKKTKSVKMGNNRHDFEYLDLLLKSQEISADQVSIAIDHTGGHYSEPISYFLKSKGYEVYYLGAASVKAAKERLLGEENKTDKIDSATLAYLLYLRDFYNISLNISATSADFESQSSLLRSLLLQNQYYRKLGAQTTNRLHQYVHAVFPEGEETYFNQLLAILSTHPTPKEIISDPDVFKKSRISVKSRKAIRDLAKRTIGVPGQTYKHIIQDLALLRISNKVKTLSIERTIRELVVEHPYSSVLMSFPGVKEKSAAIIISTVKDINNWPTKKKFKKGLGVYGTIRETGEKHTKFKRGLSGDRMCRQCLFMACFTAVRSKSNNDFKDFYEGQVRKGKPRIKALVATMGKLAEIMYHCLKLNEPYQYQSLYNVKPKDCPIL

SEQ ID NO: 155457 - protein, 377 aa, unidentified
MKEFSKYVGMDVHKATIAVSVAEANGGEIRYLGEIANTPEAIAKLVKQLRKGEAQLSFCYEAGPCGYGIHRQLTELGWDCQVAAPSLIPRKAGERVKTDRRDSLMLARLHRAGELTAVWVPDDAQEGLRDLTRAREDMKSLQLKAKQRLAAFLLRHGKCYGGKSHWTQAHLRWLEEMTFTQPIQQIVFQEYVDTVKMLSKRIGALDQQLESAASESVFWPVIEGLMALRGIHLLTATTVVAEIGDLQRFASAPQLMAYLGVVPSEHSSGATKSRGSITKTGNGHVRRVLVEAAWTYRHPARKTVYLQRRAECTSDEVQEIAWKAQKRLCARYKLMEAKGKLKVQACTAVARELAGFIWHCATSARNGRCRFRTGKQP

SEQ ID NO: 155458 - protein, 307 aa, unidentified
MTVTIVETPTHARAITGGVDTHAGVHVAAALDPIGGLLGVAEFAASPAGYAYLLEWLGGFGTVCLVGIEGTGSYGAGLARHITAAGIRVVEVDRSDRQDRRRRGKSDPLDAVSAARAALSGRAAGTPKGRDGQVEAIRALMVAKRTARSERIQTINQARSLIVTGPDDLRARFAGHSADDLVAELASLRPRPGSMIRYHTLLSLRELGRRVAFLDGQLQRLDALIVPLVTARAPGLLALYGVGHDTAAKLLIAAGDHPERLRSEAAWAHLCATAPIPASSGKVTRHRLNPGGDRQANHALYRIVITG

SEQ ID NO: 155459 - protein, 345 aa, unidentified
MEHYAGIDVSLESASLCVVDATGRIVREANVASEPDALIGWFCGLEFAVTRIGLEAGPLSQWLYAGMRDAGLAVELLETRHVRDAFKAMPVKTDRNDARGIAQLMRLGWFRSVHCKSLPAQEIRALLTARKLLQTKNHDVEMSLRGVLRGFGLKVGPTTPRTFVGRIRELAAGHGTLSTVAEALLAARSMLFEQCQKLEKRLRSLAREDGRVQLLMTAPGVGAIVALTYASAIDDPGRFRSSKAVGAHFGLTPKKYQSGETDVTGRISKIGDGGVRTALYEAANVILTRPVKGSTLKSWGMRLAARTGMRKAKVALARKLAVVLHRMLADGTEFLADKAAAAVAR

SEQ ID NO: 155460 - protein, 412 aa, unidentified
MTAINQFAAHVGLDWADKKHDVCVQFKNGERIFQVVEHTPEALDIWLNELHQKVKGRIAIALELKKGPVVYALQKYPFVTVFPVHALSLARYRQTFWPSGAKDDPQDAELALELMLRYPQKIKAIEPDNGDIRLLQQLVEQRRLLVEDKRRFVNRIINTLKQYYPQPLEWFSHRGSLLLCELIIRWPSLQQLKRARRDTIRNFLNAKGGRAMALTEQRVASIDNAIPLTTDPSVIEANALMATALATQIKVVSEIIKTYDERIETLFDTLPDAGLFKSLPGMGPCMGPRMLAALGDNRDRFNSAEEIQNYAGIAPVTERSGQKSWVHWRWQCAKFVRQTFVEWAAKTVNSSYWARLYYQGLREKGKSHQSAIRALAFKWIRIIYRCWKTRTQYDEAKYLLALEARHSPLLKP

SEQ ID NO: 155461 - protein, 472 aa, unidentified
MAAGKQKRKRVSARVVEDEDYQLSYERVAGIDVAKASAVVCVRLPPEPGRDRRTSRIWEVTASVPEIGALAVELRSAGVQLVSMESTSDYWRVWFVVLEAAGLRVQLVNSAQAKNLPGRPKTGELDARWIARLTEMGLLRGSFVPPPQIRALRAYTRQLVHLTQDRTRYWQRLEKLLEDALCKLTAVVSGLAGSVSCREMIEAMIAGERDPQVLASCARGPMRGKRAALVQAFTGMAFGPQHAFTARSHLSMIDHLDAGIAALQARVRDHVAQIPAAWGVDADGSTGPDAGLGDDAAVLPAVARLAEIPGVSPGIAIGLIAGTGLDMRQFPTPAHLVSRAGMVPVANQSGPRKGRGKKGQGNSYARRLATQAGNGAAGTDTFPGERHRRGPAAARRRRVEESQLRRRPVHPGHRLAPAQRSRRPVHRPGPGPLRQARRHQPQGPRPQTAARSPRLGRHPHPPRGRLRPSARR

SEQ ID NO: 155462 - protein, 426 aa, unidentified
MQPHYTCVCGVDVHKEFLQVCILRREEDPKVFRVFNNFSGVQELKKRVEEEGCECIACESTGVYWYRLYLAFEGQTRVIVGNAYQIKSIPGRKTDVRDAQWIAELAMNGLINPSRVFPKNDRELRELTRSRESTVKSRTQIKNRIHRIFDSAGIALGKGVRDIFGKSGVHLIWGLLKRADTEDIISTLPSARVKKKADLLREILSGSLSDLQIILIKKNLDMMVHINEHIQTLDEQIIARMMEQDSIRDIEIACSIPGVSVTTAVTVLAEIGDYRDFENAEKLASWAGLVPSVYQSAGKNCSGKITKHGSEHLRWILVQAAKAAGRTVNTTFRKFFNRIAYRKGGNTATVALARKILCILWHLLINKELYIDPSKNTKSIKPPVVQKFAKNSSSDVQQAIDFIIECGFRVIHPDFTLDRKFRGVSQ

SEQ ID NO: 155463 - protein, 373 aa, unidentified
MQESITWVGIDAHKRSLQFAVLEGGQFREWVIANESKAIRRVARKLVKQATGEVRCCYEAGPLGYALKRELEAAAPELVCEVIAPSLIPVKSGERVKTDRRDARKLAQYLEAGLLTEVHPPSEQDESVRDLTRCRRALKGDLMRARHRLAKWLLRRSVHYTAGKKQWTGMHHKWLRTLSFERGSDKVVFDQYLLAIEQLLERLEHIDAELKQLAESETYRAPIGWLRCFRGIDTVAAMTLLTEVHDFRRFESPLQLMSYLGLTPSEHSSGESKKQGSITKTGNTYARRMLVEVSWHYRHRAGVGAGLRARRQGQPAWAIAIADKAQMRLCTRYQRLVARGKPLQKATIAVARELVGFLWAVIREGEQRQSDAN

SEQ ID NO: 155464 - protein, 497 aa, unidentified
MIQIPAVIERCAGIDVGKRELAVAVIVGPADQDGEVETRTFGTTVPALEELRAWLIRQGCTSVAMESTGSYWIPVKNILEASLRIVLVCAKKHKPARGDKTDFRDAKNLAHLHRHGLLKGSFLPHQTVVELRDLTRRRKKLLANLAAEKNRIQKVLEVANIKIGSIVSDVFGVSGQAMLSVLVGGKQISAEEIANLSKRRLRQRIPELTEALQGHHMNDHHRWLIAQCVEHAVLLDRQMEELEARIEEKLQPYREQYELLQTIPGVKEMTAASILAEIGPDMSQFETAKHLCSWAGISPGNNQSAGKRKHSRINKGSKFLLATLVEAAWAAARKRDSIFQRKFHRWMRTLGEAKANVALARSLLEVAYVLLKERRPYQEPDPKQMHELEKAKLVRHHAKRLRQLGADNELVEEVVARLSRHDVSSSAEKETAAQLPLQRIRRISPAKVCRGALGFRARQTRKHEYSIIKKDATETRSPASLRSKREEPPITNSPETQ

SEQ ID NO: 155465 - protein, 355 aa, unidentified
MNLYQTKTKFNCGIDLHSQNMYLCVMDKEGNKLVHKNIKVGERVKFQEMLSPYKNDLTVACESTFNWYVLSDLCEETGIPFVLGHAFYMKAIHDAKVKNDKIDSATIATLLRSNMLPTGYVCRRETRSIRDLLRRRQYFVRERAALEAHLSMTNYMHNMTESRKELKRKKNRLENYFEKLPPDIGVKMSTQADIYMIEQYDKVIKGVETTVLAHAKKFDNELLELLQTIPGLGKIIGLGILYEVDDFSRFADCKHFVSYCRLVTPTHESGGKIVGKGNSNNGNSCLKLLFSELNATSRSHNPEMNALAQRLVKKHGRRKGTCIYCHKLGRAVYKVATERIPFNMEKFMGGPLKKS

SEQ ID NO: 155466 - protein, 423 aa, unidentified
MEIMHERVAGLDVHKATIVACARLGAGRKVTRECRTFDTTTDGVLALLAWLVECRCSHVAMEATGVYWMPVWKILSEGDFALIVANAAHIKNVPGRKTDINDAMWIADLLACGLIKPSFVPDEDVQELRSLLRTRKQLGREQTRHVQRIGKTLAEANIKLDSVLSDIMGASGRRIIEAMIEGVRQPRKLADLASKQIKATPKELYDALHGRLTDHHRFLLKLHLKQWDGLDTTIREIDLEVEARIARMDKEVKAGAARFRDLIGLLCTIPGVSTLSATTILSEIGRDMSRFPTAGHLVAWAGLCPGQNESAGKRKSARLRKGAPWLKTMLVQCAWAAKRKKHSYYKAQFFRLQSRRGPQKAICAVAASILTAIYHILKDGTEHHDLGADHFNRRSTEVQAKRLVAQLTRLGFEVQLQHNAEAA

SEQ ID NO: 155467 - protein, 370 aa, unidentified
MRHGSTLYVGLDVPKDSIAVAYATTDGPSDPVHVGAIGTRQCDIDALVRKMQSKSAPLVFIYEAGPCGYWLYRDLTRKALTCVVVAPSLIPRKPGDRVKTDKRDAVTLARLARSGDLTPVYVPDVPDEAIRDLARAREDALRDLNTGRFRLKALLLRNDIRYVGRANWGPEHVRWLARLVLPTPAQQIVFQEYVRTVTERTELLHRLEAELLEQAKPWRLYPVVDALQALRGVQFTVAITTIAELGDLTRFDNPRQLMSYLGLTPSEYSSGDRRRLGGITKAGNGHARRVLIEAAKAYRHRAKVSEPIQARQQHLPAPIRDIAWRAQVRLCGRYRKLLARGKHPNTIAAAVARELAAFMWAIARTQAVSA

SEQ ID NO: 155468 - protein, 372 aa, unidentified
MNSVGIDISKGRSTVAVMRPFGEVVISPFEVRHTDSELSELARQLKSLDGETRVVMEATGNYHTPVAKLLHDAGLYVSVVNAKLVHGYGNNDLRRVKTDKKDSVKLANYGLDRWLALTRYVPEEDTRLLLKNCYRQYRQYSKVQTVLKNNLISLLDTVFPNVNRLFSSPAREDGSEKWVDFVAEFWHCRCVSEKSEKAFANKYQRWCRKYGYNFNEAKAHTIHAEASGHIGVMPMSETTKLLVEQAVAQLRATSTALAALKHEMQALTSMLPEYPVVMDMFGVGPTLGPQLIAEIGDVRRFYSKKALVAYAGLDAPPNDSGDVTGRHKSMSKIGASSLRRTLFLVMSVYLQTAPLDEPVYQFMDRKRAEGKP

SEQ ID NO: 155469 - protein, 444 aa, unidentified
MKERVIGCDVGAEFIIAYDGEQIRKIEEVSQIPEEWRGAIFVLEQTGAYGVKWAEILSKYGAVFIADGKDFKRFRQAHTNKKTDQLDAIYLREYYLRHKERCRPYEPQVIWMRALIRQHIRNQKDITKHTNRILQYLLVIKPEEKRPSRYKLFKKLNNLEEELKRTPHALSQLALAEIEKLRICLQADQKIREEILSITRNHPDYEILRTFPMSDIQIACLLAYSWDINRFKDKDAYIGYVCMGSTVEQSGKSYRVKTEKARTEVKGIFYMLYMSAHRKKSPLKPLAELTKELVPQSYNNKKRYIKFLSRFLELTYYARKERTDYRTTLERAIQRRREELAHTLKKEEEEHNLTRAKKIYTLTRSIKAYEKMAQHKDISLRESPQEPQVYLVPLKKHQQEVSDEDSSKLSLSECNFCQPTTPHPPPSKRNEDTGGNIILLIFAL

SEQ ID NO: 155470 - protein, 396 aa, unidentified
MKTVSGLDVHKDTIFACVLQKDNVPFIKEYSTMTCGIEELSDDLRSMGVKAVAMESTGIYWMPVWEILERHFKLMLVNPYYIKQVPGRKTDVKDAQWIATLLQKGLLKGSFVPDHLLRELREYERGYVRLSNQETRLEQTIERQLIKCNIRITSFATKIGSATVMNIVQAICEGEVRANELEKLVHGRIRNKHKEKIYQSLQGVIRPCDRLLLHQSYQQYQLIKQQQNELIEQMNRICHDHFEKEMKALVTIPGVSTLSSMTILAEIGSDMASFPTDKHLVSWAGLRPRNDESAGKIKSKRVTHGNKYLRRIMVQCAWAASRTKGSWFQGKFQQLCVRKSERKALIAIARKQLMIIYLLLQTKQDYVAPVQKLTEKEKERKVKYYQRQLDALLNMS

SEQ ID NO: 155471 - protein, 464 aa, unidentified
MIDEEAVLATLGIDLAVRAAHVATLTNDRGEVVWSRHRFRNRRDELAALIARVGELDRLTVVMEPTRNAWVPVAAYFRAAGAAVVLIAPEQSADLRRYYKKHTKNDRLDSLMLSRVPLLHPEGLKELSDLGPADALKRAVRRRARLVASRLASKQRLDAMLDLLGPAYAEVFGTRCNKTTLAVLDRYGDPTKLHRFGLVRLTAFVKRTSHGHWNATQAAEILAAADAAIELWTDGGLDFAELAWDLASEIRTLRSIDTEIARLEERIAGLYAAADPKQIAASAPGVGAILAAGIAGRLGDANRFENLAAIRSFSGIVPKVAQSGLAQTQPGITKQGDPGLRRDIWFAANVARTQDPQLASKYYRLIVERKLHHNSAVCHIATTLITRIGACLRNGTPYTVRDIDGREVNRVEAAAIIAERYTIPTEARRRSRIPNEMSEPTRQESNKRRSKPTRSTPNYALDTA

SEQ ID NO: 155472 - protein, 427 aa, unidentified
MGQRARMGVGRYAAAVSLAPTAGACWEDGHAAHRRGPRKATFTACFLEEDEREAIATFPVTAEGLAAFRARLRPDDRLAAEVGPNAYFFHGQVRPAVAEVVLVSPRQFAAIATSTKKTDRNDARTLARFLTLGCLAAVAVPDATIRELRQLFATRAALVQMTTQLKNRGHAALVRNGIGRGRGAFASPTGRQRLARLEGLAPSDRLVVELVLRQLDQLEAEILGVERAIIRRGRSVPGLRRLLQVRGLGLVAAIGVLAEIGDIARFPSAKQLVAYAGLASAVRQSGATEHRGPITKEGRTRLRGFMSRRSRPSCGTAHGRRWATSTRASGGRRAPGRRSAPRRGSSWRWCSCCSRRGWTTGSWKSGSTSASCGCSPQPTDDGAPRGAARLDSSWEWQVCRRYFSAESLAKLRKEVPPLLSPPLRAAS

SEQ ID NO: 155473 - protein, 345 aa, unidentified
MKPVVRIGMDTSKNVFQLHGVDEAEEPVLRRQLRRREMMKFFENMPPTLIAIEACGSSHHWGRLLTTFGHNVRLIPPQYVKPYVKRGKNDAADAEALCEAVSRPSMRFVPIKSKEQQAACMLMSVRERMVGVKSQLSNAIRSYAAEFGIIGPPGRQNVTALIKRTLEDDTLPQLARELFSLQAKEYQAVEARLEEVEAKLMKWHRNDDVSRRIATIPGIGPIGSTMLSVKAPPAENFTSGRHFAAWLGLTPKDHSTGGRVKLGGITKAGDPSIRSTLIVGATALLRHVRKGRTKPSRWLAAMLERKPPKLVAVALANKFARIAWRLMISGGVYERPSDLELSAAA

SEQ ID NO: 155474 - protein, 343 aa, unidentified
MEQYVGLDVSQEQTSVCVVDGGGKVIWEGKCTSTPEAIAATLRTRAPEAVRIGLESGPLSAWHWHELRKLDLPVVCLDARHAKAALALQLNKSDRNDARGLAQIVRTGWYREVRVKSVDSHLVRSLLTTRAQLVRMRVDLANQIRGVLKPFGLIAGKGGGRPFAERVRALVAGGPLQEVAGALLAAWQAIGEQIAVLGRRLVAVARQDEAVRRLMTTPGVGVLVALAYVSVVDAPERFAKSSSVGAYIGLTPRRYQSGEADYTGHISRCGDKLLRTYLYEAAGIILHRVPRWSALKAWGTRLARKIGIRKATVAVARKLSVILHRMLRDSSEFRWSAKEVQAA

SEQ ID NO: 155475 - protein, 367 aa, unidentified
MWQVVAGFQSFVGVDLHKCTVTLKAVNAAGEVAGHLTISTKSVEKIEAWLRALPRPVWLAVEACPFVEWFIERYRDVVDRIDIADATRLASCRGKRRKNDPNDALDIALRLARGECPLGFIAEAQLMQLRKLGRHWRQLSRLLARTKHAMKSMLNAANLHGPKFDGAGAQRWLLAHGTLLHPAQRQAFGNYLDVVLLVERQREVLRRQILMADRSPQFLDTQLILQSVPGIGDIWGLMIAAEIGPFDRFPNADALEFWAGLTADLKTSAGRSQSGNITKAGSAPLRWAICQAAVTLCMCDARQEEIRQRLIKRIGKAKANVAMGRRLLRTLYAMVRDQKPYRCEKPVDRTTRMNQAKAPRKTKQKVA

SEQ ID NO: 155476 - protein, 463 aa, unidentified
MAWTPVQGDNLVAKRKQLRGRKRRNRPTPAINPDAAGIDVGATEVYVAVPTDRDPEPVRTFATFTRDFHELADWLDACGVKTVAMESTSVYWIPLYTVLEERGIEVCLVNARHLKRVPGRKSDVLDCEWLQYLHSVGLLQGSFHPPEAVSAVRTVLRHRTSLVQIASSHVQRMQKALTQMNVQLHHVISDITGLTGLAILDAILTGERRPEVLAELRHRNIRAKEETIIKALEGTWRREHLFTLRQSLAAYRNYQTQIEQCDRELQDMLGSFHSWTDPDAPPPAGGPKGRSDPHSFDLGAEFHRIFGVDLTQVPGIGVQTVYTLFAECGRDLSAFPTAGSFASWLGLCPDNRITGGKVLSTRTRKVNNAASTALRMAAQSLHRSESCLGDSYRRMRYRLGPPKAITATAHKLARIIYHLVSTRQPYDDSVLAHDERQTRIRKTRRLKSLAQTLGYQLVPVPSP

SEQ ID NO: 155477 - protein, 466 aa, unidentified
MTPHKDFFLHPRPSTPPPPQPPARTGPLQVFNPHAAGIDIGEAEHWVAVPPDRAPQPVRRFGTFTVDLDVLADWLIDCGITTVAMESTGVYWIPLFELLETRGLQVLLIDPRQAKRAPGRPKTDRLDCQWLQRLHTYGLLAGAFRPEAQVCVLRNYLRHRQMLLTYAAHHIQHMQKALQQMNLKLTQVVSDITGATGMAIMKAMVAGERDPQRLAALRNAHCQHDEDDIAKALQGTWHTEHLFALQQALSLYEFYHQQLALCDQQIKRHLATFADKSAGQPLPPKARRSKKTNEPRFDARTPLYRMAGVDLTTIEGIEETTALVILSEIGTDMHRWPSVKHFCSWLGLCPQHQISGGKVLSRRVRPGAHRVTVALRLAARSLHHSQSALGAFFRRMKARLGTPKAITATAHKLARLVYSLLQHGSAYVQQGLDAYETQYRERKVTAMAKQAKALGYTLVPLAAQGS

SEQ ID NO: 155478 - protein, 348 aa, unidentified
MTLVGCDLHARDQQVAVLDTATGEIQERHLVHDGDSVEQFYTSLPGPVTVGIESTGYALWFHALLHRLGHEVIVGDAAKIRAMVVRKTKTDRRDAAHLLDLLRHDRFPTVWLPDPAVRDQRTLLAHRMRLVRMRTMVKNGVHAIALNYRLALGPSLFTRAGLAQLQALSLPPHTSCRRSESLELLSWLNTRIKGLDDQIEEAAHAHPEAQRLMTHPGVGPLSALATVLVLGAVTRFPTSKHVVSYVGLAPAIESSAGKHRLGRITKQGNALLRYVLGQAGQAAIKRDPDLKRLYYAVLHRRGRSRAKIAVARKLLVRLYVMLRDQIDYQTFLHRAPAAARRKEMTPTS

SEQ ID NO: 155479 - protein, 345 aa, unidentified
MQPMYYIGLDVHKRKISFCVKDGSGRIHAEGSISATRLELDHWMRSLPQPWSAAMEATMFTGWIYDHLKPHAATLKVAHPLMLRAIAAAKKKNDRIDAGKICDCLRCDFLPESHMASTAIRERRRTLRYRNLLVRQMVQMKIKISALLMEAGVSYNKQRLHKAGYFRELLATNPDIDEGLCSLLRLCRETVVRLGKNESALVRSLERDSLLVERIERLMTIPAVGPITALTWALEVGDVQRFSSIKKAISYCGLCGAEKSSGNTVQRTPLSKQRNKHLQTTLIEAAKMAPRNSPELAMLYDREKQKGNANRATLAVARKLVAYLMAVDRGQRNFQRAETSSSIAA

SEQ ID NO: 155480 - protein, 343 aa, unidentified
MVRSVVGGVDTHADTHVAAAVDTNGGLLGIESFPADESGFEALLGWLTSHGEVTMVGVEGTGSWGVGLSRFLHDNEVTVVEVDRPNRQNRRKVGKSDPTDAVSAARAALSGSASVIPKTRNGPVEQMRILMVARRSARQQRIATLNQLRHLVFCGPEEVRSRFKDRPKTGLVTEVAKLRPRKGSDPVLYTTMVTMRGLARRIQTLNTEIKALDAMLTRLVADTAPSLVGLYGVGTDTAATLLVTAGDNPDRLASERSWAHLCGACPIPTGSGKTSGRHRLNRGGNRQANAALYRIVLTRMSGDERTRTYVARRRAEGKNTAEIMRCLKRYVARETYKHIQHTA

SEQ ID NO: 155481 - protein, 367 aa, unidentified
MGTVRFVGMDVHKESIAIAVADGSGGEPATVATIANDTGRLRKQLLKLARKADLRCCYEAGPTGYGLHRDLRAAGIHCVVIAPSLVPVQTGNRVKTDRRDAVKLARFLRSGDLTEVAVPDQATEAIRDLERARDDAKKAERVARHQLSKFLLRHGRIYSGKTAWTLKHLDWIRKERFEQEAQQRVLTDYLHTVEEASARVERLTRDITGLVESWHLAPLVKSLQALRGVQLVTAVIIAAELGDFGRFATAPQLMAYLGLVPSEHSSGESKQRGRITKAGNSHVRRVLVEAAWSYRFRPNLSAAIREQNEGVGPPIRAIAWKAQERLHRRYARMIGRGKSKQKTVTAVARELAGFVWAIGREQERLAS

SEQ ID NO: 155482 - protein, 352 aa, unidentified
MIIIGVDFHPEFQQIASVDTDSGEFLEKRLAHREEAEKFYRALAGQKVRVGMEASGHARWFERLLGELQFELGIGDAAEIRTKRVRKQKTDRQDAQLILRLLLEDRFPRIWVPSWENRDLRQLLWHRHRMVQARTRIMNQLQAVALNEGLCCKKRLWRERGRQQLESFRLAPWASRRRRDLLELMDRLNPTIAELSQAIEQEVEKCPAAQRLATHPGVGPLTALAFVLIIGRAERFQCGKQVASYLGLVPLEESSGNRRRLGHITKQGSSMLRFLLVEAAQVTVRSLPDWRSKYLHLMMRRGRKTAKVAMARRLAVRLYWMMRQGWDYQQWNKFGSHTGQPGHRDGVQSNTE

SEQ ID NO: 155483 - protein, 251 aa, unidentified
MTRTTVPNDEKGIAEAINQLKQYPVERIVIEATGRLEMPFIMACANSKLPFVIANPIHIKRFAGAIGQRAKTDKLDAQLIAHYGEVIKPALSQLKPATMQVMSDLVARRNQLLVMQTMEKNRLQSLPKSLSMTIKPILTAFKHQILKIEKKLVELIESCPEYQKKNTILQSMTGIGKIAASSIISNLPELGYVTGKQASSLVGVAPMNRESGRYKGQRRIQGGRHQVRTVLYMAMLSAIQSVLVNYRRTLF

SEQ ID NO: 155484 - protein, 343 aa, unidentified
MQVSTIGLDLAKNVFQAHGVSAEGKVVLKKQLRRGQVLSTFAKLPPCLVGMEACAGAHYWARELRKLGHDVRLMPARDVKAYVKRDKTDAADAAAICEAVSRPSMRFVALKTPEQQGRLMQHRVRDLLLRQRTQTINALRAHMAELGLVAATGRQGLCLLLAIVADAKDERLPQDARASLKLLASQITALQAQIDTLDKRLHAQHRQCPASRRLETIPGIGVIGAAALAATITDPKAFKSGRDLAAFIGLVPRNNSSGGKQRLGPISKQGDRYLRRILVVGAHSILKQARTRPDKHPWLARLMARKPGKLAAVALANKTARIAWAVLARGESYRAPTAPAAAG

SEQ ID NO: 155485 - protein, 361 aa, unidentified
MRRYTISKNKGNRCDTGMRKLLLFVGIDLHRVTWHVTIRTEDVELFSGGIPGRWDALKKLLDKYGEYRISVVYEAGYFGFWLHDRLVAYGVECTVTPPSLIPQEYGNRVKTDRRDSRKLAYFLAKGLLKKVWVPSEEERYHRQVIRRRRQLVGDRVRVQNRIKAELRFYGIELANVVGKWTREYVENLRRLSFNNRWMQESFQRLIEEYDFINEEVVKQTKVLRDLAEDELYRDRVGILRSTPGIGLIAAMEYLLELQDVERFRRSEHLAAYVGLTPSQYSSADKVRMGRITCIGKNTLRGTLVEVAWRLIAKDPAMRQKYDTLKARCGSKRAIVAIARITLLRTRRMLIDRKPYVIGLAA

SEQ ID NO: 155486 - protein, 348 aa, unidentified
MVIIGCDYHPGFQQIAFVDTETGEADERRLTHLEEAEEFYRTLKTRKVRIGMEASGHARWFERLLIELQFELWIGDAAEIRTKRVRKQKTDRQDAQLLLKLLMEDRFPRIWVPDAENRDLRQLLWHRHRLVQMRTRIMNQLHVVALNEGVRRKKALWRPAGRSELESLVLAPWALRRRRDLLDLFDQLTPKIHDLTRALEEEVEKRPIARRLMTHPGVGVLTALAFELVIGTPARFGCGKQIASYVGLVPTEESSGDRRRLGHISKQGNALLRFLLVEAAQVAVRSQPHWHSKFFHLAMRRGRKIAKVAMARKLAVHLYWMWRQGCDYGQFEKLGSHAGEPVHRHGAQ

SEQ ID NO: 155487 - protein, 347 aa, unidentified
MAKIAYIALDLHTRSCTLGVMNAAGRFLGNQQFATTEKELVKALEMVNAKHKHLVIEEGPLTRWAAQLASAHVERVVTCDSRENALIYKGSSKRDTLDTEKLCRLLRLGELKRVYQPESDHRAIFKAAARHYIDLRHQLIAIKQKIKAVFRYWGVIDCFGARLYSAKGREGYLQQIPHGVVRQQLLRLYELMDFHVQAKESAKAQLKALGRRYPEVREFKKISGIGTLNACLFDAFIQTPHRFGNKRQLQRYCRLGVTERSSDGKPLGYQRLDRSGIGELKAISFRTFVASMRGDNEVKRFYQQSLARTHNKVHARLNTQRKVLSVMYGLWKKGGTYRPDLFLDPSA

SEQ ID NO: 155488 - protein, 419 aa, unidentified
MPFKIIRKNCCGLDVHKTWIYACIGITDPNGRTEYFEKRFSSFSKGLRNLSEWLSKHNCKEVCMESTGKYWIPVFNVLETTCYVELAHPKYTKPQKGNKTDRKDARWICDLFMCGMTKPSFIPPADIRHLRDLVRYRFKLTCMLVGEKNRAQNCLTVSNLKLDEVFSDVFGKSSRSITEYMLAHPGETFDVTPFVHPRCKTPIEEIQAAVDGAISPEQAIKLRQCLNHIDELEKHKEEIEREIFRVSDPYLDALTLIRTVPGLDKNPFTSIQILSEIGGDMSVFPTDKKLVSWAGCCPRNDKSNKTIKSTRISRAGSYLKPVLVQVSNALIKSKKHSEITDRYRRIKSHRGHKKAIIAVCRMLLTAIWHILSDLKPYTPDGYLSPRPAKKEKVLTTSQALNLLKLHGYVIKDDLASAIS

SEQ ID NO: 155489 - protein, 338 aa, unidentified
MYYSGIDQHKQFSYFTTVNDEGIIIKQAELKNNEFDILNYFYTLGKDHIATVETTGGWYWMNDLLSNHGINLKLAHAKYVKAIAYAKVKTDKVDSHILAQLLRLNFIPEAYKISDNLRPLRDTLRARLRLSQKRTSCLNFMNRMLEKFNINSPSQLTEFYKLQYLQFDNQEQLLKQQMLTLEKSLYTSLIPNEVIQRLLWIPGIGKLNAFSILLEVGDINRFQSEKNFFSYCRLVPSARNSAGKSKQRSSKDGNKYLKLVFSDAAVHSLQYYPAIKKYHDSKLRKKKKQVAHAIIAKEIARIVYYVLKNKSAFNNHFKGIELEHKKSVQWPRTSSPDV

SEQ ID NO: 155490 - protein, 430 aa, unidentified
MTNREPMPSDVALVAIDISKLRNDVLIERPGNVRRKRLVVLNTRAEHDRFIELLGGLGCPVMAGFEATGNYHRPLAHRLLEAGVKLRLVSSVALARTREALHNGWDKNDPKDAQVILHMLRIGATQTYCDPIRAGIHNIQELSKTHEVVSKAKTELWHRLLTHYLPLYFPEIARFAGNSRSDWFLAFIEQFPTPASITAFAKEDFVSAAWDVVGKKVSKARLLADIYETAGSSIGLPLERDSPAIAMFRMMVTEGRSLIRQRDAIEAQAHTLLSENADYNRLRQVPGIGPINAMTILAEAGDLRRFGHHRQFLKFCGLDLATHQSGQFRGRTMLSKFGNARLRRAFWMAAQVAIRQRDNSFRAKYERYIARDRDNADLKRKALTAITAKMARTVHAVIKTGSDYRPFFEGPMPSGRTSLSKCREGASATL

SEQ ID NO: 155491 - protein, 485 aa, unidentified
MLSGVGPSTVGEIYMATITKKALEALEFTASFYCGIDVHKQELAVAIYGKDQMHLEVIRHNIFHTDPAGLAALWAFVEPYHPLGFVMEATGIYHHIVAEFLDAKRESMHEDFEIYIVNPSDAKGLPGHQKNDRVDAERLAKYYAYGLLKNGKPLVRVLEDLKALFRMSARLEKDRTAMKNRIKKTLDRAGIRPKELDLNQEWVNEALHELVHFTGSIETFFQQAMLPESPLYKHLRMIQKHLSQFEPFFSLSLTSAQKALVRQDLFDLDLKTVRQTLLRVEMEKALQSRFLLRDQAYALSTIPGISPRAALWLITELGGINRFSNLREFLSYSGCVPRVAKSANIIYSAHTSRHSNKFIRGIFYQAAVVVTHVVKKESGLKTYASRIYAAKIKTPTLAYCIIAGKIARIAYAALKKSLVFDCTLGLDKVIINRTAASSKFTMVEQKDLKKAKRLLGRIRLIQGCEQFDGEIGNLVQSLEELLGKK

SEQ ID NO: 155492 - protein, 428 aa, unidentified
MNCNTQNAKIASITEKTLIVGIDVGSETHYARAFDWRNYEYTRKPLEFSNTEAGFQTFKAWMEDIAAKHGKTVVIPGMEPTGHYWFALGKFLQDRGMRPVHVNPHHVKKSKELDDNNPNKNDRKDPKTIAALVNEGRFSYPYIPTGIYAEIRSLSNLRFQTQEELTRIKNRLARWFAIYFPEYKDVYGDLKAVSGRMVLKEAPLPEDIRKLGVEGVNRIWRDAKLRGAGMKRARILVSAAEHSVGSKEAPGAARMELKNLLNDMDVYTSRLEELLLKIEEKLKEIPYVDKLMGIKGIGLATVSGFIAEVGDIGRFDNPKQLQKLAGYAIVANDSGKHNGESRISYRGRKRLRYVLYEAAISLIGKNAEFRAIHEYYRTRKENPLKKMQSVVAVACKVLRVFYTILTKGVDYDAGKLMGDIRRPQIQAA

SEQ ID NO: 155493 - protein, 421 aa, unidentified
MKNKAARKIKQIPEGYLMVGIDPHKKKHAAVAMTQDFMVKNKFKFTNSKHGYEEALERVRWEMRSNGCRGVIFAIETASHYWRNLAYFLDERGIPFRLINQFTLKRRREGKDIDRKKNDLRDAEAAAQLLRSGEFTETQLPQGIYAELRATYNAYRRLIKEGSRIKNLIKGLLDGLFPEFTQVFKDPCGLTALSVLSICPIPNVITGMTEEGFLNIIRQECKGRLMKKKLRVLHNIARNSIGIAVGAHSLAMEISFLAEKLALINSQVHQTEKTLMKLVDETEEGKYLLSIRGLGYISVAGMLAELGLFSSYHSAKQLVKMGGTNPTESESAGKRKSRTPMSKKGRPGLRWCGWTAAVSLLRHNPDFRFWAKRLQERPIHANPLNGKEMTGAAINKLLRLAFALVKNKTFYRLPEMTEMKV

SEQ ID NO: 155494 - protein, 344 aa, unidentified
MNHYAAIDVSLELSSVCIVDATGKVVKEMKVETHPEALVKFFKRLDLPLIRIGLEAGPLSQWLHAGLTAAGFETTLMETRHVKAALSAMTVKTDRRDARGMAQLLRMGWFRPVHAKSPGSQEVRALLVARKQLQHKLRDIELSLRGILRGFGLKVGRVTAKTFEARIRNLVIGHAMLEQIAEAMLAARATLLTQFNKLHKAVLDVARHDEVCRRFMTTPSVGAIVAMTYKSALDDPGRIKKSRNAGPLFGLTPKRYQSGQTDVTGGITRVGDEMVRTALYEAANVLLSRVTRFSALKRWGLEVAKRRGLKRAKVAVARKLAVILHRMWMDGTTFRWSKTEAAHA

SEQ ID NO: 155495 - protein, 327 aa, unidentified
MEQEYIGIDLHKAFFQVCAVRPNGERHWEQRWPTTEEGIAGLLTRCGPHSRIAVEASSPTWAFVDRIVDHVGAVQVVDTRKTRIKAGYAAKTDRLDAQRLADALRRDSVVGIYYPPPAIRDLRELCRYRCHLSRLQASLKQRIHALLLRHGVVVPMRSPFSTRGTVWLDGLTLPGWGGASLRGLRRVLADVRAQQVPVLTALREVAARDPIAVALDTRPGFGPVFSVTLRAEVGVIERFPDGPHLASYAGLVPRVERSGSRHWSGRITKAGSPWLRWVLIEAAIHQLRRPDDFGQWARRLAIRKGLLKARVGVARALCDEVFEVWPR

SEQ ID NO: 155496 - protein, 285 aa, unidentified
MEQVVIGVDPHKLSATIEVVDQHEKLIGSGRFSTDQAGYCAMRNYAKTWPDRVWAVEGANGAGRPLAQRLLEAGEQVVDVPAKLAARVRLFDTGHNRKTDALDAHSVAVVAVRTSTLRVLKVDGELEALRMLADRREALTRRRVQTVCRLQALLAELLPGQGKRDITTGQAKAMLATVRPRDIAGKTRRRIAAEELAELIAVETKIKKATAELKAMVLARGSRLMDIHGVGAVVAARILADVGDVARFADRNRFASWTGTAPLDASSGEQNRHRLSRAGNLGSTT

SEQ ID NO: 155497 - protein, 403 aa, unidentified
MTVRPRVWVGIDVGKTSHYACAVDESGKVAWSQKVANEQRAIEQVIDRANNTAERVRWAIDLTSPMALMLITVLLGAEQSVAYVPGRVVNTMTGALRGEGKTDAKDARVIAESARMRSDLSEVSMPDELVVELTQLTGYRADLMADWVRGINRLRALLGSIFPALEAAFDYSTRTPLILVAGLCTPAEIRTAGVDGVTAHLVENQAWPAGITKTAATAVAVASQQQLALPGEAATAALVKRLARKLLDLDREIKDIDKTITERFRDHPYARIIESLPGFGPNLGAEFLVATGGDLASFATPGRLASYAGLVPVPRDSGRVSGNLHRPKRYNRRLRRVFYIAALSSIRANGPSRQFYDRKRGERLIHSQALLALARRLVDVLWALLRDGREFSPHRPTTVAPTA

SEQ ID NO: 155498 - protein, 401 aa, unidentified
MEGPIVSIDVSNGNSHYMCFIKNNKRFGKVKKIDHDIEGFKRLLEDIQKLEAETNEKVCAVFEATGVYTKPLERFLSKNSIKTYIINPLESARKRKEEIHNKKTDKLDPISISKVYYDKEEMMELKKKDETYNWLRKKNRLYEDQLNHLRKYKVTFQNQLSICFPGYLDLFKDGYSDIPMTILKKYPHPDLLKNKKAETVARYLEKNTCHTHKVSLEYALKIIEFAKKTYPGCEKDDVEVEIFKILLDKVIETQRECEKTLNEMITVASTLEEYRYILSIDGIGTNLAARIIAEIGDIEQFKSREALVAYAGLDPHIYQSGDQDGKHLKISKKGNKYLRCLLFLAVGCSIRGAKDNPVNRFYQKKKQQSNPLNSKAAKTACTAKLLKIIYGICKNKTTYER

SEQ ID NO: 155499 - protein, 462 aa, unidentified
MIIDHNTPQVCTGSSQIAAFNATYSSAIGIDVHSRLMVACFQKGEFGCSSFTEEFKESGTSLKAIRNLVIWCNSKNPEIIIMESTGIYWKTLYTEPEKSGFPRDRIVVINPRILKPLKGRKTDRSDARNLSKHARMGSFTNSFIPKKDIRELRSLWASFQQIKHQYENNRRSLLNSLADYGCQFANIVSNSRGVTAQRILEVILSGDTGEALRKHIRKILDDMHKRRGRKLSAGLDEICEAIESNITPAIRMALNLRSNQLKIYEAHMKTVFDTIKVMVLKSYKELYDLLLTIPGTEDMSVIGIICVVGDDLSSFSSIKKFASWTGLAPGNNISAGVSYSSRITHGNRYFRRTILAIAQGCANQKKNKSGLGNLFQRLRERKGYNKAKVAVAHKIVRIIYVIITRKVKYEDSPNDQSLAKFRMAQVKRAISRAKITEGLCVQSETSNQGKVICASVSMTQLT

SEQ ID NO: 155500 - protein, 320 aa, unidentified
MMAQNDRVVVGIDVAKDKVDACIRALSQRQTFPSTAEGRRALIRWLRKHKVGKAVMEASGGYERDWAKALREARIEVRIVDPKRVRSFAQSAGRLAKNDAIDAEMIAWFAETFDEARGQAYDAAREELVQIVNARQALLEQQTQMQNRCEHTVPIPVRKMHERLLKAIALEVTKLEAVIAALTKASPHFAETAEIIESVPGLGKITSAGLIAAMPELGQVSNEAISALLGVAPYDDDSGKRQGERQIKGGRRKVRNLFYMACMGAATQHNPVLKAFYRRLIAKGKKPKVALVACMRKLIVILNIMIARREKWDAGRYAVG

SEQ ID NO: 155501 - protein, 392 aa, unidentified
MLFVGIDVASKKHDIAITSSEGDIIVRPFTISNDLEGFKKLPMVITSHTESVEDVRIGIEETGIYSKNISEFLALHGFIVHMINPVLTNHSRKSQSLRPAKTDKIDVLAICRYIQSNFKRLNSYTPSLYIHMEIKSLTRARFDILKNQIKAKTEWTRLLDLVFPEFRQHFKQHSKWVYNLFSKYPTIEQISRMHLCTLEHIIKVQGDRVLAAQKIKLLAMNTIGHPSDTNGVLLTNTLCDIMHYASQLRRIEKQIKSIVAENFAFLLTVPGIGDITGATIIGEIGDINRFHSSSALVAFAGMDPAIHESGDFRANTMHISKRGSRYLRSAIFISTRAAIINPSIQDNKFREKYLKKRAQGKHHNSAICSASKNMINVIYSLMKSHESFNYFV

SEQ ID NO: 155502 - protein, 408 aa, unidentified
MSITCGIDWAEAHHDVAVLDGAGSVLERRRIDTGVTGFGQLMHLLAEHTEDATQVPVAIETDKNLIVVALHAAGLTVYPINPRAVARYRERHGQSGKKSDPGDAFVLADLLRHDRHQHRPLPAISDAGLAVKALARQHQEAIWALHQTVSRLRSVLLEFYPQALQAFPTLTHKAALTILAVAPTPEQGLKMTSRRIVSLLHRCGRRNDPALVEQIRTALHTPALRQPAPVEQALGRTVTGLLTISTAMKTAVEDLEAALAVQFAEHPLEPVLRSAPGLGPVLAARVLAEVGDDPHRFETAGGLRAFAGTAPVTRASGRSRLVRARKVRNKRLGDACHWWAFAMLTKSPGARQHYDRRRAAGDHHNAALRNLANKLLGRLWWCLHNDELWDESSAWNHVTNGHPATAKA

SEQ ID NO: 155503 - protein, 441 aa, unidentified
MNNKTTVFEGHEVVNHICAGIDVHRDKVNVTIAKSEGNKVHFHYRVFWTVKSNLEEMLSWLISNGCTVVGMESTAKYWKPVVNVVERSIAIHLYNARHIKNIPGKKTDKKDSQWIAKITRYELVTHSFIPDAKTRATRDFVRYRKSVVESRTRVRQQVHDILTSCGIRIAICMSDIFGASGRFLLDCIAHNKPLNKYILELRLHPPLNKKVDEIYEALEGFVNKSDRELLIMHLEEEKRLCVLIDDIEAKLEKMVIDTPEREDIVNRLIEVPGFSKRSATLLLGELGIDLSSFPDSKHFSSWCGLAPGKKESAGKNLSGRIHVRQHYLRSLLVEVALASTRCKGTYFNSKFYELKKRKSTQKAVIAIARKLSIAIYMIIKEGKEFKELTAEYVPIEAKARDIRNIQRIATKLGKDAAFALLEQVFEAPKPISQESKPLEDG

SEQ ID NO: 155504 - protein, 428 aa, unidentified
MSNQEIIRRKQYCQIVQEITGSDQYLVVGIDVGKDKHHAFMGSATGKALFRKLIFENNLDGFSRLLKTADEIKSQNGLCKIVYGLEPTGNYHKPLARHLIRYDCNVALVSGVAVKRNRELLDGRWDKNDTKDAANIADLVSRARCLYYDSPSPSIMELRALLSLRRRLKREEHGLRMRIRNNLLAQYFPELDRFYNACESESLAIVQWFLNPDTIAAMEFGEFFHLVTKTRRGIAQTLRLRKIHGLATKSVGCPMGPAAEYEADLLVEKLKQVRQQIQKTADLIEDFCLEFDEYSYLLTIPGFGPYISARVLASIGDPFRFENRKQLIKLAGYDLCAKRSGKTSDKAVPVISKKGNGELRYALYQAASVAAARVDLFRTYFTRLLRGRERERGIKTKMRVKLAVKMLAIAWTLMKKREVFDPAHLNIE

SEQ ID NO: 155505 - protein, 331 aa, unidentified
MTSLLNRTNEPALTVGIDVAKATLEVAFSDASAALAPTNDEAGHAALLAHLAALREQGHAIGLIVLEATGGLELDAATALQLAGWPVVIVNPRQSRDFARAMGYLAKTDRIDARVLAHMGQTLLQRADLHKLVKPLPTEQQRLLQALVTRRRQLLAMHIAEQQRASAPDKRMRRSLNIVLKALQREMARLDKDMQTLIGEHHAELAARLGEIKGVGKATISTLLAEVPELGELNGREISALVGLAPINRDSGEMRGKRTIFGGRPQVRKVLFMAALVATRWNPVIKTFYERLLAAGKPKKLAITACARKLLTILNAMARSGKPFNAALHLG

SEQ ID NO: 155506 - protein, 386 aa, unidentified
MQKLNDLSRSLTALEPDGTLIAVIEMSLSSWLIGGILPGVERQPLKKLAVDESALLKLLHRWREEAEKAGRRIERIVVAFEAGRDGFWLARWLKARSIEAYVIHAASVAVSREHRRAKTDRLDSELLKRAFLGWLRGERDHCKMVAIPSIMDEDAKRPNRERESLIGEQSRIVNRMKAALIRLGIRGFNPKLKRAAGRLDGLHTPEGEPIPPNTLAELRRDMERRRLVSNQIRRIEQARLQRLEQEPDDGPHAMVRLLARVIGVGIETADMLVREVLSRNMRDRRAVARYAGLTGSPDESGRKCREKGLARSGNARVRRGMIQLAWRLLMFQKNSALAQWFRARTENARGTRKTMIVALARKLLIALWRLVHEGVVPDGIVLRPAQ

SEQ ID NO: 155507 - protein, 339 aa, unidentified
MKKVFIGIDFSKLKFDAAIYSIDTKAIVSTQVFENEQSGFSEFLQWVKENTRCQKSGMLFCGEHTGYYSGNLSVFLFESGYDMWLVSGLEMKLTQGMKRQKTDPIDACKIAEHAYRYQDKVILFQPVSKALEEIRELLSYRERLVETRKVLTTSAKEMKRVKDNASCNYIYQDSLEYIKSLNASVRDCEKRIEALMKQDMALKTNYKLVSSVVGIGLVNASLILVATANFTLFTDPRKFGCYCGVVPFEHSSGSSVRGKTRVSKMANKRIKTTLTLAARNSVRFDPALKEYYQRKIAEGKNSWLVLNNVKNKLIHRIFAVVRDGQMYEKQYVHPLKQAA

SEQ ID NO: 155508 - protein, 353 aa, unidentified
MIFRSCLHVPGIIVGVDTHKDEHVAVAVDKLGVRIGQRNLPTTNTGYMGLERWASGLGEIDAFGVEGTGSYGAGLARFLRDQGHKVIEVNRPDRSTRRRLGKSDPTDAEMAARSVLAGVARDRPKSGVDKVEMIRMLKSTKDSAMKGRTQAINQMKALIVTAPVELRAVLRGLITTQLVIRCASWRHGQLGTPTAAAKYALRSLARRYIQLTQEIEALDAQLARLTAAFAPALMESFGVGPDTAAALLVTAGSNPERLKSEAAFAALCGVSPVPASSGKTNRHRLNRGGDRKANAALYRIVIVRLRYHDRTKTYFQRRMEEGKTKTEVIRCLKRYVAREVFSILHDIGKRCMA

SEQ ID NO: 155509 - protein, 364 aa, unidentified
MSSLSQRSLIHLGMDVHKDSISIGILRPDDSLDVERIFHDEESVRRFIARMGEPRQLVACYEAGPTGYELQRLLQHLQVPCHVVAPSLIPKAPGDRVKTDRRDCRRLARLHRAGELVAIRVPGPEEEAVRDLARARGDVVIDLDRARRRLGAFLLRHGQVWRGGSNWTLKHEQWLLGLRFDDAALASTFAHYRSIVEERRLRLQALEADLLPYCEQDPYAEGVARLCCYRGVDSIGALTLVSEVCDWRRFPRASSFMGFVGLVVSEYSSGDRTHRGHITKAGNVHLRTQLVESAWAYQRGPYVGERIRRAQEACPPATRERAWAAQVRLCGRFRRLAARKNVKSVVAAAVARELAGFLWGEMTA

SEQ ID NO: 155510 - protein, 330 aa, unidentified
MKKWNYTIGIDVSKNTLDIHCAEINQHIQIKNETEGFRVFLKWCNTHKIILNQSFMIMEYTGGYEYKLIQFCESKQIQYSRIPGLEIKRSMGITRGKTDQVDAGRIAQYGEEKHKQLTPDRPLNKGIIKLKELLGFRKRIVRELGGYKASLKERKAMYPDLKKDLICKTLESKIKENEKVVAKFDKELMDEIHKDEAMKTNYELIRSIKGIGMVNALMTIAYTENFVGFTNPRSYAVYVGVVPFDYSSGTSIKGRKRVSSIANKELKQELSQAARSAIQWDPELKSYATRKMANKSYGVVLNNVKFKLILRIFAVVKRQEMYVDNYKNAA

SEQ ID NO: 155511 - protein, 425 aa, unidentified
MTPEPNPEFAAFIGIDWADAKHDICLQAAGSRQREFAVLAHRPDAIDEWAAALRQRFHGQAVAVCLEIARGPLVYALQKHDFFVLFPVNPATLAKYRQAFQPSHAKADPADAQIALEILLCHRDKLKALQPQSVGIRTLERLLEERREFVDEQTRITNRLTSALKEYFPLANAWFDEKASALFCDFLSHWPSLKQLQRARRTTLLTFFREHHCYQPRLIEERLAALQRATPLTDDAAVIKPKALMVEGLVDQLRVTLKAIARFDAEIESVAPTLPDYALFLALPGAGPNLAPRLLVAFGERRERFASAADVQMFVGVAPVTESSGKQHWVHWRLQCPTFLRQTFVEWAAQTITRSFWAGAYYRQQRAKGCAHQTAVRALAFKWIRILFRCWQLRTPYDESAYLNALQRRGSPLLASLALPSPATH

SEQ ID NO: 155512 - protein, 402 aa, unidentified
MNCVGIDVSKGKSMIAVMRPFGEVVVSPFEVLHTDSELSKLARLLKSLDGETRVVMESTGNYHAPVAWLLHDAGLYVSVVNAMLVHDYGNNSLRRAKTDKKDAVKLANYGLDHWLTLPRYVPEEDTRLMLKSCYRQYQQYSKVRTMLKNNLISLLDTAFPDANRLFTSPPRADGSEKWVDFVAAFWHCECVCGLSEKAFTAKYQKWCKKHGYNFSEDKALDIYASACGHFGVMPKTDTAKLLVEQAISQLRATSAALAALKQEMQSLAASLPEYPVVMEMFGVGPALGPQLMAEIGDVRRFHSKKALVAFAGIDAPPYQSGQMDIRSRSISKRGSASLRRTLFLVMGVLLQCAPMDEPVYQFMNKKRSEGKPYRVYMMASANKFLRIYYASVKAYLDSLEHD

SEQ ID NO: 155513 - protein, 328 aa, unidentified
MVHIPKAKSTAIATLGVDIGKNTFHLVGLDKRGAIVLRERLSRAQIEVRLANLAPCLVGMEACVGAHHLGRRVEALGHDVRLMAAKYVRPFCRKQKNDFNDAQAIAEAVTRPTVRHVALKTPEQLDLQALHRVRQRLISQRTGVINQIRAFLLERGLAIRQGWHALRAELPRALSMTDRLTPRMLHIVEDLAGDWRRLDERIEGPIISSATVAGIGKGDVFEKGRDFAAWLGLVPKQTSTGGRPILGRISKRGNRYLRQLFVQASRVVLLRPQTWERYGLKHWIDAAAQRLHYNKLAVALANKLARIAWGVLHSGRTFETRRENGHAP

SEQ ID NO: 155514 - protein, 397 aa, unidentified
MSTDVFAGLDWAVHTHAVCVIDVAGTVRDRFEIAHDREGLAELMRRLARFGARVRIAIERPSGLIVDALVEAGHHVFPIHPNAVKASRPRYRSHGAKSDASDAYLLADLLRTDGHRWRELSPQSDSIRALRALVRSRDDLVATRVALGNQLRSTLETFWPGAACIFADITSPIGLAFLKRYPSPTSAAKLSEAALGRFCRSQHYSGRRSPAELLARLRSAAAGLAGPLTNEAAGQLVRSMVAVLLPLVTQLAELTRRIERFVESLPDGQIIMSFPRAGHVCAAQILAELGDVRERFPSLDQLAAEAGAVPVTYQSGKTRRVAFRWACNHRLRQAVTCLADNSRHANAWARGIYTAARARGCDHPHAIRILASACSRRRWASAAAARSRCGPTTRAAR

SEQ ID NO: 155515 - protein, 341 aa, unidentified
MAQASTIGLDIAKRVFQVHGADAAGHVVFRKRLTRAKLLEFFAAQPPCVVAMEACAGSHHWAREIGKLGHTVRLIPPAYVKPFVKRQKNDAADAEAICEAAQRPSMRFVPVKTEAQQANGVLFRARDLVVRQRTQCINALRGHLAEYGYVVPQGITHASTLIAHVEDPNTALPESARAVLKVLVGTFQALGTQLEELDAEIARRAKADPVARRLMTIPGIGPIAATAITALVPAPEGFRAGRDFAAWLGLTPLQKSTGGKHKLGAISKMGERTIRRLLIIGASAVVRWAGRREAPADSWLTRMLARKPKMLVIVALANKMARVVWALLVKGGLYRTPVAAA

SEQ ID NO: 155516 - protein, 457 aa, unidentified
MSLRKKVKKKATSKANVQLPTLHPHAGGIDIGATAIQVAVPGDADSKPIRTFATFTDDLHALRDWLLKCGVKTVAMESTSVYWIPLFQILEAAGLEVCLVNARHCKNLPGRKTDISDCQWLQYLHSVGLLRASFRPPEQICAVRSLFRHRAALTRYAGSHVQHIQKALTQMNLQIHNVISDLTGVTGLAILEAILAGERDPQKLAALKDHRIKASRDTIARSLHGDWRPEHLFVIQQALDTWRHYQKLIGQCDDQVQRQMAQFDSKIDLAQHPLPAHRRGNKKPQRNEPKFDTRSELYRLCGVDLTQVPSIQVSTALVLYTELGPDFATRFPTAKCFSSWLGACPDNRITGGRVLSVKTRNVNSRSARALRLAAQSLWNSKDYLGDCFRRWKARLGTPKAITAMAHKLARIIWHMLKFRTPYDPSVWDQAIAHSNQKKLKRLQQNAAALGLTLVSAS

SEQ ID NO: 155517 - protein, 423 aa, unidentified
MTRPARPLVDDPVQVIHPCCCGIDVHKKEIQACLVRSTTAGGVQQEHRTFSTMTDDLLVLVDWLVAVGCTHVAMESTGVYWKPVYNLLDGAVEVLIVNAQHIKAVPGRKTDVADAAWIAGLLRHGLLRPSFIPDRAQRELRDLTRYRKSLVEERTAEVNRLQKTLEGANIKLAGVATDILGLSGRAILDRLVAGQTDVALLAQCARGKMRRKIPELERALAGSFGAHHRFLVARQLAHIDYLDEALAEVSAEIAQRMAPHEEDVALLDTIPGIGRETAEALIAEIGVNMQQFPSAAHLASWAGMCPGNHESAGKRKSGKTRKGSRWLRALLVVAGQAAGRTTRTALGERFRALAARRGRKRAAVALGHSILTIAYHVLTRREPYDDALLRRARLPRPPSPDRLVLQLQNLGYTVSLQPAALGA

SEQ ID NO: 155518 - protein, 354 aa, unidentified
MSSTEGRWCMKTVTLDVHAEACQMAVISPEGEILIELQVETKPEELRRVVSGIPGPKRVILESGPLSGLIHDALEGLADEVVSSDPTRNALISRSDSSNDRLDARRLGLLDRARAIHEVYVPPEPYRTLRSLVHYDHMMATATTRTKNQIKALCRRYAVPCRGTGVYRRAGRREFLGKMPNAHVRWQMRSLYRQLDGFRRERIGARRMIAKHTRKIPVVKTLKRVPGLGPRTTPALVAWVADPRRFRSESGLASYAGLGLKNDWTAGKPVKRARASKRGNRELKRALFLSARAALRGASALRKRYDARIAAGWEDRKAIRDIARTILFVACAMWKSGKEYDDGKVGVPETDGAG

SEQ ID NO: 155519 - protein, 386 aa, unidentified
MRPFGEVVISPFEVRHTDSELSELARRLKSLDGETRVVMEATGNYHAPVAKLLHDAGLYVSVVNAKLVHGYGNNDLRRVKTDRKDAVKLANYGLDRWLTLPRYVPEEDTRLLLKNCCRQYRQYSKVQTVLKNNLISLLDTVFPNANRLFSSPIRGDGSEKWVDFVAEFWHCRCVSEKSKKVFTNKYQRWCRKHGYNFSEAKAHTIHAEANGHIGVMSKSETTKLLMEQAVSQLRATSAALAALKQEMQTLASMLPEYPVVMDMFGVGSTLGPQLIAEIGDVRRFYSKKALVAYAGIDAPPNDSGDVTGRRKSMSKVGASSLRRTLFLVMSVYLQNAPLDEPVYRFMDKKRAEGKPYRVYMKASANKFLRIYYATVKAYLESLEHAA

SEQ ID NO: 155520 - protein, 343 aa, unidentified
MQFFVGIDVSLESSSICVIDERGIIIKEGKVESDPQSVAKFIRHKGRKIEHVGLEAGQLSEWLFVGLSKEGFKVSVLESRHVRAAFAAMRVKTDRNDARGIAQLIRLGWFKSVHVKTLNARETRAVLNARQFLVDKITAIENTIRSSLRNFGLKMGQVTRRGFAPRARELADGSSCLQLVTGSLLKVRETLLDELKKLDRKLIDAARADPVTQMLMTAPGVGTIVALTFRNAVDDPGRFAKVKSIGPWLGLTPRRYQSGETDRTGHVTKAGDLGTRTALYEAATTLLGRNGGWSTLKRWGLHIAARHGIKKARVAVARKLAVILLCMWQSNCPFRWSTQGAVA

SEQ ID NO: 155521 - protein, 427 aa, unidentified
MKNKLRMITEATLIVGVDIAKKIHWSQVTDYRGNALCKPIKVENTFEGFQEFLHVIKEICGQIGCKQILLGFEPSGHYWKNLAYFLESEENIILLGVNPFHVKQMKELDDNTQTKSDKKDALVIARLIRDGRFFEIYLPEEKYAQLRILRRYREQASIARKRLICNIKVLMDEYFPEYEKVGYEVSSISARAILRTTPFPKDLIEMEAEEIWNKWRMALGKTMRIGRQKVYQLKEEAMNSIGIKVGIEAARVGLNTMLDQMDILDASIEKYDAEMEMIMNELDISIYLTSVPGVGKVTAAAFVAETGDLSRFDDWKQVRKMAGLNLVEQSSGMHKGKTSISKRGRPGLRKIIYIIGDKGMLVSPEMMMYYQYLRHRPSNQLAHQQAVLAVGLKLMRVMFHVAKTHESYDAQKVLGEIRINQINSLSA

SEQ ID NO: 155522 - protein, 433 aa, unidentified
MKVKYEDRLKQKLLAITPDTLVVGVDIAKNYQWARFVDFRGIEHSRALKFKNRKGGFEIILARIRQICKEENFTKIVVGMEPTGHYWKVFANWLEKQVGITVVLVNPYATKQAKELDDNSQTKSDKKDALTIAKLVKDGRYFELYLPHDIYAELRGLSTTRTGLNKRKNALKNTITAILDEFFPEYEEVFKHPLTGKASRHILKTCPFPKSILELGEEGVTAEIKKAVKKTVGRKKAGQLVEAAKGSVGVDYGEEAARLKLRLMLEELELLEKQTEELESQMESALEKTGYAEFLLSIKGIGVVTLAACLGELGDPTRFESPRQMSRMAGYNLVEDSSGKNKSGTKISKRGRKNLRSVLYQMSLTMVATNDEMKQLYHYLKTREKSPLRKMQALIVVSKKILTLIHTLAKKKESYDPEKVFGTVRREQFKAAA

SEQ ID NO: 155523 - protein, 357 aa, unidentified
MPMLADTIDGVIGVDTHRDTLAAAALSPVGGILAQTATTADVDGYRGLLEFARAYVPGRRCWAVEGAGSYGAGLTGFLVQRGERVVEAAQARRPASRTGAKTDAIDAVRAAPGALAHDLGHLSQPRGRGDREALRVPRTARRHASASRVAAINQLKALIVGAPDELRTELRGLSTTAQITRCAGMRDRPARSLAHRMTVRVLHTTAQRIGYLQAEIDELGDRLAPLVDAIAPWLVDLPGIGPVTAAQVLVSWSYGGRLRSEAAFAMLGGAAPIEASGKVVRHRLNRSGDRQLNRALHTIVLARLRDDPATRAYAARRTAEGKTPREVRRCLKRFVARQLFKLLERCDQPGVEVMRAA

SEQ ID NO: 155524 - protein, 397 aa, unidentified
MYIVGIDIAKRKHEAAVIDGEGAVIIKPFSFTNNCSGYNRLLAMLAKAKLPLDEVSFAMEATGHYWLALFTRLQKEGFRVQVINPVQTNSIRSFYIRQAKTDPRDALLIAEVIRFGHFSESTLHPENIYELRELCRGRHAIVSMQADVKRKVVALLDQVFPEYETAFTNMFSDTSMAILQTCPTPKELSEMPLEELCHLIEVSSHKRFRMAKAQELQALARNSFGFAMAGDVFSTMIRLYAKHLDFLKQQVREMDRKIAEIMDTLDTPITTITGIGPTLGAYILSEIGDINRFSSSAKLAAYAGIDPTMRQSGEYNGVRNRMSKRGSPYLRHAIWLATSSAVLHDPALKLYFQKKRDEGKPYMASVGHACRKMVSIIYAVMRDNKAYTPCIPNEISA

SEQ ID NO: 155525 - protein, 485 aa, unidentified
MNSIFKKRNPDVEALFEKAGKKSKVMCVAFDYAKKMHTCAICDGDGSKLKGCFNIDNNLHGLKYLLKIVTGLCRKHYIKHEHVFFGGEDCGSYAFNFIHALASRGYLVIGMNAKQVKHERENSIASTDIIDTIGVIGMMIKMIGRTIGVATGNVHGLKRLRRQRGSLVRSHVASSHRLYRITDELFPGFLSRENTGITPFCRASLWLMEDRFSAAEIHARQRSSLVRKLRELKLKDPDGTVDKLRALADISLPPSAAMIPALQRSLSEELNIYSVVKKGIHGLDVDIAKQLALTPGAMLSTIPGIGMSWAPGLYVELGDPARRRNVHSMAALGGIVPRVKQTANKPAVIGHRSKGCSVFLKYVLMSGAVTLSQYGHPEIREAYEADKECGRDARTKLAQHLLRVSLHIIDSQIFYLPPSLHKNGTFKQIRAYYAKAWPKVLIKWRNGGAILEAVAEGSPLRQWRDMAQEKYDLELSIKSPQSRRK

SEQ ID NO: 155526 - protein, 424 aa, unidentified
MKRRLDTEFAAFVGIDWADAKHDVCLQPAAGGRREFSVLAHRPEAIEVWVRGLEQRFAGQPIAVCLEISKGPLVYALQKYHFLVLFPVNPATLAKYRQAFTPSRAKDDPTDAELALELLRDHRDKLRCLEPQSVAMRTLQQLVEQRRALVGDKVRLTNRVTYALKQYFPQALDWFTDTDTVMFCDFLRRWPTLKQAQRARQATVTTFFREHNLRYPKLIEQRLAAIRAATPLTQDSAVITPHRLLVEALVEQLRVTLQAIARFDAEIEAVTRKLPDYPLFRALPGAGPAFAPRLLAAFGEQRERYTCAAELQKYAGIAPVTERSGKKIWVHWRMQCPRFLRQTFVEWAAASIPRSFWAGAYYRSRRDQGCSHQAALRALAFKWIRVLYRCWQTRTPYDESTYLNALKRRGSPLLNSTISIATNS

SEQ ID NO: 155527 - protein, 358 aa, unidentified
MLGVLTVNTTKEAPVSAHYDGPQYVGIDLHRRRSVIVRMTEAGQQLEAVRIDSDPVALGLEIAKAGPDPEVVLEATYGWYWAADVLQDAGARVHLAHPLGVKGFAYRRVKNDVRDAADLADLLRMGRLPEAYLAPPAVRELRELVRHRTKLVALRSGLKAQVHAVLAKQGVQVRVSDLFGVAGRSLLDDAPLDPPYRARVNALLRLIDGYDFEVELVSSQLRGRLATDPGYRALLTLPGVGPALAAVFRAEIGDVSRFPTARHLTSWAGLTPRHRESDTKVHRGSITKQGSTLVRWAAIEAVQKLPADAGWLVASRARLTAHKGRNIATVAVARKLLTLVYYALRDGQVRALHRSQAT

SEQ ID NO: 155528 - protein, 349 aa, unidentified
MALTIVKEARPVTGGVDTHAGTHVAAALDPVGGLLGVREFPATAAGYAGLLGWLGGFGTVCLVGIEGTGSYGAGLARHITAAGIRVVEVDRADRQDRRRQGKSDPLDAVSAARAAQSGRARGAPKGRDGAVEAIRTLMVARRSAAGERTRTINQARALVLTGPDDLRTRFARHTPAALVTGLASLRPRTGDVAGHATRIALRELGRRARFPAGQLQRLDELIVPLVTARAPGLLALYGVGPHTAALLLITAGDHPGRLRSEAAWAHLCAAAPIPASSGKVTRHRLNPGGDRQANHALWRIVFTRLGSDPRTRAYAERRTAEGKSKAEIIRCLKRYVAREVYPHLRPAGG

SEQ ID NO: 155529 - protein, 355 aa, unidentified
MSQEKYIGMDVHQATVSAAVRDRNGNLLMECILETKADTLLEFVQGLHGTLSLAFEEGTLAAWLHDLLKPHVNRVVVCDSRKAARLRDGNKSDRIDARNLSELLRTNQLKPVYHGEHGLRTLKELGRSYLTVSKEMTRTMNRIKSLYRSWAIPCAGTTVYAPRHRRQWLAKIAEPGARVRAEHLYEQLDHLQPILVRARRELLQESNQHDAVKRLRQIPSIGQIRAALLVALLQTPHRFRSKRQIWAYSGFAIETHDSGEYRYVRGKLQRNRERITVHGLNRNHNPDLKNIFKGAAISASSRPGPLQDFYETRVAMGMRPTMARLTLARKIAAITLTLWKKGANFDPQQLSRQAA

SEQ ID NO: 155530 - protein, 398 aa, unidentified
MSMYFIGIDISKYKHDCCIISAADQKVVSKVTIKNNKAGFNELLTIIHSLANSADIRIGFESTAHYALNLELFLENSLLTFMEVNPVLISEYKKSKTLRRTKTDSVDCESIARWLMTVEYKPHSKGFYHAYSLKSLTRLRDKLIRQRSFNLVKITNVLDHTFPEFKPFFNERLSKTALYLLENYGSAEKMARMNSASYEKLRSVSRGKFSPQQFLRLKELAANTVGVNNSIFDVELNSLLFLYKSLVKEIDTIEKEINKLIEEVHPHYMSVPGIGPLSAAVIYSEYGDISNFTNPGQMLAFAGIEPGINESGTESHGGKMVKRGSSQLCYTLINWNLLSIIPIADLILQIVRKLFYINACINDEKSLKISVLSQIRKAINMLKVLKLYDFQICQFFNK

SEQ ID NO: 155531 - protein, 376 aa, unidentified
MSKVRFIGLDVHADTIAVAVAEPDGDVRSMGVIPNQAESIRKLVNKLAPVEALRVCYEAGPTGYVVYWQLTALGVTCEVVAPTLVPTKAGDRVKTDRRDAEKLARCYRAGDLTAVWVPDAAHEALRDLVRCREAAKKDQLRARHRLGKFLLRRGRRPPATMHAWTQTHLAWVKTVHFAHAAQETTLLDYLHEVEHVAERIERLERAIDEAVKTAPTRMRVVIEALQAMRGIALVSAVTIVAEVGELSRFAKPRQLMGYSGAVSSEDSSGPRIRRGAITKTGNAHLRRVVIEAAWAYRYRPAVGAALRKRQTPVSAEVTAIAWKAQHRLHARYRHLLAKGKCKQEVVTAVGRELLGFIWAIGVKVEAGERTGPSAAA

SEQ ID NO: 155532 - protein, 422 aa, unidentified
MNDQEAVVYSVYVGIDWADSKHDVCIQPTTSDERVFDVIPHRPEAIDVWVQDLHQRYGDHIAVAVELTKGPIVSALQKYDFIDIFPVNPSSLAKYREAFKPSRAKDDPTDAELALDMLQRHPEHFKVLKPQSVEMRALAALVEQRRSLADDQVRITNRLRCALKQYYPQVLEWFEHIDTPLFCAFVKRWPTLMQAKRARANTLKRFFHEHHMYRKSVLDSRRSAINSATPLTLDAAVIAPYRLQTLVLVEQLELMFGAIHQFDDEIAKLASQHPDYALFQPLPGAGPALAPRLLVAFGEQRERYKSAADIQKYSGIAPVTERSGQKHWVHWRLQCPTFMRQTFVEWARQTINKSYWAGEYYRQQREKGSTYQAAVRSLAFKWIRILYRCWQTGVAYDEIRYLKALERHGSPLLKRQSMPKTT

SEQ ID NO: 155533 - protein, 326 aa, unidentified
MEHELHYIGIDTAKEKLDVDVLRPDGRHRTKKFANTTKGHDELVSWLKGHKIDHAHICIEATGTYMEPVAECLYDAGYIVSVINPALGKAFAQSEGLRNKSDTVDARMLAEFCRQKRPAAWEAPHPLERALRALVVRHQALTDMHTQELNRTETAREVQRPSIDAHLLWLEAELKRLEKQIKDLTDDDPDMKHRRKLLESIPGIGEKTSAVLLAYIGLKDRFAHARQFAAFAGLTPRRYESGSSVRGASRMSKAGHVSLRRALYMPAMVATSKTEWGRAFRDRLAANGKKGKVILGAMMRKLAQVAYGVLKSGVPFDASRHNPVAA

SEQ ID NO: 155534 - protein, 345 aa, unidentified
MDSVTLVGIDLGKHSFHLHGQDRKGLAVFRRKLNRKQLVEFFAKFHPCTAVMEACAGAHYLARKLIHMGHEVKLISPQYVRPFVKGNKNDFIDAEAICEAASRPTMRFVPPKTEAQQTLSMLHRVRESLVHDRTKTANQMHGFLLEFGVSLPVGFAVIKRLPALLDEHEDLPPQLISVLQRLHEHFKYLDDEIAEVEKQLSHQVHEDDLGQRLMTLPGVGPITASVLSAEMGDGHQFAASRDFAASLGLVPRQHSTGGRATLLGISKRGDKNLRRLLVQCARAFMQRLDKYPSPLADWVRSLLTRRHSNVVACALANKLARMAWALARGHTVYDPGKLKPEPAAA

SEQ ID NO: 155535 - protein, 390 aa, unidentified
MDVLYQSCAGMDVHQATVVVCILHGPLTSTRPKREMAQFDTTTKGLKACHDFLSQFHVEAVGMESTGVYWRPVWHELCDDFELILAQPAHMKSIPGQKTDKKDAHWIAQLTRIGLLPRSFVPDETIQELRELTRQRKHYVESRNRETNRIHKILQSGGIKLTTYIEDIMGASGRNLLQLLIDETPATPRMIHQSVYTSLKRKVPQLLEALDGYFSAHHRFMLGQSLEIYDFYQKQIDCLEERINGYLNLYERPVEILDSIPGMDLITASVIIAEIGVDMSQFPTAGHLASWAGLCPGNNESAGKKRSTKIRHGNSYLKRCLCQAVFAAKRQKGSPLAERYYQIQNRRGPQKATIALAHQLLKLAYILLKENLTYQEFVLQKKATRDEPVA

SEQ ID NO: 155536 - protein, 328 aa, unidentified
MFFIGIDVSKAKLDCSLLLDVASNKRRAKVVANSKTGIVDLLAWCTKQQVPVHELHAIMEGTGVYHEQAALALSDAGATVSIVNPAQVKDFGRSLGVRTKTDGVDSFVLARYGALLKPKSWTPPAQEARTLQALLSRREAIAQDLQRERNRLEKADAIDTTPPIRQSINDSIDFLEKQLAKLQQDIDNHINNHPNLKDDRDLLISIPAVGPQVSNHLLSVMHNHDFQSAEQLAAYLGLVPVERQSGTSVLGRPRLSKAGPARIRAVLYMAAIVATQHNPHLKALYRRLQERGKSKMSALGAVMRKLAHLCFGVLKTRQPYQADYGIST

SEQ ID NO: 155537 - protein, 399 aa, unidentified
MDVHREFAQLAVAEDGLVRDEGRIGVTPEALRQWAAGLRADDQVALEATGNSDAIANLLMPLVGRVVVSNPSKTRAIAEAKVKTDKVDARILAQLLAADFLPPVWLPDERTRSLRRQVMRRAHVVRQRTRIKNQVHAILARNLAPTPPVSDLFGMTGRHWLSRQDLPADERSAVAALLRQLDFHGAELAAVDKDLAAEALADPVVARLMTIPGVDAIAAISIVAAVGDFSRFDGPDKLVAYVGLNPKVRQSGNSAPVHGRISKAGRAQVRGVLVEAAWSASHAPGPLRAFYQRIKGRRGFQTAIVATARKMTVLAWHLITKDQDYAFARPALIAHKRRKLELTAGAPSRRGNYRQPGAAYNDKQRRNAEAAAAEHAEHAYQVLVAHWQSRKPAGQRHKA

SEQ ID NO: 155538 - protein, 342 aa, unidentified
MNILKQTVGIDVSYKTFDARFGTIDPQQNTIISQAKSFKNSPAGFKLFLRWIKTFIVSHDVPLIFVMEATGVYYEHLAHFLLEHGYQVAVVLPNKIRNYAKSLESKSKTDPIDAAVITRFGLERQLPLWNPPSENMKALRDLCREYHALKTTTTEIKNQCHALNVSFKPHRESFKRKQQLLRFLNRQIALIQKELHNLLKTEPDLAQRLKKISTTKGLGDITILTVLAETRCFELVSNQKQLTSYAGFDIVFNDSGLKKGKTSISKKGNKFIRKALFMPALSACRANPQMKDLYLRLVAKGKNKKLAIVAVARKLLLLIYTLWKSNSVYIPDYKSASQTVAT

SEQ ID NO: 155539 - protein, 305 aa, unidentified
MENQHYVGIDISKKTLDWAIFDGQKIVFCAGTENSAPGIKSALSRMREIPGFIPQKSIFCMEHTGIYNAHLLEFMHKSGLLIWLENSTQIKQASGMQRGKSDSVDARRIAGYAFRFRDQTRLWEPPRQVIQQLSFLSAARQRLIQAHKLLAMPLDEQGSFVSAALQKQIKATSKKSLTALKEEQKAIDAQIDILIQGDARLSELFGWITSVPGVGPATATEILVSTNEMKAITSAKKMACHSGVAPFEYQSGTSIRGRTRVSHQARKRLKSLFHASGRPARSYVGHREKGGASGVLPAQSSRRRK

SEQ ID NO: 155540 - protein, 375 aa, unidentified
MEKMTAYVGLDVHKDTIAVAVAEAERNGEVRSWGTIANTPTSVDKLLNKLRGKYAELEFAHEAGPTGYGLYRTLHAKGAKCIVVAPSMTPKKPSDRIKNDTRDASMLARLLRAGELTAVWVPDEVHEAMRDLARARQTASYDVRKARQRIQSFLLRQGRQFGAKSWTYRHRVWLSDQSFDHIAQQIAFQSYLNAHEQAESRRKELDEQIVELIPHWSLAPIVEALQALKGIGVVVAVALVAEIGDFMRFANPRQLMAYLGLVPGERSSGKSLRPRGITKSGNITLRSLLFEAAWCYRNRPKVGQWCWTRMPETQQVIKDIAWKAQVRLHGRYRKLISNGKRSQVAVTAVARELLGFIWAVCQHVQPSELKPDLEK

SEQ ID NO: 155541 - protein, 447 aa, unidentified
MSKKECKSEPLRVCHPDAAGIDIGADEHWVAVPSERDEQPFRKFGSFTSDLGRLADWLQQCGVRTVAMESTGVYWIPIYELLEERGFEVLLVNAAHARNVPGRKSDVIDCQWLQQLHTFGLLRASFRPEARITELRSYTRHRQTLVEESARHIQRMQKALDQMNVQIHHVLSDITGKTGMAIVRDIVAGNYDPEILAQHREPRCRATKEVIVEALRGHYKTEHVFTLKQSLSLYETYGQHIKECDARIESAINELAAEFPDPGTPQQRPKSRPVGNQIAIDIRNPLQRVLSGVDVQSIVGIGPLTALNILSETGYDMTRWPTEKHFTSWLNFAPGTHISGGRRLSSRRPPSRNRAGLILRQAASSIGRTQTALGAFYRRIAARRGKAVAIVATARKLACAYYRLLRYGGQYVERGAHAADQDYQRRRLNSLKRQAKTLGYDLQPIAT

SEQ ID NO: 155542 - protein, 356 aa, unidentified
MNYAGVDYHKRYSVVCIIDEAGSILHTERIEHGYPERFAELLGRYAPLEVAFEATMNWSWLHELLEETAGIQRIVMANPLHVRLIAAAQIKTDKVDARKLAQLLRAGLLPASHIPDRATRLRKEVLRQRTFWVRSRTQVRNRVHRLLGRQHGLAMPQVTDLFGRKGRTALEKAVLAPPDDLLLRQQLALLDALGEQIRGLETQIASDGASDEAVTLLTTMPGLGSILSNVVATEIDGIARFGDSASLCAYAGLIPTTSSSGDKTYHGRLVPGCNKWLRWALVEAAWVAVGCSAYFGGLYRHHRARGKKANTAILIVARRLCQVIFRMLKERRPYEARAWSIPVPGRSQQGRTTQVA

SEQ ID NO: 155543 - protein, 338 aa, unidentified
MDHYVGIDLHSTNNYIAIIDNDNKRVFKKKTKNDLRLVVEALKPYQERITGIVVESTYNWYWLVDGLIEEGYTIHLAHPSAIKQYEGLKHSDDVTDAFHLADLLRLGILRTGYIYPKEERPVRDLLRKRLQLVQQRTLQILSFQNLVSRNLGKSMNGNAVKKLSEEDVEHLFHDKHLVVAGKASISTILFLTEKIKQLEKTIHKVAKLKDEYTLLMTVPGIQKILALTIMYETGPIERFRKVGNYASYCRCVGSKRISNEKVKGKGNRRNGNKHLSRAYVEAAHHAMWHYEYVQRYYQKKMVKTNTLVARKTIAHKLARACYYIIRDQTVFDPTRVFV

SEQ ID NO: 155544 - protein, 357 aa, unidentified
MKATTIGIDLAKSVFHVCASNRQGRVIWRKKTTRQGLEALLAKLPPSRIAMEACGGSHYWARRCQAHGHVPQLISGKFVKPFVKSNKNDVIDAEAISEAAQRSTMRFVPAKTIQQQDIQALHRVRERLVRGRTALVNQCRGLLLENGIPIAKGRHHLQRQLPVVRENPAEELSAPFVGLLGELGEELRDLNQRIETLESQLTQLGRDLEPCTRLMSIPGVGYLTATALFAAVGTGADFKNGRHLAAWLGLVPRQCTTGGKPKLLGISKRGDLYLRKLLIHGARAVLISRKDLGAPRRWALRVAARSCPNKAAVALANKNARIAWKLLHSGESFRDLGRAPANTPSSMPSSPGLDAQS

SEQ ID NO: 155545 - protein, 382 aa, unidentified
MQASTIDTPTAEHCGTIFVSVELSQKTWLVTLHSPDRDRISRHKLEGGDHVGLLGLLESIRTRAALRLGTVPKVVSCYEAGYDGFWLHRLLTAAGINNLVFDPASIAVEQRSRRAKTDRIDGELMLRTLMAHLRGEPRVVRIVRVPSVEQEDARRASRERDRLIKEQTAHTNRIKALLRLQGMAVGYPRRGNWLHWLAQQRDWQGQPLSPHVLAEVTREHARLMLVREQLAALEQAQATQATVVPAAMAERRDLLQRLKALGPAFAATLTNEVFYKDFRNRRQVGAYCGLTPSPWRSGGIDREQGISKAGNPRARLKAIELAWLWLRHQPESELSRWFRTRTASAGKRAKRIAIVALARKLIVALWRYLTTGLIPAGAIMKA

SEQ ID NO: 155546 - protein, 355 aa, unidentified
MDSKKYIGMDVHKESISMAVMNGAGKIVMECVIETKANMILQFFDGMRGDLQVTFEEGTSAAWLYDLLKPHVTKLVVCDPRKNASMKEGNKSDKIDARRLAELLRLNHLNPVYHGEHGLRSLKELVRSYLTITKDLGRVMTRVKAIYRSWAIPCSGKQVYAPRHRAEWLGKINEPGVRRRAEFYYQQLDALRTVRQEVRRELLAEGKKHQAWKRLCQIPSIGPIRSAVLLGILQTPHRFRTKRQLWTYSGLGIETHSSADHRSVDGQLQRAKKQISIRGLNRNCNHDLKNLFKGAAIVASSKPGPFQEFYTALLTKGIRPEMARLTLARKIATIVLMVWKRGACFDAQHLKPQTA

SEQ ID NO: 155547 - protein, 321 aa, unidentified
MTTPNNELPILAAGIDVSKARLDVDFSDDRGAFSTDNDPAGHARIVQGLKDAGASRIVLEATGGFERAIVAELAAAGLPVVVVNPRQVRDFAKATGRLAKTDAIDAKVLALFGIAIQPPLRPLDDRQTQAFAELLTRRRQLIQMRVAESNRLAQARDRRVRKSIEGVLKLLERQIAAIDDEIDQHIQNSPIWKEKEQLLLAVEGVGPTTARTLLAELPELGTASRQEIAALVGLAPFNRDSGTMRGRRTIVGGRAPVRSVLYMATLTATRRNPVIRKHYQHLLDQGKRKKVALVACMRKLLTILNAMLRENEPWRPPIVSP

SEQ ID NO: 155548 - protein, 328 aa, unidentified
MLFLGIDVSKDKLDCAAVSESSGAMLGRRSLPNTADGIARLVRWAEKLAGAGPAGTHAILEATAAYHELAAHELVAAGMTVSVVNPARVRSFARGVAVLGKTDRLDAMMLARFGRLVRPKAWRPAGPILRDLQALLARLDEVEADLRREANRLEQARVRGCPEAVLRSFTDAMAALKASRGELRQAIEAHVAAHPGLQADLDRLLTIPAVGPKTALRMLVLLRSREFDSARQAAAFLGLVPVERQSGTSVRGRPKLSKAGNPRLRAGLYMAAVVATRLNPDVRAQHQRLLERGKSKMSALGAAMRKLVHICFGVLKSGGDYRPAANLA

SEQ ID NO: 155549 - protein, 346 aa, unidentified
MKVLIGVDPHKASIAVAVVDEVVGELVECATFLQNRAGLRGLERWAKRFPERRWAVENASGLGRHLAQRLSAVGESVVDVPPKLSARVRVLSTGNARKNGGLDALATALAAWRNERLRTVDLEAGSEVLRLLSERREDLVAERTRALNRLHGLLRDLVPGGVPGTLSSRRAARILRGIRPQNTSDLLRRRLASEVLRDIRALERKIADLNERIEAEVEALGTSLTEIFGVGPILAAKIMGTVGNATRFSTKAHFASYSGTAPVEASSGEVVRHRLSLAGNRRLNNALHMVAICQARSDVRGRAYYRKKIAEGKSRKEALRCLERRISDAVFKSLMADLQEPSCNAA

SEQ ID NO: 155550 - protein, 343 aa, unidentified
MITIGIDPHKRSLTAAALDPNSRLLGQLRLPATSQAGEQLLAWAEQWPQRRWAVEGATGLGRGIAQQLVAAGEPVVDVPAKLAARARLLGTSSGRKTDLADACSVGAVALHHRRLRPVAVEDHTVVLRLLSDRRDDLVAERTRILSRLHVLLADLRPGGARRELTATRAAALLRQVRPITVADVERKRIARELLADVRRLDRQVKAASQTLRTAVCEHGTTLTEVFGVGPVLAAKLLGHAGDITRFPSRDHFASYTGTAPVEASSGDVRRHRLNRAGNRQLNTALHLIAVCQIRDPSPGQAYYRRKLDQAKTPEEARRSLKRHLANVVYSHLVTDHRCRTRAC

SEQ ID NO: 155551 - protein, 403 aa, unidentified
MTKYHVGVDVGKYRHHVTIRDISSDSYCKSFSLTNDREGFDELISSLEKLSVDKNDFLIGIEACSYGVNLSYFLLGVGFNLVEVNPFRASQFRKAQGKKAKTDKIDSRTIAAILSLGDHKILSIPDQILDNLKDLTRFRTDLVNERSTMIIHLHEALSILFPEFNSVFRQLDSASSLAVLATFPGPEPIIAAGEETVGKTLSLASPHRMGRGMARRIIEAAQNTVGVIQKQPGLGIKISILAKRITSLQLTIRELDKQITEMFDGLPCKLQGFPLGRAPTLAAIVSEIGDIHRFPTLKKFLSHLGWCPQTFQTGNFRLEHPRMSHAGNKYIRRLIWMLSVFSVRVVPLYREYFQRRVTEGKAKMHILIAVGRKILSTLYAMLKKGVPYDPNWEENGRIAVAGR

SEQ ID NO: 155552 - protein, 411 aa, unidentified
MSLEVMYERCAGIDVHQRFLVVCLILVEGGKRRQSIRTFRNETADLLALRAWLLQERCTHVGMESTGVYWMPVYRRLEGFFELSVANAQHIKAVPGRKTDVGDAEWIASLLQHGLFRPSFVPSQEQQDLRDLTRLRVSLVRERTRLVNRVHKVLEEAGMKLATVLSDIMGLSGRAILHALCEGESDPERLAKRVYPSVHASQEQIVAALTGEMREHHRFLLRELLSLIAVQDRSITHLEEEIERHLHPFEEQITRCEKINGVSRHVLYVLMAEVGTDLERFPDAEHLSSWAGVCPGHKESAGKRLSGKCKKGNRYVREVLVQAAHGVRRCRTYLGERYRRLKKRRGSKRAALAIGHDILVIYCQMMKTGQEYQEKGVEFFQQRDRSKVEHQLVRRLEHMGYQLTRPSQPVS

SEQ ID NO: 155553 - protein, 362 aa, unidentified
MNYIFVGCDSHDKTLVNKIALNREPAERKSFAATRAGRRKMIEYLKKRREAAGNAKVVVVYEASGNGFILCDELKQAALECHVLAPTKIERSTKQKRNKNDDRDADRLLEILRGHYLAGNKIPSVWVPDRQTRDDREPVRGRQDLSQKQTAVKTQIQMLLKRHGLEKPEGMGSSWSKPYRHWLKALTEDAHSGWGVQKALGSLLRQLEFLESEIKQLDEAMEELADTPRWKPIVAAMRKEKGVGLMTALKYSTDIADFSRFRRGRQVGAFYGLTPSSHESGENGDRKGHITREGSPSGRQVLCQSTWSRVQHDEHEREVYRRLVLKNPKKKKIALVACMRRLAVRLWHVGFQAQLQMKATEV

SEQ ID NO: 155554 - protein, 394 aa, unidentified
MACVRHMVDGTGKREVRTFKTTTKDLVALSEWLSAEDCTHVAMEATGIYWKPVWHILADGEFTLVLANAAHVKNVPGRKTDVNDATWLADLMAHGLIRGSFVPDEPTQEMRNFLRTRKQFVRERSSHVQRIQKTLEDANIKLDSVITDIMGLSGRRMIEALIAGETDPFALAVLAHRRIRASQAELEAALRGRVTDHHRFMLRLLLQHIDAIEAAIGQIDQEVDAHVEPFRTAIEILSSIPGISDLSAGVIVAEIGIDMNRFPTEGHLISWAGLCPRNDESAGKRRSTRMRKGAPWLKTTLIQCAWAAARTKGSYLQAQFQRLRARRGAKKAIGAVAASVLTAAYHMLKNGTLYQDLGAHHFDSRAKGKQVLRLVSRIQNLGFAVQITPIGAAA

SEQ ID NO: 155555 - protein, 338 aa, unidentified
MTIVMGLDQHRGQITAEWLDTATGEVSRARVAPAHREPVRRFLHRFGEADLDVALEATTGWRFVVEEVRAVGGRAHLAEPAETAARRGSKKRAKSDRADARHLRELLMLARLPESWIPPDHLLDLRARVRLRHTLCQQRGEWQQRLQAVLYHHGLPQRRDLLTRENRAWVERAALPETAREQVTVALAMIDALDVQLAPIDRELRAYARRQAGCRALMAHYGIGALTAVTILAELGDCRRFSSSRLAVRYSGLDITVHQSDQRRAPGHLSRQGPPALRWALFEAAQVARRPASPDRDYYTQAAERLGANRACLAVARKLLKRSYHTLRALGEEALQPA

SEQ ID NO: 155556 - protein, 352 aa, unidentified
MFRSVNGYIINCNRTNLMETVYFLGIDVSKKKLDSALTIDGKNYQQDEIENTANAIRVFFQNMKKMFGMKSSQMIVCMEHTGIYCLPLLDFLTKNKIKTCLESAAQIKKSQGIARGKSDRIDALRIAHYAYKNREELHYWAPQRGVVQQLKALLVTRDRLVKIRTQLEVPIRECEEFVVESIRKDMMKNCRRTLKAVGLDILGIEQAINELIGSDPGLAEQVKIATSIPGIGTITATNMIIATGEFTRISVSKKFACYTGVAPFPYKSGTTIRGKTRVSNLANMNLKKLLHLAAMSAIQCSEELGTFYKRKVQEGKNKMSVINAVRNKLISRVFVCIKDKRMYQKIYRRELA

SEQ ID NO: 155557 - protein, 412 aa, unidentified
MELLHRRCCGLDVHKETVVACLRLVSDGKVTTEVRTFQTTTADLLRLSEWLAANECTHVAMEATGVYWKPVWRILDDGEFALVLANAAHVKNVPGRKTDINDAMWLAELLAHGLIRASFVPDAQTQDMRNLLRTRKQLVREQSSHVLRVQKTLEDANIKLDSVLTDLMGKSGRAIIEALIAGETNPVKLAGLADRRVKASFEEFREALRGRVTRHHRFLLRLHLNQIDALDAAMATLDAQVEANLGPFRTAVELIGSIPGIKNLGAHVIVSEIGIDMSRFPSAAHLISWACICPRNDESAGKRRSNRARKGGTWLKTTLVQCAWAAVKKKDSYLQAQFYRIKARRGPKKAIMAVVASILTAIYHMLKDGTMYKDLGRNHFDRRSTDQQKNRLVKRLVDLGYVVEIKALAATA

SEQ ID NO: 155558 - protein, 337 aa, unidentified
MATSAAIRMVGIDVSARWIDVERAAADEPVAVRRVANTAAGHRAVGRWLTQGGRDARVVLEATGVYSWDIALALQRTARVEVMVLNPRVSKDFAGACGQRASTDATAARRLREYAARMPFVPWVPPSAAALELRALMRRVAAVVEMRTQEHNRWHALRATAALPAAVRTEVRTHIQSLGRQIARLERAARTVVQSAPALQARYDRLRSIPGVGVRSALGLLAELAVLPPTLTARQWVAQAGLDPRPVRSGSSVHPPVRISKRGNVHLRRVLFMPALVAVRRSPAVQRLATQLTAQGKAPLQVLVAVMRKLLHAIYGMLKANTDFDGERFRRSALAPT

SEQ ID NO: 155559 - protein, 370 aa, unidentified
MKVVRSFIGLDVHKETISISVAEDGRNGPVRFLGVIPNTADDVAKMAKRLARHGELEFCYEASCCGYGIHRQLTTLGHRCMVVAPSMIPKKPGERVKTDRRDSEKLAILHRSGDLTPVWVPDTTHEALRDLVRARVDASMHLMRARQQLLAFLLRHGRSYPTGKHWTQRHRCWLAGQTFHEHAHGIVFQDYLETVWTAQQRRDALIDKISSMVASWSLGPLVEALRSLRGIDTISAATFIASTGDLSRFESPRLLMGYLGLVPSEHSSGGTIRRGGITKTGNREARRMLIEAAWSYQYPARIAKEKAEILVRLPKSIRDIAWKAQTRLCTRYRSMVARGKKPTVVVAAIARELAGFIWAIGQEMRIGMAT

SEQ ID NO: 155560 - protein, 412 aa, unidentified
MEGETVIAGVDTHKDVHVLCLLDGLGRKIWSGSFGADPEGYDRLAEAIGDPGSCMVVGVEGTASYGAGLTRRLVELGYNVVEVLRPKRDKARPGEGKSDPLDAERAARKAASGRGCSVPKSQDGWVEAVRQLYVARRLAVATSTSCVACAKSMLTTAPSALRERFRGRERPKDLMPLLARGRKAGDALEESVLASLRSVAAVWKEARSQVESLDERIRALLEANAPALLGIEGCGTTTAAALVVAAGDNPGRLKGEAAFSMMCGASPIPASSGKTDRHRLNRGGNRQANWALYEIAIKRMAYDERTKRYVAKRTSEGKSRREAIRCLKRYIAREVYRVLMDPNPDGAAPEGPELAKMRKAMRVTQKQAAAGLGMSAASLGHLEHGRRRSTKLERRYYELLCELKGALPQTAY

SEQ ID NO: 155561 - protein, 343 aa, unidentified
MDHFAGLDVSVKETSVCIVDDTGRVVREVKVPSEPEALLQVLSNPAYHFKRIGLEAGPLSQWLFNALAEAGLPAICVETRHMRAVLKAQINKTDRNDARGVAQMMRAGLYRPVHVKTLRSQRLRMLLTHRKLLQSKAIAIDNDLRGTLRNFGLKVGMVGTVKFEARIKELVENLPDLAALVEPLLIVRRVLREQLGILHRRLLAIVREDDVCRRLMTVPGVGPVVALTYRATIDAPARFRNSKAVGAVLGLTPSKYQSGEINRTGAISRCGDGMMRVMLYEAAHSMLTHTNTWSWLKVWAMKIVRHRGMKKAIVALARRLAVIMHRIWVDGTEFRWTRETAVA

SEQ ID NO: 155562 - protein, 356 aa, unidentified
MRQINQKEFKDQEFYIGMDVHKKNWVITLRNNNMELKTFSMDPSPELLYKHLHCNYPGGRYFSAYEAGFCGFWIHRSLESLGIKNLVIHAADVASTNKERTNKTDKVDSRKIARELENKSLNSIYIPDELHQQLRSLCRLRGQSVVNQTRVKNRIKGHLHTYGIPIPCQVEMPHWSGNFINWLLSLEFSQACGKDYLIFCLEELQQHRQRIVDITRILRSHLKSHSLYEPFVFLRSIPGIGLVVALSFYTEIMDINRFPTFDQLASFVGLVPSVHGTGDKIIEQGLTKRRNRYLRHLIVEAAWIAVRKDPALLHAFNQLTRRMKKQDAIIRIAKKLLRRIRYVWKNQTPYVLAVVE

SEQ ID NO: 155563 - protein, 344 aa, unidentified
MEHFAGIDVSLKDSSVCVVDAAGRIVREAKVASEPEALVAWFRGLGLKVTRIGLEAGPLSQWLHAGLSEAGLETVLLETRHVQAALSAMVVKTDRKDARGIAQLLRMGWFRPVHRKSADAQEVRALLVGRKLLQSKLRDVELSIRGILRGFGLKVGEISKGRFAAWIRELVAGHAMLETVTGAMLAAREALLAEFMRLHRRMLAIVRADAVCRRLMTAPGVGALVSITFRTAVDDPGRFRSSKAVGAHFGLTPKRYQSGETDVIGGISKVGDAMVRTALYEAANAVLSRPTRFSTLKRWAMDVAKRRGLKRAKVALARKLGSVLHRMWIDGTEFRWGKEAPVAA

SEQ ID NO: 155564 - protein, 338 aa, unidentified
MKFYAGIDLHSNNLVLVILDSNDKVIYSKRLPNDVQVILTVLAMYKEQIEAVAIESTYNWYWLVDALQAEGYEVRLVNTAAVMVYDGLKYSGDKADAKHLAHLLRLGLLPCGYIYPKEPRALRDLARKRAQLVRQRTTQLLSIKNLLARNCGQNTSSAVIKKWTEEQITQLPLLPEQRMALLANWTVMQALEQQINSVESELLRQLKPNKEFQLLKTMSGVGDILSMTIYLETGDIKRFDSCGQFASYARMVDSTRESNGKKKGEGNRKCGNRYLCWAFMEASHFAIASNEAIHRFYQRKCAKSPKVVAMKAVAHKLARASYNMLKNGEAFDVKRAFS

SEQ ID NO: 155565 - protein, 430 aa, unidentified
MKNRTNRRLEEITAGTLIVGVDVAKENQWARFVDYRGIEIGKAIRFKNNRQGFEAIIAKIREICKMKTLRYPIEQVMIGMEPTGHYWKPMANHLIKTEFRVVGVNPYHTKKAKELDDNSPTKSDKKDALTIARLVKDGRFFDPYLPREEYGELRVLTNTRVSVMKRNSAVKNTITAILDEYFPEIWTVFKNPLKGKASRQILKSCPFPGFILAMGEGGVLAEVKKAVKKTVGIKKVRQLLCAAGDSVGVDYGLNAAKMRLCCLLDELELVEGQLEQVEQAMESMLRQTGYARQPLGIKGIGVVTAASFLGEVGDPLRFQNARQIANYAGYNLVEDSSGKSKSGTCISKRGRSQLRSVLYQMAFTMVGQNDEMKVLYQHLTTRKINPLKKKQALVVVSKKIITVIYSLLKKQEDYKPELVLGAVRKEMMAA

SEQ ID NO: 155566 - protein, 345 aa, unidentified
MIIIGVDYHPSFQQIAFADQGTGEYEERQLNHSEGEAEKFYRDLKLKAANVRVGMEATGHARWFERLLAELGFELWIGDPAQIKATRVRKKKTDREDARLLLKLMLEDRFPRIWVPDPENRDLRQLLWHRHRLVQMRTRIMNQLQALAMNEGKRWKSKLWSGQGRADFEKLPLAPWASRRRKELLELLDRMNPTITELTVAVEQEANKRPEVQRLMTHPGVGPLTALAYVLIIGTPLRFACGKQIGSYMGMIPSEDSSGGKQRLGHISKQGSSLLRFLLVEAAQAAVRVNPDWRRRYFHLALRREPRIAKVAMARKLGVRLFWMWRKEWTYQQVVKFGSHAGQLV

SEQ ID NO: 155567 - protein, 370 aa, unidentified
MIKVILTKNKKLMSSKVKKLDCSGVNIYTGIDTHLKNWRVTILVDEVYFKTISIDPRAEVLSKFLRKNFPKGNYYSAYEAGFCGYSVHRNLLKEGIQNIIVNAADIPTTDKERRQKEDTRDSMKIARSLRNGELEPIYIPAESTEELRSFVRYRKSLVKDISRNKSRIKSFLYRHGVDIPSELNTASRYWSANFSKWLETVRLTTDFGHKVLLNTILTVKQLRERLLEVEREMRGIAKQEKYAHQFNCLTSIPGIGLVSAMVIISEIENIMRFSNLNKLCSYVGLVPTTNSSGENERTGDITPRSNKPLRSILIECAWIAIRHDSTLTLAYRNLCQRMKGNKAIIRIAKKLLIRISYVLKNQEIYEYTRI

SEQ ID NO: 155568 - protein, 347 aa, unidentified
MNKRDDCGVEVSAKRLLAGLEREGAPRARREFPNTPEGHEALVRWLAASVSRRVRVVMEATGLYGLDLALRLDAAPSVEVMVANPRAVRHFAIALMKRSKNDPIDTDVLVEFAQRMPFQRWVRPSPAALALHALARRLESLTEMHAAEKNRLHAAQLSPALPAAVVRDLKRSLRSLERALQRLTRQAVEVMGQDPDLNLRYQLLLSACGIGPTSAVQILAQLAVLSPDLDVRQWVAQAGLDPRQYSSGSSVHKKTRISKTGNRHLRRALYMPALVAIRHEPHLRAFYRHLVERGKAKMQALVAVMRKLLHAIFGMFKHQQPFDGTQLYRLPEEPSLRQPTFSTAEAT

SEQ ID NO: 155569 - protein, 313 aa, unidentified
MDVPATRPTCFIGCDVGKADIVMCDSRTGRITRVRNTDAALADFAATLDPGALVVCEATGGYEALLLAALVHAGRAAHRADARKVKAFIRSFGTLGKSDTIDARALAEYGRERHDRLARWQPRDRHRDRLHRLVSARHDLVEQRVACRNRLQAPGSGDVAARLQRILAALDAEIAGLEDDMRALIAACEPLRKTVAVLATITGIGPATAARLTALMPELGTLGRRQAAALAGLAPHPRQSGASDAYRATRGGRPAVKHALFMAALTAARRNPDLNAFYRRLLDNGKKPIVATVAVMRKLIVIANAKLRDADIF

SEQ ID NO: 155570 - protein, 346 aa, unidentified
MEQISRIGMDTSKRFFQLHGVNTAETVVLRKKLRRKEMVTFFEKLAPTVVGIEACGASHHWARLLQSFGHTVKLIPAQLVKPYVKRGKNDMADAEALCEAMSRPTMRFVPIKTAEQQAALMLVGLRDRLIRNRTQLCNAIRGYAAEFGFTAAKGVANLRPLLERIQADEGVPDLARELFAAQAEEYAQLEEQIAEISGKLMAWHKADECSRRLAKIPGIGPIGAALLMMKTPAPELFRSGRQFAAWIGLTPRDHSTAGKVKLGVITRAGDEALRAVLVSGATAVIRHAVGCKGRASSWLINLLKRKPPKLAAVALANKLARIAWKLMVTGENYAATSTRIASAAAV

SEQ ID NO: 155571 - protein, 317 aa, unidentified
MSGACFVGMDVSQDTVDVAVQPETMFQVTNDERGIAAAIERLQGLTPTLIVLEATGGLEVPLAGALAAAGLPVVVINPRQVRDFARATGQLAKTDRLDAQVLAHFADAIRPPIRPVPDEQTQAFAALVARRRQLIEMLTAEKNRLRLAARPIQQRVQAHITWLEQELETINTDLTTTMRESPVWREKEDVLRSVPGVGPVLTTTLLANLPELGTLTRKEVAALAGVAPFPRDSGTLKGRRAIWGGRAHVRAALYMAALVATRRNPVIRTFYQRLCQAGKAKKRALTACMRKLLTILNAMVKSRTPWRHTMEPACAEA

SEQ ID NO: 155572 - protein, 287 aa, unidentified
MDKVIREEAVRVGVDLAKRVIQVHAVDATGHVLTSRALPRARFIDWCVRLPAGCVVAMEASSSAHHWARKLIALGLDARIISAQLVEPYRMEGVSGKNDANDAAAICEAASRPKMRFIPVKSIEQQSMLCVHRLREGLKEDRTACINRIRGLLAEFGLVFPQSPRELQAALSDVLEDAGNELGTLARLTLQRAQAQWRELDDHLAWCDERIDAHRRSNPEVQHAATLIGIGPVTASAAIATVGDFKQFKNGAQFGAWIGLTPRQRSSGGKNNLAASPSEVTPTCERS

SEQ ID NO: 155573 - protein, 338 aa, unidentified
MKVTRIGIDLAKQVFQVHGVDRKEVVVVRRQLKRSQLLDYLAKFEPCLIGMEACASAHYWARELGKLGHTVKLMAPQFVKPYLKGQKNDANDAQAICEAMGRPGMRFVSVKSVEQQDIQGLHRVRSELVKQRTAKGNQIRGLLGEYGIVLSRRLEVLRRGLPDILEDAGNGLSGAFRGLLHGLWRDLLELGDRVEELDRQVKELARSHPDCRRLEGIPGIGPLSATALVGAVGDARQFKNGRQLAAWLGLVPRQHSSGGKPQLLGISKRGDCYVRTLMIHGARSVQRVCKNKTDERSRWLSALGARRHGNVAAVALANKNARIAWAVLARGESYRPAN

SEQ ID NO: 155574 - protein, 352 aa, unidentified
MPIVADNYEIVIGVDTHAAAHALCVVAAATGAVQDKASFPASPAGLDRARTWIAHRAGQQAALVVIEGIGSYGAGLSDRVLAAGFPVAEPSVMGSADRRGVGKTDDLDAARIARSVLSVDIDRLRRPRADGSRVAMRVLVVAREQMTCERTRAVNALTALVRTVELGVDARKSLAYSQIKEIATWRARSEDATTATYRAEAVRLAKRIRALDAELVDNRKSLDALVKTNAPELTAAVGVGAVVAATVLIAWSHAGRVRSEAAFASLAGTCPVPASSGNTVRYRLNRGGDRRLNRALTTIVIVRMRVDPQTRAYVERRRGEGRTTKEIMRSLKRYVTRQLFRTLAAAHPILVS

SEQ ID NO: 155575 - protein, 382 aa, unidentified
MQPIHTVNPTILLAIELSASTWLVAARVSGSEKPHLHRIDSGDITALLALISSLRNRVARRLEAAIGVVCCFEAGRDGFWLHRLLMEHGVTNHVLEPASILINRRARRAKTDRLDALGMLRVLAAYLRGDRQSCSMVRVPTADEEDAKRMHREREHLVQERLRIENRIEALLFTQGIRKRPSLRSWERDLAVLRTGDGREMPSHLRAELDRLRRRLIMTLELIRKVEAERDEAANTRPQDQTCRKIAALCRIRGLGDNFAAVLTREVFYRSFDNRRQIASYVGITPMPYQSGGMDRDRRISRAGNPRARTTMIQLAWLWLRYQPGSELAEWFRKRVGMLAGRTRRIAIVAMARKLLIALWRYVETGVVPAGVEIRAESVAAM

SEQ ID NO: 155576 - protein, 319 aa, unidentified
MALPLTIVGIDVAKDWLDLWLDPLKRFERVSNNAAGWAALVDRLTLLGPKAGTTVAFEASGGYERGLRQALITAGFAVQRLNPLRVRLYARSLGRNAKNDRIDARVIARYAAAAETIPEVLDPLRERLAELVSHRRSLINERVAIGNRTAMLQDPGLMAHNRQRLALLERQIGEVDRRIGDTVSNATQLLAKSRLMTTLSGVKHATAATLIALLPELGRLTRRAIAALVGLAPFDHDSGRHKGTRASAGGRAAVRTALYMAARAAARSTSPLGHFYRRLIAAGKTPKVATVALMRKMLVTLNAMLRDGQPWKYAHASVA

SEQ ID NO: 155577 - protein, 422 aa, unidentified
MKTTDYAVCVALDWSDQQHAFALQFAAANSKETGMIAGSPEGFHGWLEELHARCPNQRGAVILEAGRNSVVHVLVEHDWLDIFPIHPATCARFRTAFTPSGAKDDVPDAEVLLTLLLRHRDQLHQLHRDTAQTRELAALVVARRHAVDRRTQLGHQLRTTLKSYFPQALQLIGDAVEHPMALDFLSRWPDIESLKKAKAATLRSFYYLHRARRPELIEQRIKLIAEARALTPDPAVVAPAVMQVQMFVELLRVQEKHLARFDAQIAELFAAHPAAAFFRQLPGAGANLAPRLLVAFGDDLSRYPTPSSLQKYAGVAPVRECSGKKSWTHWRWHAPIFLRQSLVEWAGQTVVFCPWAKAYYWQQRRAGKAHQSILRALAFKWIRILWRCWQSHEPYDDARYVAALRRRNSPLIALIESQDAAA

SEQ ID NO: 155578 - protein, 392 aa, unidentified
MERPMPQRNDLSSRSLLALDQNSTIIAVIEMSRSNWLVAGVIPGVDRQPLKKLEPDEEGLLHLLRRWQDEAARAGRTISRIAVAFEAGRDGFWLARWLRARGIEAYVIHPASIPVSREHRRAKTDRLDTELLKRAFLGWLRGEPNHCGMAAVPTLEQEDAKRPNREREVLVGERTRIVNRMKGTLARLGIRGFKPALPRAPERLETLRTPEGATLPPNTRAELQRDMARLRFVTDQIRELEAARAERLEHAPETGPNAMIRLLARVVGVGIETADMLVQEVLSRNLRDRRAVARYAGLTGAPDESGAKRREKGLAKAGNARVRRGMIQLAWRFLLFQKDSALSQWYRARTTDARGATRKTLIVALARKLLIALWRFGATGEVPQGVVLRPAA

SEQ ID NO: 155579 - protein, 348 aa, unidentified
MRFYTSQHAFYCGVDLHARTMYVCVLDQAGEVRLHRNLPCRPDAFLQAIEPFHEDLVVGVECLFCWYWLADLCAAESLPFVLGHAYYMKAIHGGKSKNDRIDSHKIAVLLRGGTFPLAYVYPREMRATRDLLRRRLHFVHKRAELLAHIQNTSTQYNLPPLEKSLAAAGNREGLLEHFGGQEPVQMSIAADLALIDTYDETIHELELFLRPAVREHDGSSYHLLRTVSGIGNILALTIVYEIHTIDRFPDAGNFLSYARLVKGDWGSAGKKGKPRRGKMGNVHLKWAFSEAAALFQIANPKGQKLVARLRKKHGRGKAMGVLAAKLGRAVYNMLKRKEPFDLNRFVTV

SEQ ID NO: 155580 - protein, 373 aa, unidentified
METERTFVGLDVHARSVVACALDDRTGELSRARLVPDNETVLAWLQQLAGPVAVVYEAGPTGYGLARFLTGRGVRCVVAAPSKMHRPSGDRVKTDAWDALLLARLLRLGEVTAVTIPSLAQEAARDLVRVREDVRADLMRARHRTSKLLLRQGILWSGGTAWTGAHEHWLGQQRFELAGLQAAYDTTLETVLLATSRRARLDKAIVEMAHEPQWWPTVSRLQCLRGVSTLTAFGLTVEVGDWPRFTGSTIGAYLGLVPTENSSGEGRHQGSITKTGNTHARRLLVEAAWHYRRPYRPTKTMRDRWDLAPAAARARGHAGNQRLHERWMRFNGRKKRTVIANVAVARELAGWCWSLATLTEDAQLARSTRGGRR

SEQ ID NO: 155581 - protein, 471 aa, unidentified
MPRRKPASSRPDPAAAALLQTLHPHAAGIDIGATELWVCVPPSAIGAPSASSAPTVLPPHVRRFGAFTADLHAIAAWLRQCQVTTVAMESTGVYWIPLYDLLEAEGFAVLLVDPRQAQRAPNRPKTDVHDCQWIQRLHSLGLLTAAFRPEEPIRVWRSYQRHRASLIEDAGRHLQRIDKALEQMNVKLPAVVSDITGVTGMGIIRAIVRGERDPQALAKLRDRRCKESAATIARALQGTWQPEHLFALQQSLALYDYYHEQIRACDLVIEEHLQEMALPEVPPLEPTRRVRRRRDNEVIFDARQRLHHMAGVDLTAIEGIEESTALVVLSEIGTDMSRWPSEKHFGSWLGLAPNPQKSGGKMRSSATRPGVNRAAQALRLAAKNLQRSQSALGAFFRRIAARRGLAKAITATAYKLARIIYALLKHGTGYVTQGLAAYETAYRERMVRQMKRKAAELGLVIVEQEAVAQPA

SEQ ID NO: 155582 - protein, 494 aa, unidentified
MADFFMGCDVSKGYGDFIVLGKRKQIVVPSFQVDDSHEGHNSLTKFFSNFFQSHPDSTLKVGLESTGGYEDNWYSLLLRLSEVYPLMIARLNALSVKKHREASMERTVTDSIAAEAIASYQISYSEKVTYNEDETFKDLRKQWNIIQLLVKQQTQWKNILEGLLYKSHPELIQYCKDGYPQWVLDVVSKYPTAKRLAKAHPAKVAKIPYVTVSKAKFIIDNAKKSIASQISETDEFLMTDAVFQLKRLETSINNQKKHMEQKCDLADIKLLTSVNGIGSYSAVGLLICIVSVARFPTVKHLASYFGLHPIYKQSGDGTWGYYMSKKGKKQPRVLLFNVVRSAMLCNPVIKKRYEECLKRGMSKMAAMGVCMHKTLRIVYGMLKSKTKFNPQIDENNQKRKNEKPKSKQKDTKRRFQSYDSSAPISRRQTKKRKEKIEEKEPQESIKLMNGVIPSSTNEYIKCIIENGNKKDPEKVGEIIMKAVNDYVKNNSKKG

SEQ ID NO: 155583 - protein, 339 aa, unidentified
MLYVGIDIAKNKHDVTALNVPGKTVLKPLTFSNNKAGFELLDLSLRQLNQDCLIALENTGHYAFNLLNFLHEQGYKVYTYTPLLIKKFAKSLSLRKTKTNKKDAHGIALKLLSDPNREQFQHDNRQVELKILARHIHRLKKKQSDWKVQYTRCLDIIFPELDKIVEKHSEYTYQLLTCYPNPQKRLEAGFDKLIEIKRLTASKIQDILSVAPRSIGTTSPAREFEIIKHYKRLIDKAETCVNDLMAEFNSVITTVTGIGNRLEAVILAEIRNIHAFDNPAQLQAFAGLDSSIYQSGQIDLAGRMIKRGSPHLRWALIQAAKACPRFSPAFKAYLKTKLE

SEQ ID NO: 155584 - protein, 359 aa, unidentified
MQIQNNKLSFKGQNIYAGIDTHLRSWKVTVMVEKREYKTFCQPPEPMLLSDYLKRNFPDGDYFSAYEASFGGCWAHYELNRIGIKNIIVNPADVPTTDKEKRHKEDKRDSRKLARCLMNNELLPIYVMERSQLEDRKLIRMRYTLSKELTRIKNRIKSDLYFFGIKYPQEFERSGTHWSKRFLTWLEGIKFEERSGDISFRLQIRQAKNIRQEILEITKEIKNLSKSQKYAQNVKLLMGIPGIGLLTAMLFLTELDTINRFSSLDKLCCYIGIVPMTDSSGDNEKVGDITVRCNNLLRLAIIESSWIASRADPALLMSYNQYVQKMASNKAIVKIARKLINRIRYVLKNKKEYVYSTVK

SEQ ID NO: 155585 - protein, 456 aa, unidentified
MPESERKQRKSTKQLSIVYPLAAGIDVGATAHVVAVPAERDGRPVRTFRTFSADLHRLAEWLAEVGITTIAMESTGVYWIPVFEILEAHGFQVLLVNARDVRNVPGRKTDVNDAQWLQQLHQHGLLRGSFRPRDGVVRLRAYLRHRERLVDYAAAHIQHMQKALMQMNVQLQHVVTDITGVTGMRIIRAIVSGTRAPEQLAEYRDVRCAASPQTISAALNGNYRSEHVFALRQALELYDFHQTKIAECDDEIEAVLHRLNHDRDRPEKPLPEARHAKSRNEPRFDVRAGLYTLLGADLTQIHGFGPYTVLRLVAECGDDMRKWPSGKHFTSWLSLAPGNKISGGRLLSSKTKRSSNRAAVLLRIAAVNIGRTQTALGAFYRRLAARTGKAKAVTATARKLAILFYNALRFGMSYKDPGTSYYEQRYRQRVLHNLQRRAQSLGLTLVAKPATTDAVS

SEQ ID NO: 155586 - protein, 410 aa, unidentified
MLWIGDDWAEDHHDVEVQDDTGRKLAAARLPEGVEGIAKLHDLIARHGGKDLEPSDVTIGIETDRGAWVQALIGAGYRVYAVNPRQAARFKERYATSGAKSDKGDAHALADMVRIDHAQLRPVAGDSDQAQAVKVVARAHQTLIWERTRTFQRMRSALREYYPAALIAYADLALTSTDALELLVKAPTPQAGAKLTRTQITSVLARHRRHHRDAKANTIQTALREKQLALPEPVTAAYAATVVAHARILIALNEQIQAMEAQVKAHFLAHPDAEIYLSMPGIVEITGARVLAEFGDDPTRYTSAKARKNYAGTSPITRASGKVRTVQARFVRNNRLADALQRQAFCALRSSPGARRYYDKQRDRDLEYNPALRQLGNRLVGILHGCLKTRTRYNEATAWAHHTHPQPAPA

SEQ ID NO: 155587 - protein, 321 aa, unidentified
MEKEKVYVGIDVAKASIDMAVHQSKQRWSFTNDDEGISQAVSCLQELAPVLIVLEATGGIELPLTVALAAAGLPVAVVNPRQIRDFARATGKLAKTDALDAQVIAHFAAAVKLTPRPLPDAQAREFSALLTRRRQVVEMITAERNRLRSTYSKVVRKFIKDHIARLERELAKLDDNLRRSIRGSSVWREKDDLLQSVPGVGPVLSATLLADLPELGTLDRKQIAALVGVAPLNRDSGNFRGKRTVWGGRAKVRATLYMATLAATRHNAVIRAFYQRLCAAGKDNKVALTACMRKLLTILNAMLKHRTPWRYEAAFIIGPCS

SEQ ID NO: 155588 - protein, 491 aa, unidentified
MVGHSIGIDLSINGAHDCTILDATGQVTQHFTFDSSSVGLQKLEQRIRTLDPSPGASTVVMEPTGLAWLLPCLYLRAQLPDVKVVRIKTSKVAALRQYLKQDAKSDRIDSLTLAKMPLVDPEKLYAVDLPPAALQGLDRMTRQRAHLVESITARKNRLQAVVGGYLPGLMAVTGKPWEPTFRAILTVSLNPDTLSNTDEPALLKALHDRPLRKAPAEELVPRVRTACEQLTRLYRPCMEVGLLTETFFDDVRDEVARELRLIDVEQRELKDLEAAIARRYQEVAPQDHLRTMPGLGDVTAPTILAAVGTPQRFHSQAAFRGWTGVVAHASQSADSDAKGLPMTKAGPKRVKLALYQAAEIARQWDPQLAKVYYDQMVHKGNPHYKAVGAVMSHLASRIHAVLTEQRDYVLQDVDRREISVREARTIVLTQYQVPEEIRAARRASRGRKRNGSTVAHRGSAERLSRRAPTSSCVHSTRSQKMDRTGPVTIAH

SEQ ID NO: 155589 - protein, 403 aa, unidentified
MSFNGAPVMAATVVAVDVGKNKAALLVTSADRHRLFGPAEFAMTAPALAAVLQRVCAVLPAAPVKVGVEAAGHYHRPLLGAAVWPVGWEVLELSPARVAEQRRVQGRRRVKTDAIDLEAITELVLAGHGVVVTARAAAVTELTGWAMHRGRRVQARTAVKNQLLGQLDRCFPGLTMVLPDVLGTKVGRLVAAEFADPHRLAALGASRFVRFAAHRGLRVHRSTAERLVAAARAALPAHEAAVARQVLADDLVLLGCLDAQIVAAEVKLAQLLPDTSFAPLTTAPGWGTVRAANYAAAVGDLDRWPGARQLYRASGLSPAQYESAGKRRDGSISREGSVALRRALIDLGMGLWRSDPAARRYGQQLRARGKKGGVIGCAMANRANRIAYALVRDQSGYDPARWA

SEQ ID NO: 155590 - protein, 351 aa, unidentified
MKKMVRYVGIDVGKARCRAALMSQKGDIESEFFFENNSRGISNLVSALTDEDKVVMESTGNLWLNIYDALDHRNISVVLANPLKTKAIASAKVKTDKVDARILAHLLRSDLVAESYVPPRDVREMRALVRHRLSLVKMRTMVKNKAHAISDRYGYRCEYSDMFGKAGMEWLRTLEFAELDWLMLENHLSLIESINAQMKRVDEAIRKKASQDEDIRLLLSLTGIDVYTALLLRSEMGPVTRFHDYKRLVSWAGLAPSVHQSGNVEYHGAITKRGSSLLRWAMVEAARTAVQRDERLRAFYERVRAKRGDQKAAVAVACKMLKIVWFMLTRRETYGNANGRLYGEKLKKIGV

SEQ ID NO: 155591 - protein, 445 aa, unidentified
MEGLPSIRPLVAGIDLGSERHWVCAPTADGRAREVADFGATTPELRRMAEWLRQRPVESVAMESTGVYWIAPQEVLEAEGFETLLVDTRQLARVPGRDKKSDPTDCEWIQRLHSCGLLRGCFRPPEEVCLLRTLVRDKANLVAESGDWVRRMQKSLDQMNVRVHRAVSDIDGVTGMAILRAIAEGERDARTLAKLRDPRCRKSEEEIAEQLSGHWREDHLFSLQQALKMYEAIQQRIAEYDQEILRKLAAMQRQDLRDQPPPPVKNPQKAKAIKKRGEEEMREALYRISGVDLTGIDAIGVETVQVVLSEYGPDLSRFATEKEFVSHLTLAPRRPTSGGKPVRKKRPHTASTRVASALRMAALSLRNSATALGAYYRRIARRIGGDVAVFATARKLSVLIYRLLRWGQPYVDEGAEAFEKRYQAIRIAALKAKANQLGFELLQRA

SEQ ID NO: 155592 - protein, 339 aa, unidentified
MMYGAIDLHLRYSEIRVVEAEGRVVRERRVVTSRETLTAAFAGLGVLRVLLETGTESEWVAQALEQAGHAVVVADPNYAPMYGEVRRRVKTDRRDVAALAEANRRGWYRATHRRSRAQRTLQQILRSRRQLVAMRTGSISVVRALLRQEGYRLPSGSAAQVPARLARVPLPDELAATLAPLRQVIDTVTRELAAIDTRVRTTAAADPVVTRLQTVPGVGPVVALTFRATLDEVTRFQAAGQVSAFLGLVPREDSSAERRHRGHITKAGSGELRSLLIQAAWACWKSRGSGTLRAWAERLAGRRGRRIAVVALARRLSRILYAVWRDGTTFDGARVAAGA

SEQ ID NO: 155593 - protein, 340 aa, unidentified
MKLYGAIDLHSTNNVTVVIDEQDRVVYQKRLPNDLALILMELCVYQTELQGIVVESTYNWYWLVDGLMEQGYKVHLANTAAIQQYEGLKYTDDHSDARWLAHLLRLGVLPEGYIYPRADRPVRDLLRKRSQLVRQRTTNLLSIQNLVTRNTGESLSANQIKGLDVRQVDELLPNGDLALAVKANLSVMCSADEQTKIVERTVTQRVKLSPQFSFLKTVPGIGQILALTIMLETGDIRRFSSVGNFASYCRCVGSQKVSNGKKKGKGNTKNGNKYLAWAFVEAANFAIRFNSKIKSFYQRKKAKTKGVVAIKAVAHKLCRACYYIMRNRVAFDLTKAFGQK

SEQ ID NO: 155594 - protein, 476 aa, unidentified
MNSKTKRANNQVNSVMDVQKQKEMVEKANRILSEMKSFTWRDLETQGKFSKNDKLSFISDDMLILGCDIGSETHYVRAIDTRGRELSRKALAFDNNAEGFQKAHDWAVQLAAANDKKQIVLGLEPTGHYWFCLAAWMVSNGISVVQVNPYAVKQTKELEDNSQQKDDRKDPKLIANLVKDGNYGMPYLPEKVYAELRRLSMFREQLTEDRNRNMNRLHREMKIYFPEYKDAFGKIDGAFCMEVLKEAPFPEDILRLGTEGIRKIWHKAKLRGRGYSRAAEIVKYAETSIGLKDGTAAGKEAVRWFAEKIMELDEELAEIENRLNEKCKEIPHAENVLEIPGIGGKILSGILAEMGDISRFDDAKELQKLSGLGLVSCSSGKHKGETRISHRGRKRLRYWLFQAARSAVAHGEEYKWIHAHYTMRAENPLQKMQSLIVIACKILRVIYRMLKTGKPYDPEKLLKDIRYPEKVQTAAA

SEQ ID NO: 155595 - protein, 342 aa, unidentified
MGEVSTIGLDIAKSVFQIHGVDVDGAVVIRKRITRAKLLAFFATVPACLVGIEACPTAHYWGRQLQGLGHTVRLLPPSYVKAYVKRSKNDANDAAAICEAVARPSMRFVATKSEEQQSGLMLHRSRQLLVCQRTMLSNAIRAHMAELGVIAAKGRNGTAELLKIVADEQDDRIPAAARFSLDILARQYAAIRTEIVVIEKRIHAWHRSSEESRRLEEIPGVGPIVATALMAEVGDWKEFTSGRSLAAWIGLVPRQHSTGGKERLGRISKQGNRHLRWLLVAGAMAVIRYARQHGTKRPWLARLMDRRPIKVAAVALANKIARMAWAMMVHGERFKEPKLLPA

SEQ ID NO: 155596 - protein, 416 aa, unidentified
MNEERQEGQEGREGQEGQEGYTTLVGMDAHSVTASLCVTRWRKGEEPVTVREFATDVASLAATYKKRIPAGSLTVLEASTNAFDIARRLRAAGHEAKVLSADTVSGMSRADRVNDRLDARNLAKAYANGGTREVRVPDERHARLRDVWFGYRDAVKDAVKWSNRLWGFCSMHGLGLPPRGAARKVEAIREAVKGKGWEGDDAFRAEAMLAEYAHALGMRGLYARKIDEAVAGDVRMARVMQVLGVRRVTAFALVTFIEDVTRFATSKKLVAYIGLNPTVRETGKSKEGRRVSRHGRRDLKALMIEAAQCALNKGEAPMHEWARRKVAQKKERNKVVCALARKMACHVWHILMGHPAPGLEPEASFRRKLTMLAGSVGREGLRRLGHGSAKEYADSVCASLRPQRTDAEPARPPASD

SEQ ID NO: 155597 - protein, 348 aa, unidentified
MEQQSHYVGLDVSLETTSICVIDDAGAIIWRGKCSSDPDTITAIVRQHAPGAVRVGLETGQLSNWLTLSLRRRGVPVVCMDARHAKAALSLQINKTDANDAFGLAQVVRTGWYREVAVKSMDAHTLRMLLVARSRLVSQRQATANTIRGLLKTFGLVVARGSKGLFSVRVREQIAGNPALIAIIEPLLAVWYAIREQVTMLDRQILARARNDQVARRLMTIPGVGVVTALAYTAVIDDPARFRRSVSVGAYLGLTPRRYQSGEVDTTGHISKCGDSLLRGYLYEAAAVLLYRDGRASILKSWGLGLAKRIGMRRAKVAVARKLAVIMHRIWSDHSEYRWTAAIPPAAA

SEQ ID NO: 155598 - protein, 390 aa, unidentified
MSQPNDSNKSVIPLEQDNTMIAVIEMGQASWLVAGIVPGLERQPLKKLGSDEQALFQLLQRWRNEAVQTGRTIKRLVVAYEAGRDGFWLARWLRARDIEAYVIHPNSVAVSREHRRAKTDRLDTELLKRAFLGWLRGEAGHCSMAAIPTIEEEDARRPNRERENLVGERTRIVNRMKATLARFGIRSFKFTLRHADERLNDLRTAEAASLPANTHAELRRDIARLRVVRDQIKEIEQQRLQRIEQAAPSEKSPHAMIRLLARVIGIGVETADMLVNEILSRQLRDRKAVARYAGLTGSPDESGKRRREKGLSRAGNARVRRGMIQLAWRFLMFQKDSALAQWYRARTAHARGGTRKTMIVALARKLLIALWRMVTTGEIPEGISLHRAVA

SEQ ID NO: 155599 - protein, 400 aa, unidentified
MPFYAGLDWGGASHVVCVVDGAGRIVTRIDVRHDANGLADMTARLERIAPSAELPIAIERPSGLIVDALIAAGQPVIPIHPNVVKACRPRYRAAGGKSDPGDAYMLADILRTDGHRFRPLMPLSGEIKALRALVRGRDDLVAQRVALGNQLRSLLEGFWPGAATIFAAVDSPIALAFVGRYPTPDSASRLGEKRLASFIAQNSYCGRRSAAELLGRLRAAPSGLAGDAEAKAKGEIVRALVGVLKRLVHEITKLSSRIEHAVAELPDGRIIMSFPRAGRINAAQILAELGDVRERFPSANQLAAEAGVCPVTHASGKSRGVVFRWACNKTLRQAITCFADNSRHACAWAAAVYDKARQRGCQHAHAVRILARAWVRVLWRAWQDGKPYDPTRHAGAAGVV

SEQ ID NO: 155600 - protein, 426 aa, unidentified
MKITDKPTETYSGYIGLDWSSKEHVFCIFDAATARRTKKTIPNEPAALLSFLVELRGQFESKPVLLGLEATRASILPILLQHDFLRIILINPKTAKDFREMFRPSCAKSDDLDAYYNCELIRAHSDQFRIWEPHDPLTRQLNACVEGRRDLVDLRTQIANTLHAALTASFPQLLELLHCQLTVPIASHFLHRWPTLEAAQAVGVEKLRAFFYKNNVRTSDKLEDRLKKFAASKPLLHCLEDREPAGMFIKALAAQLEQFQHSIDQFENKIADLVKRHPTAQLFEGVPGAGPQLKPRLAAVFGTQKSRFASAQDVTTYTGIAPIKQSSGQMNLTCARWVRPLFIHQTWIEHANCSIRRCAWAREFYQMKREAGKTHFQALRALAFKWIRVLYTCWSKNTPYNESVHLQNLEKKNPKLWQRLQETSEQ

SEQ ID NO: 155601 - protein, 370 aa, unidentified
MKKRLLYVGLDVHKNTTDVAIATGRSNGKVRSYGKITSTLDALNKLIKKLQEGDKKLRFVYEAGPCGYKIYRNLHTKGIDCSVVAPSMIPRRSGDRIKTDRRDAINLARLFRAGELTSIYVPTTEDEAIRDLVRCRDDMKRFERKARQRLLSFLLRHGYQYSGKRNWTKGFYNWLATVGFSHSAQQVTLQEYIDVTNECSERIKRITQQIQVHVEEWNRAPFVKAYQAMRGVSLIVSTTVAAELGDMRRFQNPKQLMAYLGLIPSEHSSGKTVRRGPITKTGNSHVRRVLIEAAWTYKMQARVSNILLKRQQGLPKSVCDISWKAQTRLCARYRRLLARGKTKQTVITAIARELSAFIWAIDKEIQFAQE

SEQ ID NO: 155602 - protein, 375 aa, unidentified
MEGAPMLDTTTFIGLDVHARSIKAVSLDVMTGEVRAATFGYDAGAVAEWVRSVDPRARCVYESGVTGFDLQKRLSGLGVDCVVGAVSKMIKPSADRRRKNDRNDAEFLARMLSVGNVVEVWVPDDECEAARDLTRALEDARDDLSRSKQRLSKFLLRHGLAFDERTPTGRRKGNWTRAHWSWIESIRFAERADNDVLAYYVDAVRRAAEEKARLEGLVEAEARKPRWRKRVDSLRCLKGVDTASAADLVFEAGEFSRFRNARSFAAWVGLTPSEHSSGESDRRGAITKAGNKHLRKTLVEAAWHYLTCSGRPKDLAKGQAPDRGARRHAAKGVRRPVERREALLARGVHGNKANVATARELACWVWAVGLMAEEA

SEQ ID NO: 155603 - protein, 335 aa, unidentified
MRLYCGIDLHSNNAYTVVHDEQDRVVYRRRLPTQLELIVGELAPFKEQLVGVAVESTFNWYWLVDGLLDAGYPVRLANPAAMKQYSGLKFADDHSDARWLAHMMRLGLLPEGYICPRELRALRDLLRKRGRLVQQRTANLLSLQNQVQRNTGQRLSARALRTTELGGFGGDPNRLLSLETTRRVIVCLDREVKQLEQEVLRQLRPDPLLRLLKTVAGVGEILAPTIRLETGQIERFASAGRYVSYCRGVGSQHLSNGKSKGQGNRKNGNAYLAWAFVEAAHFAIRYHPKIRRFYERKQARTHRVVALKAVAHKLARAAYYVMRDRVPFQIDRSFA

SEQ ID NO: 155604 - protein, 409 aa, unidentified
MDVVITHGAGLDVHQATVVATVRCPGPTGGRQVITQTFGTMTPDLIALHEWLQGYGVTHVALESTGVYWKPVYYVLEDAFTLLLINMQDLKRVPGRKTDVQDSAWLAQLLEYGLLRSSFVPPAPIRDLRELTRYRVQQVRDRAQEINRLCKVLEDAGVKLSTVATNVIGVSGRAMLTALIEGSTDPTVLAELARGKLRKKLPELRRALHGRFRAHHAFLVGQILSKIDFLEETLQQLTTEIDQRLVPFEPMLAALDTIPGVNRLTASILIAETGGDMRHFPSAAHLCSWAALCPGHDESAGKRRSGHTRKGNRYLRSALIQTGWAASRAQGTALRALYHRVKPRRGHKKAVVAVAHQVLQIAYYIMRDGQPYHELGEHYFDQRNKERAIRRHVRQLEALGMTVTIQDAA

SEQ ID NO: 155605 - protein, 343 aa, unidentified
MQTITTIGLDIAKSVFQVHGIDTDGNIVIRRQVKRRYVLAFFQKLPPCLVGIEACASSHHWSRELQALGHTVRLMPPAYVKPYVKRHKNDSTDAEAICEAVTRPNMRFVATKTPEQQSCLTLHRTRHLFIRQQTSVINAIRAHLAEFGIVAPVGRNGVEQLLGVVADSNDKRLPEVARACVIALGTQLQTLKAQILEFDRMIRAWHRSSEASRRLEDIPGVGPVLATALVASVADPRAFRSGRDFSAWIGLVPKQNSSGGKDRLGNISKRGDRYLRSLFTTGALAVVRYAKIHGTGHRPWLTELLTRRPTMVAAIALANKIARMAWAIMAKGERYKEPAALAA

SEQ ID NO: 155606 - protein, 429 aa, unidentified
MNNFINNFVAGIDVSSKSSVITILMPGGETYGKKLNITNDLKGFTKLLTTLKEIEIQFSKRPEIFMESTGLYHIPLYNYFSKNDYKCYVINPIHTKNFAKQSIRKVKNDKVDSLRIAQLAQSPMFSTESVFDENTFLLKKLCREYDSLVSNAAQYKKKVNSLLNLVFPKFNEIFSDAFSSVPLAILFKYPTYVTFLSANKSDVITLITSTVNHSTEWADKRYNLLFNIAKEAELLKLDVDCLGAEMICFINLINSFKTAINKLKEKILEFCTNIPEFKENVELLCSHPEVGQISAISLLAEIGDIKNFSNAKKLVAFLGVDTSVSQSGAFTSTHNKLTKRGSNLARKILYNLSIASIKTLRNGVPANSVLLAYYKKLTTSKPKKIAICAVMHKLINHFFAILRDKKAFELRLPETHKKLYLERHLQIVI

SEQ ID NO: 155607 - protein, 347 aa, unidentified
MKQLFIGLDVHKKTWAVTIQEEHLILKRFTIDADADILTGYISKHFPKHQVQCCYESCCLGYHIYHSLTAAGWQVLVVNPGDIPRSNKQTTTKTDKVDSAYLAKQLASGHLKSIYVPTHKQEQFRSLFRRRVDLVKNLRRIKCHIKSMMLYYGITIPLQYDNVNWSKDFIQWLHKQRWSYPPATEALRSRLEEYTFFRKQYLHICNELRAYARKQYRKDYYLLRSIPGVGPFIAIALLAEVGDIRRFKGIDRLASYIGLVPSVHSSGEKSYTRGITYRSKRLLRSYLIEGAWIAAKKDPALMQYYLERKGCDHKKLIIKMASKTLSRIYHVIKTGEPYQLAQPATMA

SEQ ID NO: 155608 - protein, 407 aa, unidentified
MDVIIERACGMDVHKDNITACVMTTEGKEIRTFSTKTVFLLQLIDWIKEHKCTHVAMESTSVYWKPIVNLLEAEGIEFLVVNAQHMKALPGRKTDVKDAEWIAQLLRHGLLKPSYISNRNQRELRELVRYRRSIIEKRARQINRIQKVLEGANIKLGSVVSDIMGVSAKDMLRAIADGEEDPEKLANFARRTLKKKKEELELSLNGYIHNHQRLMLKTILKHIDFLTEQIDMLDQEVAQRLSSYQEDIERLDSIPGIATRMAEQMMAELGNNIKEQFPTAAHMCSWAGLVPGHNESAGKRKSSKTKKGNKYLKSALIEAAHSVRGSKNYLGALYRRTASRKGTKKAGIVVAHAILRIAYYLLTRKEMYVDLGEDYFDKKRQQSIVRHSLRRLESFGYIVSIKEPEAS

SEQ ID NO: 155609 - protein, 310 aa, unidentified
MDCYIGIDVSKATLDVASLPNGESWTVTNDDLGLAELTPRLVALTPVLVVLEATGGFEMLAAITLAKVGLPVAVVNPRQVRDFAKAMGQLAKTDALDAGILAEFAQRVRPEPRPLPDEAAQLLDSLLTRRRQLVDMLTAEKNRLGFARGPVKRDINRHIRWLEKRLADVDGDLQDAIAASPLYQAKADLLRSVPGVGPVTTLTLIAALPELGHLSRHQIAALVGVAPLNRDSGTMRGKRMVWGGRAPVRAVLYMAALVGIKHNPVLRQFYERLRAAGKPFKVAITACMRKLLTILNAMLHQNRRWDPKHA

SEQ ID NO: 155610 - protein, 439 aa, unidentified
MSASTGIGEDRGGPNFEQGRSMTETIKAYAGVDWASATHQVCVLDAGGKLLGERAFPHDGQGLAAMAAWIYATAAVEPPEIAVSIEVPHGPIVETLMERGFAVHSINPKQLDRFRDRFSMSGAKDDRRDALVLADGLRTDRHCFRRLEPVDAKVVELREWSRIAEDLQVERQRLVNRLRDQLWRYYPQMIDVTPDLGADWLFDLWALAPTPAKAKRLRETTVAKLLKRAQVKRISAAQALEILRRKPVAVALGATEAAVAHICTLIERLRLLNRQLKAAHRQLDLLCKAPGEENEANEPGQVHEQHDVTILRSLPGVGRIVLATVLAEASEPLRRRDYQRLRILSGIAPVTKRSGKQIVVVMRQACQVRLRTAVYHWARIAVMQDLHTRTRYAALRKRGQPHGQALRSVANRLLAMACAMLSSGTLFDPDRMPRRQAAA

SEQ ID NO: 155611 - protein, 343 aa, unidentified
MDHFAGLDVSVKETIICIVDDTGKIVREVRVPSEPQALLQVLMNPAYHFKRIGLEAGPMSQWLFSALAEAGLPVICVETRHMRAVLQAQINKTDRNDARGIAQMMRAGLYRPVHVKTLRSQKLRMLLTHRKLLQAKAIAIENDLRATLRNFGLKVGMVGKVKFEARIKELVENLPDLVAMVEPLLIIRRVLREQVNILHRRLLAVVRNDDVCRRLMTVPGVGPVVALTYRVTVDVPARFKNSKAVGAVFGLTPTKYQSGESDRTGKVSRCGDEMMRTMLYEAAQSMLVHSTKWSWLKAWAMKIAKNRGMKKAIVALARRLAVILHRIWVDGTEFRWTKEIAAA

SEQ ID NO: 155612 - protein, 360 aa, unidentified
MPTLPHESLYIGVDIGKFRHVAGFVSKTLLERHKHFEHCPAFTFEQSREGFRAFVERIRSYCPLEQCFILMEQTGHYHKAFQQYLLELDVPVYVMHVQERPKGMIKTDKRDALGLANQLYNQLELGVQVTDKLQVVHRAIPPSGAAAQLKSFMRHRYELVNEATQRKNKLTAICDEVFPEFTQVFKNPNLTIALELREKFPTPQAVATASITELREVRKRNRPSEAEFTLLQQLAPQSIGTKDVARQRGLILEQTLLIKELRLIQEHLQRLEEEICQIVEHCREGKILLSIPPISPLAAATILAAIGHIANFEDAGHLKSYFGWAPRRAQTGVSFDHTSLTQGGSREVKKMMYLVACTRS

SEQ ID NO: 155613 - protein, 430 aa, unidentified
MTELNPTPAPATLVAIDIAKHRHEVLIEAPGQARRRRLTILSSKADHDRLVETLTACGGPVLIGFEATGDYHRGLAYRLLSAGFELRLVSSVALARTREALHNGWDKNDPKDAQVILHMLRIGATQRYVDPLAAGINDLQELSKTHEAISKAKTETWHRILTHYLPLYFPEVERFAGNSRSDWFLALLERFPTPSSIMALDRESFVQEAWPVIGRKVSKARLLNDIYETARSSTALPVEEGSAAIIMFRMVLAEARSLIRQRDQIEKLAHVMLTDQADYRLLCTVPGIGPIHALTILAEAGDLRRFGHHRQFLKFCGLDLATCKSGTFRGRTKLSKYGNARLRRALWMAAQVAMRQRDNSFRDKLGRYTERDRHDADLRRKAMTALTAKMARVVHAVIKGGAEYRPFFERPVPGGRTSLCVGREGAQATL

SEQ ID NO: 155614 - protein, 362 aa, unidentified
MILGFDVSKNELVVVLIDKRGIIKRNWAIQNNKKVIEEFLLLNVQQYPKLIVACEATGEYHNVLAKCCLKKEIPFYLLNPIVTKQFTKATVRKKKTDLTDAHIIAKCVLQGEGQKIEWSIFNPIKPLLRTACHLGAMRVALNQKKKRFKEHFPELKVKEEFESIQKVIESSIEEFQEMAREKVDKELVVLLSSIPGIGKTLSLVFIAEIGDIKRFDSIKSLVAYAGLDPKVRQSGLTLQRNTRLTKRGSPYLRRVAYLAASIGQRFDPELKAYYEKKRAEGKRYKEATVANARHVLARIYAVWKRGTPYVPCSTEDSKRKALTQDCRSRTRINRTVLTKADLTIIPIPISERNKAVHDGIVS

SEQ ID NO: 155615 - protein, 457 aa, unidentified
MQQYYLGSDVSKGYSDFVILDSQKRRVEENFQLDDTIVGHSFLYDRLLIFFEEHPDAELCAAVESTGGYENNWYNTLRKFQSSLNIKTARLNPAGVCKNNEAGLKRVITDKISAQGVAEYLIAHSEKVMYQQQDYWASLRKQWSFIKMLTKQSTQLLNQLESLLYSTNPEILKYCQDGMPAWVFKLLKQYPTAAKLSKARATSVARIPYISISRAKELVASAKTSVASTTDTITGQLISATVGQIQHLQKTIRAQTKIMAAECTLQEVELLKTFTGIGDYSAIGLMLEIQAVERFTTTKKLASFFGLHPVYKISGDGAGGFRMSKKGRKEPRRILFMVAMSAINSNSLIRDLYQKHVENGMKKMTAIGLCMHKILRIVYGMLKNNTPFNPEIDLKNRERTSEQPQKERKDKSRRYQDFDANAPISGRQKKKRAERKLSQNAVSVECGICTPVPQLSS

SEQ ID NO: 155616 - protein, 373 aa, unidentified
MATQSTASPKLYIGMDIHKKSWSLNMRTDVCEHRSFTTPPDCNVLYEYVAKNFPGHEVLLTYEAGCCGFGAARHFLNCGWEVKVVNPADIPRKDKQTYQKTDKIDCRNLSKQLQAGQLKGIYIPDEKQDLLKSLVRQRVEITKGLRAAKSRIKSLLLYHSIVIPDKYDNANWSKEFIEWLNNIQWSDTSGESCLKSKLKVLDTLTQEHLHIANELRAYCRKHHKQDYYLLKSIPGIGGYLAAVILAEIGDLRRFSNESQFASYIGIIPVIRASGGTEHINGVTPRCRSLLRSYIIESAWIALRLDPEMQAYYRMHSGKNPKSVVVKIARKMLNRMLSVIKNNRPYQINHMIQTIERTKSNQPNTETAENSTVS

SEQ ID NO: 155617 - protein, 482 aa, unidentified
MKKHNIYQNQSQQLLSLFEQAANNAKVMCVPIDYAKKDHVVMFCNGYGDILRKPFSVKNSPEGVDYLTDQVMRSCRQRAISEKHVFFGGEQVGSFADNFVSTLRSQGWLVAGVNAHEAKTQRENLQASTDRLDLLGIAKSLLNRRADCSPAQSGIYLNMRTVVRHRRKLVGITTEVRNRIHTVVDRLFPGFLNESKSGITPFSKSSLWLMKERFSASQIRRRRRPTLIEALRRLDTKKPEDTADRLQQYASQVLKPPQDYVHMLQLSLAQHVKHFCCLQESIGQLETEIALNLAQTQGAFLTSVRGIGIVLAAGVSAEIGNPFEQKPINNLVSYCGIIPRIKQTGGPQGNTKTGKVAKRCNRILKDYVVKSASHLGLHGPADLKSDYQRRDAAGQHADFGMARRYLRMAMCLMRTSQIYLPNRLRKADSQIQDRADYYVMSWPQLRDKWQKSGALQTAFNADQPLGQWRKIVQQFYGIKLTL

SEQ ID NO: 155618 - protein, 366 aa, unidentified
MPTRKLQNPDEFLAQKFYVGIDVHKKSWAVTVRSLNFVVAHFTQPPSPEALLSHLQRKFPGGEYYSTYEAGFSGTGAHEELCKLGIKNIVVHPGDIPRTDKEKKNKTDVHDSRSLAFNLEKGNLHSIFVMSRQQQEFRALFRLRESKARDVARAINRLKGCLLYFGIDYSSIFEGYISARVITWLRKLHMTNEAGAFTLKKYIDDLVHQRNELGKITKALRSQAKKDYSLPYKCLLSVPGIGFTTAIGLLAEIGDFNRFKDPAEYCSFLGLIPWQHSSSGESIQVKGIQPRCNKHLRPLLVEASWFAIRNEPSLLKYYRKHAVKNSRHAIIKVARKLALIAKGVAQKLRMYDAAYSSFPNQGLVAQ

SEQ ID NO: 155619 - protein, 396 aa, unidentified
MISVGIDVSKGKSTVCIMKPCGEILESPFDIGHTADELDSLISLIKSFDEETRVVMEDTGHYHLPVATYLSSHNIFVCCVNALRMKKFCSQSIRRAKTDKIDSIKIASFGITYWNELVKAYPSNVIYDELKFLARQYYQVTGMLVKSKVNFSNLLDQVMPKINDVLSNQGENHKLTEFVNRYIHFQNILDMGEMKFTSDYCKWAKKKGYRLNERKAAEILALAQNGIPTLPNSQSVKIAVSEAVKLIHSIEESRNTILAQMQDLCNTLPEYSVVKEMDCIGDTLAPRIIAEIGDVRRFKNKHSLIAYAGIDAPPYQSGAFHSSERHISKRGNSYLRKTGYEIMQSLIKHKPADNAVYDFIQKKRSEGKCGKEAMIAGLNKFLRVYYGKVMEFYSEH

SEQ ID NO: 155620 - protein, 412 aa, unidentified
MKVLYARCCGIDVHAKMLVACLIVNGRKETRTFSTMTDDLLNLLDWLVANECPQVAIESTGVYWRPVFNILEGAVEVMLVNAREAKGLKARKTDVIDAEWLADLLRHGLLRPSFIPPLYIRELRELTRYRESLVREQTSLANRIQKLVESGNIKLGQVATDALGVSGLQMLRALAAGETNPDKMSSMARGRLKRKQGELKRALSGQLTEAQRWVLSELLDQYDRVKEAISKVEQKIRDEVAAAPDPFVSEAVKLMDTIPGVGETIAQILAAEIGVEMSQFPSDKNLSSWAGMCPGNNESAGKRKTGKTTKGSRYLRTALVEAAWAASRTKNTYLSAQYRRFVKRMGKKKALVAVGHSILVIAYHLLNNKRTYQELGGDYFDKRYAEKRRTRLIKQLQSLGLKVTVEELPQAA

SEQ ID NO: 155621 - protein, 358 aa, unidentified
MKLFVGLDVSLEKTAICVISEHGKIVKEAQVASEPEALSCWICDQDGAIAAVGLEAGPLSQWLHRGLSDAGLPVVLMETRQVKGALKAMPIKTDRRDAEGIARLLHLGWFRPVHCKSVSAQEVRAVLSARKAVQQGFITLEMSLRGLLRNFGLKVGTISRGRFEQRIRELAAGNPMLEAATEPMLRARSALRRELAGLERNVRQLSQEDPVCRRLMLMPGIGAVVALTYRSAVDDPARFTSSKKVGPWVGLTPSRNQSGERDVSGGITKAGDVNLRRALCQAATVMMYEEGQKTVRGTVFPTIGGRASWLRTWAAKLARRRGAKRAMVGLARRIAVILHRMWKDDTDFRFDIPVLHAG

SEQ ID NO: 155622 - protein, 429 aa, unidentified
MNYNTQNAKIASITEKTLIVGIDVGSEIHYARAFNWRNYEYSKKPFAFSNDEAGFSSFKEWMDDIAEKHGMVAVIPGMEPTGHYWLNLGAYLQEQGMKPVHVNPHHVKKSKELDDNNPSKNDRKDPKTIAGLVNEGRFSYPYIPTGIYAEIRNLSNLRIQTQEEITRIKNRIARWFSIYFPEIKDVYRNPDAVSGLMVIKQAPLPCDIKELGVDGVNKIWRDARLKGAGIKRATTLVTAAEHSIGNTEAPRSARKEIRNLLNDYEIYKNRLDELMEEIEKTLSEIPYIDKLMEINGIGIKTVSCFIAEIGDIGRFDNPKQVQKLAGYAIVADSSGKHNGESRISHRGRKRLRYALYEAAISVIGKNKEFKEIHSYYRTREKNPLKKMQSVIAVACKLIRIFYTILTKGVDYDGQKMLNDIVRPEIQLAA

SEQ ID NO: 155623 - protein, 334 aa, unidentified
MKTLKQSIGIDVAKETLVCCVGQLDINQQYSFSKTKTFTNDLNGFSSLIQWIEPSKTKDTVFVMEATGVYYENLAYWLNSRGEKLSVLLPNKVKHFAKSLNLKTKTDGVDAQLLSRLGLERKLSYWTIPSKIMREVKFLSREYREDKEKLVVIKNQLHAKEHAHGCPSSIIKRLKKQIAVLEAQLLETEAELRVTVMSDSSLNDKIGKISTIPGISFMTIISILAETNAFALVENAKQLVSYAGLDIQHNQSGAKEGKTKISKKGNSYIRNALYMPALCASRHNPTLKAFYNRIIENKPAKKIGITAVARKLLILTYILWKNDTEFEPDFAQSK

SEQ ID NO: 155624 - protein, 354 aa, unidentified
MSQNLHSAVAVIGIDIGKNSFHVVGLDARGAIVLRQKWSRGQVEARLANMPPCLIGMEACVGAHHLSRKLKAFGHDARLMPAKYVRPYSKGQKNDFRDAEAIAEAVQRPTMKFVATKTADQLDLQALHRVRERLVSQRTGIINQIRAFLLERGVAVRQGLRFLRAELPGILATPPDVLSPRMVRIIEGLAEDWHRLNERVDHLSGEIAALARQDSGCDRLMTVPGIGPIISSAMVAAIGAGDGFSNGRDFAAWLGLVPKQISTGDRTILGKISKRGNRYLRVLFVQAAWVVLIKPKTWQRHGLKPWIEAAKKRLHHNVLAIALANKLARIAWSVLAHGRNFEARKIDEAAAQPA

SEQ ID NO: 155625 - protein, 458 aa, unidentified
MKRRGKPKSKGVRMQVVNPNAAGIDIGSEVHYVAVPPDRDPEPVRSFKCFTADLNALADWLDECGIETVAMESTSVYWIPLYQILEARGFEVVLVNARHVKNVPGRKSDVLDCQWLGQLHTYGLLRGSFRPEDGICVLRSYTRQRDNLIKSAGAHIQRMQKALEQMNIQLHKVITDITGVTGIRIIKAILDRERDPIKLAQLRHYNARSSQETIAKSLEGDWREEHLFSLRQEFELYEIFRQKIAECDQKIEVCLNSFESKVDPGEKPLPKYKHGNKKARGNQPNLDLRNPLYRMIGVDLVPVDGFDVLTIQTIISEVGLDMARWPTEKHFASWLGLCPNNKVTGGRIKDTRSKKVVNRASCAFRMAAQAAGKSHSALGGYYRRMKIRLGPSKAITATAHKLARIFYRMLRYGTDYVDPGLHYYEQKYRQKVLNNLKKRARLLGYELIQGHELRAAVS

SEQ ID NO: 155626 - protein, 344 aa, unidentified
MSEVIIIGLDIAKHVFHAHGVDGRGLALFSKRISRGKVLEFFAAQPSCTVALEACGGAHHWARQLTELGHEVRLIPPAYVKPFVKRQKNDAVDAEAICEAAQRPSMRFVAVKSEEQQAAGLVFRTRDLLVRQRTQLINAVRGHLTEYGWVAPKGPSHMARLADLIEEEEMISSLPEAAHAMFRLMLDLLAGLNDRIADLDKEIARRAREDEVSRRLMTIPGIGPISATAIAALAPPAETFAKGRDFAAWLGLTPLQRSTGGKQKLGGTSKMGERTLRRLLIIGSSAVVQQASKRGAPKGSWLEQMLARKPRMLVTVALANKIARIVWALLVKQENYRAPVAAKA

SEQ ID NO: 155627 - protein, 429 aa, unidentified
MNSTRNKKIEQVKETTMIVGIDIGSEKHYFRAFNWRGIELTRKPVAFSNSMEGFNSFYNTIVELIQKSELEEALVGIEPTGHYWFDFGQFMGEKNIKFVMVNPHHVHKSKELDDNSPSKNDRKDPRVIAGLVRDGRYFYSYMPTGVYAELRNASNRRFVLVEEQTRAKNRLQKWIAVYFPEYKGIYTRIDAKGGLLVLKQAPTPEEIVRLGVEGIIKIWKDAKLRGNGHKRAMLILNAAMKSIGLKAGLTEARMEIQDLIEDYELQTKRLERVNDLIKELCQQIRYADKLLEIKGIGITTIAGFIAEVGDITRFDSAKELQKLAGLELVADSSGKHNGKTKISKRGRKRLRYLLFEAAISVVGKNEEFKEIHRYYTTREKNPLKKMQSLIAVACKLIRVFHVILTKGISYDASKMLKDIQHPGEPLKAA

SEQ ID NO: 155628 - protein, 321 aa, unidentified
MAMPVVPVEAGVDVAKDELVIQSGPDTKPFAIPNTPKSIKTWLKTVPRRSALAIEATSSYHMELAEQAHGAGLSVYVVDGLRLSRYRDSLGVRAKTDANDATLLARFLNRERASLKMWVPAPPGHRELQMLLRRRAKIVEMRGMMRMSLSGEKLFEKELEVIEKTCKRLERLFEMRLREIVKETGLRDQLRRLQQLPGVGFLTAVGLTMSFIRGEFANSDAFVAYLGMDVITAQSGKWVGRGRLSKRGDSEVRRLLHNAAMSGSRTQTWKQFYAHHLERGKKTTQALVILSRKMARLAYGLMKSQTDWKPQVYTGGAKPVG

SEQ ID NO: 155629 - protein, 377 aa, unidentified
MDHVVAAIDERGEAVAKPMPFKNSGTGFERCVAYLEGLALDNAGVFVGMEATGHYWMACFSYLVSRGFKVAVINPMQVKAVRKLKGYSRVKNDRIDSQIIAETMRIGDFDETRLATDELQSLKTLTRYQQSLKQEVATVKTQAICLMDAYFPEYAGMFTDMFGTSSMAILSKCPTPAECNRTHAATLAKILSEASRGRFGTEKAANVKAAAKGSVGITLGSDAASFQIKELVSRIVFLNKKASEADRRISVLLQGIEPLILTIPGISTTTGAQIVAEIGDASRFPNAAAIVSYAGLNSAVSQSGRFEATGEPITKHGSPYLRRSMWLAANRPFAEPWVGSIFRRTIARGADRNEHPVCSRGFDAGERECTKDSLDHL

SEQ ID NO: 155630 - protein, 351 aa, unidentified
MSKVYIGIDLAAKCCWGATRNRQGELTSLERFPTSEENLISYVRAQGGEAVVLLEECDLAGWAQRVLIPHAQKVAVCEPRANLWIHRDSVKTDKIDAKKLAQIALLGNYKEVYHTTDERIYELQAAVKAYDRLVEKAKAQKNQIKARLRGEGIITEGTKVFGKKGRREAMALIGSPLLREIIAADYEILDFLLRKQAEAKGRFVRLGKEIGIIRAWQAIPGVGPVGAARFCAYVKCPHRFAKKGKLSKYSRLGVTVTETGGKAIRRQHLDPAGNGALKDISRKAFSSALRTRGDNLIKRAYARALSSTGSEIHARLTVQRKILAIMWAMWRNGTAYDDNYDLKNGACEARL

SEQ ID NO: 155631 - protein, 345 aa, unidentified
MLYLGVDYHKSFSYCTLMDEQGKVVKQGRMENSADGVKDFVRDADGEVIGVMEATRNWTLMYDWLEEEIDGVKLAHPLKVKAIAEAKVKTDKIDSKILAHLLRCDLLPESYVPSQSARLVRQVLRQRIFYVRVQTMLKNRIRTIIDKHPEVGSPPVELLFGVKGMEWLRKVTLPEIDKKVMENDLELLKEVQERISQSDSLIAELGKDDERVKYLMSIPGIGKFLAVLLCYEIDDINRFRDDRKLHAYAGLVPSTYASGNRVIHGHITKQGNKWIRWAMVEAVWPAIRKDRELRSLYERLKIKKGANCAKVATAKRLLTIVYCILKERRYYQVHGCPDISLAVSR

SEQ ID NO: 155632 - protein, 492 aa, unidentified
MTTILPPRKADDDTIRYVGLDLAKKETQVAVLNSDGKQIASRRFQATAGNYRQLASELGRNDCVALEVSTNSFNVARILMTSTARVRISDPVKTKVIASAKVKTDKIDARVLAELDRADYLPTVWLPDHYTDRLRHLMSNRQSLVDRRTELKNRVHGILHREIISTIGSDLFGRSGSLQLDSIAATDELDCWDQAELESARGEIAEKDLRIAEMEKAIAAYLCSNQAAVQMVDLLLSISGVSLVVAAGLVAAIGDVSRFTKGKQLASYFGLVPSTYQSGDSSGYHGRITKRGRAQARWLLIEAAEHARKSGPMRAFYLRIAKKRNHNVAVVAVARKLAEIIFRLLSKQEDYLYSIPRLTDEKRARLRMLASQTCSSSPGDAPRRPSGPRDGSPRSPLYGSGLRGRKIKSDIVRKASTYAEAAYRTMVQARAAGKRLDAPIGFDPTRPSAIDWQAVLEKAAIAIANKQSSPSHPERSLSAPTAKAKLPGREVR

SEQ ID NO: 155633 - protein, 422 aa, unidentified
MNSENNENYTAYIGIDWADRKHDMCIQSDQLKKDEYAVVSSKVEDIDTWAMDMYKRFGGPIAVAIELSKGPIVYALQKYDFFVIHPVNPATLAKYREAFKPSRAKDDPTDALLAVELIRKYPEKFKPLKPQGKELRALFTLTEHRRKLVGDRVRMTNRLRYAVKQYYPQILEWFDRIDTVVFCEFVERWPTAAQARRARRSTLTNFFHSHRIRRKDLLNARIDAIKCAEALTEDDGIVIPHRLQALVLVDQLRVALSAIKRYDDQIAELAESHADYKLFDCLPGAGPSLAPRLLVAFGEQRDRFANAGELQMYSGIAPVTERSGKKCWVHWRWRCPNFLRQTFAEWASQTINKSFWAGAFYRQQRAKGCTHQAAVRALAYKWIRILHRCWVTRTPYNESVYLKALKRRGSPLMNQVAESIGA

SEQ ID NO: 155634 - protein, 331 aa, unidentified
MIIKETVGIDVSKKTLDVHIHKRKMHEQYNNTSKDIKKIVEWVFSNTTYTKDEVLFVFEHTGMYSEQLMTVLSEKDIKFSVISGLEIKRSMGLIRGKSDKADAAMIALYGYRLREEIKLTQMPSEDLKSLKRLLGLRDRLVKQRAGHKACRGKQKRVLNKKDNKVLFDVQNQMINYLSKKIDKVEKEIKVIVKSNKIINDLDKLITSILGVGSVTSLYMIVFTQAFTKFETWREFASYSGIAPFKNSSGTSVRGKTKVSHLANKNIKSLLDQCAKSALQHNPEIKQYYERRIAKGKNKMSTINVIRNKIVARIFAVVRRGTPYVNTLKYAA

SEQ ID NO: 155635 - protein, 424 aa, unidentified
MDVMFERVAGLDVHKAMVVAAVRIVSDGKVNRECRTYPSTTAGLLELLAWLTQSGCTHVAMEATGVYWKPVWNILSDGEFELVLANAAHIKNVPGRKTDVNDATWIADLMACGLIKASFVPDGEIQELRSLQRARKQLVREQTRHTQRIQKTLEEANIKLDSVVSDILGVSGRKMIEAMIEGVRNPAKLAALADRRLKASPKELYDALHGRLTDHHRFMLKLYLGQFDALEASITEIDRTVSAAVARMDEEARVAARATFQSLILLLSSIPGISAQSALAILAEIGTDMSRFATAGHFVAWAGLCPGQNESAGKRKSSGLRKGAPWLKTAMVQAAWAAVKKKDSYYRAQFHRLKARGGAKKAICAVAASMLTAIYHMLKDGIEHQDLGADHFDRRSTDFKAKRLVAQLTKLGFEVALQPLEKAA

SEQ ID NO: 155636 - protein, 314 aa, unidentified
MSDATFAGIDVAKAYLDLAERPVGTHTRHANDAAGIAAICAHLQARSPTLVVLEATGGLEVPLAAALAVAGLPVAVVNPRQVRDFAKAVGQLAKTDALDAHLLARFAEVVRPEPRPLPDADAQNLSALLARRQQVLGMLVAEQQRLPTTTATLRPRVEAHIAWLRQERDELDRELRQQIRASPAWREDDDLLQSVPGIGPVLATTLIAELPELGRLNRKQIAALVGVAPLNCESGILRGRRIIWGGRARVRAALWMGTLVAVQRNPAIRAFYQRLVATGRPKKVALTAAMHKLLLVLNALLRQRIPWHDAAQPA

SEQ ID NO: 155637 - protein, 392 aa, unidentified
MSQVSPRVVIGMDPHKRSVTIEVMDADERVLGGGRFATDAEGFHSMLDSVDAWPNRVWAIEGCNGIGRHIAHRLIADGEQVVDVPPKLSARARVFATGQGRKTDATDAHSVALVGTRMTGLRPVVNDEQLEVLRLLVDRRRSMGEEHTRKVAQLHALLLELIPGGAKVFLSAAQARKLLASVRPRDVVGKTRKRVATELVVDLEKIYARTKAADKELTELVKATGTGLLDLRGIGPSGAARLLVEVGDITRFPDRGHFASWTGTAPIDASSGDHVRHRLSRGGNRQINRVLHIMAVVQLRNPTEGRAYFDRKKASGKTSMEAMRCLKRRLSDLVYKTMLEDLVAAQKTGPGGQPGNDSVSSVTGSQPSAGSSDKSLPGPANTKPKRTLPAAS

SEQ ID NO: 155638 - protein, 370 aa, unidentified
MATRPLALIVGSRDTRTRGVKEKQDRDRLFIVARMVAGTTWFVCKAGTTKMNETSTKTAGIDTSKKSLDVATYPASERLRVANARDGHQELVAWLSARKIKRVGIEASGGYERAVVEYLREHGFEVALLQPRQVHAFAIYKLRRAKNDRIDAALIAECAANLADLHEPPDTRLTALAEHLLFIEQLEYDIAHLKTRREHFSTKRILKQLERDVQRLQRRREAELLLLQVVVCKHDDLARRLELIASVDGIGIRTALTLVILLPQLGKVSREQISALVGVAPYDDDSGERTGERHIAAGRSRVRRALFNAALPASQRWNTALVALYGRLTNNGKAHRKAIIACVRKLLIFANAVVERGTPWSKSPPANHTA

SEQ ID NO: 155639 - protein, 366 aa, unidentified
MGWMAPLRHLSAKLLVARISSNEEPSMGEVTTIGLDLAKHVFQVHGVDAEGSTVLRKQLRRAQVVAFFSRLPRCVVGMEACATAHYWARELRALGHEVRLMPAQYVKAYVKRNKNDAADAAAICEAVVRPTMRFVAVKTAEQQAAVLLHRGRERLVRQRTGLVNALRAHLAEFGIIAPQGLRNVGRLIAIVRDEDDARLPDLARQVLEVLAAQIEQLEAAVAAIEKQLMAWHKSNPVSQRLATIPGIGPIIATAIAATVTEPSGFRSGREFAAWLGLVPRQNSTGGKVRLGGISKRGNRYLRRLLINGASANLLRSKATNADPWVIGLRRRRPSLVVAVALANKTARIAWAVMQRKENYQRMAAAA

SEQ ID NO: 155640 - protein, 411 aa, unidentified
MWLFIGDDWAEDHHDVEVMNEAGKVLAKARLPEGVAGMARLHELTGRYLGEDPDQAEVVIGIETDRGPWVAALIAAGYTVYPVNPLQASRYRGRHGVSGAKSDQGDSHMLADMVRTDSHQLRPAAGDTPEAEAIKVVARTHKTLIWERTRHIQRLRHQLREYFPAALEAFEDLDAPDVLELLAKAPDPARAAKLARAQVAAALKRARRRGIADKTTAILAALRSEQLGQPAALTAAYAATARALISVITALNEQIKALQGQVEAHFGQHPDAEIYLSQPGIGAILGARVLGEFGDDPHRYASAKSRKNYGATSPITRASGKKKVVAARFIHNDRLVDALMSWAFSSLQASPGARGFYDQQRAKGHDHSDALRRLANRLVGILHGCLKTRTLYDEATAWGHRENFPQSSVAA

SEQ ID NO: 155641 - protein, 414 aa, unidentified
MERVYERCCALDVHKRQVTACIHVPGQGGERSERCVEFSTMTADLLGLRDWLKGLGVTHVAMEATGVYWKPVYYLLEDDFELLLVNAQHVKNVPGRKTDVKDAQWLCQLLEHGLLKGSFVPPKPLRELRDLTRYRKSLVWERSREANRLHKLLEDANIKLASVASDVLGASGKAMLEALCEGSNDPQALAQLAQGKLRSKLPALAAALEGRFSAHHALMTSHLLAHIEYLDETIDALSSEIEERVRPFAGELERLCTIPGVARRTAEVILAEFGADMSRFPSHRHAASWAAICPGNEESAGKRKTGKTRKGDRWLRTALVEAANSAAGRTKDTYLHSQYLRVRRRRGHKKAIVAVGHSILVAAYYILRDEQSYQELGGDYFINREDQERLTRRLVRQLERLGQRVTLEPALEAR

SEQ ID NO: 155642 - protein, 433 aa, unidentified
MQDVQDEPLFAERVAGLDIAKAEVEVTLRVPSDTTAGRRQQETRTYGTTRRELDSLADWLHCWAVTRAGMEATGDYWKPVFFLLESRGFDCQLYNAGQVKALPGRPKTDRADSIWLAKITERGSVASSFVPPEPVRRLRTHTRYRRHLTQARTAEKQRVEKLLEDGHLKLSSVISDIHGVSGRAMLEALAAGQRDAKALAQLARGTMRGKIRRLEEALDCSFFTAEHAAVLAMMLAAIDCYTAQIEALTARIETLTEPYLRQVEQLDQIDGIGAICAQDIIAEIGADMTLFRTASHLVSWARWSPQVKQSAGKRKGSNATGRGNPYLGAALGEAVICAGRTQSYLGAKYRRLARRMPKKKALVATGNSMLTIVHTLLSDPAASYQDLGADYYEQRMHARRQARNHVRSLERLGYKVTIQALNPDTGEFLTPAG

SEQ ID NO: 155643 - protein, 332 aa, unidentified
MYQLYVGIDIAAKTAHVHWQEAEQGESGHQEVQQCQRDYARLAQRLQGIADPGASLVVMEATSNYWLEIALYLYEAGFRVSVINPIRGRHFAKLHLRRAKTDAIDAALLCQFGQTIHPDLWTPPPTIYHRLQQRLGLREDLLKTKTQYRNRLHAMRYQPYAEASLIVRLERQIALLQQEIEQLAAEIEALLNSDHEWREAALRLQTIPGIGLITTAWLLTATHCFARCDTPQQAAAYAGLAPHARDSGSSLHGKRQTGGGHAQLRASLYLAAGSALQHNPCLKPFYQRLVQRGKIKQVARVAVARKLVHMAWAVVVKHRDFDPHYAQHPLAA

SEQ ID NO: 155644 - protein, 339 aa, unidentified
MERQYVGIDLHRRSSTIVRMSPDGEVLACRKIPSQPFELAEAMAEAGEAPEVVLESTYGWYWAADLLQELGATVHLAHPLGNNWGNRRVKNDERDAKDLAAMLRLGRLAEGWIAPPPVRELRELVRYRFRVVGHRTSAKAQIHGVMAKNGILPARREMWGPGGSAQLDAISQDLPLAYGMRLESLRALIDVFDHEVELLDAHIHLELKDDPGYRAILQINGIGKVLGAIFVAEIGDITRFERAEQLCSWAGLTPKHRESDDKVQRGPITKQGSHLVRWAAIEAISKYRGGEKLRADFDRISERRGKFKARVAVARKLLTLVFYGLRDGEVRCLEGHEAA

SEQ ID NO: 155645 - protein, 348 aa, unidentified
MNYCGIDLAGVSSYAYMTDEKGRKLWAGPVETSKAAFERLVKKFRRGGLAIAIEAGNQTAWVYEELVNLGAQVTVVNPTKVKLIAESRRKTDKIDAKILCELLRLDGLPHPVHMPGPEARELRGLLVARRQLVSARSKLCNVVRGMLRQTGIRLPARELSTSAGWKRLFAAGFEYDHVMHIVAAYHDSFLALTKSIRDLDKQLAEREKNEPRAARLKTMPKVGRIASLTFLAAVDDVNRFPTSRKLVGYSGLAPTVRQSGERTEYGAISREGRRELRAVWVQIAHLVATDKTKATQPLRTWFNRVAKKRGKKTALVALARRLLVIAYQLLKSESDYDVGRLKKKRRAA

SEQ ID NO: 155646 - protein, 297 aa, unidentified
MLYLGIDQHARQITISLRDESGDVVQARQVSTQPDKVHAFFQQLTRERLHDGESFVAVLEVCGFNDWLIRMLHEYRCHKVILIQPDERKKCKTDRRDAAALSELLWVNRDRLLQGKPVHGLRQVDIARSTDQENRRLTTLRKDAGQARTRLVNKVRHILRRHNLQWQMPTKKFPTKSGIAWLKQVALPEIDRLEMNHLLADLEQVQGRRQELERVIAQRCGVSAEAVLLSSMPGVGYFTAVALACRVGRVGRFPRAASLASYWGLTPAAATAARALLLQSGKRPPSGPSAKGARFTR

SEQ ID NO: 155647 - protein, 324 aa, unidentified
MLATLGIDISKADFHVELSVNEKLRHRRFVNGKEGFRELCVWLARHKAEPVHACLEATGRYGDELALHLYEAGHVVSVINPAQIKAFGQSELLRNKDDRPDAGLIRRFCEKQQPAAWQPPSTQLRELQALTRHLENLHDTRQQQVNRLEGVNNKAVLKSLRKLVAHLDSEIQRTEKQIQDHIDNDPDLQRQQQLLSSIKGIGKLTAAKLLAEIGDISSYKSARQVAAYAGLTPRNNRSGTLRGKTRLSKTGNARVRKALFFPALVAKRYNPIVRAFCQRLTHSGKNKMEVIGAAMRKLIHIAFGVLKSGKHFDPDYELLLNSNG

SEQ ID NO: 155648 - protein, 333 aa, unidentified
MNTAGIDVSHKTLVLSMSKGGKLGKAREFANTAPGHQALLKALKGANVERVCLEATGTYHLELALVLEAAGVALMVLNPKAAKRFAEALLTRHKTDPVDAGVLAQFAERMPFTPWQRPDDAVLALRAVARQIEALKKTRTGARNRRHAMGQSVLTPAAVLDSIERLIGECDAHIDALRAWAHEHIAAHPALEARWRLLLSAKGIGAASAIELLGELLVLPADMAAKQWVAMAGMDPREVSSGSSVNKPARLSKAGNRHLRQALYMPALSAARNDPHIRAFYRHLIEQRGLKKIQAICAVMRKLLHGIHAMFKTGQPFDSARLCPPRPAPAGAG

SEQ ID NO: 155649 - protein, 372 aa, unidentified
MKQYSEAFVAFDVAKTKHSVAIAEGGRGGEIRFLGTIENTPTAIERTIKKLANRHGRLQVCFEAGPTGYGLYRQVQELGHNCMVVAPALIPQRPGERVKTNRRDAVTLARLHRAGELTGVWVPDAVHEAIRDLVRAREAAADDLRRKRQQLLSFLLRHGRLYTAGRDHWTQAHRRWLAAQKFAHKAQQIVFQEGVDAIEDALQRLRRLEQQLADIVPSWSMAPVVEAYQAMRGASFLVAVTFAAEIGDVRRFDTPRQLMAFLGLVPGERSTGETVRRSSLTLAGNRRARRALVEAAWTYRFPARVSETLEPRLRRVPKAVRDIAWKAQVRLCARYRRLSTAGKKLPVVVAAIAREMAAFLWAIGREIAPLPM

SEQ ID NO: 155650 - protein, 337 aa, unidentified
MMYSGIDLHSNNSVIAVIDDSDRIVAQKRLPNEITRIVGFLARWKVELAGVVVESTYNWYWLVDGLQDAGFHVHLANTAAIKQYEGLKHSGDETDAQHLAHLLRLGILPTGTILPREHRAVRDLARKRMQLVQSCTAHVLAVENIMARQLGGRMTSNQTKRLTDDAVDSLSLAADVGLAVKANVAVIGTLQAQIEILEKRLQERVKPRPQYGLLISVPGIGQTLATVILLETGPIDRFADVGNFASYARCVDSVRTSNRKKKGEGNVKNGNKYLAWAFVEAANFARRFCPEAKRFHERKKARTNNIVATKALAHKLARACYHILKEGKPFDVTRCFA

SEQ ID NO: 155651 - protein, 322 aa, unidentified
MTSVSQTPEFYAGIDVSKDKLDLAVEGQTEIVFFTNDAAGITQLIQRMQQLHPALIVVEATGGYERAVLHAALDAALPIARVQPGRVRHFAKASGLLAKNDGIDAHLLAVYARCIQPAVTEKRSENQLELNALLVLRRQLIDARTAHTNQMQMADSAFVKNTLAKLLRQIDGRIKQVDKKIARLIDSDDDLAGRRDPLLSVPGVGAVTAATLAAQLPELGKVDRCQICALAGLAPYDRDSGKYKGKRSIFGGRAAVRSVLYMAAITAIRCNQVIRTFAQRLQKAGKQPKVVITACMRKLLTMLNAIARDKITWSPKCQLQTA

SEQ ID NO: 155652 - protein, 320 aa, unidentified
MDGLSYVGVDVAKDSLEVALHPEAKSFSVTNDRAGIAKLMAQLPEPGKCVVVLEATGGYERTVIAELLQAGHRVARVNPRQVRDFANAMGVLAKTDPIDTRVIARFGEVVKPRCLEIPEGPLSELQQLVERRRQLIELRTAEKNRLQQANSKPTRKSIEDVLKTLEKQVEIIEEQIDELVRKHEDWQHKVDLMTSVPGVGRATATTLRADLPELGQLNREEIAALVGVAPYNHDSGQLQGTRCIWGGRAPVRNVLYMATLSAKRCNQIIRRFAQRLAENSALRPSKPSKVVTTACMRKLLIILNTMLKNDTPWNPQLALG

SEQ ID NO: 155653 - protein, 312 aa, unidentified
MMQEVFVGVDIAKDWLDIFHPGSGLRRIDNTAAAARRFAKASAKDGVWVIFEASGGYDRLLRDALEAAQARFSRVNPRQARDFARAMGVIGKTDRVDARMLAEFGARLRPAPTAAAAPERCALQALTTRRRQLVEIRKQELTRLPQTLDPAARADIRSLILILNARIRRIEGAMAAQVGATPDMAQAARRMQTVPGVGPIVAATLLAELPELGQLDRRRIAALAGLAPIARDSGKHLGKRRIGGGRPTVRAILYIAALHASRLSQPFKAFRDRLKAAGKPTKVTLVATAHKLLDILNAMLAASTDYKANTMP

SEQ ID NO: 155654 - protein, 405 aa, unidentified
MFVGIDWASTEHAVCVLDQAGKTVRAFGIPHSAAGLDDLVARLRRLGAPAGLPVAIERPDGRLVDRLLEAGHPVVPVRSNAIKAWREGEVVSGAKSDAGDAKVIAEYLRLRHHQLRALTPFSDATRALRAVVRARGELVRQRVAAINQLTATLEAFWPGAKAVFPDVEREIALAFLERYPTPESAAGLGERRMAAFLTRHRYCGRTPAAELLARLRAAPAGVAGGAEATARRDAVLAFVGVLRALNQAIRDLDRSVVARLGEHPDSKVFASLPRSGQINAAQMLACWGDCRDAYDGPEAVAALAGIVPVTRQSGKHAAVSFRWACNKRFRNAMTTFAHNSRLASPWAAKLYADAIARGHDHPHATRVLARAWVRVIWRCWIDQVPYDPVKHGAAQRLAEEAATAA

SEQ ID NO: 155655 - protein, 429 aa, unidentified
MTVSNDTPPRVTLVAVDIAKNYHDVLVQPPTPGRRRRVRVANSRQDFEHLVGYLQGLNSSVLIGFEATGNYHRPLAYFLHEHGFELRLIPTLALARTREAMHNPWNKNDPKDAQVILHLLKTGLIQTWHDPVVNSINDVQELSKTHFQVTLARVRVWHTLRNHYFALYFPEIDRFIRSDHSIWLVRLLASFPTPASITALSEGEFQTRAWNLVGRKVSKRALLAEIYAAATRSIGVPVPLDSAAVAMFRLVLGQYLDLHRLREHIAEQAAIVLGDNPDSRRLMTVPGIGPANALTILAEAGDLRRFRHHRQFLNFCGLNLSTLQSGKSRGQSHISKYGNARLRTALWMAAQTAIRMRENSFRRKFDNYVRGNPLDADLRRKAYTAIAAKLARVIFGLIKSGADYRPFFEHKFQVEEPSRASAVGATSTP

SEQ ID NO: 155656 - protein, 349 aa, unidentified
MVLYVGLDLSRKRLDWRALGIDGGLVGEGACPPDRDALAHLARRFERDRRQPVLAAIESMTGARFVHDQLELAGWDVRIADAQRAKGIAPLACKTDRVDAWVLAELARRDLIPEIWLPGPEVRGERERARFRIHLVHKRTSLKNRVHAILFQHGLRAPVGDLFGLGGRRFLERCELPEPWRSSVAAGLYLIDVFEEQISAIEKELRRLGAEHRYLPLLVTVPGIGWVLGYTIAAEIGDIGRFSSPAKLVGYTGLCPRVRQSGEVDWRGALSKHGPPYLRWALIEAAHNAIRCYPRYRALAERQRARLGRQRGGSVAAITIARKLAEASWWMLSRNQPFAPAGARVPLTA

SEQ ID NO: 155657 - protein, 413 aa, unidentified
MGIDVVVERAAGLDIAKASLVACVRIPGQRKGWTMHMRKFGTTTKDLLELSAWLSEHGVTLVGMESTSTYWKPVFFLLETQFECWLLNAGHMKAVPGRKTDMADAEWIADLVAHGLVQPSFIPPQPIRRLRDLTRRRTLLLAERMREKQRMEKLLEDAGVKLSIVVTDIFGVSGRKMIEALIGGERDAQVLAGLAVGTLRKKLPALQDALVGRFDDHHAFLAGILLRHIDFLDTMLAEFDLRIETEIEPYMAEVELLDTVGGIGPRSAQVIIAEIGTDMQRFSTAARLASWAGLCPGNNKTGGKAKPSRTQPGNKWLKAALGIAALSAIRKKDSYANAQFRRIAARRGGKRAQSAVAHSILIAIWHILERHTPYEDLGVNYFINRDNPDRQRRRAIAQLERLGLTVTIQPTTA

SEQ ID NO: 155658 - protein, 344 aa, unidentified
MEYYCGIDVSLEQSSVCVVNASGVIVREATVSSEPEALIAWLSSLDVTLSRIGLEAGPLSQWLYAGLAKAGFAVELLETRHVRDAFKAMPVKTDRKDARGIAQLMRLGWFRSVHCKSLPAQEVRAMLTARKLVQTKLHDVEMSVRGILRGFGLKVGPTTARTFEGRVRELVGGHPTLTTIADALLAARSVLHREFQGFERKVRSLARRDDQAKLLMSTPGVGVLVSLTFASAIDDPGRFKRSKQVGAHFGMTPKRYQSGEKDVSGRISKIGDRSVRTALYEAAHIILTRPVKAGALKSWGMRLAARAGMKKAKVALARKLAVILHRMLVDGMPFAADKAAMAKG

SEQ ID NO: 155659 - protein, 418 aa, unidentified
MQVDKDEPEVIERVAALDIGKAEVVCCARVPGPGAQRMQEVRTTSTMTSALLALGDWLAELGVTRVVMEATSDYWRAPFYLLEDRFETWLVNAHDVKHLPGRPKTDRLDAVWLCKVAERQMLRPSFVPPPAIRELRDLTRYRVDLLAVRTAQKQRVEKLLEDALIKLTAVVSDPFGVSGRAMMAALIAGERDPVVLAELARGSLRSKTARLTEALTGRFSEHHAFLLMQMLQRVDAATADIAAVQARIDARIGELAPAVARLDAIPGIGPVAAQMILAEIGTDMSRFPTPAHLTSWARFAPGVSESAGRPKGNARTGKGNRYLARVVGEAAVSAARTDTFLGERYRRIARRRGKKRAIVAVGRSILVIIWALLSDDEALFVDLGPDYYASRSNPERKVRQHLRELQALGYTVTLNPAA

SEQ ID NO: 155660 - protein, 327 aa, unidentified
MMFIGIDISKEKIDLSWLRDQLTNKIKTKVFKNKHQDFLAIEKWLLNTTKSAANELVITLEPTGVYHEALMYFLHEQGFNIILANPGKAKKYADALNIIHKTDKSDATMLAHYGCAKHTVVSYWQPDALEVRELKALIRRLDALESNRQREANRLEASEFSNVSARVCQSIKVTIAFLDDEIKQLKSDIDNHIDNEPDLKRNRKLLESIPGIGPVLSRELTYLFAAKKFNKAKEAAAYCGLIPRHNESGKLKGRTSISKLGPARIRCKLYMAAIVAGQWNKTIKRHKLTLINNGKTPMQVVCANMRKLIHICFGVIKNQEAFKLQES

SEQ ID NO: 155661 - protein, 391 aa, unidentified
MSMYFVGIDISKYKHDCCIISAVDQQIVSKFTITNVKDGFEQLLISLNSLSNPEDIKIGFESTAHYALNLELFLENANHSFMEVNPVLIKEYKKSTTLRRTKTDSVDCESIARWLMTVEYKPHSKGFYHAYSLKSLTRLRDRLIRQRSFYLVKITNVLDHTFPEFKPFFNERLSKTAIYLLENYGSAEKMAHMNSASYDKLRCISRGKFSIQQFLHLKELAANTVGVNNSIFDIELNSLLTLYNSLCKEIKNLEAEITRLIEEVHPHYMSIPGIGPISAAVIYAEYGDISNFSNPSQMLAFAGIEPGINDSGTESHGGRMVKHGSSQLRYVLLNACLPLIRFDLTFATYYAKKRAEGKKHRVAITHVAKKLIRVIYALERQDVDFNAQKIR

SEQ ID NO: 155662 - protein, 370 aa, unidentified
MSETSVAYQSFIGVDLHKNTVTLATVRPDGSLLDRVKIPTKCRDRIASWLLTRPRPSHMAVEAVGFVEWFIDDYRGCVDRIDIADATELANRRGKRRHNDPNDARDVAVRLARGECPLGYIADDELMQLRKLGRHWHQLSRLLTRTKHAMRSMFLAANIAGPKLDGPAAQKWLLAFGHLLKPVQQQAFANFLDIIQLVERQRARLHLQITFANRAPRFRKTVELLKSTPGIDEIWGCIIAAEIGPFDRFPNADALEFWAGLTSDLQESAGRTQPGPITKAGSRSLRWALCKAALTLCRSDKKQEAIRQRLIRRIGKPKANVAMGRRLLRILYAMIRDEKPFVRGPATQHNRAANRARMARKQRKEVARAY

SEQ ID NO: 155663 - protein, 310 aa, unidentified
MSTELFVGIDVSKDTLEIGIYPSLEAYSVPNSDQGRDDLSQRLKALSPQLIVCEATGGYETAVVSRLAAAELPILVANARQVRDFAKSIGKLAKTDAIDAGVIARFAEAVRPELRSIKDQPSQELAALITRRRQIVEMITAERHRLPTTSRRGRRDIELHVRWLRKRLEQIDDQIKRDIHDSPIWRTKDKILRSTTGVGPAMSATLIGYVPELGQLTGKQISCLVGVAPLNHDSGRFRGRRMIWGGRAHVRSVLYMSAVSAMQHNPVIREFYQRLRAKGKCFKVAITGCMRKLLVILNAMLRDQTNWKPC

SEQ ID NO: 155664 - protein, 341 aa, unidentified
MKKFIRTSIDLGKSYFQVHALESEGGQSISRKMKRSKMREFYEQIEPCRVGMEACGSGHYWARELVAMGHEVVLIPPAYIKPYVKRGKNDAVDAAAICEAMSRPGMRFVPIKSADQQAVLMLHKTREMFVKQRTMSVNALRGHLAEFGIIVAKGIGRVDELLALAQSDAELPQIAKSAVAGLAQHLEGLDQSIEAVGDEIARAHKKNPTSRLLDEIPGIGVLIASVIASSVPDPSVFKTGRDFAAWLGLTPKQNSSGGKEKLGSITKQGNRYIRKMLVVGATSVMRVSGKRKGALADWINALQAKKPKRVAAVALANKLARICWAIMSTGEGFRVDTYVKA

SEQ ID NO: 155665 - protein, 349 aa, unidentified
MILVGCDLHTRKQQVALLNTDTGELWDQELSHDGDAVERFYATLPPPVTVGIESTGYSLWFHALLQRLGHTLLVGEAAKIRAMVVRKIKTDRRDARHLRDLLKDDRFPVVWIPDPATRDLRALIKHRLRLVRIRTMVKNGLHAIALNQRLALGPSLWSRAGLAQLHALVLPPHTRRRRDDSLELLQWLNGHINELDLHVATAAAADPDACRLMSHPGVGPLTALTTVLVLGPVGRFPNSKHVVSYIGLAPAVSASADKYRLGHISKQGSALLRWVLGQAAPLATRGDAALKRIYFAVLRRRGRPKAKVALARRLLIRLYVMLRDQIDYDEFCRRGRTQRPGLEPARIPV

SEQ ID NO: 155666 - protein, 326 aa, unidentified
MTHDSSSVTAVCFVGIDVAKHQLDLARTDSSEILTLANDPEGIGRIVDTLRSISIGVIVMEATGGLEQPLLVALLEAALPVALVNPANVRHFARGIGILAKSDSIDARVLAEFARLAQPRLSRKRSAHQSELDALVTCRRQLTHVRTEQTNRRQSTSSARALQAINAVLKVVNQQITDLDRQIKKLIESDDDFNSIDKLLRSVPGVGAVLSATLLAELNELGSTDRRCLGALVGVAPFNCDSGQHKGQRVIRGGRIQVRSVLYMATLAAMRFNPVIRRFAQRLSQAGKPAKVTITACMRKLLTLLNAMVRDRLNWEQLNVVKNLDL

SEQ ID NO: 155667 - protein, 342 aa, unidentified
MVVIGCDYHPSVQQIAMVDTKTGAYNEHRLKHSDGEAEKFYRDLKLHTPQIRAGLEATGHRRWFERLLMELDCELWVGDAARIATMRVRKQKTDRQDAELLLKLMIEDRFPRVWISSLEDRDLQQLLWHRHRTVQMRTRILNQLQSIAMNEGIQRRGGLRSVQGRKRLEQIPLGPWGARRRNDLLTLLDQMNERVNELTAAVQQEAEKRPEARLLMTHPGVGPVTALAFVLIVGYPERFQCGKQIGSYVGLIPAESSSGVHRRLGHISKQGNVLLRALLVEAAQAAARFDPEWHNKFSHLAMRRERKIAKVAMARKLAVSLYWMWRRQRSSQMASKVGSYVG

SEQ ID NO: 155668 - protein, 410 aa, unidentified
MEVILSCCAGLDVHKDSVEACVRRTSAGGKVEHEVRHWGTTTRELVEMSDWLSSLRVTHVAMESTGVYWKPIFNILEEHFEILLANAHHLKNVPGRKTDIRDCQWIAQLLQHGLLRGSFIPPRRQRELRDLTRQRTQLVDEASRISNRVQKVLEDANVKLGSVASNVVGVSGRLMLEAIVSGQDDPAQLADLAKRRLRAKIPQLEQALYGKLTEHHRWMLGLLLDQLKSTEQFIARLDERIAELTRPQQPVLEKLNAIPGVDRRVAEVLLAEIGPDVTPFPTDAHLASWAGICPGNNESAGKKRSGKTTKGSRWLRQALVQAAWAASHKKNSYFQAHARNLMHRRGRKRGLVAVAHSLLTVIYHMLKDGTVYRDLGPQFLDRLRATHLIRFHVRRLQHLGMEVSVTPAQA

SEQ ID NO: 155669 - protein, 433 aa, unidentified
MPTTHPYDLVIGLDRSDRKADLHLIDTRTGTVQKQTVATSPEALHDWLVQLRQNHPQARVAICLEQPAANLIVFLETYSWITLYPINPISLQKFREAFVTSRAKDDGKDAQYLAELLLSHPDKLKAWQPDDSQTRQLQQLVLHRRAVVDQRTGLTNRLKALLKQYFPQALDLCGEDLWRPLATAFLLKWPTLQSLKKARKESLKQFYYLQGSRSQTLIEQRLERIDKAVPLTDELALLQSYTLRVQLLCKELQLLLKTLQQFDQQIAKVFQQHTDRPIFEAFPGAGPVLAPRLLASMGSERERFAQPENLQSFSGVAPVTKQSGGTCSIHRRYLCPKFLKQSFHEYAKESILHSRWAAAYYGQQRNKGCGHHTAVRALAYKWQRIIWKCRQTRTIYKEAIYEAALKKNKSPLIGLLDQIELGKSPVKSRAKKS

SEQ ID NO: 155670 - protein, 355 aa, unidentified
MKFYSKQHKYYCGVDLHARNLYVCIIDQKGVIVKHKNIEATPEAFLNIIKGCRKDIVVAVECMFAWYWVSDLCKMENIPFVLGHALYMKAIHGGKAKNDRIDAHKIAVLLRGGMIPMAYVYPSEMRATRDLLRRRNHLMRKRAELLAHIQNTNHQYNLPRFKKSICYRGNREGIAEQFSDECVQKSIEMNIALIDSYGYLLRKIERYLCKKAKIHDMDSFVRLQSIPGIGQTLSLIILYEVHDIKRFPRVQDFVSYSRLVKCAKESAGKHYGHSGGKIGNAHLKWAFSEAAVLMLRENSDVKKYKAKLQRKHGKAKALTILAHKIGRAVYYMLKRKEVFNTDRFLNKQLIQTGRA

SEQ ID NO: 155671 - protein, 349 aa, unidentified
MNATTVAVDLAKNVFELAVADTEWRIIERHRLSRARFARFFIHRPPCQVVMEACGSAHHWARRILAQGHTVRLLPAHYVKPYVGRSKTDRADAVALIEAARSPRIREVPIKTLEQQQLQSLHRLRSQWMSTRQRYLSTLRGILREFGIMIALGPSVAKAQIGAALAAADSGIPDGLRSALAEMLQEIAPLEQKILSVERQLTALTREDERVQQLREIPGVGLLTSTALLSSVGDIQRFPSGRHFACWLGLTPSERSSAQRRRLGKISKQGDVYCRTLLVHGARSALLAARRAQRAGKPLDRLRCWALNCERERGHNKATVALANRLARIVWASWKYQRSFDGNWGNQAP

SEQ ID NO: 155672 - protein, 450 aa, unidentified
MREPREIEDREDELAVARVAAVDVAKASAVVCTRVPREGGPGRFVTRVWPVGATTNEIIELAAHLAGQRVEKVVLESTSDYWRPFFYLMEAAGLHVELVNARDVKNAPGRPKTDRLDAVWLAKLAGWGMLRPSFVPPAEIRQLRDYTRLRTDLTRERTRHWQRLEKLLEDALIKVTAVASRIDTMSVRDMVEALIAGQRDPRKLADLARGRMKAKRAALIEALTGRFDAHHGELAAILLAQIDGLTAQIGALGARIEELIAAIPGAQGVDADGTTGPQAGRGPDAAALPAIDRLQEIPGISRHAAQVIIAEIGLDMTRFPTAGRLVSWARLCPRTIQSGASERPGKTAKGNPYLKGILGDAAAAAAKTATFPGQRYRRLARRRGKLKALVAVARTLLIIIWHLLADRAARFEDLGDDYYLTTIDTDRRARSHIRQLQALGFTVTITPAAA

SEQ ID NO: 155673 - protein, 465 aa, unidentified
MSKPIIIAADVSKGYGDFIAIDSDKKVLVELFQLDDNNGGHSSLTDQLNLLRQNHQCSRILFAVESTGGLEDNWLRLVKKAPLSSFVEGYRINPKLTHHEYRIQKRNSVSDRVSSLTIAHHVAKNLDTFSPSEIVETPDYAAARSLIRHLVGLAEQCTEHKNSLQQLLYQYYPSLVRFVPKAWSRYFLNILVIYGSKQSIQSAASRGFKQVSHVPKGKAAQIHEAFKDGIDLEETPLLVVATVKSKARKILELQQEIKELESLLCQAAPVDKKQVELLCSMKGMGRGPATILLCFIEDVDRFEDASSMAAFFGVQPRVKTSGDGKVTIGMSKQGSGIVRRELYLLAFRSLRNLPYLKSIYAKFRKKGMVHDEALGVLMHKLLRMVYGMLSSGTEFDPGIDQLNQVAPRDKQTDISNAQGEPAKKDPKRRLQASTSSAPLSARERRKRKKDQESQAATKAEIAGSS

SEQ ID NO: 155674 - protein, 365 aa, unidentified
MEFFSGLDVSIDETAICVVDDKGKVHLQTAVATDPEAIVRVLKPFLPNLRRVGHEAGSLSPWLHPELKARGIPAVCLETRHVRAAMSAQRNKTDAADALGLAHIVRTGWFKAAFIKSEPCYRMRLLLSQRRNLKRKFLDIENSIRHSLKAFGIRLGGTSRGAFDQAVREAVAGDKLTSQLMDAMLIARAALWKEYCRLHNLVVKFVARNELCRRFMAIPGVGPVTALSFMTAIDDPSRFRRSRDVAAYFGLTSRRWQSGSSIDVQGRISKAGDPDVRRALYEAASAMLTRFKGKDKVKAWGQSLAKRGCHHKAAVAVARKLAVIMHAMWSDGSIYMGDPTATQKEVLARAKVKDRQLLGALARPE

SEQ ID NO: 155675 - protein, 351 aa, unidentified
MNVQHHYIGFDVHKKSIYYCVKLIDGTIVEEGKLAARRATLRQWASKRSTPWHGAMEATLFSAWIYDTLKPYAAKLEMGHPARMKAIGASKKKNDKLDARTICDLLRCNLLPTCWVAPAEIRELRRMLRYRNLVVGQAVRMKNKIGGLLMESGAEYNKRRLHGAKYFGELMENLEEVPESVKKLLQLSRGSLEAFQATQQQLLTQLRTHPQLAERVERLKSIRGVGDVVALTWALEIGDPKRIPSIGDGVSYCGLTTALVESANKQKRGPISKQRNVHLQVVLIEAAKLAPQWNPQLKEVHDKEIQQGHRNRATLEVARKLVAYLLAVDKSGKPFEVRTAAKPAKEVEAAA

SEQ ID NO: 155676 - protein, 481 aa, unidentified
MSRRKMSTFERLQRGHKLSQRERKQLERQLRAEDPGWEIVHRNVAGIDVGNESHFVCVDPQRATPSVREFGSWTAALKETVEWLKSCGVQRVVMQTTGVYWIPLRDVLEQAGLEVAVVNARTTKNLPGRKSDVQECQWLRKLDIYGLLRASFQVPETIRAIRTLWRLRERWVQEAGRAIQQMQKALILMNVQLANAISDISGKTGMAILRAILSGERNPWVLAKLRDERIQASEEEIAHSLQGNWREDLLFELQQVMAAYDFQQQQIKDCDRELQKYMNLQPTRAGVGEGMPETEKAKPRRKQSRARKPRKNQPDFALEAELKRVLGADPTVIDVVNLMTIQTIYSELGADLSAFPTEQHFTSWLMLAPKREVSGGKLIKHSNLRGRNRVANALRMAAESLKESDSYLGARYRSLRGRLGAVKAVKAMARYLACLIYRMLTKGQAFVDRGAACYEQKRRERELSHLQRKAATMGLQLVPTK

SEQ ID NO: 155677 - protein, 366 aa, unidentified
MKKTSTVRVNGNMIFKGHKLTIGLDLGDRWSNYCVLDEAGEILLEQKLATTPEAMKQTFEKIPRSLLALETGTHSPWLSRLLKELGHEVLVAHAQKVELISKSKRKDDRHDARTLARLARIDPELLGPVRHRSAKAQIHLTVIRARAELVSVRTALVNAARGLAKSYGERLRKCGTAQVSRELAAELSAELREVLEPLLKEIESLNERIKEYDARMEKIARESYPQVALLKQVKGVGTQIALTYVLTLDDPHRFAKSRQVGCFLGLRPGRRDSGQSQPQMHISKEGDRYLRTMLVQGAHYILGPFGEDSDLRRWGLRLAERGGKNAKKRAVVAVARKLAVLLHRLWVSGEVYEPLRNSHKAMRAVA

SEQ ID NO: 155678 - protein, 467 aa, unidentified
MLSDAMQTLAGRDADIAAEAPGATSQRRVASCPVRERPRISWMRGDAPPRISFGRLRSRALGQAPPHRRREPGMIYAGVDIAKTDHVIGAVDERGAEMCPPMPFKNTEAGLERAVAWLEGLAGSPSDVVVGMEATGHYWMACYSFLVARGYSVAVINPMQVKAVRKLKGLDKVKNDRVDAGLIAEALRIGQYDETRLATDEMASLRSLSRYLQSLRGMVAELKTQCICLMDAHFPEYAGIFSDMFGAGSRAVLSKSPLPFELARRRADSLARDIAEASRRGGKSSGYAAKIKAAAKSSIGVRLGQEAASFQVKSLIRQIEFADSECAGVEARLRSLLDEVEPLVLTIPGVSYVTGAQIVSEIGDVSRFRNAPALVSYAGLNSSVSQSGQFDSGGGPITKHGSPYLRRALWLAANRARQYDPGLRAFYDRKRAEGKPHRVAVTAVARKLCHIVFAVMRDQVPYDPGRE

SEQ ID NO: 155679 - protein, 342 aa, unidentified
MDEYDGRQFVGIDLHRQRSVIVRQSESGEQLSAVRIVNEPVALELQLEQAGADPEVVLEATYGWYWAVDVLQACGARVHLAHPLGVKGFRYRRVKNDVRDAADLADLLRMGRLPEAWIAPPQTRELRELVRYRAKLVAIRSGLKAQIHGVLAKAGVLIAVSDLFGVTGRQRLAKVPLGPAYAQRIRSLLELIDILDSHEARFAVMIAERLATHRGYQAIQQVPGIGPTLAAVFVAEIGDVHRFTDAAHLCSWAGLTPRHRESDTVVHRGHITKQGSKAVRWAAIEAVQRHPTTAKIAADKHRIEARRGKNIAKVAAARKLLTLIYYGLRDGQIRALDRARPA

SEQ ID NO: 155680 - protein, 357 aa, unidentified
MQKTYRLQEYVVRGKEIFVGLEDSKRTWKLAVRSEKMTIHQVSMEAKYPVLIGYLRNKFPECMIHLIYEAGFKGFNLYDQLTEDGIDCVVIPPHVVTEPKVSRIKTDKRDARRLAKVLEDHDFQDSCYVPDKERREDRQVSRTLIALQKDIVRTRNRIRKLLQFHGIEVGFPDRWGRDEFRALKKLEVSEPLRISLDIFLAQLEELWTHQLSLRAALRKLCHKERYRKAFTIARSLPGIGWFTAIRFVLELGEDLSRFTSGKKIASFVGLTCSEDSTGETEHKGRITGMGSGFIRSTLVENSWMSIAKDPVLLAKFTRVWHASGSRKKAIVAVARMLIVRYRACLMSGTPYVIGVAA

SEQ ID NO: 155681 - protein, 396 aa, unidentified
MISVGIDVSKGKSTVCIMKPCGEILESPFDIGHTADELDSLISLIKSFDEETRVVMEDTGHYHLPVATYLSSHNIFVCCVNALRMKKFCSQSIRRAKTDKIDSIKIASFGITYWNELVKAYPSNVIYDELKFLARQYYQVTGMLVKSKVNFSNLLDQVMPKINDVLSNQGENHKLTEFVNRYIHFQNILNMGEMKFTSDYCKWAKKKGYRLNERKAAEILALAQNGIPTLPNSQSVKIAVSEAVKLIHSIEESRNTILAQMQDLCNTLPEYSVVKEMDCIGDTLAPRIIAEIGDVRRFKNKHSLIAYAGIDAPPYQSGAFHASERHISKRGNSYLRKTGYEIMQSLIKHKPADNAVYDFIQKKRSEGKCGKEAMIAGLNKFLRVYYGKVMEFYSEH

SEQ ID NO: 155682 - protein, 360 aa, unidentified
MFCERTSVGLDVHARSVVAAAIDGQTGEVFRARLTPSHVEVVEWIGRLPGPCAVVYESGPTGFGLARALTAAGWRCEVAASSKLQRPAGDRVKTDARDAFHLARLLRLDEVVSVRIPTQAEEAARDLVRAREASRQDLMRARHRLSKLLLRHGIVYSGGKAWTELHDRWLRQQRFDSMPTQAAFDDAYETVVLAKARRTRLDEKITALAADSEFTPLTRRLACLRGISTLTGFALAVEIGDWQRFTGASIGAYLGLVPSEHSSGESRVQGAITKTGNTHVRRLLVEAAWHHRTTYRPGVVLQRRWDQAPAAARARGHAGNQRLHARWVNLNLRKKRPVIANVAVARELAGWCWSLAVLPD

SEQ ID NO: 155683 - protein, 392 aa, unidentified
MFYIGIDVSKDKHNCFCCNDNLQPVFQFQFNNDSIGFNQLFEAIRSLDSPFDNIKIALEATGHYSYNITSFILDNSLPLAIINPLHSNLFRKSLSLRKTKTDKVDACVLARMLIAYPDLKFSTSLDDNDIILSELKSLTRFRLSLLKGLSKLKTSLSRIINIVFPEIEKVFSSTNSLYELLYNFPSAKEIANAHLTKLTNVLIKASKGHFSKEKAVQIKKLAQNTVGNSSYALTLELKHTIKLINEYNSSIDKIDKEITAIMDKIASPITSIPGIGITLASIIIAEIGNFDNFDSPDKILAFAGMSPTIYQSGKYVASSAKMEKRGSKALRYALYNAARLTSIYCPVFKEHLARKRSQGKHFSVAISHVVKKLVRVIYHLQTKNELFKNIIN

SEQ ID NO: 155684 - protein, 375 aa, unidentified
MGNHSEAFVAFDTSKLRNAVAIAEAGRAGEVRFFGEIENVGAATAKLVKKLAAKYQRLTFCYEAGPTGYGLYRQIKSLGHECVVVAPSLIPKKPGDRVKTNRRDALSLAKLLRAGELTAVWVPDRGHEAMRDLTRARETAMMDLRSKRQQVSAFLLRQGLHYSERKKTWTKTHMNWLASQKLEYVEQRLVFEEMMLAVRQAQERLERLEQAIRVAVPDWSLAEVITALMAMRGIDLISAATFLAEIGDLSRFQHPSELMGYLGLVPSEASTGDKIKRGSITKTGNRRARRMLVECAWSYQHPPRVGQDKQEKVAAAPRAVREIAWKAQCRLHGRYRALVRRGKLKTVAVTAVARELAGFIWAVSRAITTARAVTK

SEQ ID NO: 155685 - protein, 367 aa, unidentified
MKGLDDMLAIRVKPAYDGGVSISEGGLAMLYVGLDIHKKYVYAVAVDEAGNKLCEARLDNEQRALRQYVCSLPERAKCVLEATLNWAFVYDCLEGYADSIVLSHPKRTKAVASAKVKTDRIDSTVLAQLLRMDFLPTAYVPEKKVRDLRDLLRHRASLVRVRTAAKNRAHAILAGYGIRFPGSDLFGKAGRVFLSELRLRPFHQLALEDNLRLIDMLDERLKQVTQQINVLARGDQRVTWLTSMPGIGYYSALLILAEIGDITRFPTDKQLCSYAGLVPSVHESGDHTRYGHITKEGSSWLRWIMLEAAQQAARKPGQLSRFHARVARKHGRKAAHVALARKMLEIVHHLLTHQECYQEQTSVVSET

SEQ ID NO: 155686 - protein, 346 aa, unidentified
MQHYVGLDVSLRQTAVCVVDQTGKIRREGMVASDPEAIAEFIGKHAPDVARIGLETGATSNWLWTELKKKELPVICIDARHAKAALKLQINKNDRNDAVGIARIMQCGWYKEVRVKDLDSHAIKALLVSRALLVGMKRDLENQIRGLLKNLGLVIGRAKMGTFTARATELIGDKPVLTAAVEPLLKAREAIERQIGDLDRKVMRLARNEPQVRRFMTVPGVGPITALCYLATIDDPTRFDKSRNVGAYVGLTTRRYASGEIDRTGRISKCGDALLRGYLYEAANVLLTRVAKWSTLKAWGMRVAKRSSLSKAKVAVARKLAVILHRMWIDGTEFNWSTKEAAAQVA

SEQ ID NO: 155687 - protein, 394 aa, unidentified
MKLVGIDIGKHKHFVSIVDKLTGEIILQPVAFSNNAQGFEFLISQIALYPVDSVLIGMEDTGHYHFALLRFLLQKNYNVALINPKTTDLNRRMDGGITKNDKLDTLNICDILSSNKLKKPYRLTSSKKFDLYEQKQLTRLHHSLKEQINVLSNRLQKCIDLVFPEYNSLFKSKYGKVYMSILKQFGSAKAIAQADIRTLRKCFDITGRGNRISLTAEKLKESAKTSVGISSLADEMQIKHLIAHIELLNDQLKEIDKKIEEFSTDLNSPIISVPGISHFSGTSILAEYGDIFNYSKPSKIIKAAGVAPFHYESSQYEAKHSAITKQGSSYLRKTLYQVIVPVIRFNKVFKDYYDLKRSQGKSHRCAQGHCIRKLLRVIYHLVTTNQQFDASLLR

SEQ ID NO: 155688 - protein, 355 aa, unidentified
MNSEKYIGLDVHQATISVAVLDSTGKLVMESILETKAATILEFVAGLRGTLSVTFEEGTWAAWLYDLLKPHVDELVVCNPRKNALLKDGNKSDRIDARKLADRLRLNDLKPVYHGETGVRMLRELARSYLNLVKDQTRVMNRLKAMYRSWAIPCAGRDVYYARHRAEWLGKIREAGVRRRAEHLYQQLDMLQHLRQQARRELLAESRQHAITAKLRQIPSLGPIRSALAVALIRTPHRFRSRRQLWAYSGLAWETRSSGEYRCVEGQIRRSKKQISIRGLNKDHNHDLKGLFKGAATRASVQPGPFQDFYQRSLAKGIKPTMARLTLARKIAAITLTLWKKGENFDVEKLKSQAA

SEQ ID NO: 155689 - protein, 289 aa, unidentified
MTHHATTVAVDLSMTVFEVGIADRQWRVVERRRLNRRQFAHFLADQPASHIVMEACGTAHHWGRVAQGHGHRVTLLPVRYVKPYLRGNKTDRTDVDALLDAVRTGHIPPVVVKTAAQQELVALHRIREQWMATRTARINALRGFFREHGIPLPAGPRAALAAVPALAEQLPSQLALAVTSVYDDARSLETRITGIERQLAAIAKEHDTVQRLLEIPGVGLLTATALVGSVGRITAFRRGRQFASWLGLTPREHSSGPRRRLGSITKRGDVYLRCLLTDGTRGMLDGAQR

SEQ ID NO: 155690 - protein, 410 aa, unidentified
MAYKVAGIDVHKKVLMVVILEADDPAGEPQRRRFGTTTSELQNLSSWLRQQGVQQAVMESTAQYWRPVWYELEPYMKLSLAQASSNRAPRGRKHDFRDAERLVRRLLAGELTLSFVPEPEQRTWRMMTRARVQLTEDKSRLHSQLECLLEEMRIKLSSVVSDLLGVSGYRILRALAGGETDPRKLAALADDRLQCSEKQLIDALSGTFQRVHRQVLTLYLDRHQMMVEQIAKFDRLIAEALKAHQEAVARLAQAPGLGVDSAQQIIAEVGVDAGTFPTAGHLSAWVGTCPGLEKSAEENHSSRSAKGNKYLRRILNQAAHAAVKKKGSHFQTVFRRLLPRLGYNSAIWAVAHRLCRLVWKMLHEAVPYIERGSEPDARTKRQRARQLVKRLRQLGYEVDLRTINHTPAPA

SEQ ID NO: 155691 - protein, 435 aa, unidentified
MAKALNIINPHAAGIDIGSKSFYVDAGDESIKVFSTFTEDCHSLCSYLIQHGITTVAMESTGVYWVILYAVLEEAGIEVYLVNGRDVKNVPGRKSDVKDCQWLRSLHSYGLLRKSFIPPAAIRTVRSYLRLRQDHIRSAATQVHLMQKALTQMNLRLAEVINDIVGTSGLRIIEAIVRGVRDADELTSLCVDSILIRKKEQVKKSLTGYFSDEHLFALSQALRTWHYYHGLINECDTEIEKQLLSITKDKEDIIVNGKRKPIRYHKPAIKELHQPLLKLTGGKDPTAVAGITDYTFLQIVSEIGTDMSPWPTEKHFISWLKLSPLKARSGKMNKRVIMKKHNNAGQLFRNAAQGLMNSKHIAIGSFGRRIRSRRGSSVAIKAMARKIACYYYRVITKGEDFLEKGIHAYEQFLEERKRKQLEKAALKMKLKLVPA

SEQ ID NO: 155692 - protein, 340 aa, unidentified
MERYLGIDAHAKSCTVSVMSQAGKRIRQDIVETNGEALVGYLKTLAGSKHLCLEESEWSAWLYEILERHCVEVVVEHPQWKAGTKSDAIDSWGLADRLRTGQIEIEVYKAPRRFTKLRELTRTYEMLTDDVIRVKNRMRSMYRRRATPFPGYSLEAQSKGMATLPRWMQQPVEVLGIELASIEELRGEIEETMIAESHRHPISRILETAPGIREIRVAQMLPIVITPHRFRSKRQFWAYCGFAVVTRSSSDYVRDGSGWKRMLVRQTVGLNKNCNRTLKRIFKGAAVTVIRSRMEPLWSDYQGVLERGTKPNLASVTLARKIAAIVLAMWKKKERYAPQS

SEQ ID NO: 155693 - protein, 367 aa, unidentified
MSSVASQAGLIHLGMDTSKNTIMVATLLPGEESPVTDRVANEEAAVRRLVGRFADRSVLRCWYEAGPGGYELYRLLASMGVACQVVAPSLIPKGSSDKVKTDRRDSRRLARLGRAGELTPVRVPSPAEEAVRDLVRARGAVLEDRKRAQQRLTAVLMRHGRIWRGASYWTAAHRAWIAGQRYGEPALAAAISYYRATLAVREAELAAVEAELAPWAAREPLAGPVARLGCYRGIAELGGLTLAAEVVDWRRFPAARAFMSYTGLVPAEYSSGERTRRGHITKAGSEPVRTALTEAAWAYRHAPAIGAGLRRRQAGATPETLARSWTAQRRLHARYVHLVHDGGKAAPEAAVAVARELAGFIWAEMTA

SEQ ID NO: 155694 - protein, 351 aa, unidentified
MGEYIAFDAHKRYTWVDRADHSTGKSQGYRLEHAPGAVRRYLSACAAGTPVAVEATGNWYWIVEEIEQAGLQPLLVHPWKAKLLMGLTNKTDKLDAQGLNRLQRNGTLPTVWIPPGPLRDLRELTRTRLVLTAQRTRLKNRLTATLAKYGVPASAYSDAYGQRGRAELEQNLARLPEQTRWVSGQLLAQLDFVAAQVRQLEQRLEELVEVSAEMQWLMTLPGVGVLLAATIALEIGAVQRFPSAMHLASYAGTTPRVHASGGKVRYGGLRNDVNRYLKWAFAEAANSVAVNHTRCADRHVSQLYQRLRLRKGHAKAVGAVARHLAEAAFHVLRGKEMYRDPVLGRGRTSEV

SEQ ID NO: 155695 - protein, 321 aa, unidentified
MNTQPLSIGIDVSMDELVIATFDDIQPLIRIPNKPAAIKRWLANLPVQCTLGMEATGTLHRTLADLAFSAGHRVYVFNPKDVAFYLKSLRVRGKTDLFDAAGIARYTHNESAQCHPYAPLSEDHLALTTLIQRRHQVVKQRASLSMSFSQGDASCLSALSTLMKAFEALIAQIDQRLQDLMAADAVMQRKCKLLMGIHGVGPLVSTTLALRMSRIHYANSDALVAAVGLDPRPRESGRYVGTRQLSKRGNPEERRLLYMAAISACRNTPWRTMRDALLSRGLPRTAIYCIIARKILRVAFAVWNSETPFDPTLIGQPRTQT

SEQ ID NO: 155696 - protein, 316 aa, unidentified
MDEIVRFVGIDVSKDHLDIHLRPDDHQQRFTYDDDGLVALVAILNQRQPRLIVLEATGGYEQRVVAALAAQELPVVVVNARRVRDFAKATGQLAKTDRLDAAVLSDFGEKLRPELRTLPDAGREELKALLVRRRQLVDMMTAEKNRQTIAPALIRRKIQKHIDWLKKQLGDVDEDLASAVRNSPIWKAKDEILQSTPGIGPTTSTTMLAALPELGLLNRHTIASLVGVAPMNQDSGKLRGRRTIQAGRHSVRTILYMATLVATRHNPVIRAFYQRLLTAGKPKMVAITACMRKLLTILNSMLKTNSPWSPERAKTC

SEQ ID NO: 155697 - protein, 407 aa, unidentified
MDVVHLKCAGLDVHAQTVVACARLGSGKAVAYDRRTFGTTTPELLALSDWLTAHGCTHVAMESSGIYWKPVWHVLDGHFELVLANAMHIRNIPGRKSDLNDATWIADLLAHGLIRSSFVPPPSVQELRDLTRTRKQLVREIAQHTLRIQKTLETANVKLTSVLADILGVSGRAILTALIAGETQPERRAALASDQVKASRAELVAALHGRLTDHHRFMLRLHLDQIASLDVAVRDVEARLGETLAPFRAAVDHLITMPGVSETVARVIVAEIGFDMTRFPSAAHLVSWAGLCPRLHESAGKRLSNRTRSSNPWLKTTLVQAAWAAARKKDSYFRAQFLRIKSRRGPKKAVLAVAASMLTAAYHMLRNGAVYRDLGADHFDRHDKAKLAKRLIARLHDLGLVVDVRAA

SEQ ID NO: 155698 - protein, 383 aa, unidentified
MSANGITFVGMDAHKQAINVAMLLPGARQPAEWQVANEPAAIRRLAKKLEREAPGEVRSCYEAGPCGYALQRQLEAAAGVVCEVVAPSLIPVKPGERIKTDRRDARKLAELLRADLLTVVHAPTVDEESVRDLSRCREDAQQDLSRARHRMGKFLLRRALVFRVGKTAWGKLHRQWLRGLCFDHAADQGVFGDYLLAIEQLEERVRTLEAQLAEAAQRDPYREPVGWLRCFRGIDTVTAITLVAELHDFRRFRSARELMAYLGLVPSEYSTGDSRHRGSITKTGNRHARRVLVETAWHYRHRAKSGESLRQRRQGQPARVIALADRAQERLSRRFRYLLERGKPPQKVVVAVARELVGFLWAALVPITVTECRQPGSARHHDS

SEQ ID NO: 155699 - protein, 315 aa, unidentified
MNPEIVIGIDISKAHLDFGTVPSGEVWRESNEPTAIDHVAKRLVELAPKLIVMEATGGLEIPVAATLSRAGLAVVVVNPRQVREFARATGQLAKTDRIDALILALFGDRVRPQVRPLPDDLARAFDALLARRRQLVVILAQEKTRLKQARSRPVTTGIQRHIRWLEKEIKDVERDLTKNVRESPVWRAKDNLLRSAPGVGPIMSFTILADLPELGRLNRKQIAALVGVAPHAADSGTLRGKRIIWGGRACVRQPLFMAALAACRSDPGFRAFHQRLVVSGKPPKVALVACMRKLLTVLNAMVRDATPWNPTIVRI

SEQ ID NO: 155700 - protein, 318 aa, unidentified
MRIKERDLQARQQTLAMLDTGTGEVVNRTLPHEGESVREFYSTLPGPVRVGIEATGSMKWFLQLMQELGIDCQVGHPATIRAAEPRRQKHDQRDAELLLKLLVENRFPSIWQPSQELLDLRGLLLHRHQWVRLRTRIQNALQAIALANGLRRGSSLWSESGQRAIASLPLATHTAQRRSELQAMYAGFEAEIEQLKQQVLQQAGPRPTAGLLMTHPGVGPITALATDVFLGDPKRFSNGKALASYIGIIPREHSSGGRQRLGGLSKQGNPLLRLLWCEAAAHAVRRDPELRRFYRRKLVQKGLGKARVAAARKLGPGN

SEQ ID NO: 155701 - protein, 393 aa, unidentified
MRKPKKQKKPLNDLSRSPTPFDPNRSLIVVIELGKESWLVAGIVPGVERQPLKKLAADESGLLILLERWRAEAEKAGHEIDRITVAFEAGRDGFWLARWLRARGIETHVIHAASVAVPREHRRAKTDRLDTEHLKRAFLGWLRGERNHCKMCAIPTAVEEDAKRPHRERETLVGEQTTTINRIKATLARLGIRNFNPKLKKAPERLEHLRTPEGEPIPPNTLAELSRDMARKQLLTEQIKQIEKTRLEQLKEAPKAGPTLMVLVLVRVIGIGIETADMLVREILSRNLRDRRAVARYGGLTGSPDESGKSRREKGLARSGNARVRKGMIQLAWRFLDYQKDSALAKWFEARTANARGSRKKMIVALARKLLIALWHFVRDGVVPEGVILRPAH

SEQ ID NO: 155702 - protein, 343 aa, unidentified
MQAIKTVGLDIAKSVFQVHGIDVAGNVVVRRQLKRRYVLAFFEKLNPCLVGIEACASSHHWSRELQALGHTVRLMPPAYVKPYVKRQKNDAADAEAICEAVTRANMRFVSTKTPEQQSCLMLHRTRHLFIRQQTSVINAIRAHFAEFGIVAPVGRNGVEELLGVVADASDKRLPEVARACLLALGTQLRMLKTQILNFDRMITAWHRSNETSKRLDELPGVGPALATALVASVADPKAFRSGRDFSAWIGLVPKQNSSGGKQKLGSISKQGDRYLRSLFTAGALAVIRYAKIHGTEHRPWLTALLARRPTKVAAVALANKIARMAWAMMARGERYREPVALAA

SEQ ID NO: 155703 - protein, 339 aa, unidentified
MVEGTVGSHHKEGSRKMSKHSIICAGIDTGKRKLDVALNNSSERLQVDNSPDGHRALSAWLRQHRVKRVGIEASGGYEQEVVTQLRRDGFVVVVFQPAQVRAYAGFLLQRAKNDKIDAALIAVCTAAVKKIHAAPDPRLAPFAERMTLIEQLTDQIARCKDYRESCREPRRRQFWKEEIARFNRLLRAELKELVAAIRQHRDLAERLDLIKSVDGVGLKTAVAILVRMPEIGRLSREQAAALAGLAPYDDDSGERFGIRHIAGGRERLRGSLYNAALAAAFHWNPQLIAFYRRLTRAGRPHKYALVACARKLLIFVNTVVARGTPWVRTAAPSAGRETA

SEQ ID NO: 155704 - protein, 394 aa, unidentified
MYFVGIDISKYKHDCFIGTEAGEVIKDTFTFDNNRTGFDQFFSILDGLGPKNEIKIGLEATGHYMNNLMKHLSVKGYSFILLNPIIVSRFRHSETLRRTKTDKVDAKLIAQVIASKDFSSYPLQAYHFPDLKTLTRLRDRLIKQRSLYLVMLTNQLDLSFPEFKEFFDGRLKSKTAQFILTKYGISSRIANMNSQSFELLRKVSYGKFSYAKFANLKELAKNTIGCSSEIDEMLFALTINLYQLLDKTITEVESKITEIMEKLDSPTASIPGIGTMSAATIIAEYGDVSRFANDGQMLAYAGLDSGRYQSGTSDFPGRMVKHGSGYLRQALMNVAETCMMHVPSFYDYYLKKRNEGKSHRVALSHIARKLVRLIYKLETSHTHFDLSVFNSQHQ

SEQ ID NO: 155705 - protein, 352 aa, unidentified
MQHFIGCDVHTRNQVVAWIEEETGEIRKRRLEHEGQEVKEFYAQFPPGTVVGIEATFPAYWFERLMGELGHELWVGDAARIRASEVRYQKTDARDAEGILDLLRSGRFPRLWVPSLDERDLRQLLVHRMKQVRARTQVKNQLQALAISQGVCRKRKLWSAKGRAELEKLVLLPWAARRRKELLEWLDRLDEQVRELDRAVEEAGRARPEVALLRTHPGVGMVVGLAFVLSVGPVERFPNRRKLVSYWGLNPREDSSAGRQRLGSISKQGNTMMRWLLIEAAQTAARLDPRLRRTYQRLKHQRNSGVAKVAVARRLVVRLFWMLRTRHNYAQLVHMSGSPSSAVVPPQGGPKV

SEQ ID NO: 155706 - protein, 321 aa, unidentified
MMQLSTPRFNRVIAFEVAKQSLVVHALPEDRQRRIANTAGAVRKLLRTAIESGDGQILVVCEATGGYEKHVLAEACALGLACHRAHGARVRHFAKFMGAAAKTDAIDGRMLALYGQNAQNLRLYRPPAIEQKAVRALKSRRDELLQMMIGETNRIEHADHASVRASLRTHVRILKLQLARIERELAQIIDETPRLAEQARLMQSVKGVGSETAAAIIAYFPELGSLSKGQAARLAGLAPIARDSGKASAPRHIEPGRAALRRTLYMAAVAAIRFNPGLRAFAAKLKAKGKPFKLIAAAVMRKLVVILNAVLASGEPTRQYA

SEQ ID NO: 155707 - protein, 351 aa, unidentified
MPLMKYYIGLDAHSTTSTFAVVDENGQCILRETVKTSEQSLFHVINKVIGERHMTFEESSISQWLYLQLKDKVDNLLICNPTYVAKKQGAKTDFRDALHLANELRTNHLQPVFHDTSHWMEIRTTVSGYLDIVEEIVRFKNRLKAVFRAEAIQTDENSFYKNNSRVKELKNPAAKFVAEKLFNQIEFLENEKDKYKEVFERNRKKYRPIRNLMTIPGISIIRANIIAAIVCQPNRFENKHKFWGYCMLVRHIQISGGKIYGNKRFFGRRELRNVFLGAAENVMRLDGELRDRYDALRAKGADHKDAKVNLARQIASIALCLLKNNDKYNENYADYLKERKKLRKDFFEQSL

SEQ ID NO: 155708 - protein, 395 aa, unidentified
MSAEGEAIRSNDYRKDTTVKAPSTRPAAVLGLDVGKSSHWACLVDRDGEVLASAPVRNREAELDALFASAPAGTLVVVDQFRNIGSLAVRRARAAGLAVAYLPGLAASRAAGLFAGEAKTDERDAAVIARTALGVPDSLSGVPGRGEALEAARALSSQRDHVVACATRDKNRLRAVLLESCPALEAAVDLSDRRWLELLAGFGGAWGIARSGAGGPRAEAAGEAAAASTAPPPALVEAENRQVRFLAARISEALDEAGALEAETAALLEGDETYACLLTVPGIGPRTAAQLAVSVDIGRFPDHDHLASYCGIAPRVRSSGTSVRSVRASRRGDARLKSLLIFSCNSLVRSSGRYGEYYRACRARGMGHGRALKAVARRRLRAIYAVMRDRVPYRE

SEQ ID NO: 155709 - protein, 403 aa, unidentified
MNNVAGIDVSKGKSMVSVLRPFGEVVAKPFSVGHTGSELKELADYLKSLDGETRVVMEHTGRYYEPVARFLHDEGVFVSAVNPKLIKDYGNNTLRKVKTDKADSRKIARYGLDNWAELRQHTPMDTIRMQLKTLNRQQSLYTKTKTMMKNNLIALLDQTYPGVNALFDSPVREDGSQKWVDFATAFWHVDCVRNMSLTAFAERYRKWCKRHGYNFSQSKAVEVHAGAQDLIAMLPKDALTKTMVRQAIDALNAVSASLERLKAEMQALAAQLPEYPVVMAMHGVGDSLGPQLMAELGDVTRFTHRNAITAFAGVDPGADQSGTHEAKSTRVSKSGPPELRRALFLVMDCLLKTQPQDDPVYRFMDKKRAEGKPYLVYMTAGANKFLRIYYGRVKEYLASLEGN

SEQ ID NO: 155710 - protein, 409 aa, unidentified
MQVLYERCAGLDVHKDTIVACVRCVSVPLHQEVRSFGSTTAQLLELADWLGEHGCTHVAMEATGVYWKPVWHILEDEFELVLANAAHIRNVPGRKTDVNDAMWIADLLAHGLIRSSFVPPQQIQQLRDLTRTRKQLVREVSQHSLRIQKVLEDANLKLGSVLSNVLGSSGRAMLDAIVAGQSDPARLAELALGTARNKTAELREALRGRITEHHRTMLKLHLQVVDALQRTLAELDANVGKALAPIQQRAHLLTTMPGVSDLTASVLVAEIGVDMTRFPSAGHLVSWAGLCPRNDESAGKRRSTRVRKSGTWIKTTLVTAAWAAVRVKSSYLRAQFLRIKARRGAKKAILAVAASMLTAAYHMLRDGTEYADLGAEYFDRQDKSKAIRRLLKRLQDLGCDVPEVLHATV

SEQ ID NO: 155711 - protein, 413 aa, unidentified
MNSYKIAAIDVHKSMLAVVVTDAAVEGELPFQRRKFGALGSDLKALAEWLAAQQVQEVVMESTAQYWKPVWRRLEGQCRLHLAQAHSNRARKGRKDDFRDAERLARRHLARELILSFVPDPEQRLWRTLTRSKHQLTRDRVRLHNQMEALLEDARIKLAACVTDLLGVSSRRMMEQLAQGETDPARLATLADPMLRATPEELSDALSAAPEMSTLHRQILRLFLERLELMERQMAVLDRNIAAALQLHQDAVVRLAAVPGLGADSAQQIIAEVGPQAATFSSPQELASWVGVCPGREESAEVSKSDESPKGNQTMRRVLNQAANSARKTKGSIFQSLYQRWVSRLGHNKTIWAIAHRLCRVVWIILHRGEPYIEFGNSRDPRSAAKRTARLIHKLRSLGYQVTPPTPTPRVAG

SEQ ID NO: 155712 - protein, 370 aa, unidentified
MDHHSEAFVGIDTSRLRNAVAVAEEGRGGDVRYLGEIDTTEAATRKLVAKLAAKYRQLTFCYEAGPTGYGLYRLIRKLGYDCIVAAPSLIPKKPGDRVKTNRRDAVGLAKLSRAGERTAVWVPDERHETMRDLSRAREAARKDLKGKRQQVSSFMLRLGRHYPGKKTWGPAHMNWLMLQKLEHREQRIALEELLGTVRQESERVERLEQAIRDAVPEWSLAEVVTALQAMRGIDLVAAVTVLAEIGDLSRFQNPRELMGYLGLVPSESSTGDTVNRGGITKAGNGRARRILVEAAWSYRHPPRVSREKQIKVAAAPRAVREIAWKAQMRLCGRFRSLTRKGKRPTVVAAAIARELSAFIWAINREVMASR

SEQ ID NO: 155713 - protein, 422 aa, unidentified
MSKKRNKVCGIDVHKRFLVASILDNEGNCETKRFEQDLDELISLKNWILDSGCESVAMESTAEYWRPAYGILNPEINITIGNAYHMKGIPGKKTDVLDSQWIAELELNNLITPSRVFTGDLYELRTLTRARNKMVNNSTVFKNKILHQLDVCSIRLCTVLKDVFGKSGYALLKGIVERKTQDEIIKALPAKTRKIAPVFFEQIPEYIPDSAIFLIDSMLKIYDNLQVEIKRIEERIKFYLKDKENELRILMSVPGIGIVIGSNLLAEIGDIRDFPTADKLAKWAGLTPSVYQSANTNYTGPITKQGSKYLRWALIEAAHSAIRRPGKLNDYFNGLLPRKGYKKAIVAVARKILRIVWHLLINNEIFEDGIPRVKTVKIPKFPEKIERVGIAKIIQLLSRGAEIIVQEEGKEIMRINGLSQPT

SEQ ID NO: 155714 - protein, 364 aa, unidentified
MQKISTVCRSGKNIFKGQLTIGLDLGDRSSAYCVLNEAGEIVLEHKLATTPEAMQQVFGSMPRCRMAMETGTHSPWVSRLLAELGHEVIVGHAQKVRLITKSRRKDDRLDARTLARLARIDPELLSPVKHRSAQAQLHLAEIRARAGLVSARTALVNAARGLVKSYGERVHKCDTRQFRRETSGLSTGLREALEPLLFQIESLNESIQKYDRRIEKMAKETYPQTSLLKQVKGVGDLIATTYVLTLEDTHRFRKSRDVGCFVGLQPGRRNSGESEPQMRISKEGDRYLRALLVQGAHYILGPFGEDSDLRRWGQKLSARGGKNAKKRAVVAVARKLAVLLHRLWVSGEVYEPLRNSQKAMSPAA

SEQ ID NO: 155715 - protein, 387 aa, unidentified
MPQPNDLSRSLVALDQDSTIIAVVEMSQSSWLVGGVLPGIERQPRKKLEPSPERLLALLHRWRDESVRAGRTITRIAVAFEAGRDGFWLARWLAARGIEAHVIHASSVAVSREHRRAKTDRLDTELLKRGFLGWLRGERGHCTMARVPTIAEEDAKRPNRERDCLVGERTRIVNRIKSTLARLGIRNFKPTLRKAAERLAAVHTPEGVPLPPNTLAELQRDMARLGFVVSQIQEIEKARQKRLEQHPETGPDAMVRRLVCIVGIGVETADMLVHEVLSRPMRDRRAVARYAGLTGSPDESGARRREQGLARAGNARVRRGMIQLAWRFLMFQNESALALWYRARTADSRSGTRKTMIVALARKLVIALWRFVTTGEPLEGVVLRPAS

SEQ ID NO: 155716 - protein, 451 aa, unidentified
MKKETVKKGIVKMGTGLPVFNPHAAGIDIGDTLHCVAINDGNGGHEVKTTSAFTCDLQEIVGYLKYNGITTAAIESTGIYWLALYIMLEEAGIEPYLVNAKHVKNVTGRKKDDTDSIWLQKLHTCGLLQKAFQPDNEFRTLRNYVRQRANIISLGSDAVRRMQKALELMNVKIHTVISDLLGKTGMNMVIAIIAGERDPIILSTLCDPRIKASKEEIIKSLEGIWKEEYLFMLEQAYEHYGFHQKQLKDCEEKIKQQLLKQVAIVQDGDITSFEVLTQKKTKAKKNQFNFEVSPYLIALTGVDLCKIPGINEVTALELIAEIGNDMSKWKSAKHFAAWLNLVPNTKITGGKVISSKLQKKKNKAGQCLRQAASTLSNSKKPIGEYYRRMRGKLGGKGATVATANKLARTVYTMINKKTEYDEFLLNQNQEKYKNEKIKKLEKQLFRLKQAS

SEQ ID NO: 155717 - protein, 345 aa, unidentified
MGFFAGVDLGKRKSQIKIITADRRVVEDLKIENDPRTFLRIFKKYKGDIDVACEASSNAFWLVDILEPFVRSIQVGHTSKIRWIAEARIKTDKLDAGILAELLRVDLFPAIAVPPKRIRDLRELVRGQIRMRRQSVRCRNQVHGLLCRQGVSYKRSEMAGSKLTELVTTTELPGPARIAAQAILRVEKSIGDEMKLLQAAIKDELKSDPKLLEVIALLESIPGVGFFSALLFVVELWDITRFHDSAHLASYVGFVPSTYQTGQTLWQGKMTKQGNVLVRWVLVQDAWSAAMNNPFFGRRYEYYKAKKGKARAIVPVARALLNTIHRVWTEKKTYSELYEKKTLVG

SEQ ID NO: 155718 - protein, 412 aa, unidentified
MKDLLEISCGLDVHKEKIVACILTGPLGKPTRSEIREFSTLIPDMIALRNWIVSKNCHHVAMESTGIYWMPIYEILEDAFSGDITLLVVNARHMKNVPGKKTDMRDSEWISTLLRAGLLNGSFIPEKRIREFRDLNRYRKSVIRDITSQKNRIEKFLQSSGFRLSSFISDIFGASGRNIILHLMEHGQIDKAALDSCLKTKTRNRIDEILMSVNGTLSEHQKAFLRILMTHYDSLKKHLAEIETSLEEDMAPFALQVEQLNSIYGISTTASCAIIAEIGIDMKPFKTAEHICSWAGLCPGNNESAGKRKSTSVTKGNPYIKSMLCEIAWVIAGKRNTYLSAWYWRIKQKKGAKKAIVALARKLLVIIYTMLKQGTVFDESCFETRRKHCEQKQLSRYIRELEKHGYHVEAQS

SEQ ID NO: 155719 - protein, 342 aa, unidentified
MTVTIGIDPHKASHTAVAIDDSESVLDEYRLRACSDQSDQLRAWAAAFPDRVWAIESARGLGYLLAQQLVAAGESVVDVPAVLSTRARLLGSGRAQKNDPNDARSVAIAALRNRGLTRVRLDDHAQVLRLLAKRHRDLAQSRAETASRLHALLMEPQPGGMAKRMNVTRANAILDAISIDTAIVEHRVGVARELVADLVHIETQMKASKARLRRAVAAASTSLTDIRGIGVFTAAMIIGHVGNIDRFATAAHFASYNGTAPIEASSGDRRRHRLNPRGNRQLNFAIHVAAVTQLRYPGEGRDYYDRKRAEGKSTKEAIRALKRQISNAVYRSLVSDARRRQA

SEQ ID NO: 155720 - protein, 289 aa, unidentified
MLADDVVFVVGVDTHSETHTLALLDTRTQRTRQNVTIPATRRGYWQALRLARRQAPGKRAWALEGSGSYGAGLARFLRERGEQVLEVERPAREGSRGRLKSDALDAERAARAVLSGTSGSAPRLGCETQALRALLVAREGAVQACTAALNQLHALLVTAPPELRERLQGHTRTALLERCSRLRPGTADWERAALALALRSLARRVHQLQTEADTLEQELTRRIQTLAPELLARPGVGPISAAALLIAWSHPGRLRHEAAFARLAGAAPIPANSGKTHRHRLDRGGDRRL

SEQ ID NO: 155721 - protein, 371 aa, unidentified
MNDFSKYVGLDVHKETIAVAVADAQGGEVRYYGEIANTPEEVVKLVRRLRKEGEKLSFCYEAGPCGYGLYRQLKDLHQDCQVVAPSLIPKKPGDRVKTDRRDCITLARLLRAGELTSVWVPDEVQESLRDLTRAREDMKHLQQKARQTLLAFLLRHGRRYPGKKHWSQAHFRWLETLKFDQPVQQIVFQEYIDTVQAMTKRVANFDAQIETSGSESVFSKHIEGYMALRGVDRLTATTIVAELGDLRRFPDAPQLMKYLGEVPSEHSSGSTKSRGGITKTGNGHVRRILVEAAWTYRHPARKSPLLQRRAERTPEAVQEIAWAAQKRLCARYRMHESRGKKKVQVCTAIARELTGFIWAIGQILPPPAVKA

SEQ ID NO: 155722 - protein, 341 aa, unidentified
MKTHTPTQPCSRYCVGLDISSQTFTVQLLVEGTPVGKALDFANESKGYKQLLQWLKTHDVPLSQTHAVMEATGVYWEECALYLHEKGIRVNVVNPAQIKAFANMTLRRSKTDRTDANLIARFAATMPLPLWEPPSLEMEALQITMRHREALIAMLTEEKNRLHALERRPGTPKEVLKTVKKHIAFMQQQVKDLDDTFKKKLKEQPEWQECYELLQSIPGVGGIIAAVLMGETGGLASFMEPRQLVAHAGIAPQQHESGTSVKRTACISKIGNARLRRAAYMAALSAIRCTGPLKDFYQRLTARGKAKKLALVAVARKLLILAFKVVRSGKAYDPQYQAQNA

SEQ ID NO: 155723 - protein, 383 aa, unidentified
MESPIVSIDVSNGNSHYMCFIKNNKRFGKVKKIDHDIEGFKRLLEDIQKLEAETNEKVCAVFEATGVYTKPLERFLSKNSIKTYIINPLESARKRKEEIHNKKTDKLDPISISKVYYDKEEMMELKKKDETHNWLRKKNRLYEDQLNHLRKYKVTFQNQLSICFPGYLDLFKDGYSDIPMTILKKYPHPDLLKNKKAETVARYLEKNTCHTHKVSLEYALKIIEFAKKTYPGCEKDDVEVEIFKILLDKVIETQRECEKTLNEMITVASTLEEYRYISSIDGIGPNLAARIIAEIGDIEEFKSREALVAYAGLDPHIYQSGDQDGKHLKISKKGNKYLRCLLFLAVGCSIRGAKDNPVNRFYQKKKQQSNPLNSKAAKTACTA

SEQ ID NO: 155724 - protein, 482 aa, unidentified
MTKRTIFPYQSQELNTLFKEAGNNAKVMCIPIDYAKKEHVVMFCNGHGNILRKPFPVKNSPKGIEYLTQQVLSSCHHRGIDPKYAFFGGEDVGSYAENFINTLRYGGWIVAGVNAHDAKKQRANVQASTDKLDLMGIASMLLNRRANCSPAQTGIYRNLRGLTRHRKKLVDMSTEEKNRIYTVVDQIFPGFLDEKNTGISPFSNSSLYLMADRFSPAQIRRRKRQKLIDTLRKYGTVKPEVGADKLQLYAAHVLNTPTEYLSALQISLAQHIKHFKCLQESIEQLEKEMALWLAQTQGAFLTTLRGIGIVLAAGATAEIGDPTKQKPVANLVSYSGIIPRVKQTGGPEGQTRTGKVSKRCNRILKNYVVQSAHHIGLHGPEDLMADYKRRDANGQHADFGIGRRYIRTAMCLMRNSQIYIPKRLCSKGINPEERAGYFLMIWPSLRDKWAKLGALETAFTNDNPLGRWRNMVQELYEIKLKL

SEQ ID NO: 155725 - protein, 316 aa, unidentified
MKIIGIDISKQWFDCFCFSKGGRRFANTPEGWSCFAKWAGKKVWVVMEASGPYYLGLASWLHERGTSLSVVNPLVIRRYSQMKLARTKTDAKDAELIAGYGVEQQPTSWSPPSRVCLQMRQLMSLREGLVRQQGILRGQQEAFSQGPVAEELTQQILAEQAGQVERQVNRIDRRLKQLATMHYAELMEALQTMPGIGPKTAILLLILTDGFTRFQSARQLASYVGICPRVWQSGSSIQGRGAICKLGAAHMRKLLYMCSWTAKLYNPACRSLYERMATKGKPERVIKVAVAHKLLRQAFAVGKKQEPFNEKLAMVA

SEQ ID NO: 155726 - protein, 352 aa, unidentified
MDITLGVDSHKDSHTIYAVNAVGRPLDQVTVANDSDGYESAYQWASQQATARRWGIENCGHFGRGLAQYLLGQGETVVEVSPHLTGRKRNRSRKAEKSDPNDALAIARIVLQEDDPLPAIQPEDETTKVKLLVEQRDNLVGERTRLLNQLHGHLHEIDPHYKENLGQLDQAKVLKRCKAYTLRGADAVSQIRITIIRQLATLILQLNTQIKALEKLLTPLVLILAPALLTIQGIKEITAAQLIACVGNIHTVPAASTLAHYAGIAPIKSGSAGNYYYRVNPKGNRRLNAVFHRIAKTQARCNPLAKAYLQKKKGEGKPHKQAFRCLKRRMVDIVYAVWKSGQPYAPPIPKFA

SEQ ID NO: 155727 - protein, 334 aa, unidentified
MENIALIGIDLGKNSFHIHCQDRRGKAVYRKKFTRPKLIEFLATCPATTIAMEACGGSHFMARKLEELGHFPKLISPQFVRPFVKRNKHDFVDAEAICEAASRPSMRFVQPRTESQQAMRALHRVRESLVQDKVKTTNQMHAFLLEFGISVPRGAAVISRLSTLLEDNSLPLYLSQLLLKLQQHYHYLVEQIKDLESQLKRKLDEDEIGQRLLSIPCVGTLTASTISTEIGDGKQYASSRDFAAATGLVPRQYSTGGRTTLLGISKRGNKKIRTLLVQCARVFIQKLEHQSGKLADWVRDLLCRKSNFVVTCALANKLARIAWALTARQQTYVA

SEQ ID NO: 155728 - protein, 302 aa, unidentified
MHYLYYVGLDVSKVVAFEDANEMAHRKFANSRKGICSCLHWVEKRHGIRLDDVIFCAEDMGSYISEMAVCASDRTLNFNFSLISPLVIKYSMGIARGKTDRVDARRIAEYAITHYRKIALYLPAEKELCQLRTWLILRAHLAKQRVAKLVLLEKLDYKEKFADVSIQRSMLQEEIAYAETHMKTIEREMKELITADSNICRNYKLLTSIKGVGPITAIVMLCSTLNFTKITDHRKFACYCGLAPFEHSSGTSVCGGCHTSSMANRDIKVQLNRRALIAIRCDPQLKAFTNAKWLKVNINSAS

SEQ ID NO: 155729 - protein, 348 aa, unidentified
MIWIGVDAHKRLHEAVALSESGVMGSRRIRNDPPQWAALLDWARQWPERVWAVEGAGYLGRGLAQFLVEHGEEVHEVSGKWTARRRRGMRRPGKSDRLDAHSVATLLREERTTLPRVYAEDDELASVQLWSRLEQEFSEDRTRILNRLHNLLLLCDPGYTAGLPALTTKAGIAAARTYTAPGTRAVAREREQAVRASAEQVALLDAQIAALRRKLGRASRSSFRALGAIEGVGPQIACTIVAELGAPRPGFGDEQLAALAGVAPLEASSAGATRHRLNRGGNRRLNLALHRIVLTQARMYEPARVYLARRRAEGRTAREARRALKRLICRRIIQAWRACFEQPLAPAA

SEQ ID NO: 155730 - protein, 339 aa, unidentified
MKKSTTIGLDIAKSVFHLYAVNQMGRFEKKKQLKRKQVLAYMANMEPCLIAMEACGGANYWAREFIAQGHQVELIAPQYVKPYVKGNKNDYNDAEAIAEAVQRPNMRFVPIKTVEQQDIQNFHCQRERIKKDRTALVNQVRGLLAEYGIVINKGVSAVRRALPEILEDAENGLTLIARELFAELLEELRDLEQRFKRCDRRIQSLNQENEVCQRLDGILGIGPIIASATYAAAGDGKNFVNGRHFSAWLGLVPGQHSTGGKTVLLGISKRGNAYLRTLFIHGARATLRHSANKHDSFSRWAQSLLERRGHNRACVAIANKMARMAWVIMAKGETYRAFT

SEQ ID NO: 155731 - protein, 371 aa, unidentified
MYIIGIDIGKNHHEASIVSPEGKQIGHSLRFATTHKGADSLMNFIFKNIGNSPCVFGMEATGHYWYPIYSFLKARGYTIYVINPIQSDSLRKMYIRQTKNDSIDSFLIAEVIRFGQFTTTSMADENILAMRQLCRYRDSVISSRTEIKLRISTIIEQIFPEYEKQFSSLWLSTSMGILEKYLTPENIENAPIDELFEIIKDKSHNRLTKAKAISIKEAAADTFGIKIAQDAFSFQLKQLIDRMNFLDKQIEALDCQILEYYEKFDCYLHTIPGIGMIAAATILAEIGDINRFKSSSALVAFAGIDPTVRQSGEFSSPHNHMSKRGSPYLRHAIFLAATARSFHNSPLNAYYKKKRDQGKHHLTATGAVARL

SEQ ID NO: 155732 - protein, 342 aa, unidentified
MYYIGLDVHKKTISYCIKDVGGQVQWEGTIPATRTELDSWMKTLPKPWTVAMETSVFTGLVYDHLLPQAAQVKVAHPVMLRAIAAAKKKNDRIDAGKIADCLRCDFLPECHMVSTEIRDRRRTLRYRHLLVRQMVQMKNRVSGLLLETGVSHNKQRLHKVKYFRELLATNKEVDESIRPLLKLSRESIERLQKTDYALVSSLERDPLLAQRLKNLRTVPGVGPITALTWAVEIGDVSRFQSVKQAISYCGLCGDEKSSADKVLRTPLSKQRNKHIQRVLVEAAKLAPKQSHELALVYEKAKQKGNTNRATIAVARKMVTYLLAVDRGQRSFVPVEDFSTAVA

SEQ ID NO: 155733 - protein, 407 aa, unidentified
MIFVGDDWAEAHHDVCLMDDTGEIVGYSKLPEGVVGIGRFHELVADLVSEPSEVVVGIETDRGLWVDALVAGGYQVYGINPLAVARYRQRHHLSGAKSDRADAKLLADVVRTDRHNHRPVADDSDLSQAVKVLARSHQDLIWERQRHVNGLRSKLRDYYPAGVELLKEVPVRDAVAILGRAPTPVEGRRLSKPQITAALKNAGRQRNLERWSAEIQQILRTDHLDGSAVVASAYGGTTTAAVAIITTISRQIDELAETLEESFRTHPDAAIYLSLPGIGDVIGARMLGEFGDDPNRYADVKSRRNYAGTSPVTRQSGTTKIVTARWVRKRRLYDAIDQWAFTACNTSPGARTLYDHRRGQGDRHHQALRAVGNRLVGILHGCLRTGTLYDEDTAWAHRQPTETVKAA

SEQ ID NO: 155734 - protein, 322 aa, unidentified
MSLPGPLCIGIDVSKATLDIAASSAIEPFSVSNDTDGFDSIIAELRKHSVALVLMEATGGLEAAVACALQAEGFELAVVNPRQARDFARAMGYLAKTDRIDARALAQMAEVINRHPERSRFIRALPDAERQVLNAMVVRRRQLIAMLVAERNRLHPVHPQSRKSINTIIKALEDELARIDDDMNNHIRSHFKELSERLSSIKGVGAMTVAVLLAEVPELGHLSRREISALVGVAPVNRDSGTMRGRRTIFGGRAGVRTALYMAALVATRFNPVIKAFYTRLVAAGKPKKVALVACMRKLLTILNAMLRKNEEWNESYHHVVP

SEQ ID NO: 155735 - protein, 411 aa, unidentified
MIKENYIYVGIDLHKETHTAVMIDCYNQKLGEITFPNRPADFPKLVAKVKKCNTDGKTIVFGLENAYGYGRALAVWLIDKGYLVKDVNTAISHRQAKHRGAMYRKSDSDDAEAIALATLNMLDKLPDAYPNDAYWSLGQLVHRRDNIMKQRTRLVNQLHEQLCIAYPSYKQFFNDISRPTALYFWEHYPSRKYLKGKSVEDLRAELVPVSHNKCSTRTCEKILDAIAGDKVKNNAYQDARDMVTLSIVSDLQHYDKQLAEVDKMLEQMYKMLGCTLTTIPGVNVITAVKILAEIGDIKRFSNANKLAQFAGIAPLHLSSSGKGKDLATKQGNRRLQATIYFLAIQMVQISSKGTPRNPVVRAYYEKRKAEGKTSQQALICISRRLISIIYGMLKSGTESRMPVMENTGETV

SEQ ID NO: 155736 - protein, 360 aa, unidentified
MLYLAIDQHRKQLTVEDRNEAGDVTVKRQISTKWDRVRAFFEEYRRRAGPEGGFVAILEVCGFNYWLVRLLREYGCREVILVQPEKRSKQKTDRRDASALAELLWVNRERLLSGKRVQGVRHVEWPTEQDAADRQLTVLRYRLGQLRTRTINRIKHLLRKHNIEQECPTKGLDTVKGKQWLAAVTLAAVDRLEMDLLLAQWKAWDEQTKTLDDAIRKRQTAHKTAAVVASIPGCGAYSSLALAARIGSIERFARPGSLANYWGLAPGCRNSGEVTDRLGSITKQGSMMARFILGQLVLHVLRRDAWMRAWYGRIKRRRGAKIARVAVMRRLATIIWQMVKNNEGYVVGGPPRRKLVGQAG

SEQ ID NO: 155737 - protein, 332 aa, unidentified
MENCIGIDVSKASINIHISKNGQDLKVDNSVKGFRSLHAKLKKIYKKEIEDIVFIFEPTGSYSEALRKYCSEQKIKCFIVNPKQFCNYAKALGVEVKNDIEDARVLSKALHLAKDGQVKIPVYDEDVERIKELMSYYKFTTKQTTQQKNHLESLTSKEGDSFAIRELRKSIKESKIKEQRIIEQIQTIIDTHAKYKNDYENIISIMGIGQIGAIALLHLFLKYPEANQRQLTSLTGLNPIYKQSGTSVQSGYKISKSGAKVYRGSLFMAAMCAIRYDANFRTFYERLKANGKQTTQAQIAVMRKLIITAHSLYKNNRKYDVNFNLNVVKKVA

SEQ ID NO: 155738 - protein, 408 aa, unidentified
MRVIGLDVHRSMAVVAILENGNLNSGGRIDLTRDAVIAFGRKLRSDDEVVIEATVNTATIVRLLRPFVGRVVIANPLQVRAIAHAKIKTDKIDAAVLAKLHASGFLPEVWMPDEATETLRRLVAQRTQIVQQMTRVKNRIHSVLHANLIPPFAGELFSIAGRRWLEAQPLAQDEKLAVRRHLADLDHRAADLAALEQALAKRALQDERVERLMTISGVHVTVALGLLAAIGDISRFASPENLVSYLGLNPSVHQSGNGTAHHGRITKQGRRHARAMLVEAAWAARRAPGPLRAFFVRIQNRRGKQVAAVATARKLAILAWHLLSKAENYTWARPALLQAKLRQVELLAGQPAAKGRKPGRAHAYNSRAVRDRERAWLEQTEQAYTRFVVNWQTKPTRRTGAANGTRSS

SEQ ID NO: 155739 - protein, 357 aa, unidentified
MPSSDVKYIGLDVHKEAITIAVLNGDGKLVMESVIETKASTLVQFLDGLRGELHVTLEEGTWAAWLYDVLKPHVREIVVCNPRRNALLKEGSKNDKVDARKLAELLRTGMLRAVYHGENGLRTLRELARSYEVVSKDLRRVMNRVKALYRGWGIPCTGMQVYSRRHREPWLNKILEPGVRRRAELFYQQLDGLQTLRRTVRGELLAESRKHQAVKVLRQIPFIGPLRAAQLVALMQTPHRFRSKRQLWTYSGLAVETHDSAQYRYVDGQLQRSKKPQQVRGLNQNHNHAMKEIFKGAALNAALRAGPFKDFYEGLLARGMKPELARVTLARKIAAITLTLWKKGECFDAGYVKRQAV

SEQ ID NO: 155740 - protein, 331 aa, unidentified
MKQYDHYVAVDWSKNNMAIARMTKHADIPKVVDVRTDVEDLKAYLKNLKGSVILTVEESTPAQWLYTELNGLVSRMIVCDPYRNKLLNDGPKTDKIDAKKLVRLLKAELLREVYHSGEEFIKLRKLVRGYMAITKNGVRLKNQRAALLLSAGRMNEDIEIVERHEEFAVRQFDSIISSNEVSRTAYVKEFKRLKRKNKIIKTITTVSGIDVKGAVKLVAVVVDARRFKNKSAWLSYCGLIKHEKMSGGRSYGRRSPRYSRIAKSVFKTAAIACTRMDEKSAFKRYYEGLIRDKNYPEFHARHALARRIAVITLGVLKTGKPFEDRWNEIKK

SEQ ID NO: 155741 - protein, 377 aa, unidentified
MIRRACCSRLDGRDRADDACAHPGLTRHMGQHDSPANPGGDRVYAPYALDQLGRRLGEIELATTRAGYQRLLAWAERLGAVEAFGIEGTGCYGAGLARHLRARKVCVIEVMRPNRQTRRRKGKSDPTDAEAAARAVLSAEAAGSPKAGDDLVEMIRVLRVARSTAIKARTQAINALRSLLVTAPPELRDELRALSTSRLVTKAAQVRPGERLNTLAASKLALRHLARRCQALQAETQSLDAQLAQLTATASPHLGEAFGIGADTAGALLVAAGDNPERLRSEAAFSMLCGSSPIPASSGQTRRHRLNRGGNRQANAALYRIVLVRMRHHQPTKDYVQRRTNEGKSKREIIRCLKRYVAREVYTALKRSSDEKRARAA

SEQ ID NO: 155742 - protein, 429 aa, unidentified
MSYRIAGIDVHKKMLAVVVSNVEVESEFQFERRMFGGNPEQLRLLAAWLLEQEAEEVVMESTAQYWKPVWGALERYWKPIRENREGAKRRSGTLHLAQAQSNRGRRGRKKDFVDAERLVKRLVARELTLSFVPDAEQRLWRAVTRKKYQLRRDLVRLNNQLESLLEETHIKLSSLVSDLLGVSARRMLKALADGETDPAALAALAHQRLRATPEQLCDALGACTDLKPVYRRLLKMTLEQLQLLEQQIGQLDQELATLLHPHQDAVHRLAEVPGFGVDSAQQIIAEVGPTAATFPSEKCLSSWVGACPGDEESAGVNYSHQSPKGNRHMRRLLNQAANAAVKVKGSIFEVIYRRCVPRLGHNQAIGVIAHRQCRLIWLILHNGALYEERGPAVTMQSKYKRTWRMIRQLRQLGYRIDPPNLQPSQAQAQ

SEQ ID NO: 155743 - protein, 366 aa, unidentified
MKKISTVQALGNEIFKEQKLTIGVDLGDRWSFYCVLDEAGKIILEQKVPTTPEAMKQTFSRIPQSRIALETGTHSPWVSRLFTELGHEVIVAHAQKVQLITKSNRKDDRRDARTLARLARIDPELLGPVRHRSAKAQIHLTVIRARAELVSARTALVNAARGLVKSYGERLPQCGTQQVSRELAAKLSTELRDVLEPLLKEIESLNERIKEYDERMEKIAKEVYPEVSLLKQVKGVGTQIALTYVLTIEDPHRFLKSREVGCFLGLRPGRRNSGQSQPQKHISKEGDRYLRTMMVQGAHYILGPFGEDSDLRRWGRKLAERGGKNAKKRAVVAVARKLAVLLHRLWVSGEVYEPLRNSHQAMRAVA

SEQ ID NO: 155744 - protein, 434 aa, unidentified
MKKHAYRARNINQFSFEKLQGRLRGERIIVAVDVAKHDFAAGIAGDDGLVLEHFKFKHPKQTHQFLDLLEQPRRLGSRVEVVMEPTGTYGDAVRYQLSARGIPVFAVSPKRCHDAAEIFDGVPSLHDAKASTILARLHAQGLSKPWPEGESSRRALRAIVERRELYHDPLERDRGRLEGILSRHWPEYGEHLDPQQQKTALALLAEYPGPATVAQNAEAASEFMVRTSRGNLSRDKIAGVIDSAKTTLGTPMVEQEQTLLKELADQMLALRGELDRIDAQIEELIQSEPEAATLASTVGAVTAAVLIAMLGLARSYPSAGAYVKAFGLNLTEHSSGQSKRPGSGLHISKRAPGIVRKYEWLAVLRLIQSEPLARAWYEGRKAFQCDQKPKAVVALMRKHVRALWHVGKGEAFDVEKMFDTARLKVPVAAQAADG

SEQ ID NO: 155745 - protein, 397 aa, unidentified
MSKVFVGVDVSKDFSTAQGVDKNGKKLFYLRFAMNAGGFSELLKAMMKCSENIKEIMAAMESTGCYHINLFSFLSSQGVSCAVVNPLLITNFARLSLRKTKTDKKDAHTIAQFLLANEKALSAIAFSQDTQDIKDLSRERESMTVLISGMKNDIKRLLQGTFPELEKLCSPYGETMLHFLKRFPSARLVRAAKQRDIDKALICPDEKRKRVTVSADDIIAAAKSSVASSGAAKELILSEKISTLLYLQEKNKRITEVLIETCEALMIEKLDIIRSIDGVNDITGSTFLAEIGDINNFTSYKHIIAFAGLDPSIHQSGQYVGRSTISKRGNRHLRRIIFLMTLCAVKCKNTFREYFLRRKQEGLPPKKAILATAHKLIRVIFAMLSNKTLFRKGVAAE

SEQ ID NO: 155746 - protein, 346 aa, unidentified
MFYCGIDIASKSSYLYVTTKTGRKVASGEVETTREAFERRLKRYAKDRLAIAIEAGNQTAWIYDALVAMGAKVTVVNPTKVKLIAESRRKTDKIDAKTLCELLRIDALPHPVHMPGKQARELRGLLVARRQLISARTKLCNVVRGMVRQEGTLLPTRALSTLIGWKDLLGKGFNWPHLAVIVATYFETFKALTTSIHEIDRELAQCERKDKRAARLQTMPKVGRIAALTFLAAVDDPKRFPSARKLVGYSGLAPTVRSSGERTEYGSISREGRRELRGVWVQIAHLVAIDHSRATQPLRTWFNRTAKRRGKKTATVALARRLLVIAYHLLRDETVYDATRLKRRAA

SEQ ID NO: 155747 - protein, 369 aa, unidentified
MTFFIGVDLHKTQFTVHVRTEEKVESLDQIKQYPTTTAGYAEFLSRIETYKATGAALKIGVESTGNTRFFKNQVEKAGAEVTVINTLKFKVINESTKKTDKHDASTISEFLSKDMLPESYLCGKETENIRRLLKSRERLVRSTVGQKNEIHALLVSLGLSDELRSLQSKKGRQKILDTLESNNDYVLEAQSVKLMFEIIERIEESVKIIEKQISELTKDDEMVNRLMTIRGCGKITAWTVRAYTEDISRFATAKKYAAFCGLVPWVQDSNETIHHGKITKRGPQELRTCFVQLVLGIRRCKDTSEWRMMQRYEYMKKNKGSGKSIVAAARKMAEIVWAMLNDKQDFDSAKMIGRYKPMILADKALTAMN

SEQ ID NO: 155748 - protein, 346 aa, unidentified
MIIVGCDFHPTWQQIAVFDSETGEITEHKLIHGNGEAEQFYRRLPIASRIGIEACGNSQWFVDLLQRLGHEVWIGDAAQIRASYVRKQKTDRRDAAHILRLLIEGRFPRLWTPSAEERDLRQLLVHRHKLVAIRTRVKGGLQHLALNRGLQKKSKLWTAAGQKALRELPLDTWAACRREDLLGLLASLDKQISKLDAAVERAAEEHPQARLLVTQPGVGPITSLAFVLTLGDVSRFQRGKQVASYLGLIPRERSSGGKQRLGAINKQGNSLMRTLLVESAQSVTRLDPGFRKQYLHRCHRMAKGVAKVAAARRLAVRLFWMLRTNTEYPEIVRIESSPTLAVVSES

SEQ ID NO: 155749 - protein, 352 aa, unidentified
MKQANKVDFTGQTIYVGLDVHRKSWSVSIYLEHFEHKTFTQPPKVEALVSYLKRHFPGATYKAVYEAGFCGFWIHDNLRKNDIECIVVNPADIPTTDKERIRKSDRIDCRKLARSLRAAELQGIWVPSRTQAEERSLVRTRQAMVKKQTRCKNQIKSMLYLYGLQLDPDKSWSGRFIRSLEALRLESESGNIALKIHLAELVNLRQLIAKLNRDILALSRTERYSESVKLLISVPGIGTINAMILLTEIGDINRFQGLDRLASYMGITPESRSSGETQSPGDLSRRGNRHLRYLLIESSWIAVRKDPTLAAAFNKMCLRTVKTKAIVKIARKLLNRIRFVLGNKVQYVPMAA

SEQ ID NO: 155750 - protein, 410 aa, unidentified
MRVIGLDVHRSFAEVAILENGTIQHAGRFKLEHWRVIAFGKTLKRNDEVVLEATGNTSVIVRLLTPFVRRVVVANPLQVRSIAWAKVKTDKIDAGVLAKLHASGFLPEVWIPNEETEALRRHIAERNQLVSQMTRLKNRVHSVLHANLIPRYAGKLFSERGRTWLDTQPLPEDQRRQIGRHIDEHDRIAIELVALEKNLAENALRDDRVKRLMTIGGVNAIVALGVLAAIGDVARFSSPQKLVSYFGLNPKVRQSGDRPAYHGRISRQGRAHARAMLVEAAWSIATQPGPLRAFFNRVKQRRGQQIAAVATARKLAVLIWHLLTNEEDYAWTRPALMQWKIRELELRAGRASRRGGNKPGPARDYSLKTVRDKEREWLGLAEAGYRRFVSAWKEKPPTRRPGAAKEVRRS

SEQ ID NO: 155751 - protein, 408 aa, unidentified
MNAVGIDVSKGKSMVAALRPMGEVALLPQEFLHTEVGLEQMAYAIIALGEDTRVVMEATGRYHEPVAAALHEYGIYVCVLNPLFIKQSGGGSIRKVKTDKADAMKIAKYGLDNWVDLREYTPMDTVRQQLKLCSRQYNLYMKTVVSLQNNLISLTDKTFPGVNELFSSPERADGHQKWVDFVMTFYHCDCICRVSENAFAERYQKWCKRKGYHFSAEKAQDVYLGSCGHFTTLPKNDNTKLLITTAAQQLLAGKMTLAALRTEMTRLAKQLPEYDIVRAMYGVGETTAVQLMAEIGDVRRFPRRSSIVGFAGVDPAVDQSGKHSAKSVPTTKRGSPHLRKTLYQIVCTYLKKSPVDEPVYQFLDKKRSEGKPYFVYMTAAQNKFLRIYYARVKECLEAFDAQQDTSQR

SEQ ID NO: 155752 - protein, 390 aa, unidentified
MIYVGIDIAKLNHFASAISSDGEILMKPFKFTNDGDGFQLLLSKLETLALEDDSIIIGLESTAHYSDNLVRYLVARNFKVCVLNPIKTSSMRKNNIRKTKTDKVDTYIIAKTLMMQNSYRFVTFYDLDLMDLKTLGRFRQKTIKQRTRLKIQLTSYVDQVFPELQYFFKSGLHQKSVYALLKEAPTPEALASMHMTHLAHLLEVSSHGHFTKEMAKELRVLAQKSVGASDSALSIQITHSIAQIELLDSQLKQVEAEMTDIMKFNDSVLMTIPGIGYINGGMILGEIGDINRFSSPGKLLAFAGLDPSVYQSGNFQAKRTRMSKRGSRVLRYALMNAAHNVVKNNATFKAYYDAKMAEGRTHYNALGHCAGKLVRVIWKMLTGKLEFNLN

SEQ ID NO: 155753 - protein, 457 aa, unidentified
MGRKGKRTEGLEEAHPFTGMSQVNPHACGVDIGAVEIVVCVPGDENTQVVRAFGNYTVDLQAIGKWLTEYGVKTVAMESTGVYWIPLFEELERQGFECLLISSRSLRRVAGRKSDITDAQWIQTLHSYGLLESSFRPQAELVALRTLLRHRGQLVEHRSPHILHMQKALLQMNVQLPQAVTDITGVTGLTILRAILAGERDPQELAAMREPGCKKSAEEIGKALTGTWREEHLFILKQSLEMYDFYAQQIQACDEEIERVYGLTRPDWEAGEVKPLGERKRSSHSKNRPHNPEAIRKHLKRISGVDLSVVDGFGVSLAQTVIMEVGTDMSKFPSEKHFCSWLGLAPKHEISGGKVLKNKTLKTKNRAGQAFRMAAQSVKQADCVFGVTYRRLKARLGPAQATVATAHAIAKVVYRMLKYKVEYETISVEEYEQKYRDQQFKYMRKKAAKLGYQLVPA

SEQ ID NO: 155754 - protein, 345 aa, unidentified
MATYYIGADVHSNNTEMAVEYRHKVVARYSVPTTIPAISNVLVSIQGKKILAIEEGPMAGWLYRNLKDRVEEFIVSEPRRNKLITYDGDKDDKIDAAKLAVLLRGKFLKAVHHTNDKDRAYLKHWINLYHDRVRDAVRYINKIRACCRMHGVATPRKVIHNNADLHYWLSSIDNSVLQTQLQMLWIGYEATREQVQIARKQLNSSARKYRTIKHWRQLPGIGLIRAATIFAYLDTPWRFKKKSKLHKYCGVGLERTTSGKDNKGRIKPARLRLPNTVNKRLKDAVLGAATSAINRRMDNVFKDYYERMLSNGITPANARHSVARKMISVMSGMWKANSVYDPKLV

SEQ ID NO: 155755 - protein, 414 aa, unidentified
MQDLLEICCGLDVHKENIVACLLMGPLEEGLRPCSEIREFGTQLNDLIALRRWLEEHGCCHVAMESTGIYWQPVYAVLETAFSDEICLLVVNARHMKNVPRKKTDMRDAEWIATLLRAGLLNGSFVPERDIRDLRQYTRYRKGLIRDITSQKNRIEKLLQSSGFRLSSFLSDIFGVSGKAIMCQLVEVGVITSERLEMCLKGRARHKSSEILSSLNGTLSAPQRKLLKMQLAHLEDLQNNLQETEEVIQADFSQFECPIQLIDTFPGIDLTAANAILAEIGRDMTVFPTAQHICSWAGLAPGNHESAGKKKKQGITQGNKYLKTILCEVAWVVVAQKKLYLSKWYWRLKQRTDAKRAIVALARKILVILYTMLKTNQPYDEQRFSERQEATSKKRICRMVNELTGLGYVISSPA

SEQ ID NO: 155756 - protein, 428 aa, unidentified
MSENSTTHPEPEFVAFVGIDWADQKHAWCSQRAGATQREHGEVEHTPEMVEVWVSQLAQRFGPGPIAVAVEQVKGALVYMLSKYECLHLFPVPSTMSASMRKSLYPSGSKDDPRDAELLLDLLLQHRKKLRRLTPDDEVTRRIQNLVEERRTLVDEKTTQLNRLTGYLKVYFPQMLEWFEKLDTQLVCDLLERWPSLEELQKVPPAELRKFFGQHRGRHQELTERRLEGIGQAMPAIRDRAVLEAKRAMVQVSAQLLRILLEGIANLDSKIEEAASAHPDFFIFESLPGAGSALAPRLLAAFGSQRDRYGSAEEVQTHSGIAPVMEKSGKKKWVHFRWACPKFLRQSFHEWAGHSISQSTWARAYYQQQRGRGKDHHAAVRALAFKWIRILFRCWQDRVAYDENKYLAALARRGSPLSSVLTVTAATL

SEQ ID NO: 155757 - protein, 352 aa, unidentified
MKKIVVGIDISKEKIDVSAIDVRESQTGMVKLDYQVFENRPLGFRRMLVWARHLIKGIGLEDILFCCETTGGYDRCLCDYIYAKGLYIWREGALQIKRSMGVRKGKDDKADSLMIAEYAMRHMDKAVMYETPSETIRELKALFLYRHKLVQEKAEKKVRASHLDNTAAKSKSMRFILRDAKKSVKALEKSIEECEKQIMELIEGDEDLKRNYGHIVSIKGINIVNATAMIAYSNNFKGITTANKMASYYGVASFREQSGTSVDKKACVKYYSSSLLRATITQAAEWTIKENGIYHDYYLRLKADGKPYGIIINNVKNKLIHLVYSLVTNDIDYENNHEFLRAKRKCEQAESD

SEQ ID NO: 155758 - protein, 420 aa, unidentified
MSPPGASEPASELLLQYLLQHLLVQTQLSDPLLQPLILILQLPQTPQLRHAQPGKFFLPVNGMDYLLPLRLTVRNVLTRRITMNIVFPGIDLAKNVFQLCGLNQAGKPVYTKRTGRKELLQTLANIPACLIGIEASTGAFYWQREFEKLGHKVKVISPQYVKPFVRGQKNDGNDAQAIAVALMQPTMQFVPPKSPEQQDIQALHRARQRIVNHRTATVCQIRGLLLDRGIPIGSAVSRARRAIPLILEDAENGLSSRMRRTIAELYDLFNDLERRIHFFDKEIETVFRQSEACQRIAKVKGIGPKTATAVVAAIGKGTEFKNGRHFAAWLGLVPRQHSSGDRQVLMNMTKKGDKHLRTLFIHGARAVVRVATNNNDGHMNQWVNQLKERRGFNKTTVAVANKNARIIWSMLRNETEYQVV

SEQ ID NO: 155759 - protein, 339 aa, unidentified
MKSVHTIGIDLAKSVFQLCAFDKAGKKIINKVLRRNQVLRFLSNLEPCLIGMEACGSSHYWAREIKKLGHTVKLMPPQYVKPYVKTNKNDAADAEAICEAVSRPNMRFVSVKSEEQQALLLLHRERDGVVKERTALINRIRASLQEFGVSIPAGRYRLRIWFREDFSLIEESLPKVLCHHVKSMQLRLIDLENYIESLDDHIDGASQESSECQAIREIPGVGRLTSSALVASVGDAKAFTSGRQLSAWLGLVPSQHSSGGKSLLLGISKRGDSYLRRMFIHGARAVIRHLKPGKPFYEWVMSLQSRMHKNKVIVALANKLVRVVWAVLARDQKYKAEMI

SEQ ID NO: 155760 - protein, 356 aa, unidentified
MSRDVKYIGMDVHKEATVIAVRNSRGELVMESIVETESSTILQFIHGLRGELHVTWEEGTWAAWLYDLLKPHAHEVLVCNPRRNALLKEGSKTDRIDARKLSELFHAGMLGAVDHGENGVRTLRELACMYQTVSQDLTRVMNRVKALYRGWGIACAGTQVYAPRYREEWLQKIEPAGVRRRAELLYEELDGLQALRRKVRPELLTESQKHKAAKLLRQIPCIGPIRAARLIALMQTPHRFRSKRQLWTYSGLGIETRDSGQYRFVDGQLQRSKKPQQVRGLNRNHNHEMKEIFKGAATRASCGVGPLREFYGSLLDKGRKPEMARLTLARKIAAITLTLWKKEERFDAEQLKTQAA

SEQ ID NO: 155761 - protein, 428 aa, unidentified
MKYTQNEKILQVTEKTLVVGVDIAKERHVGRAFDFRGVELGKRIEFENRKEGMEKFLDWANKIMKANGKENVIVGIEPTGHYWLCFEQYLRENGIKVVLVNPFHVKRSKELDDNTQTKSDIKDPKTIAMLVKDGRYTEPNIPEGIYAEMRVAMNIYERLQKRLSVLKNQIINWLDIYFPEFLEVFSDWEGKIAIATLREMPLPCDVVEKEVEGIIEYWCNKVDKRAISRRRAMDLVETAKRSIGKKEGRKLARQEIKYLLSQYELLKKQIEEIEGEMAELLREVPNGEELLRIKGVGVKTAVGFISEVGDIRRYEDARQIQKLAGLNIVENSSGKHKGQTCISKRGRGRLRSSLFKAMITIVAKNEEFKQLHRYYTMRQNNPLKKKQSLIALCCKLIRIFYAILKKGIKYDGNKMLSDIKREALARTA

SEQ ID NO: 155762 - protein, 353 aa, unidentified
MAHTAPPQVTIGVDTHKDLHVAAARDQLGRRLATTMAPATSAGYAQLLAWAQGLGEPVTWGVEGTGSYGAGLARFLCAHGQRVLEVNRPDRAARRRHGKSDPVDADAAARAVQAGEATGTPKAQDGTVEMVRSLRVARQTAVKARTQAINAIKALLVTAPDELRERLAGLSTTRLIRQAAAMDPDRLATPTAAATLALGGLARRYQHLDAEITLLTGTLDQLTATAAPKLRALLGVGPDSAAALLIAAGDNWQRLHSEAAFAALCGASPVEASSGKTRRHRLNRGGDRQANAALHRIVIVRLRWHQPTRDYAARRTTESKTKKEITRCLKRYVAREVFAVLHQTGEQSLTTAA

SEQ ID NO: 155763 - protein, 353 aa, unidentified
MTTTFTKEYDTFIGIDVDKSNFSFTIIDNDIMKKPKTIPSAPEQLYNYIRKHYPDKRVLCAYEAGPTGYGLYDHLALNECECLVVSPNTIPKASNEKVKNNNMDSRKIAENLRAGRLKSIRVPVGSYRELRNLVKIRENYADARKVAKQRIKSLLLHASLYQFIKEPDKSWSNRFIQDLKQIPCTDAVRTRMYMLLMDLDYARNQLLESHRYLRKFVNNTADIHRNIEFALSIPGIGFITAVTLLAKSGDPTHLQNTRELAGFIGLTPTEHSTGDTEHRGPISHLGDSKLRILFIEAAWVAIRRDAELRHFYHRIASRNHPKGASQKAIVAVARKLTERLYRVLKDQRKYLVH

SEQ ID NO: 155764 - protein, 379 aa, unidentified
MDHATTGTLAEIVLHGALELSKNSWLLALQFSDRAQPSLYPIRGGDTEGLMTKLMAARDRWAKVSGKAPSIVLCYEAGYDAFWLARFLKARGIECLVVDAASVQVNRRARRAKTDRLDVRMLLRALIAWDHGERHVWSVVRVPSVDEEDLRRSHRERDRLVRERTAHINRIKGLLFGQGIRGINVKSKYKTLQIDKLVTGEGRPLPPRLASEITREIARLALIQEQIVALERERDQAPTPCKVTEKKRVQLMCLTGIGPAIAAVMTREVYYRQFDNRRQVAGFLGLATSPHDSGDVERSQGISRAGRGQVRGAIIQAAWLWLKHQPKSAITRWFVQRTAGHSGRIRRIMIVAVARKLAIALWRFLEQGLVPQGAMLANR

SEQ ID NO: 155765 - protein, 457 aa, unidentified
MARKGRRTKGKEEAHPFMGMSQVNLHAAGVDIGAVEIVACVAGDGNTQIVKAFGNYTVDLQAIGGWLKEHGVETVAMESTGVYWIPLFEELEHQGFECLLISSRSLRRVAGRKSDIEDAQWIQTLHSYGLLESSFRPQAELIALRTLLRHRNQLVEHRSPHIQHMQKALLQMNVQLSQAVSDVTGVTGQTIIRAILAGERDPQKLAALREPGCKKSEEEIGRALTGTWREEHLFVLKQSMEMYDFYTQQIQACDEEIERVYSLTRPDWGAGELKPLSVRKRNSHSKNRPQNPESIRKHLKRISGVDLSTVDGFGVSLAQTVIMECGTDMGKFPNEKHFCSWLGLAPKHEISGGKVLKNKTLKTKNRAGQAFRLAAQSVKQADCVFGVMYRRLKARLGPAQATVATAHAIARVVYRMLKYKVEFETISVEEYEKKYVDQQFKYVKKKAAKLGYQLVPA

SEQ ID NO: 155766 - protein, 324 aa, unidentified
MTLPCLGLDIAKVKFNACLIREGGKLRHKVFPNTEAGCSQLSAWLSQQGVGRVHACMEATGSYGDSLAAYLHEAGHTVSQVNPAVIKAYAQSHRSRTKNDRIDAALIAGFCAERRPLVWHPLAPELRELQALVRRLDSLVELRTMEENRLSSGIAVEAVRESVEELIAHLSGQIKRTEALIRSHIDNHPGLRQQRELLDTIPGVGEATAAVLLAEVPDIKEYRSARHVAAFAGLVPRERQSGSSVRGRVRLSKIGNARLRKALYFPAVTAIRCSPFFQQWAEGLRQRGKSKLAVIGAAMRKLIHLAYGVLKTGKPFDPEWAKSA

SEQ ID NO: 155767 - protein, 447 aa, unidentified
MKTEPEEIPDADHELIIERVAAIDVAKASGKVCLRLPRPGRPGHRVSRVWDVEATTAAVCELADHLVAGQIERVTVESTSDYWRIWYYLLEAAGLSVQLVNARDVKNVPGRPKSDKLDSVWLAKLTEKGLLRPSFVPPAPIRQLRDYTRLRVDLTRERSRYWQRLEKLLEDALIKVSAVASTLDTLSVRDMLEALIAGERDPRRLADLARGRMKTKRAALIEALTGRFDDHHGELARMLLDQIDALSGQINTLTIRIDQLLATIANEVPGHDDGDSGAGGQPSADLTVVQRLTEIPGIGPTGAQVILAEIGLDMSRFPTAAHLVSWAKLCPRTIQSGAIQRCGKSGKGNPYLKGALGEAAAAAAKTNTFLGERYRRIVKRRGKLKALVAVARSILVIIWNLLSDNHARFRDLGPDYHATRINTERKLRNHIAQLAALGYHVAVEPAA

SEQ ID NO: 155768 - protein, 457 aa, unidentified
MSSARPHHARRIVRLDALKQINLNAAGIDVGDSEMYVAVPQDRDIQCVRVFGTFTRDLAAIAQWLTHCKITTVAMESTGVYWIPLFEVLVDHGLDVLLVDARKIKNVSGRKTDIEDCQWIQQLHTYGLLSGSFLPDQQIRALRDLVRHRGNLLRYRASHTQHMQKALQLMNLKLTTVLSDVTGTTGLLIIRAIVDGNTNPHYLAQFRDPHCRSSQEDIEKSLEGTYRSEYVFQLKQQLALFDYYTALMAETDRHIERLFQAIPSRIDPAVKPLKPLKPNSKRKTKNSPDFDLRTHLYRITGVDLTQVDGLNASTVQEVIADIGTDMTKWPSSKHFCSWLRLAPENKKTGGVVFSTATKKTKNRANKALRMAAFSLANAQCALGAYYRRIRAKHGGPAAITATAHKLARIIYKMLRFKLDFHDPGPDYYDLKFTNRILHNLQHRAKSLGFQLVPLPPV

SEQ ID NO: 155769 - protein, 335 aa, unidentified
MKSYKRVIGIDISTERLDVADSNAKIVHEVDYTIEAIKSKILRLIKKPSETLVVCEATGGLEYSLVDMLHDAKIDVVVANPARIRDFAKGHGFLEKSDKIDARVLQLYGQQVDATLAIPRTLQERNFIALTRRRTQLLQLISQESNRLRQSNDTQVKSFIEEMLKSLENQMKTLDSWISKALDEQSKTNPSIDVMRSVPGVGVVMTATLVAELPELGTISRTKIAKLVGVAPMIKQSGKSEERRRARGGRGGVRRVLYMATLAATQKNDVIKKRYIKLLASGKPKKLALVACMRTLLTILNDMVRHETKWGEKKKSVAGSVVSNRPAPAHVLDKS

SEQ ID NO: 155770 - protein, 331 aa, unidentified
MEEGRRFVGVDVAKARLDVFIQPSGESFSVANDERGISELLRRLEPADFVIIEATGGLEVPVASALATVGIAVAVVNPRQVRDFARATGQLAKTDALDAQVLARFGEAVKPQVRALRDAQAQALEALVMRRSQLVAMLTAEKNRRANSPKVIHKSIDEHIRWLEKRLSGIDDELAGLVRETPIWRARDELLRSVPGVGKVLSTTLLAHLPELGALNRKQIAALAGLAPFNRDSGSLRGSRCIWGGRAQVRRVLYMAVVAAVRSNPVIKNLYAQLRARGKYPKSALTACMRKLLVILNAMLRSKMSWQTPALAASTATFSPRLGAVPEHGCC

SEQ ID NO: 155771 - protein, 333 aa, unidentified
MNKSETTFLPCGIEISAAILVVDLSGKAPCEFPNTPVGHQSLIRWLQLAGSEIRVCMEATGLYGLDLALALHAAGIAFMIANPRSVRNFARAMMQRSKTDRLDVIVLREYAARMPFEPWRPPSSQALHLMAIAHRLQALTRMITAEKNRLHAASLSRALPALVRRDLRRSIQSMERALKRLTQAALDLVLSDPQLARRNQLLLSVPGIGVTSALNVLAEILRLGPDCGVRQWVAYAGLDPRHYTSGTSVAKKPVISKSGNAHLRRALYMPALVTVQHEPHFRGFYQHLLDRGKTKLQALVAVMRKLLHAIFGMFKHNQLFDGTKVYALETSCA

SEQ ID NO: 155772 - protein, 476 aa, unidentified
MGYGNVRRRENQVIRRAFVEAGDLSQVMLVGIDYAEAEHAVVICNGLGDQLGKVLTIRNDADGLAYLLKECDRHARANKIRPEQVIFGGESPGSWAENFAYGLLQADRQVVDLHPLRIKRYQEGESSTDHTSARTICMALQNREGYTRTGDDIYGALKAESHHRRGLVRQTTRGKNHIHGCCDVFFPGFLDSGILIAFGRSCRALLRRYSPGSLKKTRPSTIDKLLKKYHVTQTEQKAVRIRSFAGKVLMPSAPCQQARHEELCALLDQLDLLEHQIATCTTRLARLLRQTPGCLLTTVGGVGVVSAATLTAELGPEPHQWGADSKTCYFGLITTIFQSGGSGKAPINTGAPTGGNRIGKDILLRISDMLRRFGPEEYKIYGQQRIRNQANVRYALARKFLRFALSVFNAPHEYIPAPLRSLSDQTDPLWPLHFTSTAARLREVWHPFPTALPPEQDYLQQWQDMVNEHYHLNIQI

SEQ ID NO: 155773 - protein, 421 aa, unidentified
MEGKKIRVVGFDTATEEHECVLLGLDGTESWSLSCRNRYKSIEEVFAKLILRIAPDETLVVALEAPRAHGRLVFEVALQFGFTVWQVEAIALNHYRRCEGQARKDDHWDAFLAARMVFRGMKGCRVVADPRPDERVLSRLTRLRAQMVKQRVQLGHRLRAVMLELAPIVLDSQWKGPKLGSVAMRKILEKWPAFEGLDRARTTSIRSIFRSCRYGQAKTDRCVALVRSLPEEIVIPPEERAVIAFEIEMISKQLELLNQSISEIEKQLRVAVNQHHICCKLMEMPGIGLITASVLVGELLPVARNATEPSSATFSGVTPLTRKSGTSLDSAHLGRASNKRVLNALFLSAVKALGESALDRAYYDKKRIDYQGHPKPHTAATLALARQRHKVIFRLMTTEARYDKEVLIASHLKRQREMAAA

SEQ ID NO: 155774 - protein, 417 aa, unidentified
MAEEIEWFGGIDWASQTHQVCLVDAHGECLGERAVAHGGPGIEELCDWLITRTGATPEVIGVAIEMTQGPIVEALLERGFCVYGINPKQLDRFRDRFTVAGAKDDRRDAHVLGDSLRTDRHAFRPLSNDEPVIVKLREWSRMADDLQQERNRLASRMREQLWRYYPQLLELADDLAADWFLDLWSRAPTPAMAVRLRETTIERFVKAHRLRRWQASEVLSILKQKPLSVAPGVVEAASDHIRTLTVRIRLVNQQLKAAHRKLDELCAQLIPSEEDEPGQQCEQRDVVILRSMPGLGRIILAVLLAEVWQLLRRRDYHALRSLSGVAPVTRRSGKTRVVVRRYACNKRLANALYHWARLATQHDALSRRRYAALRRRGHSHGRALRTVADRLLSVACTLLEQQTLFDPTYEVRDAASG

SEQ ID NO: 155775 - protein, 375 aa, unidentified
MTNHSEAFVAFDTSKLRNAVAIAAAGRSGEVRFVGEIENSGAATAKLVRKLAAKYERLTFCYEAGPTGYGLYRQIKSLGYECLVAAPSLIPTKPGDRVKTNRRDALSLAKQLRAGDLTGVWVADGRHEAMRDLTRVRGAAVEDLRRKRQQVSSFLLRHGLHYPPGRKTWTKSHMIWLASQKLEHLEQRIAFEEMLFALRQARERIERLEQAIRAAVPDWSLAEVVTALMAMRGIDLISATTFLAEIGDLSRFQAPRELMAYLGLVPSEGSTGDTVKRGPITKTGNRRARRTLVECSWSYQHPARVGKEKQEKVAAAPRAVREIAWKAQCRLSARYRTLVRKGKPKNVAVTAVARELAAFIWAISREVTTAGAVAK

SEQ ID NO: 155776 - protein, 324 aa, unidentified
MNLPCLGIDIAKVKFNVCLLRSNGKLKHKVFPNNAAGFAQLQEWLVKHQVPLVHACLEATGTYGEALSHFLHDRDHTVSVMNPAAIKAFAASRLSRTKTDRVDAELIARFCLAHQPPPWTPSAPEVRELQALVRRLESLIEMRVAEENRLSAGVTVAAVRNSVEEMITHLKDQITRTEKLIHKHIDKHPGLKQQRELLNSIPGIADTTAAVLLAEVPDIKLYRSARQVAAFAGLVPRERQSGSSVRGRVRLSKIGNARLRKALYFPAITALRCSPFFQQWAEGLRARGKSKMSVIGAVMRKLIHIAYGVLKSGRSFDPELAKSA

SEQ ID NO: 155777 - protein, 411 aa, unidentified
MHERQKHVYVGVDLHKQHHVAVIINCWQEKLDEIKFENKPSAFSTFLRDIYKYMDDGLTPIFGLEDVGGYGRALAKYLADHEQIVKEVNPALSYAERKSHMTTQKSDSWDAECVARILVNKLDQLPDAKPHDLYWSIQQLVSRRNALVKAQGALKNQLHIQLSHHYPSYKKFFSEVDGKTALAFWERYPSPPCLEAVSVKQLTIFLLEASSNTCSVKKASEILKLVKEDGNTIREHQETRDFLVKSIVRDISFKKQEMRYVERELKGLMSLLDVQLDTMPGIDLVTASALIAEIGDVRRFPNANKLARFAGIAPVYFGSGGKGREQKSKQGNRALHALFYNLAVQQVQVAKGSKLPRNPVFHAYYQRKLKEGKTKGQALVCIMRTLVNIIYGMMKHKTAYKLPIIKEEEVV

SEQ ID NO: 155778 - protein, 474 aa, unidentified
MSKSKQQPSKGGAPGPTIAKSKRASQQKQAEHPVFQPNAAGIDIGAREIYVAVPADRDDHPVRKCGTFTEDLNEMAAWLVSCGVTTVAMESTGVYWIPIYDAVERHGMQPCLVNPRNMKNVPGKRTDFHECQWIQHLHAMGLLHAAFRPDSEVCAVRSLMRHRNDLVEMASQHVQHMQKALTQMNVQFQHVISDLTGLTGLAILDAIVEGERDAAVLAKLRDPRIKASEETIRKSLEGNWRAEQILVLKQRLSLYRSYRLQIHDCDQEIEKLVAAFTPKIDPQEKPLPEDRKKRQRQRKKKSGHPDFNMRTEAYKLFGVDLTQIPGLMALVFMLFSEVGRDMSRWPTAAHFVSWLGLCPDNDISGGKVLWRGARRTKNRAGTLFRMAAHSLYRDQNPIGNYLRRMKAKLGPTAATTATAHKIAIIFYTMVKQQVEYDASLWEQRDALRDKRLEARLHKQAAQRGFKLVPLEPAA

SEQ ID NO: 155779 - protein, 411 aa, unidentified
MEIVYKRCCGLDVHKETVAACVMIREGEKVQKEIRTFRTMTSDLLVLHDWLLAHRVTHVAMESTGVYWKPVFNLLEGSFEVLLVNASHIKTVPGKKTDIKDCEWIADLLSHGLLKGSFIPPQPIRDLRDLTRYRKSLSDERTREINRLQKLLETANIKLSSVATDVMGVSGKAMLEAILSGSTEPEVLADLAKGRLRNKLSLLKEALQGRFRPHHRFLLGQILSHLDFLDEAIGEMSKEVEKRLDPFLQEIELLKTIPGVKQRMAEVILAEIGADMSRFPTHRHLASWAGLCPGNNESAGKRKSGKTRKGDRWLKRGLTESSWAVSRAKETYLSALYHRMVRRRGKKKATVAVAHAMIVMAYHILKHKLPYSELGADYFDRLNVSYIKHHFTKRLEALGYKVTLEPLQAAA

SEQ ID NO: 155780 - protein, 316 aa, unidentified
MSEPVYVGIDVAKASFEVAVSGEAQTLSLGNDEAGHAELCQVLVPLAPRLILLEATGGHERLLALALAAAGLRVSVINPRQARDFARCMGKLAKTDRIDAQVLRGFAALLDAQGHEPRALLDEQQRELTALVTRRRQLVAMLVAERQRLALAHPKAKASILAIMDAIAAQLHDVDGQLREHVQAHHADLAKLLTSVKGVGPTTASTLLAQLPELGHLNRKQITSLVGLAPMNRDSGTLRGQRHIFGGRADVRRVLYVAALVGTRFNPVLKAFYAKLLAAGKPKKVALVACMHKLLIILNAIARTKSPWSHEIAGIA

SEQ ID NO: 155781 - protein, 400 aa, unidentified
MNIIGIDVSRGHSQATLINDDFEKIQFNFKHNRSGFKQLSTYLTKETIVIFETTGVYSVQLARYLRENKTKFYELNPLEAKMRMATLRRNKTDVNDSLKLALLGLTQLDEVKRSRRRYFNPEYEPLRILALRYQELIRQRTWEINHLHSALELSFPELNDIFPCIRSVTALQVVRLYCHPDFLNGLTLKQMTDNVYQPISKHIKRTVVAGYCSQVWLAAKDSYPAIKADSIKIPIIAAYCDQITAANERIALVKKQLIRLATSLPEFKLICSIPGTGQLNTALLLGFTGNLKRFDNYKQLDAYLGIDLNRYQSGQYQKHDRINRRGSSAGRGVEVEMIISMLRNKARIQNHLVDYYYKLKEPPYSKKNLVALVACANHLNRTIMNLVYTNQIYDYQKASH

SEQ ID NO: 155782 - protein, 462 aa, unidentified
MRRRDESETLENRREQLEGLPIIRRNVAGIDLGSERHWVCAPTPNAQGREITSFGATTPELIRMAGWLKERHVESVAMESTGIYWIAPHEVLEAQGLQVLLVDTRQLARVPGRDKKTDPTDCEWIQRLHSCGLLRGSFRPEEAVCMLRTLVRDKANLVAESGDWVRRMQKNLDQMNVRVHRAVSDIDGVTGMAILRAIVGGERDAQKLAKLRDRRCSKTEEEIAEQLSGHWREDHLFSLQQALKMYDAVQERIAAYEKEILRKLGDMEGDEHHERTAPPLPNPNKAKTIKHRGQEAKRQALYRMSGVDATHIDAIGVETVEVVLSEYGPDLSRFPTEKQFVSHVTLAPRVPKSGGKPVKKKKRNSASTRVAAALRMAALSLRHSQTALGAYYRKMAQRRSGDIAVFATARKLAILIYRLLRWGQTYIDEGAEAYEDRYRQRRIGHLTATAKQLGYQLIPVNA

SEQ ID NO: 155783 - protein, 387 aa, unidentified
MQSVTSATSVATTARANDTTLFASLELSKSKWVVTINSPGSEKFSKHVVEGGDGAGLLDLLSRSRAKAEQRYGVQVKAIVIQEAGLDGFWIHRMLLANGIESHVVDAASIAVDRRHRRAKTDAIDGETLLRTLMAWARGERRVCSMVRAPSPEDEDRRRLTRERGTLLKERIQHTNRVRGLLSGQGIGDYNPLRRDRFERLEALRTGDGRELPPMLKAEIRRELDRIALVTTQLAAVERARDALIRTDAEERNNPAALLLKLKGLGPEFASLLWLESLFRSFGNRRQVAAYGGLAPSPWQSGGVERDQGISKSGNRRLRKTMIELAWFWLRHQPDSALSRWFQARVGAAKGRIRRIAIVALARKLLVALWRYVTQGVVPEGAVFKTA

SEQ ID NO: 155784 - protein, 335 aa, unidentified
MHKADRTRRHRKERRVEAILGIDIAKATFVVALLTPEGRLRRKSCANTPAGYAGLAGWLTRQHVTHVHATLEATGPYGEALATWLHEAGHVVSVVNPAVIHAYARTQLTRSKTDRIDAALIAQYTATQRPAAWTPPAPEIRQLQALVRRLDALHGMRTQELNRRGAGALVADVRASIEAVLAQLEAQIAHVQQLIRQHLDQHPGLRAQRDLLTTIPGIGETTAAVLLAELFDKPYSSARQAAAFAGLVPRLVESGTRRGRARLSKIGPGRLRKALYFPAVTALRCNPTIRAVRARLQAAGKPPMVIIGAAMRKLIHLAFGVLKSRRAFESRCAHP

SEQ ID NO: 155785 - protein, 344 aa, unidentified
MHIASIGIDLGKTTFHLVALGERNRVLVRKKFSRAQLLAYTANLPASLIGLEACAGSHFLGTVLREQGHQVRLIPAQFVKPYRKSNKNDFIDAEAIAEAVTKQNMRFVQIKTEEQLDWQAMHRVRDRLVQRRTALINEIRGFLLDRGLPFAAQPIYLRKNLPTVLEDAEQNLSPRLRWLLDRLWQEWKQTEIDIKAVSDEIERISNEDVRCRRLRQIPGFGPLVSTATVAAIGNGAAFRRGRDFAAWLGVVPRQYSTGGKQKLYGISKRGNIYLRRMLIHGARAVLLRVKYDTGGFGQWVHRLAQRAPRNKVVVAIANKLARIAWAVLASGKDYRHQPLQPAAA

SEQ ID NO: 155786 - protein, 360 aa, unidentified
MITIGVDFHKCFSSYKVLDKNGNSIKKRKIENDPDIIKEFLLSIHGPKQLAMEATRSWGLYYDCVKEHVDKFYLGHPKKMKAITESETKNDPNDANMIARLTHSGFLPKAHVSSVTIRELRSLVRYRGSLVNQRRSTRNQVHALIDRNVWPCHKPKSFKNVFCKRGLLWLKELSLPERERFILDQCLANFEALNKQIAVVEKYIQVQDHDLPGLKYLRTVPGFFTSVVNAYVVLVEASDITRFRKAKGFAYYAGLVPREYSSGDKHKTGRLVKGANMHLRTAIIESTLSAIRTDKGLRAYYKQVKSRRGSGPAIIATARKLSYAIYHVLKEQRPYRFEKVQSPVATCHSSSVYVLKNSTR

SEQ ID NO: 155787 - protein, 401 aa, unidentified
MSTMRDNVQRVKRFRELKATLRTNRSRLLVGLDIAQAEHEVQVRHAHTRIVVPQCTIPNTTRGFTQLWARIQQAQRATGCREIVCGLEPTGTYHQAVAAFLEAQGATVVLISSSVAYWNRRTQDGTWDKHDRKDAANCAELLEQGKVLFYSQPDGPLAELRPLVKCLRRARAELAACKARWRTTLRPALGPMGEPLPNCLRAELPAVLQPWERAALGRPAVAKGRLPLGQATACADLGAQVTAVQARIGTIEQALTPVAERLPAYPLLRTIPGVGPTVAAILLAEIGDVAWFTQFSQLRKLAGLDIVRVQSGQFAGQARISKCGRSLLRWALYHAAMGLARTATGQARLAALKAKRQGDRYAGFKAIVELAAKVLRVVWGVWRSGTPYDPKRTGGLQRQAR

SEQ ID NO: 155788 - protein, 346 aa, unidentified
MRIIGCDYHPSWQQICWIDTLTGETEEKKLDHATGEAEKFYRGLPGPALIGMESTGNCQWFMEMATTAGHEVWVGDAARIRASEVRHQKHDRRDAALILKLLLEGRFPRIWAPSGEEKDVRQLLIHRYKLVRIRAQVKTELQHLAMNQGVTKKRKLWSKAGEKVLRELPLKPWTSRRREDLFKVRAMLDEQIAPLDQAVVEVAEKNEKAKLLMTQPGVGPITSMAFVLTMGDVSRFQRGKQVASYLGLIPREYSSGGKQRLGSISKQGNRFLRMLLVEAAQGAVRCDPGFRNEYLHRCHTKAKGVAKVAAARKLAIRLYWMLRTNTAYPEVVRVESSSRVPLVSAS

SEQ ID NO: 155789 - protein, 351 aa, unidentified
MVIIGVDYHPSDQYIAFVDAETGESGERRLNHSDGEAEKFYRELKQRGVSVRVGMEATGYSRWFERLLAELGIEVWIGDAAKIKTKRVRKQKTDRNDAQLLLKLLLENTFPRVWVPSPENRDLRQLLWHRHRLVQMRTRLMNQLQALAMNEGQRRKKKLWSEQGRAQLEKLPLATWASRRRQDLLELLDRMNPTIEELTVAIEQEAKKRPEVLQLMTHPGVGPLTALAFVVIIGTPERFHCGKQIGSYVGLIPSEDSSAGRQRLGHISKQGNALLRFLLVEAAQAAVRCDADWRRRYLHLAMRRERRIAKVAMARRLAVRLYWMWRNGWEYAQSVEFGSYAGQLVTGHGVN

SEQ ID NO: 155790 - protein, 330 aa, unidentified
MDGMSIGIDVSKETLVIAVQPSGESWTSETTPAAIETVVVRLRALAPTIVVVEATGGYERGLVAACAAAGLPMAVVNPRQVRAYAQALGRTAKTDAVDARVLADFGARVQPAARAIADAETQALAALVTRRRQLIEMLGMEQRRLAQAPPTGRITRDLRTHIRWLERRIADVDDEIGTAIQASPIWRVQDDLLQSVPGVGPTTARTLLAELPELGRLDRRAIAALVGVAPFNCDSGQHRGQRHIWGGRASVRTSMYMAALSAARSNPVLRLFYERLREAGKPPKVALVATMRKLLTILNAMMKHQSRWNAEVASTPASPARLARTATVRA

SEQ ID NO: 155791 - protein, 335 aa, unidentified
MNYKLFAGIDVSKAKIDVVFFLAENPDEQFHGIFGNNELGCAEMVIWIQELTSLPISDMLFCAEDTGLYTLPICTFFDGHGGSLWVENALRLKRSLGLKRGKSDKADAAEIANYGFLHRRKAVLFKLPSKTISRLKHLLSCRKQLVKHQTALKNSSGELEAFDGADAGFTLRIRKGLIREYDKKIEMVEAELLRCVKADELLEKQYNLVNSVYCIGPQTAMFIVVLTQGFSLFDDPRKFACYCGIAPFPNTSGSTLKGRTKISHMANKRIKTLLTMCALNTIKNDNEFKRYYDRKIKEGKHHSAVLNVLRNKLVSRAFAAVNKNRPYSKEIDLAA

SEQ ID NO: 155792 - protein, 351 aa, unidentified
MPRKSSVCTVTAIGIDMGKTTLHMVGLDSYGAIVLREKVSRGRIASRFANLPPCLIGIEAGMATHYVARELAALGHDVKQVPPAYAKPFRQGHKNDFRDALAVAEAVQRPTTRFVPPKSNEQLDLQALHRVRSRLVSQRTAVINQIRGFLLERGIIVRQGLRFLRQLLPDILAKRTDVLSPRMVRIVSDLAGDWRQLDDRIEIVTDEIETLAKADDSCRRVMTVPGIGPIISSAMVAAIGNGSAFSKGRDYSAWLGLVPKQMSTGDRTILGRISKRGNSYLRMLFIQAARVIMLRPANWPKHGFGAWLVRAIQRLHPNVLAAALANKLARIAWTVLAQERSYEARVTKAEA

SEQ ID NO: 155793 - protein, 345 aa, unidentified
MPSIVGGLDIHRKQITFDYLDTVTGEVSCGQVAPADRVHVRAWLAGRFEDPAGVAFAAEACTGWRYVIEELQAAGIEARLAEPADTATARGKKRRAKTDRADARLMRDLLAQGRLPECWIPPAQVLECRALLELYHDLRAEHTAWIQRVHAVLFHQGAPVFHDLSRTEAPAELAALARGHLSPAGQIQAATCLRMLTALEAELDATRRRLLAAARQLRGARTLTESIYGVGPITALALTCWLGGAGRFSSARKAVRFAGLDITVYSSDGKRSPGHLSRQGPPVLRWAVYEAGKTHARAAAPDHGYYAQVKDRKDGKRAALSEARKIVRRACHILAELGDDALATV

SEQ ID NO: 155794 - protein, 378 aa, unidentified
MEPTYERKEPAVCSIAHREFIHLGMDVSKDSIAVAVLAPDRDAAEVDKIFHDADSVRRLVKRIGRPKGIWACYEAGPTGYDLQRLLASLGVRCDVVAPSLIPKGSGDRVKTDRRDARRLAGLHRAGQLTPIAIPTPAQEGVRDLCRTRGDMVQDLTRARNRLSGFLLRHSVVWRGGSPWTERHRRWLATLSFDDPAIATTYSHYLATVKLRDTALEAVEADLLPWCEKDPFGHQVQRLAAYRGVTRIGALCLAAEVFDWRRFPKARPFMSFTGLVPGENSTGLTQRRGSITRAGNAHLRGQLCEAAWAYQHSPNVGVGIRERQQGVSPETVARSWAAQVRLSRRFRQLSAHKNVRSVVAAAIARELAGFLWAEMVAEA

SEQ ID NO: 155795 - protein, 290 aa, unidentified
MTGRFGNDASGIAELAALCARHAVDLVAMEASGGYERLAVLLLSELGQPCAAPLNARNVRRFAEAMGFLEKTDRIDAGVIAHYAEVRKVRPAPPPSPAQQRLKALVSRLSQVTGDLVANKQRRAAASSAETLDSIDEVIVLLKRQERRLSGEIASLIDDDPLWARLDAALRTVKGVASRTVAVLMAQVPEIGLISNKAVAKVTGLAPIANDSGSRQGYRPVRGGRAGPRSILFLIARIAARYDPHLKAFHDRLQKAGKPKMVIRIALARKLLVILNAKARDARNELANAT

SEQ ID NO: 155796 - protein, 355 aa, unidentified
MVIKATETEKDDAMKDTMIGVDLAKRVFHLHVASMTGEVRDRKKLTPDQFRRYMSDAPKCIVVFEACGSAHYWSREMMALGHEARVIPAQYVKPFVKRHKNDKNDAEAIVVAAQRPEMRFATVKSEDQQARAVVFRARERLVHQRTELVNALRSTLYEYGHVFPIGIAHLKKIEELLQNPHCDLPTLVVTECQDLLAQIAEKTERIKAKDKLIKELAKESDVARRLQTMPGVGPMTALAVEAFAPDMAQFSCGRDFAAWLGLVPLQSSTGGKSRLGKMSKMGQVDIRRLLIIGAMSRIIGRARHTIPDDSWLGRKVAAKPKMLVGITLANKMARQIWAMLTKNEDYRDPALAGTA

SEQ ID NO: 155797 - protein, 397 aa, unidentified
MYIVGIDIAKRKHEAAVIDGEGAVIIKPFSFTNNCSGYNRLLAMLAKAKLPLDEVSFAMEATGHYWLALFTRLQKEGFRVQVINPVQTNSIRSFYIRQAKTDPRDALLIAEVIRFGHFSESTLHPENIYELRELCRGRHAIVSMQADVKRKVVALLDQVFPEYETAFTNMFGDTSMAILQACPTPKELSEMPLEELCHLIEVSSHKRFRMAKAQELQALARNSFGFAMAGDVFSTMIRLYAKHLDFLKQQVREMDRKIAEIMDTLDTPITTITGIGPTLGAYILSEIGDISRFSSAAKLAAYAGIDPTMRQSGEYNGVRNRMSKRGSPYLRHAIWLAASSAVLHDPALKLYFQKKRDEGKPYMASVGHACRKMVSIIYAVMRDNKAYTPYIPNEISA

SEQ ID NO: 155798 - protein, 365 aa, unidentified
MQKITTVRRSAKNVFKGQLTIGLDLGDRSSSYCVLDEAGVIILEQKLPTTPEAMKQTFRRMLRSRIAMETGTHSPWVSRVLTELGHEVIVAHAQKVRLIVKSRRKDDRLDARTLARLARIDPELLTPVQHRSAQAQLHLAEIRARAGLVSARTALVNAARGLVKSYGERLRKCGTQQVRREITGGLSPGLREALEPLLREVESLNERIQEYDRRIEKMAKETYPETALLKQVKGVGDLIALAYVLTLEDPHRFRKSRDAGCFVGLQPGRRNSGESEPQMRISKEGDEYLRTLLVQGAHYILGPFGEDSDLRRWGKKLAIRGGKNAKKRAVVAVARKLAVLLHRLWVSGEVYEPLRNSQKAMNAAA

SEQ ID NO: 155799 - protein, 459 aa, unidentified
MKKQRAATQKPAVDATEGLPRLNLNAAGIDVGNAEHHVAVPPGRGTRPVEKFGSFTADLHRMARWLKGCGVDTVAMQATGVYRVGLYDVLESEGLQVHVVNARHTKTLPGRKTDVQECQWLQKLHTFGLLNNSFRPAEEIRVLRSYLRQGGNLVAAAATCIQHLQKALTEMNLQLANVISDISGVTGMAILRAIVGGERDPHKLAALKNERIRASREEIARNLEGNWREELLFVLAQSLELYDTYLRKIAACHRRVEAHLKTMDPKIDVQAQPAPQARRIHAPRKHMPRFDLRTQLYRITGVDLTQIDGIEVQTAQRVISEVGTDMSRWQSEKHFASFLGLCPDNRISGGKVLKRGTRRVVNRAATALRLAAWTLFRSQSALGAKFRRLRARLGAPKAITAMAHHLARLLYRMMKFGKEYVDKGIEYYEAKYRENQLQWLTKQAAALNLQLVPSTGVAG

SEQ ID NO: 155800 - protein, 355 aa, unidentified
MKGEVQSKKVLVRGKEVFIGVDVHKESWHVTARTEGEEIFNGRIPSQYQALRKLLGHFKDCKIKVAYEAGPCGFWLYDKLTEDGVETIVVPPSLIPVESGNKVKTDKRDSRKLAKLLESNMLKRVYVLNEEDRVDRELLRTRRQIVEHRNDVARQIKSKLLFYGIHSPFARRYGWHQNYLRWLKEMELPREGLRVCFGSLIELYEYLSDQLLKINQKVKELSQSLKYRQRLKLLCSVPGIGTLVGMELLVELQEVERFKRADELASYIGLTPSEFSTGQYIRQGRITRCGNKRVRTCLVESSWILITKDPLMRFKYNRLKVMKGAKRAIIAIARRLIIRIRRILLNNEPYVVGVC

SEQ ID NO: 155801 - protein, 383 aa, unidentified
MKNVRFVGLDVHAQTIAVAVAEAGGEVRSLGSIPNRLESVSKLIKKLGKPQQLRVCYEAGPTGYVLYWQLTKLGVRCEVMAPTLIPMKPGDRVKTDRRDAEKLARCYRAGDLTPVWVPDAAHEALRDLVRAREAAKSDQLRARNRLGKFLLRQGRRAAEGVQAWSGRYMKWIKEQVRFEQPAQEATLLDYLHEVEHAAERIQRLEKSIDQAIDTVPQKMRAVIQGLQSLRGIAKISAVSIVAELGEISRFQKAAQLMGYSGVVSSEHSSGERTQRGAISKAGNAHLRRIVVEAAWSYRHRPSVGAALAARQKDLDEPYAEEVKEMAWKAQHRLHSRYSKLSARGKTKQKVITAVGRELLGFVWAIGTHVERAVGVRAPRRRAA

SEQ ID NO: 155802 - protein, 361 aa, unidentified
MNRTGLNEVIMAAKVSIPSPGQVKVGVEAAGHYHRPVLDHRWPHGWEVLELNPAQVAEQRRVQGRRRIKTDVIDLEAITDLVLAGYGQLVADRDAVIGQMSAWVVHRNQRVATRTATKNQLLGQLDRAFPGLTLALPDVLGTKIGRLVAAEFADPARLAGLGVNRLIRFAATRDLQLRRPVAERLVVAARDALPTRDAAIARRILAADLALLTDLDDQIQCAQTALESLLPRSPYATLTSVPGWGVVRVSNYAAALGDPRRWPGPRQIYRASGLSPMQYESAHKRRDGGISREGSVALRRALIDLGMGLWLNDPAARNYAQTLKDRGKPGGVIACALAHRANRIAHALVRDCATYEPTRWH

SEQ ID NO: 155803 - protein, 436 aa, unidentified
MEVLYARCCGLDVHKRTVVACLLTPGAGGKPARAIRTFGTMTEDLLGLAGWLAAADCTHVALEATGVYWQPIWNILEDRFSLLLANARHIKAVPGRKTDVRDCEWIAELLRHGLLQGSVVPARPQRELRELTRYRTALVGEHSAEVNRLQKTLEGANIKLAAVATDTMGKSGRAMLDALVAGSAAPAAMAELARGRMREKLPQLEQALTGRFAAHQRFLVARQLAHIDALDALIAEVSHEIAARLRAADDAVAAAAEPDAASVGSPEGPPARPFADAIARLDTIPGVAQRTAEILVAELGLDLTRFPTPGHLASWAGMCPGNHESAGKRQSGRTRKGNRALRAALVEAAQAAGRTKRTYLGAQFRRLAARRGKKKAAVAVGHTILTIVYHLLTEGTSYQDLGVQYFDERDRQRVERRLVHRLEALGYTVALEPAGA

SEQ ID NO: 155804 - protein, 356 aa, unidentified
MVMVLGVDVHKDTHTVVAVDEVGRADGERTVRATDTGHRQLLDWARRQVPQDRMWAVEDCRHVSTRLERALLAAGETVVRVPPKLMAGARSSARTRGKSDPIDALAIARAALREPDLPLARHDDTSRTLKLLVDHRDDLVIERTKMANRLRWHLHELDPELDIPARGLNRLNLLDRLITWLAEQSRPDRLGQVLARLAAELLTDIRAATVRINALEREINTLARQAAPRLMTLPGAGGLTTAKIVGETANITRFRSEACFAMHAGVAPIPASSGRTQRHRLARGGNRQLNAALHRIAITQVRITASPGQLYYQRRRARGDTAMEALRALKRRLARVVFNLLQADTTIAINDLSTAA

SEQ ID NO: 155805 - protein, 463 aa, unidentified
MAKKAQKMKKGKRSELLIVNINAAGIDIASTEYQVCVPEDRDTEPNRRFEAYTCDLHAIATWLKQCNIETIAMEATGIYWVQLFMVLQEYGFDVVLCNAKHIKNIAEKKTDYVDASWIQMLHSYGLLRESFQPENQIRQLKDLMRHRERITQRMSQDILRIQKALEMMNIKVHKVLSDIKGKSGLSILEAIVGGERKPSVLAELVHHSVKASREEIIKSLEGNWNDAQLFILKQSFDAYRFAQTQIEELDQSIEQLLIAYSQVADHSKNNKPIVRALKRKQVQGNAFHFDAERYSYDILGVNITRIPGISSLTAIKLISELGRGFTAKFPSVKHYCSWCNTVPNNRISGGKVLSSNVPKRKNFAGQAFRVAANTLSRSKGYLGDYFRRIQFRTGYNQAVIAVAHKLARIVYHMVKMGVEYDESIDRAKNLKMLDFKRKSLQKRLLKIELELSACNTDNMALVR

SEQ ID NO: 155806 - protein, 284 aa, unidentified
MNYIGVDYHKKYSYIVVKNEDGRVGGRGTVNNTKEEVQRFLEPYRPGMAVVEATRNWGLIYDWLDEVLDDVTLAHPLKVKAIAEARIKTDKISADILADLLRAGLLPRAYAPSKQTRELKNVLRQRMFFVRVQTMVKNLAKGDARARLLKSIPGIGPFFSVLILYEIDEISRFRDEKKLCAYAGLVPSTHASGGKVFHGRITKTGSKWLRWAAIEAAQTAVRSDSEFHAYYQRIRIRKGTNAAKVATARRLLTIVYRLLRQGRFYERRTTNTRKIVTPAALVTD

SEQ ID NO: 155807 - protein, 392 aa, unidentified
MNRIVYIGMDVHTSNYTLCSLDPGYGVEKDNYFAEVQFTNDFIKNVVNYVTNLKKKLKDCEFVCGYEAGCLGYSTYKDLTKVGIKCVLMAPSTMAVQKGGKKVKNDRRDARVIAQCLAYQTYKEVYVLSEHDEAVRGYLRMRDSHNKALKRIKQQIIAFCTGHGLFSPTKSNWTVAHLKWLKDLKFNDPVEQEILNEYLSSLTFLSDKIKAMDVRIEELASEKQYCENVKKLRCIKGIENNVALTLLAEIGDFNRFSKPTDFASYLGLIPGEQSSGDKVRGTGITKAGNSTLRRKLTESAKGYWRGRIGIKSATFKKLEKELPKEVTEYALKANTRLQRKFFNMTHVKGKNMNVAASACAREMACFVWGLITNHYDKAPAVPKTDEELLDLN

SEQ ID NO: 155808 - protein, 371 aa, unidentified
MLDCSTYVGLDVHDKTIAAAMLNVGTGELSVTEFGAGTAGVKKLLRWVRQTAGESVRLCYEAGPSGYVLQRRLGEAGLDCRVIAPSLVYRRPGDRQKNDRRDARQLAQQLAHGQLTEVHPPTVAEEGVRALVRSRDDAQTATKRLKQQLVSMLKTWGMRCEGTAWSQGFREWLGSLQLPDATAQWVLENALLQLGQLEANVARLDAKIEEVAAGEPYREAVGRLRCFRGVDTLTAMICVAELYDFDRFASPRALMGYLGLVPSEASSGERERRGGITKTGNGLVRRVLVEAAWHYQHKPAVGATLKKRQQGQPAAVVAGAQRAMLRLNQRYWRLVGRGKLKTVAITAVARELVGFLWAALQGEAGQVQQAA

SEQ ID NO: 155809 - protein, 368 aa, unidentified
MRWTPPISTASQCAKVEFLHKHLTIGEVRMNITTIGIDLAKTSFSLVGANKYGKVVLRKTVSRGKLPSVIAQCPPCLIGLEACSGAHYWAREFEKLGHEVKIIAAKFIEPYRKGGKNDNNDAEAICEAVRRPNIWFVPIKSADQQAALCVHRVRQGVVRDRTAWVNRLRGLLSEFGIVMPKGRYAAQSAVPTILADPDNGLPGLARQMIHDLWLSIQQANEQVLSYDRALSQLAKEDEVAKRLLTIPGVGEQTATGVVASVPDPRLFKNSRQFSAWLGLVPRQYTTGGKIRLGRITKRGDKYLRMCLVHGARAVIAKLGDKQDHVSCWIRGVIERRGYLRAVVALAARNARLIWTLMMKREDYRAIDA

SEQ ID NO: 155810 - protein, 410 aa, unidentified
MDILYARCAGLDIHRDTIVACVRLTEAGRVVRFVETFATTTTELERLSEWLAGHGVTCIAMEATGVYWKPVWAVLAGDFELVLANAHHVKAVPGRKTDVNDATWLADLLAHGLIRSSFVPSMSEQALRDLTRARKQLTREKASHVQRIDKTLQAANIKLGSVLSNIMGQSGRILLEALAAGERDPERLAGLVRTRIRASHAQVVEAVRGRLAAHQRLLLRLYLAQVDALDAAMAAIDHELGERLEPVQETVQRLITMPGLSPLSAAVVISEIGLDMSRFPSAAHLISWAGLCPKNHESAGKRRSTRLRPGAPWLKAVLVQSAWCAVRVKASYLHALFQRLKARRGPRKAIVAVAAAMLTAIYHMLNRGTAYHDLGPDHFQRTEPSRLAARLARKLGELGFDVTLTQRAAA

SEQ ID NO: 155811 - protein, 319 aa, unidentified
MDHIYDICCGLDVHKESVVACLLKKNKLPGKRSKKELIEKELRIFSTFSDDLKELRDWLIINDCRLVAMESTGVYWHPVYDVLEDAYDGDIEILVVNARHMKNVPSRKTDINDAEWIADLLRCGMLRSSFIPPQNIRDLRELTRYRKSIVEDISRQKNRIEKTLQSAGFKLSTFLTDIFGVSGRNIIDVLIQNGYLTPDDVEVSTKSISKEKKMEIKRCLTNKLSIHHRNVLKIKLKHLDEQIDHLIEVEESIAEITIQFEKEIDNLDTIPGISETSATAIIAEIGIDMSKFPTSEHLCSWAGLSPGNNESAGKKKTQE

SEQ ID NO: 155812 - protein, 371 aa, unidentified
MKKPIRVGGRQPVPSRAEKADLKPGRRSRTRCKPARLSGPKSPYLQGRVVASDLRAGDRMAPTIFVGIDVSKDTLDIAVRPSALRWQLANDDAGIRDLVSRLAELSATLVVLEATGGYEHPAAAALAGAGAGVVIANPRQIRDFARATGQLAKTDAIDAGILALFAERVRPEPRALPDEARQMLEALVTRRRQVTEMLVAEKNRLGHARRPVRRGITAHIRWLERQLSDVDRDLDEAIRQSPLWRSQDDLLQSVPGGGPITSRTLLAQLPELGLLDRKEIAALVGVAPLARDSGTLRGRRTIWGGRATVRAVLYMATVAAARCNPLIRIFYQRLRAAGKPAKVALIACMRKLLTILNAMARTHTPWRPAHA

SEQ ID NO: 155813 - protein, 373 aa, unidentified
MNKFSKYVGFDVHKDTIAVSIADAGRSKARFYGTIKHNSAAVSSLLKKINPDGEVLELCYEAGPCGYGLYRQLMASGHQCQVIAPTLIPKRASDKIKTDKRDSLRLAELLRAGELTPVWVPDAEQEAIRDLVRTRNDFKTSQRQVRQQLLAFMLRHSMSWTGGKKNWTLGFWTWLEAIQMPDAHQQFALKEYIDAVRYYSSRVQGIEQQMYAAKSGWSLEPIVEGLMAMRGVNLVTAMGIVSELGDLSRFSKPTQLMAYLGLVPSEYSSGDNRRQGGITKSGNGQIRRLLTESGWCYRFAARKSREIEQRAQKASPEVQQIAWKAQRRLCARYRDLSERGMSSCKIVTAVARELSGFIWAVVEQVRKEQAALT

SEQ ID NO: 155814 - protein, 363 aa, unidentified
MMAKATCLVGLDVHARQTHAALLDSRTGEINVRRLIGMPEAAVLSYLEHLGGGVLAAYEAGPTGFGLAREANRRGLDVRVVAPGSIPKGAGDRVKTDRRDAVRLVRLLAAGELRFAFVPTVEDEAFRDLIRCIEDLRGDLMRARHRLSKFLLRRGRRYEEKSTWGSTHLRWLKAIGFDDGCSQATFVDYLASVQLLGGRRATLLEVLEAQVPGCSYAPTIARMRCFRGIDTLSAAGLCAEVGSFERFPKPGLLSGFLGIVPSERTSDTKRRQGSITKAGPGHARRLLIEAAHQYRRRPAIGETLARRQQGQDPRIIEIAWRAQRRLYQRWQHLREARRKPAGVVAIAVARELAGFLWEAAVLD

SEQ ID NO: 155815 - protein, 405 aa, unidentified
MYYCGIDIAKYKHEATVIDKTGKALLDSISFSNRAEGCEKLLILFERLSIAKDELLIGMEATGHYWLSIYGYLLENGFEVKVINPIQSEAFRKMYIRQTKNDSKDSFIIAQIMRFGQFSATSLSDEVIIAMRQLSRYRLALVDNCGDCKRRVIALLDQVFPEYDSLFSDTFGVTSKEVLAKYPTPEDMLSVPTGKLTNLLGKASHGRFGKQKAEQLKSMAAGSFGVSFAKDAFAFQIRQLIEQLNFLETQIGELEEQIAVLLKQTGSYITTIPGIGDTLGAIILSEIGDIRRFDAPGKLVAFAGLDVRVSQSGEFTGTRQKISKRGSPYLRRAIWLAASRAAFCDPVLSKYYQGLRARGKHHLTAIGAVCRKLCNIIFAILSENRPYQTLPPNDKKLSASSFSPT

SEQ ID NO: 155816 - protein, 412 aa, unidentified
MEVVNPRCCGLDVHQKSVTACALVTEAGRARPRKAIRTFPTMPADLLALGDWLAAEQVTQVAMESTGVYWKPLWAALEDRFTLLLVNAQHVKAVPGRKTDVKDAEWLADLLRHGRLRGSFVPDADQRELRDLTRLRTVRVRARAAELNRLQATLEKAGLKLAVVVSQIDGVSARRILEAILAGEEDAATLADLAEGRLRVKRAEMERALAAIPNAHYQWLIAEHLAMLDDLEEVIGRLDALIAEELAPFAAERARLQTIPGVKRRVAEGILAEVGHDVGRFPTSKHLASWAGLCPGNDQSAGKRRSGKTRQGDVWLRSLLCESANAVGRTKGTYLSAQYHRLVTQRGKHKATIAVAHSILVRAYCLLRDGTTYEEPGANYFDEKDEPAVRRRLTRRLERLGYTVTLTPLAAD

SEQ ID NO: 155817 - protein, 343 aa, unidentified
MQTITTIGLDIAKSVFQVHGVDAGGQVIVRRQLKRRYVLTFFQKLPPCLVGIEACGSAHYWSRELQALGHTVRLMPPVYVKPYVKRQKNDATDAEAICEAVTRANMRFVPTKTPEQQSGLVLHRTRHLFIRQQTSVINAIRAHLAEFGIVAPVGRHGVEELLTVVADPNDRRVPEIARACLSALGDQLQRIKQQILEFDRLIRAWHRSNEVSMRLDEAPGVGPVLATAVVATVADPKSFRSGRNFSAWIGIVPKQHSSGGKNRLGGISKQGDRYLRGLFVAGALAVIRYAKIHGTKHRPWLTALLARRPTKVAAIALANKIARMVWAMMVKGERYKEPVALAA

SEQ ID NO: 155818 - protein, 385 aa, unidentified
MNRELCLKTDSSPYLDTLAFLNGDLYKKLTFLLLRFLGDVQYPFPLQIAKHKDMENFYFIGVDVSKKKLDFCVLLNGTIVLEEVVNNNIPSIRRFLETFVVDFKTSIDNLLVCAEHTGQYTFPLSIACQSLSCGLWLENPARIKYSSGFSRGKNDKVDAHRIARYASRFSDNARYYQRPREEIERLKQLRNEQDLYKSDLAKYKGQLSDQREFMLDRVYQEKAQRLERLIEELEKLIKDIDLLVETIIRSCRVLWRQRELLLSVEGVGPSVALCLIIETEAFTRFDDPRKFACHAGVAPFRYTSGSSQHSRNKVSQRANKQIKTLLHMAALSITGRKSGELKAYYERKVKEGKNKMTVINAIRAKLIARMFAVIKKDQFYTPVYS

SEQ ID NO: 155819 - protein, 422 aa, unidentified
MLEETQDEQEIIARVAALDIGKAELVCCVRVPDPKGGSRRVQEVKTYSTMTRSLQTMADRLLDLGVTRVVMEATSDYWKPPFYLLEAHGFQTWLVNAKDVKHLPGRPKTDRLDAVWLCKVAERQMLRPSFVPPIPIRRLRDLTRYRVGLVSDQNREKNRVEKLLEDAQIKLSVVASDIFGVSGRDMMAALIAGERNPQVLAQMARSRMRTKIPQLEEAFVGYFTDHHRFLLAKMLARIDALDTDITDLEAQIEAQIAPFAPAVARLDEIPGVGATAAAVIIAEVGVDMTRFPTPAHLSSWARFAPGVKESAGRKKGTGSTGHGDRYLARVLGEAAVGTSRTNTFLGERYRRIARRRGKKKAVVAVGRSILVIVWYLLRDEGAQFHDLGVDHYDSRINPDRKKRNHIRELEALGYRVTLQPAA

SEQ ID NO: 155820 - protein, 328 aa, unidentified
MYLCILNQDGEILVHRNMPAGPEPFLKAVAPYREDLVVCVECIFTWYWLADLCAREGIPFVLGHALYMKAIHGGKAKNDKIDSQKIAVLLRGGMLPQAYVYPAAMRATRDLLRRRMHRMRKRAELLAHVQNTNSQYNLPGIGKNIAYKANRDGIAERFPDPAVQKSIEVDLALIGHYDHLLNDVEFSIVHTAKQHDPQTLSRLQSVPGIGKILSLVLLYEIHTIDRFPRVQDFVSYCRLGKCAKASAGKRYGTSGAKIGNAYLKWAFSEAAGLFLRTNPAGQKYLARLEKKHGQGKALTVLAQKLARAVSYMLRRKTAFDMPMFLQSS

SEQ ID NO: 155821 - protein, 389 aa, unidentified
MPYHVGIDVSKWKHDVFAMDQDGAVALKPFQIRNDAEGFSNLLKSLEALGDKAGVRICMESTGHYHKAVYGFLKDNGYSPSVVNPYLVSVFVRGATLRKEKNDRADAIALARYSLEKRPAPGESQSDALEQLKSLTRARDRLVRERSDKIVVITNCLDRIFPEFTGFFEVKSAVARLILSKKADAESIASMTPAFMERARKLSRRASALRIQSLKEAASKTVGRPDPAASAIISVTIPVLESVDEAIGRIEGEIKAIMSGMEEHVSSIPGISVISAAAILGEYGDISRFSNPGKMLAFAGLESSHSQSGQSDSHGKMVKRGSPHLRYVLMNVAITAKSWNQVLAEYYNKKRVTEGKKRRVALNHVAKKLIRIIWKLQTEGIDFDASKLR

SEQ ID NO: 155822 - protein, 407 aa, unidentified
MLFVGDDWAEDHHDVEVQDETGRRLAKARLPEGVVGVARLHALVAKHLGEDGEPGQVAVGIETDRGPWVAALVAAGYQVYAINPLQVARYRERHCTSGAKSDAGDAHALADMVRTDRHQLRPVAGDSGAVEGVKVLARAHQNLVWERIRHVLRLRSALREFFPAALAAYPDLDAPDTLQLLAAAPDPASAAGLSVEQVAAALRSARRRGVPAKAAAVVAALRSKQLTQPEALSAAYAASVRAQVAVLTTLNTEIARLEARLEADFGQHPDAEIILSQPGLGPVTGARVLGEFGDDPDRYADAKSRKNYAGTSPITRASGKKKTVQARYVHNDRLLDALHSQALSALSGSPGARAYYDALRARGAGHNAALRQLANRLVGILHGCLKTRTLYDEAKAWAHHTTGQAAA

SEQ ID NO: 155823 - protein, 408 aa, unidentified
MEVLYPRCAGLDVHQQTVVACARVASGSSVQQDVRTFGTATADLLALADWLTAHGCTHVAMESTGVYWKPIWHVLDGQFDLILANALHIRSVPGRKTDVNDAMWIADLLAHGLIRSSFVPPAAIHELRDLTRTRKQLVREVAQHTLSIQKVLEDANLKLTSVISDVMGMSGRAMIEAIIRGEQDVERLADLSHGRLKASRPAVIAALQGRVTPHHRFLLRLHLTHVDAVNAAVREVEARLGEALAPFQAAVDRVMTIPAVGCTVARVIVAEIGFDMSRFPTAGHLISWAGLCPRQQESAGKRLSTRTRPGNPWLKTTLVQVAWVAARTRNTYLRAQFLRLKSRRGPKKAILAVAASILTAAYHILKDEVTYHDLGADYFERRDQTKLARHLIRRLEHLGLSVEVKPAA

SEQ ID NO: 155824 - protein, 326 aa, unidentified
MQSILGIDVSKSTLDVVLMTESGNFHKTIRNTSQGYQQLEKWLVDHQAEEIHACLEATGQYGEAVAEYLYASGQQVSVVNPARIKHYGESKLHRNKTDKADAALIAEFCLKEKPALWQPLSPEIKHLRALIRRLEDQKANLRQETNRLTSGEKDSWVMEDLQNHVDYLQERIAATEKEIQDFINKTPSLKSQQKLLTTIPGIGDLTAFTLLAEIGDVSSFDNAPQLAAYAGLNPQGHCSGSSVHKKTRISKQGRSELRRCLYMPAVVAISYNPVVQDLSHRMAERGSIKMEIVVAAMRKLLHIAYGVLKNQLPFDPNYSAQFDYSS

SEQ ID NO: 155825 - protein, 351 aa, unidentified
METQITAQPNLFIGIDIHKRSWKIHCATDLSSGKTFSMPPRPDALKAYVTKHYGDYQVTTAYEAGCCGYYAHRCFESYGWSSLVVNPADIFRRGKERFTKTDRIDAQLIARELKDGRLASICVPDKCREQLRSLFRRRNDLVKDMRQIKSYIKMQLLYYGIEIPPEYDNDHWSHNFRHWLDDLKFEYDAGTEVLRSRLRSFRFIDQEFRDVSTLLRRHTKTHFKQDYMLLRSIPGIGPIVASGILSELGNLRRFSSIKQLAGYVGLAPGIYQSGDTIRHTGVSMRAHRLIRSYFIEASWQAIRTDPVMQAYYRKHQGKNVKSVIVKVARKLLSRTLAVIKTGVPYEIGVVE

SEQ ID NO: 155826 - protein, 341 aa, unidentified
MQHVAIDLGGRESQLCARATDGSIVKESRVCTKSLPQMFTTMEPSRVILETSAEAFLIADAALASGHQVRVVPATLVKQLGVGARRVKNDRRDAQVLSEASCRSDLPSVHVPSALARELKSLCGSREILVKSRTMLINNVRGWARTQLIRVRTGSTPTFQDRVRDYAQTHQIAIPDHIERQLVVLDSLKLQMKGADQQLATLASAHPVCQRLMTTPGVGPVTSVRFMAALDDVTRFRNAHAVQSYLGLTPGENSSSDRKQHTGITKAGAMEVRRVLIQAAWAAMRSAPNEPMVRWATQIALRRGQFIAVVALARKLAGILFAMWRDGTSYRRCPSKEVMPT

SEQ ID NO: 155827 - protein, 343 aa, unidentified
MHTVTTIGLDIAKSVFQVHGIDAQGKVVIRRQLRRRYVLAFFQKLPPCLVGIEACASLHHWSRELQALGHTVRLMPAAYVKPYVKRQKNDATDAEAICEAVTRANMRFVKTKTAERQSCLMLHRTRHLFIRQQTAVINAIRAHLAEFGIVAPVGRNGVEELLEVVADPSDKRVPEVARVCLAALGAQLRLLKLRILEFDRMINAWHRSSETSRRLDEIPGIGPALATALVASVADPKAFRSARDFSAWIGLVPRQRSSGGREKLGSISKQGRSLSARPVHGWRAGRDPLCQIHGTKHRPWLTALLARRPTKVAAIALANKIARMAWALMARSERYREPVALAA

SEQ ID NO: 155828 - protein, 481 aa, unidentified
MKAKSQENIPKPTDPSTRGHWNEMNRKQRRETMRKIESEDLSLEVVHPHAAGIDIGNESHYVAVPPTRDSQPVRCFGCTTVELKVMVEWLKQCGIRTVAMQSTGVYWIAVYDILEAAGLDVYLVNARDTKNLPGRKSDVQESQWVMKLHTYGLLRNSFRPSQEIRTIRTYWRQRNDLIRAAVSHIQRIQKGLTQMNIQLANVLSDVSGVTGQAILKAILAGEGDPHKLAALRDPRVKASEEQIARYLEGNWQEDLLFVLKQEQEGYEFCQHQMAECDRQLEQYLQQQEDRTQGASLPKEMRKGRLLKKKGNKPAFDMRAELFRITGTDLTQVDGIDVTTAAAILSEAGWDMSKWENEDHFVSWLRLCPDNRISGNKVLGKGRLPTNNRASIALRMAASTLRVSNTYLGAQFRRFRSKLGAPVAIKAMAAKLARLVYRMLRYGMKYVDQGAKFYEAQHRERQIGQLKWKAAKLGFRVVEAAA

SEQ ID NO: 155829 - protein, 343 aa, unidentified
MDHFAGLDVSVKETSLCIVDDTGRIVREVKVASEPEALLQVLKNPAYHFKRIGLEAGPLSQWLFSALAEAGLPVICVETRHMRAVLKAQINKTDRNDARGMAQMMRVGLYRPVHVKTLRSQKLRMLLTHRKLLQSKAIAIDNDLRATLRNFGLKVGTVGRAKFEARIKELVEDLPDLVILVEPLLIVRRVLREQVGILHSRLLAVVRDDDVCRRLMTVPGVGPVVALTYRATVDVPARFRNSKAVGAVFGLTPAKHQSGEVDRTGAISRCGDEMMRMMLYEAAQIVLVRSAKWSWLKAWAMKIARHRGLKKAIVALARRLAVIMHRIWVDGTEFRWTRDVAAA

SEQ ID NO: 155830 - protein, 309 aa, unidentified
MEQQVKFEQVIKCGCGMDVHKKSVVATIRQSDTDLETREFNTYTRSLKSLREWCKTEGVTHVAMESTGIYWRPVFNILEEDFEIILVNARHIKNVPGHKTDKKDSRWISKLLLSGLLKGSFIPPREIRELRDLVRYKKKIVGQIASEKNRVIKTLEDANIKLSSVFSDVNGASASKMITDILVGKEEVEGLMEHIHGKVQAPRSEIRQALEGTLTDHHRFMLQLIKRSISEKEQLLTVLDEQIEKAAQQYKVELDLLQTIPGVGKDSSVRIISEIGVDMIRFPNEHHLSSWAGMSPGSNESAGKKKVQE

SEQ ID NO: 155831 - protein, 355 aa, unidentified
MPAQTQDQQMNVYIGMDVHKKDWKVTILTDQLSHKTFSQPPNPQVLVNYLHRNFPDSIYHSAYEAGFCGFWIHRQLKAQGINSMVVNAADIPTTQKEKLQKEDKRDSRKIARGLRNGELSPIYVPDVQRVEDRSLVRMRHLLVKDMRRYKQRIKSFLYFHGIIIPAEYERASEYWSKPFMNWLHNIKMNHLSGQQSLKMLLRETESLRQSLLEITKSVRDLSAAPEYANQNTLLRSIPGIGLVTAMTLLTELDNIDRFDTNDKLRSFIGIVPTTRSSGEKEKHGEMTMRGNHLLRKMIIESSWVAARIDPTLTKAYHAYCARMEPNKAIIRIARKMVGRIHFVLKNQKPYKLLEK

SEQ ID NO: 155832 - protein, 355 aa, unidentified
MMRTVYCGVDFHARMQTIAYCDSADGEIHLAQLDHRKDDVREFYSKLTGQVIVGLETGGYSSWFEAMLEELGHTVWIGHANEIRRRANWRQKNDRRDAELILEIMLKGDFPRIHCHNRESVEALRMLRYRARLVKMRTMISNNLQAIAISSGLTQRSRMLSRAGQQRLRNARMTPAIKHQSEDLITLLVPLNERIAKVDRWLKEQASVDDRVKLLMTHPGVGVLTALGVVHTLEPFNRFSRQRSVVAYVGLEPRERSSGERKRYIGISKAGSRLLRFLLGEAAHTAVRLDPELKQFYERVGKRRGKSKATVAVARKLLIRCWIMLRNNIDYVEFRNRGVEARLARNINRPSVPVE

SEQ ID NO: 155833 - protein, 426 aa, unidentified
MKEHIDYLSTLFVGIDIASRIHVISALDFNQDFFIKMKPFENTKEGAGIVEKMIADVLADNHQFKYVVIGMESTGFYGVHLANYLSTSELLAPFSVRVYCLNPKEVKNYKKSFNDIGKNDGIDSFVIADFARVGRIAIKPWRGSQYLALQRLTRHRMHITECITREKTYMLNNIYLKFSEYALLRNGEHPFSNKYGATAEAILTEFTTNEDIVNSSIEELVEFINSKSKGRIADPEETAKIVQAAARNSYRLDKCLYEPLTISIASSFNCISSFEKELKAIDKAILQTVQGLNPEEYTVLNSIPGIGKVYSAGILAEIGSIKAFQNANQLAKYCGIVWNDNNSGDFESEDSRMSKAGNRYLRYYIIEATGSVISHCPEYKAFYQKKYAETRNHQHKRALALTSRKFIRLLFGLLDKGQLYSPEKGR

SEQ ID NO: 155834 - protein, 344 aa, unidentified
MEHFAGLDVSVNETSVCIVDETGRIVREVKVASEPGALLAVLKNGAYRFKRIGLEAGPLSQWLYSALGEANLPVICVETRHMRAVLKAQINKTDRNDARGIAQMMRAGLYRPVHVKTLRSQKLRMLLTHRKLLQSKAIAIENDLRGTLRNFGLKVGTVGAVKFEVRIKELVENLPDLATLVEPLLVVRRVLREQIAVLHRRLLAIARDDEVCRRLMTIPGVGPVVALTYRATVDVPARFRNSRAVGAVLGLTPCKYQSGESERTGAISKCGDEMMRVMLYEAAQILLMRSTRWSWLKAWAMQVARRRGMKKAIVALARRLAVIMHRIWTDGTEFRWTRQQAAGA

SEQ ID NO: 155835 - protein, 340 aa, unidentified
MEKRYIGIDLHRNRFTCCIRLENERTYVTEWALEALARFVKKLRATDEVAVEITSNTRLFFDAVAPRVKRVVVVDTNQFHVISQSVKKTDPNDARLLSLYLSKNLLPEVRMKDKDRAQLASLTQTRDTLVKQRSALKNKVNNILSARGLNLAKEALSSEKKLGEVLELPFDEIVRTELRVVVEQIRSLNKSIAELEKTIGEEGSKLEGHKGLSSIKGIGKITGAILLSVIGDVNDFADEGRLASYFGIVPRVSNSNETERSGRIHKRGTKLGRTALVQSALIAANYSPYLKRFYEQVKARKGAGKAIIALAHKFLGIIYRTLKNKWIFEDFPNFVLAEES

SEQ ID NO: 155836 - protein, 385 aa, unidentified
MQASNVCTPTVDHFGTILVAIELSRQSWLVTMHSPDRDRISRHKLPGGDHAGLLALIERAQERAARALGSVPAVVSCYEAGYDGFWLHRRLMAAGITNHVFDPASIAVEQRARRAKTDRIDGELLLRTLMAHWRGEPRVVRIVRVPSAEQEDARRDTRERQRLITEQTAHTNRIKALLRLLGMAVGNPRRRDWLIWLAAQRDWQGQPVPPRLAAELEREHARLMVVREQLEALSQAAVGADAPAAAAQMARRSALLLRLKGLGPVFAATLTNEVFYKDFRNRREVAGYCGLAPSPWRSGATNHEQGISKAGNPRARHKAIELAWLWLRHQPDSALSQWFRERTLNGSGRIKRIAIVALARKLIAALWRYLTTGLVPEHAVLKAKA

SEQ ID NO: 155837 - protein, 400 aa, unidentified
MRVVFGIDVSKVSSEVAILVNGEKVHGYTMPNDAIGFARLLGDLKTVHKPEIIFEATGVYSRRLQAFLEDNGYAYTRLNPLEAKKQLDSLRVRKTDQIDAEKLAQSQFVLNRKPTYVQEEVYQNLRDLSRFYQNLTEDIVRAKNRLHKVLQVTFPELENILATPTGEQYWNLVTAFPCKDFVLEVGKDELSESILQSTSKRISDKRVAYLAEKLTALANQSYCAVKKTSPMFEEIRYYAQELLRLSERRKAVLDQMVTLAKPLPEYEILLSIPGIAETTATSIIGELGDIRRFQSANQINAFIGIDLRHYESGNFLAQEHITKRGNPYARKILFKCIHNIASASHTNPCHIADFYEKRKRQSQTTSTKPHTIASIHRLIRTMYYLITHNKLYDYTSTQNQ

SEQ ID NO: 155838 - protein, 385 aa, unidentified
MTNQLQDTTFIPRDYEIFGGLDVDKKSMAVTFRDHGIMRKSLRLPYSASDLLNYTRKHFPGQRVAFVYEAGPTGFGLHDELTAASHACLVVSPSMVPTVQRKRVKTNRLDSLKLAEGLRGGQLRGIHVPPPSYRELRHLVQLRDTQVAQLRATKCRIKSLLLYEGIPFPTANGKWSGPALRELEALPCNATVRFKLDQLIDALQFHFQSAAKVQKQIRYFCQNDPELRGCISFLVSLPGVGTITATHALARLGDWRQIKDVRQIAGFLGLVSSEHSTGDKENRGEITRIGDSRLRNKLIQCAWTAIRKDPELRAFYRRIYERQPRKVAARKAIVAVARKLTTRMYAVLKEQRPFVIRADSSIAPLTAEETGGPRERLDAAQNEQP

SEQ ID NO: 155839 - protein, 350 aa, unidentified
MSKHSVAAGNMAELLTLFAELKRKTEVRTGQSYPIITIQEAGLDGFWLHRVLQQEGIESHVVDPASIATPRRRRRAKTDRLDGETLLRALLAYKRGEPRVCAMVVAPSPEEEDRRRLCRERQALIAERITHVNRIKGLLFSQGISDYAPLRRDRRSRLETLRTGDGRELPSHLRAQIGRELDRIELLLEQIKAVEAERDGLLAAARKPAEKPADEKAALDPVAMLLALKGLGANFAAVLWSEAFYRQFSNRRQVAAYAGLAATPWQSGGIRHEQGVSKAGNPRLRTTMIQLAWLWVRHQPQSALTRWFKERSQQGRKRAIVALARKLLVALWKYVTQGVVIEGAVMKPAA

SEQ ID NO: 155840 - protein, 365 aa, unidentified
MKKIAYVGIDYHLKTLTCAVLIEGEKELFDTMRFTNIDKNIKKYMKKLSDSYDIRTCYEASCNGYSFQRKMQSWGYHCDVIAPSLIPKKPGDRRKNDFRDARTLVQNYAHGMLTIVHPPTEREESVRSFIRCRIAMKKNEKSVKQQINSLLLAQGLHWGKSKWTSQHRIWLKKIELQDENSQMVLEEYFGLLEYLSSRIQYLDQKIEDIANSKIYAPSVKKLKAFRGISTLTAMLLIAEITDFKRFQNPRALMAYLGLIPSEDTSDDKQKGGTITKAGNSRCRTQLVESMIHYIKRPIISATMKRDLKNVDAHSANIAIKCMKRLHKRYWSLVMKGKNSNKAKTAIAREFVGFIWAMMQPEPATI

SEQ ID NO: 155841 - protein, 409 aa, unidentified
MPNAEAQLPPEWPKAAEGTQSVPTLWAVNYSDGMDASRPFIRHRRAMLRVLITAEEPETCMTSSMTIAVDLAKTVFEIAIADSEWRIVERHRLSRSQFQQFFFNREPATVVMEACGTAHYWGRWLTELGFSVRLIPAHYARPYRRRNKNDAADAAVLVEASRSAEIIDVPVKSSEQQAIQGLHRIRSQWMTTRTARINNPRGLMREQGINIPVGAATAVSAAPGLIDSDAVPEALRAALQEIVSEIHSLEERMKTVERQLKQYAATSRDVQSLQQVPGIGLLTATALVAAVGTPDNFRDGRHLAAWMGLTPRHVGSGHRMHLGGISKRGDRYLRMLLIHGARSVMIRAQMNARAGQPLNRLQQWALDLRQRSNHNKATCALANKLARIAWAVWAHDRAFDGNHSLGQAA

SEQ ID NO: 155842 - protein, 387 aa, unidentified
MGVIIGMDPHKRSATIEVVDERGQILAAGRYGTDKAGYAEMLQAGRKHPDRLWAVEGCNGVGKHIAHRLVHDGEPVVDVPAKLSAQARVFATGNGRKTDPVDAHSVAMVALRTPSLLRVEVDDDLLVMGMLVDRRDELGRAHTQTINRLHRLLLELFPGGAPRFLSSHKARAMIATIKPRDIVGKTRRRLAVELIVELEAIDKRIKAVKKELAALVQARGSTLMGLTGIGPSGAARLLADVGDIHRFADRDRFASWNGTAPLDASSGDQKRHRLSRAGNRRINRTLHIMAIVQLRNPTEGRAYFDAKKAAGKTSMEAMRALKRRLSNVVHAQMVADQKRREAADPGGHSGTTLQSSVTDLTPDIGSSDKPLPGPATTQLRTVLVTAS

SEQ ID NO: 155843 - protein, 361 aa, unidentified
MSLANWLVAGMIPGVDREPRKKIAPNPEVLLLLLYRWRDEAIKAGKEITRIAVAYETGRDGFWLARWLRARGIDANVIHATSVAVSREHRRAKTDRIDTAMLQRGFLGWLRGERGHCSMAIVPTVAEEDGRCPHRERETLVKQRTSTANRMKSILIQFGVRNFNPVLRKAPEKLESVRTPEGIPLPSNAVAALQRQMQRFRVIKEQIKAIERTRLQRLQRNPAEKFNAMVFLLVRIIGLGIETAEQLVHEILSRNLRDRKAVARYAGLTGSPDESGSKRREKGLSRSGNGRVRKILIQLSWRLLKFQPESDLVRWFKTRTANAQGSRKPMIVALARKLIIALWRYVNTGLVPEGFQLRSAA

SEQ ID NO: 155844 - protein, 343 aa, unidentified
MVYHIGLDVSLKQTSICVVNQVGSVVREGVVDSDPEAIAAFVRSKAPGAVRIGLETGPTATWLWTELKQLGLPVICIDARHARAVLKMQINKSDRNDAAGIARIMQTGWFKEVRVKDLDSHSVRALLASRALLVKIKRDLENQIRGLLKNVGLVIGRAKFNVFTMRTEELIADRPEMIAVVGPLLKARQAIEQQTDDLDRKVLKLARYDAQVRRFMTVPGIGSITALCFKATIDDPTRFKRSRSVGAYVGLTTRRHASGEIDWTGRISKCGDAMLRSYLFEAAGVLLTRVPKWSALKAWGMRLAKRNGLRKATVAVARKLAVILHRMWIDRTEFNWSKEEVAA

SEQ ID NO: 155845 - protein, 344 aa, unidentified
MEHFAGLDVSVKETSVCIVDEAGRITREVKVASTPEALMQVLRAPAYHLKRVGLEAGPLSQWLFGALAEANVPVICVETRHMRAVLKAQINKTDRNDARGIAQMMRAGLYRPVHVKTLRSQKLRMLLTHRKLLQSKAIAIENDLRATLRNFGLKVGVVGTAKFEARIKELVGDDSDLVLMVEPMLIVRRVLREQLAILHRHLLALARDDGVCRRLMTVPGVGPVVALTFRATVDVPARFQNSRAVGAVFGLTPCKHQSGESDYTGGISKCGDEMMRMMLYEAAQILLIRATKWSWLKSWAMQIAKRRGVKKAIVALARRLAVIMHRIWIDGTEFCWIRQQAVAA

SEQ ID NO: 155846 - protein, 352 aa, unidentified
MLIIGCDFHPGFQQAAIFDNLTGEMQEKRLQHRAEAEQFYQSLAGQEVLVGMEACGHYPWFERLLAGLGIELWWGDAARVRAGEVRKQKTDRRDAEHLLRLLRENRFPRIWVPSLEVRDVRQLLVHRHKQVQARTRTKNQLQAMALSCGVQKKYKLWTKAGRAELEQLPLLPYAAERRKRLLETLDGLEAAIGELDRRVAEEARQRPEAVLLMTHPGVGSVTALAMVLTLGPAERFASGKQVGSYFGLIPREDSSGGKQRLGKISKQGSSYLRFLLVEAGQTAARLDPQLKCFYRRLAGRRNRSVAKVAVARKLATRLYLMLREDWTYAQLCQAVMQVSPSHSVAGEQGPSA

SEQ ID NO: 155847 - protein, 461 aa, unidentified
MKSNKPAGKRKESAGPKVDWKALEIVHPNAAGIDVGGSEHWVAISPDRDPEPVRRFGCFTADLREMGQWLVEKGVRSVALQSTGVYWMPVFEILEQQGLEVYLVNAQHTKNVPGRKSDVQECQWLLKLHTFGLLNNSFQPTDEIRVARALWRQRGNLVADASSAIQRIQKVLIEMNVQLSNVLSDISGVSGMNIIQAILDGQRDPWELAAWAAPGVKATAEEIVKSLEGNWRQELLFVLRQQVELYRTYQEKIRDCDLELRRHLESLGSKVDLEAQPLGPKPKGKKSGRNTPRFDLRTELYRITGIDWAQVNGMDVVTAQTVIAECGADLSAFPSEKQFTSWLGLVPTNEQSGGKILKRRTRKVVNRAAMAFRNAASTLVRSQSYLGAQYRRLRARLGAPKAITAMARKLACLFYRLLKHGQQYVDKGMEYYEARYREQQIRSLLKRAQKLGFQLVTTKAG

SEQ ID NO: 155848 - protein, 482 aa, unidentified
MSQTSKPKSKRRTANKTAVGQGKRGRKGKGMCFADRPILEPNAAGIDIGAREIFVAVPPDRDADPVRIFSTFTEDLERMAEWLVSCGITTVAMESTGVYWIPPYDVLERHGLKPCLVDARGMKNVPGRRTDWHECQWIQFLHSVGLLRAAFRPEGPVCAVRSLMRHRGELVAMTSQHVQHMHKALTQMNVQLQHVISDITGLTGLSIVDAILEGERDPAVLAKLRDPRIKASPETIQKSLQGNWRVEHLFTLRQSRKSYTHYQQQIIACDAEIEKLLVAFAPRVDPAERPLPASRKRQRKGRKERTTNPRTGFDLRTESYKLFGVDLTQIPGLLVMVLTLFSEVGRDMSRWPTAAHFVSWLGLCPDNDISGGRVLWKGVRHVKNRAGQLFRLAAHSLHHEESELGDYLRRMKAKLGPEAATTATAHKIAIIFYTMVKKQVEYDATLWSQRNTERERRFEAKLRRQAERRGYRLVPMDENAAA

SEQ ID NO: 155849 - protein, 544 aa, unidentified
MAENIGNNSSRRCKSTRRKKARRRQSVQKPNGTIGPRVKKVGTDKFAIVCVDPAKHRSEWLMADYFGNLLLGPCTLEHQAEHFALAVQSIRQAQQEHGIEDLIVTVERTGNYHMAAKRAFGKAGFETRVIHPFATKQYRLPADPGNKTDPTDLAAQHRAAIAGFGLKEPELEEPYRRLRLRVRHRRDLVEKASAIACQIREHLHLAMPGYANLFDNFFSHQTALAAARLADTPQALLQLGRAGLHHKLREQGRRFQARTLDKILAWARQAAGQVPDPDASLHHAIWTDLHDLYQALHQRIRPLERDLAGDLAQTPYVRLMSIPGINVVSAADFAGEMGPIAHYANANAITGRSGLFPSRYQSDQTDHADGTIVRCANRRLRAAIMRIADNLARLNSHFRGRAGLDRAKGVDERALRVRIAKSFTRLGFACVAGDQPLKHPCCCAPDSILEKLRAFHHQHATPLDHVLGDLQAAVGQLPFKTRNHEAKIVAQVLHQQTQRRRGPAKLAELLPAVLARLGVAKPPKPTGTSIPDQPTSDTGGSTPP

SEQ ID NO: 155850 - protein, 422 aa, unidentified
MSYCPVAGIDVSKRFSDMCILSPDNKIFAQEKIYHDETSINRANALLQKAERLCFSKPVIVMESTSHYHLILFQFFSEHGYNVIVVNPLQSNSMKDFSIRKRKTDRVDAFKLAMMYRTKTLRPSQIPQTATRALRQLCRHRAELLNDVSSYKNRLTALLDQTFPGYDKVFSDVGGITSCAVLVRFPTPTILLVEEESELVEVIAAASKSGYSFAKKKAGLLISAAQKAQTLGIHSCADETLIVCTIQMLRTLSESVLQIETAIDNLLAQIKELRNNVSLLQSIPGIGSHSAALLLGEIGDISLFKKPKQLAAYFGLDPTERQSGSFRGTKNKLSKRGSPYARAALHMGVVNSICKRGKDSAANPVLLSYYEKKCKNKPAKVAQAASMHKLVFIIFAVLRDQKPFELKTPEQHAVEQGFVKAA

SEQ ID NO: 155851 - protein, 490 aa, unidentified
MTVILLLGLSVGTGHANARNQRRRLVGAGEGYGMKRTIGIDLGVTSASRMAVAEGVTLISNRRIRSSPDALTRAIRDASGGDAVDVVLESTAMAWFVAGVAAQRADVEHTLYRVSGRKAAALRAFYRAHTKTDRIDAPVLARMPFVDDGLRAFTLPSASELALKRLVTYRARLVREATRGKGRVRSILHWAAPGLIRGNGVSDGIIDMLRRWPDLRKLANAHLRSIAKQAGISLDRASEVRQSARDAIAFYRERIDYDALALELDINTAHLQSLDAHLQRLDERIALEHQRAYPNDVLTSIPGVGPVVASVVRATIGDARGFNNASTLRAYTGLVPREDSSGDAQRRGRINKAGPHLLRWALYLAADTARKHDPQLAALYRRLMVERGRHHNQALCAVATHLTDRIYALLREHRAYQARDLDGRPVTAAEAKRIAATLAVDRATRERLRIRKRQGGPREPKSRQPTAPQGTPRPSPTSLAEQALEHARRT

SEQ ID NO: 155852 - protein, 386 aa, unidentified
MFKTEKAAIAIHTNLGAIFVSLELSRSTWLITSLSPGNGERMSKHSLRAGDVAALFGLLSKLRERCRAKTRNDYPIVTIQEAGLDGFWIHRVLEKAGIESHVVDAASIATSRRHRRVKTDRIDGEALLRVLMAYKRGEPRVCSMARAPSPDEEDRRRIGRERKALTAERVAHVNRIKGLLFSQGITNYEPMNTDRRQQLEDLQTGDGRALPTHMRAQIGRELDRLELLLEQIRTVEDERDALIAAQTAETMPSPVTMLLEIKGIGTEFANILWVEGLFRHFDNRRQVAAYAGLAPTPWQSGAIDREQGVSKAGNPRLRVTLIQLSWLWLRHQPNSVLSQWFNARVHRNGGPMKKSTIVALARKLLVAIWKYVASGVVIEGAIMKKA

SEQ ID NO: 155853 - protein, 339 aa, unidentified
MQLYAGLDLHSRNTYIGIMDKEFKRVFGKRVLNKLPVIVKTLAPFQDQLQGIVVESTFNWYWLIDGLMDAGYQCVHLANPSAMKQYEGIKHTDDQHDAFFLAQMLILGILPQGYIYPKEDRPVRDLARKRLFLVRHKTSHILSLQSLIARCCGQRVSANEIRKFTVEDLQRLLEQEYIVLSAQANLDTIVFLKQQIQQLEKAIQKKVKLNKAFQQLLTVPGIGLILAMTIMLEVGDIGRFPQVGNFASYSRCVPSNRLSDGKSKGHGNRKNGNRYLSWAFTEAAHLSRRYNESFRSYYNRKVAQANTSLATKALSNKLARICYYLMRDQVPFRQELLSH

SEQ ID NO: 155854 - protein, 425 aa, unidentified
MTRRVRASGQAQVHARYHITGGCDTDKNIIVAAIYQADTGDLQAKEFHQHREDALRAAAWFQSQQVELVVIESTANYHLLYYDTLREQGINIAVINPIVVKSLLRVEGKSDKGDAMTLARLAASFDLKTSNMPDGQQRELRLVFKRIDAWKTQRTQITNRANGVLTGYGFTAFRLVPINSPSGFRILQAVLDGCSATEIAATHSRKAKRAELEKCVGVSLPNYLRDYLQEVMQDVRMYNQRIQQGEAELLAKISVCQLTEQLNLMCTVPGVSKMLAMRIIAEMGDNYHQRYDSAAAFAKAIGVVPSNEVSGGKLLKRRASHGNKRVKLHLLTVAKVYAIHGKGHLREWYNSYRSRTTYMKATSALARRIAEALWWVLTRSEPYRYWQGELARTGNELVEVGGQVVDPETGEVLDTLEPDPVTVEV

SEQ ID NO: 155855 - protein, 328 aa, unidentified
MNSICLSTDQGKLPVLGLDVAKNSVQAELRIAGKNVRFGFANNPKGFAQLARILDRHNAPKIWAGLEATGPYSHALALWLHARAHRVSVLNPRRVKQYARSAGNRNKTDRLDAAVVADFLCAHHPAAWRPPLQEVVELRALVRRREELSLMLQAEKNRLEGVASQVRCSLERIIVMLSAEKARVEKLILKQIRSHQQLCRDHQLLCTIKGIGSLTAAILLGEMASPDQVQRTRQAAAHAGLVPRHQESATSVRRNRGIGKEGNRYLRKALYMPALVAIKYNAPLRYFASRLRAACKPKMKIVCAVMRKLIHVAFGILKHQQPFNPSLA

SEQ ID NO: 155856 - protein, 320 aa, unidentified
MAEEFQSFVGIDVSETWLEVCVLPQATRQRFAQDAQGWQALAQMLAGQPAPLVVIEATGGLERPAARLLSAADIAVAVVNPRQTRQFAKGLGWLAKTDRLDALMLARYGSLARPIARAPLDVAQARLQALVLRRRQLAQEINAEGNRLRRATEPVIRDSLSAHLAWLKAELAALDAHIAAALAARPEDVERAAILASVPGVGPVATSALLALLPELGRRDGKAIAALAGLAPIAQDSGKRRGQRCIEGGRAVVRCVLYMATLVASRHNPAIRAFYQRLVAAGKAKKLALVAAMRKLLVILNAMLRDRTIWNANHPAATNL

SEQ ID NO: 155857 - protein, 411 aa, unidentified
MERVLERCCGLDVGQKTVAACVRIPAPNGGREQIIRTFGTMTADLLALRDWLLAHGVTQLAMESTGVYWKPIYYALEDELTVLLVNARHVKNVPGRKTDVSDCAWIAQLLEHGLLRASFVPPAPIRELRDLTRYRKSQIQERAREVNRLHKVLEDAGMKLAAVASDVLGVSGRAMLEALLHGTTDAETLAELSRGRLRKKLPQLRQALNSRFGAHHRFLVGRIIAHLDYLDESIAECSQQVELLLRPFASVVERLKTIPGVKQRTAEVIIAECGLDMRRFPTPAHLASWAGMCPGNNESAGKRKSAKTRQGSKWLRIALIEAAQAAARTDTALSARHRRIMRHRGYQRAVVAVGHEILVIAYCLIARATTYQELGSTYFDRRYTERTIRRCVRTLEQLGHQVTLQPMAAVA

SEQ ID NO: 155858 - protein, 370 aa, unidentified
MAKRSMFVGMDVHKESIDISLAEEGRDGEVRHYGGIAGDLEALAKVVKALRAPTRRLRFVYEAGPCGFGIHRYLTAQGEECVVVNPSSMPKRSGDRIKTDRRDGDALARLHRAGELTAIYIPTADDEALRDLVRAREDAVGLSTQAKHRLKAFLLRQGRRYPGRAGWTQAYRRWLADLSFPLAPQHIALQEYRDTIDETERRVERLTDQLRAHTPAWRWAPVVNALQALRGVSFVTAVGLVAEVGDIRRFDHPRQLMAFLGLVPSEYSSGPSVRRGGITKAGNPHARRLLAEAAWAYQGLPRIGRQMLYRQEALPKPICDIAWKAQLRLTSRFRKLVARGKSKPKVATAVARELTGFIWAIAREVPAPLA

SEQ ID NO: 155859 - protein, 400 aa, unidentified
MIDTIGVGVFLGLDVGKSTHHGHGLTPAGKTVFDKALPNSEPKLRAVFDKLTAKFGTVLVVVDQPASIGALPLTVARHAGCQVAYLPGLAMRRIADLYPGEAKTDAKDAAVIAGAARTMPHTLRTLDLADEVTAELTMLVGFDQDLAGEANRTSNRIRGLLTQFHPSLERILGPRLDHPAVTWLLERYGSPAALRKAGRRRLVEVVRPRAPRMAQRLVDDIFTALDEQTVTVPGTGTLDVIVPSLAKSLAAVHEQRRALETRIEDLLEAHPLSQVLTSMPGIGVRTAAVLLTTIGDASSFPSAGHLASYAGLAPATRQSGTSIHGEHAPRGGNRQLKRAMFLSAFAALHDPASRTYYDRCRARGKTHTQALLRLARHRISVLFAMLRDGTFYEPRSPRTA

SEQ ID NO: 155860 - protein, 458 aa, unidentified
MVQTKRPRSRREMPAVHPDAAAIDVGATMHVVAVPPDRDPEPVRTFGTFTADLHRLADWLRSCRIKTVVMESTGVYWIPIFEILEQKGFDVQLVNARDAKHVPGRKTDVSDAEWLQRLHEHGLLRGSFQPKGEVKALRSYLRQRERLLDSAATYIQHMQKALTQMNVQLHHVVSDITGVTGMRIVRAIVAGERDAATLASFRDSRCKEPVETIREALIGNYREEHVFALTQALELYDIHQKKVAECDKRIETVLEQLKATRPTPAKPLPAPRHKTKQPNAPNFAARDALYAVLGVDLTQIHGLGPYLALKLIGECGTDLSAWPSAKHFTSWLSLAPRNKISGGKILSSTTRRSNNRAASLLRLAAVTVGRTETALGAFFRRLSARIGKAKAITATARKIAVLFYNALRHGMKYTDPGAAYYEERYRQRVLSNLQRRAKAFGYVLQAAAPKAPQAVGVS

SEQ ID NO: 155861 - protein, 319 aa, unidentified
MSEVVYRRYCGLDVHRDTIVVCVLPRVGQSGTAIRKVYRTFRNDLTRMRGWLKLLKVTEIAMESTGVYWRPVWNVLEEHGFRLLLVNPAQVKALQGRKSDPRDAQRIAEYLQDGRLDPSFVPPQEIREWRQMLRHRLSLLQQRGEVHNPIRDLFETASSKLSSVASDLLGVTGRRIIEAMLAGQDSPELLSWKVRGRLRKKEKQVKESLKGCFNEFHRMLLKAPYRHYQFLSEQVQTLEAEIERRMQPYARQIAALQTIPGVDQIVAWHLLAEMGPDMSVFPDADHCASWAGVSPGSCESGGNSGVAAPKKGTSICGES

SEQ ID NO: 155862 - protein, 401 aa, unidentified
MEAIVQRSAGLDVHKKIIVVTILLEQPDGSVSEETREYGTTYKACEGLASWLLSHEIQVSVMESTGIYWKNIYAALEKAGLRVSVVNARHVKQVPGRKTDVKDSQWLARLARYGLVKCSFIPPKDLRELRMVARYRTKLVGTLAGEKNRLHKTLDDAGVRLGNVVSDIGGVTATEIITGLVDGKSMDELLACTRGALNKKKDKLQAELEGELSARHLFLLKNLQEHITYLRNKLKELDNYIFEAMQPYQRQWEILQTIPGIDAVGAALLIIEIGVDMQQFGSREQFCSWAEMCPGNNESAGKKKSGKTPKGSKQLRYILCEAANAASKTDCQFQHKYKSLMIHRRHKKAIVAVGHKMLRVIFSRLKTGEVYQDSGISYKELVVKKNAPRWIKMLTKYDYAM

SEQ ID NO: 155863 - protein, 478 aa, unidentified
MEQRRIIGLDLGIASAHTARVLSGDGEVIAKRKAFPTTESLGALEVAALEGAPPGTVLEVVMEPTGPAWLPIAVFFISRGHKVFRVPSAKAHDMRRYLSRHAKSNSIDADALARLAIIDPIGLRLLELNGADEAALDRRVRACDRLTQEVALHKVRLKDLVRQLLPMTPLTGDIGAADLAVLERWADPHDLVNAGKTRLTRVLAAASHGMQKTDRADEWLAAARGSLELYGEHPGVAFADLAAEVATEIRLLRAIEAELVSHEEAREERYRSVDPEELARSLPGIKSVGGPALVATMGRAERFPSAAHFRSFTGLAPKASETGNTDRKGEPMSKAGNSLLRTTLVRAADWARKQDPQLARIYYIQMTERGKNHLAASCVVAAHLAERAWLVMRRGTPYVLRDIDGTVVTAAQAKAIIAERYSVSEETRKRRRSNKGGKAPQKVLTEHLKSHAKGVDRTRRPSPTTTSARSEKPVKRTA

SEQ ID NO: 155864 - protein, 418 aa, unidentified
MSVLNSLFVGIDVSKTSNQVYAMNFDQKKLLSFSAPNDSEGASKIEAKLLECLNKNNLEKVVIVLESTGMYSFHIATYLSSSEYLANYSVVVYCINPKTSQNYRKSFSEMDKTDPKDSYILADMARVGKVNSLSPVKGPQKLALQRLTRHRKHISEQIVREKLYVLNNIFLKFSAFDRKYDGFSPFSDPFTATAQAILLEYKSPEEIINTSIEDLTSFVATVSKNRFTDSKKVAETLTKCARMSFRLDKSAYEPINTAIASSLCILRCLQNELKHIDKEIENLIKGFNADEYKCLISIPGIGPTFAAGILSEIGSIKQFDNEEALAKFAGLTWRRHQSSENEHEDTPMTKTGNAYLRYYLIEAASMAILHNPVYKEYYQKKYNEVKTHQHTRALALTARKLVRLIYGLMSKNQLYNAN

SEQ ID NO: 155865 - protein, 488 aa, unidentified
MKAARQGKQSKQGKPAKTPSGGAKRSSPRWNRKQSRELARKIHAEDISLEIVHPDAAGIDIGNESHYVAVPPSRDQEPVRRFGCVTAELREMAAWLKRCGIRTVAMQSTGVYWIAVYDVLEEAGLEVYLVNARETKNLPGKKTDVQESQWLMKLHTYGLLRNSFRPGQEIRMMRTYWRQRNDLARGAARHIQRIQKTLTQMNVQLANVISDLSGVTGQAIVKAILAGERDGRKLAALRDGHIKASEEEIARSLEGNWQEDLVFILKQEQESYQFCHQQIAACDKQLKEYLKQCGDRSQGAPLPEEKRKHRRKKKRGNAPQFDLREGLFRLTGVDLTRIDGVDVITAATVVTEAGWDMSKWSTEHHFVSWLRLCPDNRISGEKVIGKERLRTNNRLTLAFKMAASTLRASDTFLGAQFRRLRSRLGAPIAIKAMAARLARLVYRMLRYGMEYVDRGAEFYEQQHRQRQILSLKLKAAALGLTIIVPAAA

SEQ ID NO: 155866 - protein, 462 aa, unidentified
MAERREDESRSEEARQIEGLPVVRAQVGGIDLGSQRHWVCAPGLEGRGREIADFGATTPELQRMLEWLKVRQVESVAMESTGVYWIAPQEVLEAGGLEVLLVDTRQLARVPGSNKKTDPSDCEWIQRLHSCGLLTGAFRPPEQVGMLRTLVRDKANLVAEAGDWVRRMQKSLDQMNVRVHRAVSDLDGVTGLAIVRAIVAGERDARKLAQLRDRRCQKSEAEIAEQLSGHWREDHLFSLRQSLKMYEATQERIAAYEQEILRKLREMTPEERAGQTAPAVKNPHKANAIRKRGEEPRRQAWYRMSGVDATQIDAIGVGTLEVVLSEYGPDLSRFPTEKQFISHATLAPHVPRSGGKVVKKKKRYSASTRVAAALRMAALALRHSPTALGAYYRSLARRIGGDVAVFATARKLATLIYRLLRWGQPYIDEGAQTFEERYRQQRIRSLTAKAKELGYQLLPATT

SEQ ID NO: 155867 - protein, 422 aa, unidentified
MLEETNDTEEIIKRVAALDIGKAELVCCIRVPGAGKRGKRLQEVRTYQTMTRSLLVLADRLGELGVTRVVMEATSDYWRAPFYLLEAQGFEVWLVNARDVKHLPGRPKTDRLDAVWLCKVAERQMLRPSFVPPPEIRRLRDLTRYRADLVGVRTAEKQRVEKLLEDAQIKLSVVASDIFGVSCRAMLAALLAGERDPKVLAQLARTRLRAKLGQLEEAFTGHFSDHHGFLLATMLDRVDAVSADIATLEAKIDQEIAPFAAAADRLDEITGVGRGAAQVIIAEIGTDMGRFPTPGHLASWAKFAPGVKESAGKTKGKATTGHGNPYLARVLGEAAVAAGKTNTFLGERYRRIARRRGTKKAIVAVGRSILVIVWHLLADPTARFHDLGAGFYDTRINPERAKRNHVRQLEALGYKVILEPAA

SEQ ID NO: 155868 - protein, 428 aa, unidentified
MDQVNHNRLEEFRQLRQEVRHSGEYLIVGIDIAKDRHYAFFGTATGKTLLRRLVFSNDHEGFRKLLDQAEALRVQHGLKKVVYGMEPTANYHKPLGEYLIGLGRTVVLVSGVTVKRNRETLDGRWDKHDVKDSANVADLISQGKCLYYEHPSAELRGLRGLLSLKRRLKKQEHGYKVRIRNHLIAQYFPEMDRDYAQLGAEGLSIVRWCFPASQIVQLDVDPFIERVTSRRIRVEKRRRLEVIWEKAGESIGCDGVPGVEHEAKVMVEGLRQIREMIKETEDKILGLCKQFPAYPYILTIPGFGPDVSAKVLGAIGDPDRFQNGKQVLKMGGLDLSADRSGKDSDKATPVISKRGKADLRYALYQAAFIASTKNRDFMLYYTNKLRGREKEKGIHTKMIVKLSAKMLLIAWTLMKKKEAFDPAYLITE

SEQ ID NO: 155869 - protein, 393 aa, unidentified
MRLLRRCAPRNDFMKACLLVLGRIPTSEKINAAWPQKGDTPMEIIAMDSHKRYSQVCVGDYKGHTICEARVEHGAGRIREFLGRWTPGSKVAVETIGNWYWIVDEIEAAGMIAQLVHAHKAKLMLGSINKTDKLDARGLNKLQRVGTLPTVWIPPSDIRDKRELPRTRVIFAALRTRLKNRIHSVIDKYGLHTDFRGISDIFGKCGREQMEATMKKLPAESRYTLGCLLLELDRVEDQIRSIEKRMRKVFSKTEMVVRLMSVPGIGFILAVTIANEIGDISRFASAARLASYSGTVPRVHSSGGQTRFGKLRNDVNHYLKWAFSEAGNSTAVNHKRFPNKHTSRLYSRIREKKGHAKAVGAVARHLAEATFYILTRNEDYKEPAAKSFSLTTA

SEQ ID NO: 155870 - protein, 354 aa, unidentified
MPKSASTQIAVVGIDIGKNSFHVVGHDKRGSIVLRQKWSRGQIEARLANLPPCLVGMEACVGAHHLARKLAALGHDARLMPAKYVRPYAKGQKNDFNDAEAIAEAVQRPTMKFVATKTADQLDLQALHRVRERLVSQRTGIVNQIRAFMLERGIAVRQGMRFLRAELPIILATRTDALSPRMLLVIENLAGDWRRLDERIETLSREIETIARQDAGCDRLMSVPGIGPIISSAVVAAIGSGDVFSKGRDFAAWLGLVPKQISTGDRTILGKISKRGNRYLRVLFVQAAWVVLIKPVSWERHGLKSWIESAKKRLHHNVLAIALANKLARIAWAVLAKGRGFETARTIDGSTQPA

SEQ ID NO: 155871 - protein, 409 aa, unidentified
MSYFAGLDWGEVEHAVCVIDSGGQRVAGFTVPHTAVGLAELCARLARIAAAVDLPIAIERPSGVVVDTLVEAGHTVFPVHPNALKACRPRYRAAGGKSDPGDAWILADVLRTDGHRLRPLRPISDPVRALRALVRTRDDLVAERVALANQLRALLESFWAGGARIFAEVDSPIALAFLERYPTPHSARALGPKRLATFLADQGYSGRRSAVELLERLRTAPSGLAGPAEQQAKGQLVRALVAVLHPLVQQIKKLTAAVEGTVPQLPEGQVVMSFPRAGKVNAAQILAELGDEPRRFPSEDQLAAEAGVAPVTYASGKSRSVGFRRACNKRLRRALTCFADNSRKASPWARDLYARARARGCDHPHAVRILARAWTRVLWRCWTDGETYQPTRHRAANRLLPQSLSTIGA

SEQ ID NO: 155872 - protein, 346 aa, unidentified
MIAIGIDVHKRKCTIAEQGEDGELKMRPSIENTREEWLQLLQELPPTAEIALEVSTSGYFAMSVLEAAGWRDRTHWVHTAGIDSLRKQKTDRLDARRLARKLSVADREPLPEAWFPPPEIRELRLRARQRCWLAVMRAQVRNRTQSLLQLHGLRSGRNPFTPRGQAWLAKQAMPTATRESLEQLGRLQAFLQQEVETSEAALAESTKNISQISRLRSIPGLGRILAAVVWSEIGDLARFASADALVNYTGLVPSLYQSGEVSKAGPITHQGSVWLRWALITGVNAALRGRSPFAERYRRLKQRKPGNVAKTAVARSLARCVYGVLKSECDYQEERWGRKLGSFVEQ

SEQ ID NO: 155873 - protein, 352 aa, unidentified
MSKITITGIDLAKNVFHLHAVDSTGRQVKAIKLSRSKLNEYLHRSEPITVAMEACASAHHWGRLCLLLGHEVRLISPQFVKPFVKSNKNDRNDARAICEAAQRPDMHFVPVKTVEQQAVLSLHRVREMLIGQRTATINQLRGLLTEFGITAPTGRRALHNTIPAMLEDLMKISPTFLVSCIRQQWEHLGELDQHIDNITTQIEMHARQSDATRRLQTIPGIGPITASALEAYVGNATQFRAGRQLAAWLGLVPRQHSTGGKPMLLGISKRGDSYLRRLLVHGARAVVASVRSSPHVQKQDKTIMGWLARKHMNVAVVAMANRNARIAWAMMTQQRNFDRDFRDQLASQLAAT

SEQ ID NO: 155874 - protein, 347 aa, unidentified
MNFYINTHPYYCGIDLHARTLYVCILDSQGNVCLHKEISANPELLYQLLKPYIGNIVVGVECMHCWYWVADYCDDIGVDFILGHALYMKAIHGGKAKNDRIDSYKIAHLIRGGNFPLAYVYPKAMRATRDSLRRRMKIVRHGADLKGHVVNTTSQYNLPVNKVNLKNSSAREQIRGSFPDPIVQRTIDLDMVILDCYAKELAKVEWFIEQQAKKHNPVHFQLLKSISGIGRILALTIIYEIGDLNRFSSVQKFASYARLVKCKAESAGKTYGTQGNKIGNAHLKWAFSEAAVLHLRGNEKAQHYLLTLQKRMSKAKALSALAHKLGRCIFYMLKNEKLFDENKFLRG

SEQ ID NO: 155875 - protein, 312 aa, unidentified
MTIACAAGVDVGRDYLDVGLAPSGQVFRVANAPAGVGAVVTRLKQAGAVRVVLESIGGYGARLVRALAEAGFEVGVVDPKRIRALRIAEGKRAKTDRLDAKLIARFALTMQDAARPVPSPQAFEIRSLSTRRRQLVEMVAMEKTRLKQTLDEPIAESCRAIIALLAAERARVEDALHEALLQQDLGRHRLELVQTIPGIGPAVGMTLMADLPELGGLDRKAVASLAGLAPHPNQSGSRTGAAHIAGGRPCVRAALYMAALNAVRSDKGFKREYLALRQAGKPAKVALVAIARRIVVAANAILKSNTPWTKQA

SEQ ID NO: 155876 - protein, 265 aa, unidentified
MTANQKFSRFIGIDVSKAKLDIYDDATGEFLTVENTAKAIEKYVSALSPDPELLIVVDLTGGYEALCVNTFYNRGFTVHRAEGRRVKAFMRSYGEHAKTDRIDAYALALFGRKLHETLRMYTPLPLNLKPVTERISDLKTMLLQEKNRSTAPSLPADMKKEIVRHIAYLEKEIERLYQKCLDIIKNDPPLAEAFYKIIAIKGIAEKSAVLLLTTLPELGCTNRRQIAAIAGVAPYAKDSGTLSGYRRIRHGRTTAICAAFITAFP

SEQ ID NO: 155877 - protein, 374 aa, unidentified
MDVVHARCCGLDVHKKSVVACALITQWDGSVERHMRTFGTVTTDLLKLADWLSNLQVTQVAMESTGVYWRPVFNVLEDDERTIVLVNPQHMRAVPGKKTDVKDAEWITDLLRHGLLRASFIPPAPIRAIRELTRYRKTLVQERADEKRDPDVLADLAQGRLRAKLPQLREALQGRVQPQHLVLIEHILAHIDFLTQTISEVQAAIERCLPSYEEALTLLQTIPGVKPIAAAAILAEIGTDMSRFPSAGHLASWAGLCPSNKESAGKRMKAPMNHGNVWLRAIMGEVAWASIRTRATYFHAQFGRIARRRGAKKAAVAVAHSLLIVIYHVLRDGNPYNELGADYFNNFDSERVQRHHVRRLEQLGYKVSLTPMVA

SEQ ID NO: 155878 - protein, 407 aa, unidentified
MDLLKTVFGIDVSSRKSNVCIMVNGQKVNDYAISNDMVGFNRLLGDLKQVTKPQIIFEATGVYSRRLQAFLDMHELRYVMMNPLEAKRKTKDDLHQNKTDKLDALYLAKLQSEHPQRLAYVQNKEYQELMANNRIYEQSSHDLITNKNRLHKAVQLTFPEIEHLLANPRGKNYWSIALRFPHPDIVLETKEADIIDFLKGLSGIGKKRANDITQSLIRLAKVACPAVKKNSAHVRGLKMAINNILSAEEECQTALQEMAKLAPKRDLEILTSIPGIGENTALRIISELGDIRRFNNPSQLNSFVGVDPQVYESGNLTAHLSISKRGTAIGRKVLYLAINQIQSAKKAGKPCHIADYYEKRKRSSETASHKKAAIASIHKLLRTIFALIKNDQLYSYDVAKHNQRLLS

SEQ ID NO: 155879 - protein, 351 aa, unidentified
MNEYISFDSHKHYTLMEREDIHSQLARQQRIEHAPGAIRAALQGCAAGTSVAVEATGNWYWIVSEIEQAGLHPLLVHPRKAKLMMGLINKTDKLDVHGLNRLQRTDTLPTVWIPPADLRDLRELTRARLVFARQRTRLKNRLTATLTKHGRQLSGYSDAYGAPARQELRARLAQLPGETRVVCDQMLAHLEFVEKQIGALEQRLQGLVKITPAMQRLLSLPGIGVILAATIALEVGDIARFASAERLASYAGTTPRVHSSGDKTRYGPLRTDVNHYLKWAFAEAANSVAVNHARCPQRHVSQLYRRLRLRKGHAKAVGAVARHLAEAAWHGWSRNETYRDPVLSKGSSNEV

SEQ ID NO: 155880 - protein, 448 aa, unidentified
MPEQTWYAALGLAACVGLDWAMDKHAVTVKDLDSGQRERCQLGNTPEAVELWAGGLAARFGGRPVAVALEQSRGAVISMLSKYAHLLLFPVHPKALADYRKALHPSGAKDDPTDGDLLEEFLELHGRGLRMWQPDTEATRSLQWLTEERRKFVGDQTRFAQRLRGQLQRYYPQVLQWFDQIDTPLVLAFLRRWPTLEEVKKAKPATLRRFFQQHNCRQQSKIEERIQAIASAVAATLDTAVILSGRLAVATLVDQLEAIHTGIAAYDRQIAEITLAHPDNELMDSFPGAGPAMRPRLIAALGTRRDRYLNAAEIQRCSGIAPLIERSGRQYWVHWRWACSKFLRQTFHEWASHSLAFSAWAREYYQAQRDQNKGHHAAVRSLAFKWIRILFRCWKDRTPYDEAKYLQALIARKPKQSRDLQSKLDRGKQPEFIWTSRNGFNKLVGFNY

SEQ ID NO: 155881 - protein, 363 aa, unidentified
MTVYIGVDFHPYEQSVAYASDEDGEIGYRRFLHSDKQSIRAFYRKCGADAVIGVEATGCLWWFEKMLADGGHKLKIGDPRMIRRAALSRHKNDFRDAETILDLLMRGAFPSIVPRSEESREVLDLLHYRQTLVQKRTSIANQLQAFARGKGLARFRMPAVKGRRKLIDAPVTEIETLLMTSRLVLFDEITAQMKALESRLEKLAAEDERARLLMTHPGIGVINALALVHTLGEVRRFRRKEEVVAFVGLDPLEKSSGQTKRIGQISKHGSRLARHLLGQAAQACRDHRIRKFYLEVSRRRGRPKAKVAAARKLLINCYVMLRDGIGYEEFQRRGEVGLCEGSGEVRAKASVSGGLMARPAISI

SEQ ID NO: 155882 - protein, 421 aa, unidentified
MSANSEGDFNRAFATFIELKADALLLPQGGGGDLPARCHEQEGRAGGARFPTTTQGLLTLAEWLESAGCTHVAMEATGVYWKPVWHILEGHFALILANAAHVKNVPGRKSDVNDATWLADLLAHGLIRSSFVPPPAIQELRDLTRTRRQLTREIVQHVQRIQAVLEEANIKLCSVITDIMGASGRRMLKAMIAGETDAEKLAALGHERLGCTRAELMEVLTGCVREHHRFLLGQHLRTIEQLEDSVAAFDARIEAALSPFHDIVERLKEVPGLGATATETVIAEIGTDMSPFPTAGHLLSWAGFVPRLDESAGKRRSTRIRKGAPWLKPVLVQAAWGAARKKNSYFQAQFLRLKARHGAKKAAIAVAASILTTVYHMLRDGTCYQDLGPEHFTRRNPAKAAARLANRIRNLGYHVEIRAAA

SEQ ID NO: 155883 - protein, 348 aa, unidentified
MSLYIGVDFHPHQQTVCWGDLQTGETQTLTLLHELDKVREFYQSMPPAIIGIEASSKAVWFENLLAETNHQLLVGNPTLIRKKATSRHKSDKRDAELIFNLLVKDEFPAIWRRTSLNNQILEILKTRMNLVQQRTQIYNRLQALAHNFGLPKGKMKTNYFQLLIKSAKTDEAGELQRTQLFNLLEYLSKQILELEEWLKKKAAADEQVQLLLTQKGVGYLTALCLVNTIGDISRFKKPTKQVPAFIGIEPLGAESAGKSTNKGISRAGSWMARFLLGQSANIVARYDAKFKAFYKRLAKKKPKGVAKTATARKVLVKLVIMMRDKISASEFDQRGRTVNDTRVDPGLK

SEQ ID NO: 155884 - protein, 433 aa, unidentified
MNTPHPHDLVIGLDRSDKKADLHFITPATGQRRSQTIDTAPEALWEWLLELRQQHPQARVGLCLEQPAVHLIAFLEAYEWITLYPINPITLQKFREAFVTSRAKDDAKDAQYLAELLLTHHPKLKPWAPEDSATRAMQQRVFHRRAVVDERTALTNRLIALLKQYFPQALVLCGEDLWRPLATRFLLKWSSLQAVQKAKPATLKQFYHLNGSRSAKLMEQRLALVAKAVPVTDETALIESFALRVQLICRQLQLVQQTLRSYEQQIASAYAAHPDHEIFASLPGAGPVLGPRLLASMGSQRERFGAAADLQQYTGIAPVTKRSGGSCYIHRRYLCPKFHKQSFHEYAKESILWSRWAAAFYLQQRVKGSPHHTAVRALAFKWQRVIFRCWQNRTPYQEAIYEAALRKSGSPLVALFDKVELGKSPFKNPMKKS

SEQ ID NO: 155885 - protein, 362 aa, unidentified
MPQPKSVVGLDVHATQTHACVLHPETGELRSRRLNGPPRGALDFLEGIQAPVLAVYEAGPTGFGLARGGAERHLDVRVCAPGSIPKAPSDRVKTDRRDAERLARLCLAGELRFVRVPSPEEERFRDLTRSREAIRADLMRARHRLGKFLLRRELRWEGPGSAWTQAHLRWLEAIRFPDGASRAVLEDYLAAVVALEQRRGASERAIEELWPESPWAETIARLRCLRGINTLTALGLCAEAGDLRRFERPASLMAYFGIVPSEHSSGERRQRGPITKAGSPHARRLLVEAAHHYRHQPRVGGALEQRQRGGDPRACAIGWRAQRRLHNRWQRLRLERGKPANVVRIALARELGSFVWEVGQLS

SEQ ID NO: 155886 - protein, 386 aa, unidentified
MKTTTLVHESTASAAITTTTTITLLLAFELGERTWKLGFTTGFGQRPRLRSVPAGAVDRVLEEITRAKRRLKLADATPVVSCYEAGRDGFWLHRYLVAHGVTNSVIDSSSIEVNRRARRAKTDKLDLAGLLNLLARYLAGDRRAWRVVRVPTVAEEDARQLHRTWETLQKDRTRLICRLQGLLVIHGVRLPITDDFLAQLEAARLWDGTPVPAGLRARLTRAWQQLALLNTQLDELDAARAALRVDPATVTGRYVTRLPTLRGIGPVGAWVLATEIFGWREIRNARQLGGLVGLVPAPFQSGETDHDQGITRAGNKHVRRLMVQLAWSWRRWQAASALTRWYEEKFGRGSRRLRRIGIVALARKLLIALWRYVETGVIPEGATLKA

SEQ ID NO: 155887 - protein, 390 aa, unidentified
MGGLMTKPTPSHNSPVSIGIDFHKRYSVFCVLDAKGGILERGRIEHTTPELFVELAKRYPKARVVFETTMNWAWLYEILEPHVSNKNIVLADAFKTRIIAESQVKNDKIDAHILARLLHAGMICEVHIPSKSARQRKEVLRQRCFFVRQRTMIRNRIHRLLGAQHNLQLPQCSDLFGKRGLGFLDKLDLPAPSGLLLKQQLEMLRNLQTRIAEDEAALKSMLEDSPELAFIQSLPGMGPILAAVVVSEIDTIGRFSSAQKLCGYAGLCPSTSSSGGKTHQGRLMSRCNKWLRWAFIEAAWVSVGCSPYFADHYKRKRALGKKANTAILSTARRMARIAWQLLTEKRAFETLPPAQKTKGRTGGETDSSPVSVNGQEAMAISAPLSPAAPL

SEQ ID NO: 155888 - protein, 456 aa, unidentified
MRTVPEEIPDPDHEQILQRVAAVDVAKESGMVCTRLPAGVSGRRTSRVWQVPATTNTVSDLADRLVELGIDKVTVESTSDYWRIWYYLLEAAGLDVQLVNARDVKNVPGRPKTDKLDAVWLAKLTEKGLLRPSFVPPAPIRVLRDYTRMRSDLTRDRTRYWQRLEKLLEDALIKISAVASTLKTLSTRDMIEALIAGQRDPQQLAGLARGRMRSKHAALTQALTGRFDDHHGELARILLDQIDGLDTQIATLTTRIEQLIGTLGQPATPAPPHPAGDDNDPPHQQLPSTTGAAHNAVRRLAEIPGLSPETAQLIIGEIGLDMTRFPTAGHLVSWAKLSPRAIQSGTKTGNGNTGKGNPYLKAVLGQAAATAGRNHGTFLTERYRRIVKRRGKGKALVAVARSILVIIWHLLADPTAHYYDLGPDHYDKRINTNRKVTRLVRELEALGHTVTLQPAA

SEQ ID NO: 155889 - protein, 338 aa, unidentified
MELYGAIDLHGKNNVLVIMGGKKKHLEKRMPNDLDYVLKELKPYREDLTGIAVESTYNWYWLVDGLMEEGYKVHLTNTSAVKQYEGLKYTDDRHDARWLAQMLQLGILPVGYIYPKEERAARDLLRKRSSFVRQRTANILSIKNLIARNTGRTISANKVKQLTDEDVERMFENQDHAMAIKSSLHVMWSLDEEIKSIEKRVKEVASLRPEYRHLLTVPGIGEILAMTISLETGDIGRFRKPGNYVSYCRGAKSTKLSDGKKKGKGNRKNGNKYLSWAYIEAATHCMQWSESARKYYQRKSARSNAIVARKSLAAKLTRACYYIMRDQIPFDPKKMFGF

SEQ ID NO: 155890 - protein, 370 aa, unidentified
MLDTTTFIGLDVHARSIKAVSLDVMTGEVRAATFGYDAGAVAEWVRSVDPRARCVYESGVTGFDLQKRLSGLGVDCVVGAVSKMIKPSADRRRKNDRNDAEFLARMLSVGNVVEVWVPDDECEAARDLTRALEDARDALSRSKQRLSKFLLRHGLAFDERTPTGRRKGNWTRAHWSWIESIRFAERADNDVLAYYVDAVRRAAEEKARLEGLVEGEARKPRWRRRVDSLRCLKGVDTASAADLVFEAGEFSRFRNARSFAAWVGLTPSEHSSGESDRRGAITKAGNKHLRKTLVEAAWHYLTCSARPKDLARGQAPDPGARRHAAKGVRRLVERREALLARGVHNNKANVATARELACWVWAVGLMAEEA

SEQ ID NO: 155891 - protein, 374 aa, unidentified
MHNHNEVFVAFDTSKLRNAVAIAESGRSGEVRFLGEIENTDAATAKLVSKLAAKYQQLTFCYEAGPTGYGLHRLIESLGHDCIVVAPSLIPRKAGDRVKTNRRDALGLVKLLRAGELTAVWVPDARHEAMRDLVRAREAAVDDLKSKRQQVLSLLLRLGRHYLGKRTWTQAHMNWLASQKLDHAEQRIAFEEMLLAVRQAQERIARLEQAIRAAVPDWSLAEVVTALMAMRGIDLVSATAFLAEIGDLSRFRTARELMGYLGLVPSERSTGDTVKRGGITKAGNRRARRILVECSWSYRHPPRVGKEKLAKVAAAPRAVQEIAWKAQSRLSARFRALARRGKRPTVVVTAIARELSGFIWAISREIVRPRIPAM

SEQ ID NO: 155892 - protein, 308 aa, unidentified
MGIDIAQDKFDVATLPSGDSFTLDYHDAGIHHLIERLRLLTPCLVVIEGTGGLEQRLVAALQDVDFAVAVVNPRQVRDYAKGIGYLAKTDRIDARVLARFAQEVLPHAREKKPEKLRELEQLIARRRQLLDIRTAESQRRERTTSVPARKSIDKVLRCLAKELKDIEAAITEIVSSDDTYRHKSDILQSTPGVGAVTAATLVAELPELGQLNRQEISALVGVAPYNHDSGHQQGRRSITGGRASVRHALYMAAFTARRYNPVIKRFAERLEKAGKAFKVIMAACMRKLLTILNTMLKRSTPWQPQIAG

SEQ ID NO: 155893 - protein, 392 aa, unidentified
MISVGIDVSKDKHDCFIVNSEGEVLADVFTIHNTMDGFNFLLQRIRECTMPQDKIKVGLEATGHYSYNLIGFLLDNGLATYVLNPLRTNLYRKSLSLRKTKTDRVDARTIASMLLSDAGLKPYTDTAYHNEELKSLTRYRFDKVKERTKLKSSISRLVCILFPELEKLVPTLHMASIYALLEEFPDAKQIAAAHLTRLKALLETASKGHYKRDMALRIRDAARNSIGAFMPAKSLELQHTIRLIRELDAEIAEIEERIQSIMNDLHSPITTIPGMGVRMAAMILAEVGDFTRFVSPDKLLAYAGMSPSTYQSGQLKNCYPHMEKRGSRYLRYALYNATKCVCHWNPNFAAYLAKKRAEGKHYNVALSHATKKLVRLIFAMEKSKQPYSQLAA

SEQ ID NO: 155894 - protein, 416 aa, unidentified
MGKVVASLEPVVFVGIDWASEEHAVCVLDPGGIKVRSFTVAHSRDGIERLTKRLAELGAAVSVPVAIERPDGRLVDALLEAGHPVAPVQPNAIKAWRDGEVLSGAKSDPGDAELIAEYLRLRAHRLRVLQPFSDETRALRAVVRARDELVGHRVAAHNQLEACLDASWPGAKAIFSDVTTDIALAFLERYPTQASARGLGERRLAGFLVKHGYCGRRPAAELLERLRDAPEGIVAGAESEARRDAVLGHVRVLRSLNASIKQLTRSVVAHLGEHPDNEIFTSLPRSGQVNAAQMLAEWGDCREAYETPEAVCALAGLAPVTKKSGKHEAVAFRWACNTRFRQAVTTFADNSRHASPWAADVYQRAVARGCDHPHAVRILARAWVRVIWRCWIDQVPYDPTRHGGAVRHAAHLGEAA

SEQ ID NO: 155895 - protein, 370 aa, unidentified
MKKNSTVQQSPRRAAARKEGPITIGMDLGDNTSRYCVLDEQGEIVREASVVTKKKPMLQKFAALKRCRIAIEVGTHSPWVSRLLKGLGHEVIVANARQVKLISASSRKDDRLDAQTLARLARADPQLLRPIQHRSEKAQGHLTVIRVRAALVEARTSLVNTARGLAKATGERLVKCDTDQLRAERLEGLRAELREALEPLIKEIESLTEKIHASDRKIEQMARAEYPETALLQQVSGVGTLIALTFVLTIEDRERFQKSRDVGCYVGLRPKRSESGQSRPQLRITKEGDVYLRKMLVQGAHYILGYRGPDTDLRRWGLRLAAHGGKNAKKRAVVAVARKLAVLLHRLWVTGEVYEPLRNSPTARSKKRAA

SEQ ID NO: 155896 - protein, 389 aa, unidentified
MYFVGIDISKYKHDCFILNDSGEVIVNDFVFANTHDGFQSFLNLLESLDSAPNIKIGFEATGHYTSNLKRFLENAHYSFMESNPALISKFIHSQTLRKTKNDAIDSNAIAHWLMTVDYKPYPTGFYHTYSLKSLTRLRDSIVRQRSFYMVKLTNVLDHIFPEFKPFFKERFSQTALFILEKYHTPERISRMNTASYDAIRCISRGKFSMQRFIKLKELASSTVGDSNEIFETQLITILNLYRLADSEVKRLETDIISLVTELNPQSLTIPGIGPISAAVIASEYGDISRFSSPSQMLSFAGLEPGYFQSGTMEFKGKMVKRGSSQLRYTLMNCTMPLIMYNMVFAEYYHKKRNEGKSHRVALNHVAKKLIRVIYTLETQNIPFDDSKLR

SEQ ID NO: 155897 - protein, 371 aa, unidentified
MSVYVGIDVHRKRSQVAVIDAKGEVLANRNVPNGVEPILKVIGGLPPGTPAALEAAFGTGWLVELLENYGFDPHLVHPLRCKAIASARLKNDKVDAAILGQLLRADLLPEAWIAPPPVRQLRALLRHRVQLVRLRTLLRNRIHAVLAGHGHDRPAGCWSGPGRAWMASLQLPAVSREVVDDDLALIDALETVTGRLDWEIHQRARSGPRVKVLTQLPGVGPFTALVILAEVGDVSRFGSARKLASWAGLTPTVRGSDRVAHYGHIWKAGLGVAAVGAVRGGADRQAVPAVRRRLPGHRHTAGEEDRHHRGRPQAAHPRLAPAHRRRACRSHTTRRSIRAPGGDAVTGQEEVARLRASSKNTLSGATARSKI

SEQ ID NO: 155898 - protein, 432 aa, unidentified
MNNRPGKGERVLGVGIDWAEEFHDVALGTPEKGVVEQFRIKHGPVGVDGLIRRCLALEPDPAEVRVVLETRHGLLVEALLDAGFTLIPINPDLVARRRGPARKKDDSEDARICCLIALDRHVALKRLVPHGEVAGELRALARDDERAARDQRRLLNRLRADLQVTFPAALTLAGDDLGAPTMLRLLQRWPTQAELATATRDELVAFARAGSHGWPARFADSVVAALAAPTLPTRDYLVRAKAATIRLAAVQLLALHEARRGWERRMAELLLGGPRTGPDRSVKEADPGQAFPGGEIYLSMPGLGDRLAARVAGEIGERFDQFDSPNALQCYAGQAPVTRRSGKSDYVVARRLAYNHYLGAAVHQWAFCSLRQSTWAREFYDGKISAGKGHHAALRALGNRWLEILWHCLRKEVRYDESTHVAHRNRALGLAA

SEQ ID NO: 155899 - protein, 356 aa, unidentified
MSIVAHTRPFVIGVDTHARKHSYAILTAVTGELIATNEFPTTPAGMKRALNWVARLTGGDLAVLWVIECAATFGAGLARTATGAGYDVVEAARMDARAHRGVGKSDCLDARRIGAAVLPLELDQLRHPRADDGVRAALRVLTTAREHMSNDRTACVNALTALLRVVDLGTDARRPLTNAQITEVASWRSRVEDLALSVARAEGVRLAKRIHALNVELAQNNTKLKKLIEQSEAAPLLDQSGLGPVTVAVAYAAWSHPGRVRSEAAFAALAGVNPIPASSGNTTRYRLNRGGDRRLNRALHMATVTRMVHDPETRAYVDKRQAQGRTTKEIRRCLKRYLARRIYRTLEALHSAPVGA

SEQ ID NO: 155900 - protein, 343 aa, unidentified
MEYHVGLDVSLKQTSICVVDQAGLVVREGVVDSDPEAISIYVTSKAPNAVRIGLEAGPTSTWLWTELKRLGLPVICIDARHAKAVLKMQINKSDRNDAIGIARIMQTGWFKEVHVKHIDSHSVRALLASRALLVKIKRDLENHVRGLLKNLGLVIGRAKFNVFAVRAEELIEGRPELVAAIRPLLEARSAVEQQVSELDRKVMKLARHDTQVRRFMTAPGVGPITALCFKATIDDPARFARSRSVGAYVGLTSRRHASGEVDWTGRISKCGDAMLRSYLFEAAGVLLTRVPKWSSVKAWGVRLAKRNGLRKAKVAVARKLAVILHRMWIDGTEFNWSKKEIAA

SEQ ID NO: 155901 - protein, 453 aa, unidentified
MCLEDRPVLEPNAAGIDVGAREMFVAVPPGRDEKPVRVFATFTEDLERLTDWLEQCGVTTVAMESTGVYWIPLFEILEQRGIRPCLVNARHMKNVPGRRTDWHECQWLQFLHSVGLLRAAFRPGQDVCAVRTLLRHRNELVAAASQHVQHMHKALTQMNLQIHHVISDITGSTGRAIVDAILAGQRDGAELAKLRDPHIKADTETIRKSLEGNWRPEHLFTLGQSRDLYRIYQQQIVNCDLEIEKMLRDFEPRTDPVEKPLPPDRKQNRAGSKRRKKNGHPHPEFDLRTETYKLFGVDVTQIPGIEENALPLFSEVGRDMSRWPTAGDFISWLALCPDNDISGGKVLWRGARRVRNRAGHLFRLAAFSLHHSPTPLGHYLRRMKAKLGPKGATMATAHKIAVIFYTMVKNQVEYDETLWDTRDAQREKRFEAKLKRQAKQLGYELVPIEPKAA

SEQ ID NO: 155902 - protein, 374 aa, unidentified
MDDHSVAYVALDTSKLRNAVAIAEAGRDGEIRYLGEIDNAPAATAKLARRLAKKHATLTFAYEAGPTGYGLYRQIKNLGHDCIVVAPSLIPHKPGDRVKTNRRDALSLARQLRAGDLTAVWVPDPHHEAVRDLTRARGAAVRDQRAKRQQVSALLLRLGLYYPGKTTWGKAHMAWLAGQKLAHLEQRIALEEMLHAVRQAGDRIARLEQAIHAAVPDWSLAPSATALMALRGIEFIAATTLLAEIGDLTRFRTPRELMAWLGMVPSEHSTGERTRRGPITKSGNRRARSILVECAWSYRHPPRVSRDKLARLEAAPPAVRDIAWKAQSRLTARYRALRRAGKLDVVAITAVARELAAFIWAVGLAVGSGRTPEV

SEQ ID NO: 155903 - protein, 410 aa, unidentified
MDVFLERCAGLDVHQASVVCCVLIGAPGRKPQKLLRSFGTTTRDLKTLRAWLAEHGVTHVGMESTGVYWKPVYAVLEGHVDLTVGNAHHIKNVPGRKTDVKDAEWIAQLVRHGLVAKSFVPPPAIRDLREMVRHRRTLIETRTAVRNRVLKLLEGANIKLSGVASDVFGVSGMAMLEALAAGTSDASEMAGLARGRMRSKHAALEAALEGRMREHQCFLLGMHLRNLKAIGQDLEALDARIGTQLEPYQAQHQLLTQIPGVDWVTAASIIAEIGTDMDVFASARRLAAWAGVAPGNYESAGKSKGAGTRRGNVFLKSALFAAASAAVRTKGSYYRDKYNRLRARRGAVRAIMAIAHKLLLAAFHMLSTGEAFRDLGEGYLDQVARKRSTTKLVQRLSNLGYDVMLVPKTA

SEQ ID NO: 155904 - protein, 393 aa, unidentified
MFYLGIDVGKFTHSLCLIDESGHHDIWQINNDKSGFESLRKKINSLNLLIESRLLVGMEATGHYFLNIYDFLLHLGLSTEQIALLNPLQVKSFRNTNLRGAKSDNVDAEQIAVLLQFGNFDRCNVSTDHIMNLRELTRLKSDLTANLGNLKRKMIAVVDRIFPEFAKIFANKFGLTVVTLLTDYQTPEEFAALSLEELTALIKGLSKRGVNRDKIQRLHEAARNSIGISFGREGFKIELSILLTQLKSIEEQIDFLEGKIAEMVNELNSPLFTIPGIGKTTGAAILAEIGDINHFASAVKLIAFAGLDPKLKSSGTYQGRTPISKRGSKYLRSSLWYSAMVLCRVDEKFRKQYQDRKKLGKSHRYAVTAAANKLTKIVYHVLKNNCIYDPNLA

SEQ ID NO: 155905 - protein, 355 aa, unidentified
MNDAKYIGLDVHQTTISATVLDSTGKLVMESILETKAATILQFVHGVHGSLHVTFEEGTCAAWLHDLLRPHVTRVLVCDPRRNALLKVGNKSDRIDSRKLAELLRSNLLRPVYHEQTGVRTVKELARSYLTITKDLTRVMTRLKAIYRSWAIPCAGQQVYAPRHRTEWLAKISEAGVRRRAELHYQQLDALRPLHQEARRELLAEGRKHNAMKLLRQIPSIGPIRAVLLLALIQTPHRFRSKRQLWAYSGLALETRNSGEYCIVRGQLKRSKKVIAIRGLNKNHNHDLKNIFKGAAIRAAAVAGPFQEFYAAMVARGMKPPMARLTLARKIAAITLLVWKKGVCFDAEHLKQQAA

SEQ ID NO: 155906 - protein, 398 aa, unidentified
MDLPVYYELETNNGNRDYRIQIGGHYMNYNTVYVGMDVHKESFTLCSCKYEDEKASHYQRTPASYKNVLRYLAFLRTIYGEDTRFVCGYEAGCLGYSLYHQLENFNVECVILAPTTMLEQRSKRRIKTDKRDAEIIARSLAQHNYSPVHIPTETDNQTKEFIRMRDDHKAELKKIKQQILSFCLRQGYQYDGSGNWTAKHVKWLRSLKPAGLYKEILDEYLLTYTILTDKLNRLDQRIEELASKEEYKESVSKLTCFLGIKTHTALSVIVEVGDFQRFVSARKFAGYLGLVPGQHSSGDDRNGLGITKAGNTHVRRLLVESAQSYTRGKIGYKSRVLRSRQAGNSPQIINYADRANERLRRRYYKMVLKDGKKYNIAKTAIARELACFIWGMMTDNIY

SEQ ID NO: 155907 - protein, 414 aa, unidentified
MGDVRWFVGIDWASTQHRICLLDADGRHVAERDGTHDGTGLAELCAWLVERSKAEPAKIAVAIETPHGPVVEVLLERSFQVFATNPKQLDRFRDRFSVAGAKDDSRDARVLADSLRTDGRAFRQLTLDDPLVIELREWSRMHEELRQEQNRLTNRVRDQLWRYYPQALELGGRDLAANWFLELWKLLPTPAKAARATEKSIARILKAHRIRRLQAADVLRILCQPPLSVAPGTTEAASAHIGSLVERIRLVNQQIKEAERRQDELCAAIEETTPGQICGQRDVEILRSMPGLGRIIIAALLAEACEPLRLRDYHALRVLSGQAPVTRRSGKTCIVLRRHACNNRLRNVLYQWARVAMQHDPISKRRYAELRARGHSHGRTLRSLGDRLLYLLCTLLERQTPFDPNYQNPQRAVA

SEQ ID NO: 155908 - protein, 350 aa, unidentified
MIIIGVDFHPEFQQIASVDTDTGEFQEKRLAHREDAENFYRGLAAMGRAVRIGMEASGQAHWFERLLANLQFELWVGDAAKIHTKRVRKQKTDRQDAQLILTLMLKDDFPKIWVPSWENRDLRQLLWHRHRMVQARTRIKNQLQAVALKEGLRCKKRLWREHGRQELESFQLAPWASRRRRDLLELLDRLNPTITELSQAIEREVENHPEVRRLMTHPGVGPLTALAFVLIIRETERFQCGKQVASYLGLVPLEDSSGSRRRLGHITKQGSSMLRFLLVEAAQVTARSLPEWRSQYFHLMMRRGRKIAKVALARKLAVRLYWMWRKQWDYEQLTKFGSHAGQPGHRHGVQ

SEQ ID NO: 155909 - protein, 347 aa, unidentified
MTEAYDGRQVIGIDLHRRRSVIVRMTEDGRKLETARITNSPAALRREIAKAGKNPRVVIEATYGWYWAVDVLEEAGAEVHLAHPLGVKAYSYRRVKNDERDAADLADLLRMGRLPEAWIAPPEIRELRELTRYRHKLVRARTSVKDQVHAVLAKLGIPVTCTDIFGVHGQAWLDELKLPQPYAGKVASLRQLAGGLSAEITLLEQVLGDLLAGHEGYAAIQQLPGIGPVLAAVIVAEIGDIRRFPGPGQLASWAGLTPRHYESDTKVIRGHVTKQGSRMLRWAVVEAIQRQPAGTRPRQVKDAIIARRGKEAKNIAKVAAARELLTLVFYGMRDGHLRRALQRGQAA

SEQ ID NO: 155910 - protein, 346 aa, unidentified
MKLSRIGVDLAKNVYQLHGVDRHGKTVWKRRLRRGQWLQALLDKAEPGCEIGMEACTGAHHWARELQSRGYTVRLIAPQFVKPYVKSNKNDANDAEAICEAMSRPNMRFVTVKSVEQQDIQATHRVRSEIKDQRNAKANQIRGLVAEYGLVAPTTLLALRRAIPCWLEDADNGLTDYFRSLLHGLRSDLVALDDRMTELDKQIKKIADSNEVTQRLQQLRGVGPLVATALVATVGTGEQFKKGKQMAAALGLTPRQCSSGDKQRLLGISKRGDVYLRTMLIHGARAVVSQAKHRDDRLSQWVTSIAKRKHPNVAAVALANKTARMAWAMLRNDTDYNPDFAIGSVG

SEQ ID NO: 155911 - protein, 385 aa, unidentified
MKKSNITEAGPSKRAKKVDSKVNHPGQKSRKHPGPVTIGLDLGDKSSRYCVLNEAGEVVLERSVGSSKKAMTQVFGAIPHCRIAMEVGTHSPWLSRLLQKLGHEVIVANARQVKLISQSSRKNDRLDAQMLARLARVDPQLLRPIRHRSEQAQGHLTVIRVRAALVEARTGLVNSARGLAKAMGERLPKCDTDQMGQERLKMLPEGLREALRPLLQEVESLTEKIKQCDVKIEQIGRTEYPETCLLRQVSGVGTLIALTFVLTVEDKERFAKSRDVGCFVGLRPSQSDSGESKPQLPISKEGDQYLRKMLVQGAHCILSKRGPDTDLKRWGLRLSDRGGKNAKKRAIVAVARKLGILLHRLWVTGEVYEPLRNIQAVSNQKAIAA

SEQ ID NO: 155912 - protein, 429 aa, unidentified
MEDVEDEPLFAERVAGLDIAKAGLVAAVRVPGTGRRRMQEVRSFAVTRRELEELADWLEGHGVTRVGMESTSDYWKPAFFTLERRGFECLLYNSRQVKAQPGRPKTDRADAVWLAKITEHGWVRSSFVPPEEIRVLRAHTRYRRRLIQARTAQMNRTEKLLEEGHLKLSSVISKLHGVSGRAMLDALAAGERDPKVLAQLARGRMRVKIPRLEEALDCSFFTPALARLLRRMLDLTDQLTAQIEDLDTEIAVLAAPFEAEIARLDQADGIARRTAEDVIAETGTDMTVFATARHLVSWARICPQIRESAGRRKGRNATGDGNAYLSAAISEAVMGALRTDSFLAARYKRLDRRMPKKKALVATSNTMLTIIWHLLNDPETTYRDLGADYYERRDPARQARNHIRGLERLGYHVTIDTINPETGELTPAA

SEQ ID NO: 155913 - protein, 344 aa, unidentified
MYTIGCDQHKYFCQLAVLDEEGKMIQQQKLYHDDRETLKRYFTSLPPGSQMAVEASGFESWLTDFVQDLGIKVHLSHPLKTRAIAEAKIKTDKVDAKILAQLLYADLLPKAYLATPQTRRIRYFLRFRLCLNRYRSSLKNRIHSLLHSLGIPAPAVTDLFGVSGRRFLDSLQLGEGYQEALLGYLDLLDTTEARINCLKKKLAAGVKENPDAERLETIPGVGVLLSQLILAEIADIQRFASPERLSSYAGLVPSIHQSGKRLYHGPCPDQGNKFLRWAMVEAAQTAVRKDPRLKDFYERIKRKKGPQKAIVAAARKMLVIVFHVLKKKENFRFYVSPRQVRQSA

SEQ ID NO: 155914 - protein, 368 aa, unidentified
METQITAFTPKLFIGIDIHKKSWAVHMRTDIGDHKAMTIPPECEILFDYVNGNFPQHQVQLAYEAGCCGFSASRYFLSMGWDVRVVNPGDVPRMDKQNYQKTDKLDSQNLARQLQANQLRGIHIPTTEQDMLKSLLRQRAETTKQLRSIKSQIKALLLYHGIIIPEHFDNTNWSKAFIQWLSAIEWPVPTGKQCLESKLRMFHAIKSEYLLLANQMRAYCRKHHKSDYNLLRTVPGVGGYLAAAILAEIGDLKRFNNASQFASYVGMIPMMRSSGETERIMGVTPRCRSLLRSYLIEAAWKALGRDPEMQAYYRKHIGKNSKAIIVKIAHKLLNRILSVIKNQKPYKCNYSVLSKNEIQKGSESVCSH

SEQ ID NO: 155915 - protein, 313 aa, unidentified
MNTPTTYLGLDIAKLTLDLSLHPTLTCQHYANDPCGHARLIAQLHRLPGPLRIICEATGGYEHHLLQALHQAQIPVTLVNPRLARDFARAKGLLAKTDQIDASVLAEYGRLFAPPATLPLAPAQERLAALVRRRQELLSVRTQEQRRAEHHHDPFVQRQSRRLGRTLSTQLAQLDAELVALQRADANLHTRVQRLSTIQGVGQRTALTLLAALPELGTLARGQASALAGLAPYNHDSGPHRGQRHIAHGRPLARVALYMAALVAARRNPVLRPVYQRLRAAGKPAKVALVALMRKLAELANLLLKSPSLSLVQ

SEQ ID NO: 155916 - protein, 338 aa, unidentified
MKLYGAIDLHSTNNVTVVINEHDQVVYQKRLPNDLSLIAQQLSSYRKSLEGIVVESTYNWYWLVDGLMEKGHRLHLANTAAIQQYNGLKYTDDHSDARWLAHLLRLGVLPEGYIYPKEERAVRDLLRKRGQLVHQRTANLLSIQSLISRTTGNSISAKYIKALNIQRVDGVFPNPDLVLALKANLAVMNSADAQIEIREKAVQDRVKLRPQFRFLKTVPGIGPILALTIMLETGEIERFASVGNYASYCRCVGSLKISNGKRKGSGNTKNGNKYLAWAFVEAANFAIRFNSRIKSFYQKKKSKSHAIVAIKAVAHKLCRACYYIIKDQVPFDITKAYA

SEQ ID NO: 155917 - protein, 445 aa, unidentified
MEQQMTLEIVNKNAAGIDIGSRRSKKSDIKEFGVYNEDLYALADWLREHKITSVAMESTGNYWQNLHAVLIANGFEVTLCNGKFTKNIKGKKTDVIDCQWIQKLHALGLLSSSFLPDEDTEILRTFTRHRLNLIQQAAASSKKMQKYLRLMNIRLDVVVKDIVGLTGLKIITAICLGETDPKKLASLRHYNCRKSEEEIAKALHTNRRNDYLYALNDELDTYNYLQEKIRKCDDQIALKIDDIIGKDPEKKEHHIDKKKHKRINKNTPKNIDINLKSYQIFKGIDLLAIEGTSYNTALTIMSEIGYEGIHKFKTAKHFTSWLRLAPNNKVSGGKVLSSKIGKGSSRLKIALRNAANAIGNLKDSTPLRDFFHRINFRKGRVSAITATARKLAIIIWNMIVKAKPYQNPEGYLYLDQKRKLGLVKRIKKQIDKFDIKLEDLEFKTP

SEQ ID NO: 155918 - protein, 342 aa, unidentified
MKFYCGIDLSARDCHVCVIDQELKIVVQQKLRNELPRICQLLEPYKANLKIVVESTFNWYWLIDGLQAAGFEVVLAHTLGLYLITGAKVKTDRRDAYALAKLLLVGAVPAAYIYPVETRPVRDLLRRRLHLVQVRAGEYGSLRRLLLRQGILSSKQQEIKTATEAELEQWFAHPLVRLHASQELQRIELYSEQIAELEKTILALAKTEQSYELLLKLPGVGQTIALTILYEVGELTRFANVKVFSSYCRVVPGIAQSGNVMRRGRASKQGNHYLKAAFSQAAVHAVRCYPKVRRYYERQLKRHQGRGRQMICYNIIAHKLAQAAFHVLKEQTEYREELLFGR

SEQ ID NO: 155919 - protein, 434 aa, unidentified
MAKVINFEEIHANVAGIDIGSREIFVSIDGEQVVTFKTFTSDYRLCCKYLKEHAIKSVAMEATGVYWMSLYSMLEQYGIKVCLVHPREVQQVKGRKTDVKDSQWIQKMYSAGLLRESIVAEGDFKELRLLIRERLDLIEMGSTYVNKMQKYLELMNLKLRNVIAQIHGASGLRVIKAIISGERDPKKLVELCHENIKKNKREDVIKSLDGNYNESYIRLLKENLHLWEEHQKSIHQVEHLIGELLKKINQDNSHIEVTTPSKPARHHHPNIKELHQTMVQMYGGVNLTNIAGINDSTMLRLLGEVGNDMSRFPTKKHFISWLGLSPKNKQSGRMKKRLKCTSNNAGLIFRQSAQSLSISKDKAIGVFINRLKGKKGAKVAIKAGARKIAEAFYDALTKGIDYVEQGAIKYKEQLQLREIYILNKLAKKYNYELA

SEQ ID NO: 155920 - protein, 345 aa, unidentified
MEPMYYIGLDVHKRKISYCVKDASGQLHSEGSLPAARFDLDCWMKTLPRPWSAAMEATMFTGWIYDHLKPHAAALKVAHPLMLRAIAAAKKKNDRIDANKICDCLRCDFLPECYRASTAIRERRRTLRYRNLLMRQMVQMKIKTGSLLMEAGVSYNKERLHKAAYFRELLATNPDIDDSLRSLLRQCRETVMRLSKTENALIYSLQHDRLLAERVERLMSIPAIGPITALTWALEIGDVQRFSSAKKAVSYCGLCGAEKSSGSTVRRTPLSKQRNKHLQTTLIEAAKMAPRYSPSLARLYDREKQRSNANRATLAVARKLVAYLVAVDRGKTHFLVRDRESSVAA

SEQ ID NO: 155921 - protein, 421 aa, unidentified
MEEITEELTALVERVAALDIGKATLTACVRVPHETRPGRRRQEVRTCATTTRSLLELRDWLVCQGVTRVVMEATSAYWKPPFYLLEDDIAECWVVNARDVKNVPGRPKTDKLDAVWLAKLAERGMLRPSFIPPRPQRQLRDLTRYRRTLTHERTREKQRTEKLLEDAQVKLSSVISDIFGKSGRDMLDALIAGQRNPYALAALARGTMRAKTSVLQEALTGHFTDHHGFLLAMMLSRIDALTAQIGTLTARIEQAIAPFAHQVAQLDEIPGIGIIAAQDLIAETGADMSRFPTPAHLVSWARFAPKARQSAGRSKAATTGKGNPWLGGTLGESAAAAARTSTFLASRYKRIVKRRGKQRALVAVGNSLLTIAWHLLSDPSARFTDLGPTWHDRHTPQRRKRQLIAELERLSGMKVTLEEAA

SEQ ID NO: 155922 - protein, 418 aa, unidentified
MNSNKTKKVTKINGKTVIATVDIGKNVQYGYFRAPNGDDVTPFAFYNSNKSFNTFWQKLCQFQKQQELESIVIGFESTGPYAEPLFHFLRKKPVDLVQVNPMHTKKVKELTGNSPNKTDKKDPRVIADLICLGHALTLVVPEGPAAELRRLTQARQRAIKTRTSMINQLQHLIFVIFPEFLQLLKISTKTARYLIKHYTTPEKISALDLGFISEIVKKLSRGKLGPDRAKQLHEAAKNSIGICEAQQSIVFEIEHLVGRIEAEDQFIDRLEKQLRFYLQQIPYSENILSIKGLGQVTVAGLIGEVADFNKFDTISEIMKLAGLDLYEISSGNHKGQRRISKRGRALMRKLLFFAAINSVKSKGIMHQKYQQMLDRGMLKMKALVAISRKILRLIFAIVRDNTKYIENYTANYHYKLAA

SEQ ID NO: 155923 - protein, 374 aa, unidentified
MVDDIAVYVGLDVSKEKIAIGLAEAGRKGEVRYYGEIANRADAVRKFVDKLAGRHGRLCLCYEAGPTGYGLYRQLRDLGHECLVVAPSLVPTRPGLQIKTDRRDAVALAALLRAGELSSIWVPDETHEAMRDLCRAREVTVSDLRRARQHLLSFLLRHGRVFEGRSHWTRAHRNWLATQRFDHRAQQIAMEEYIRAIEQIEERRERLTRQMVALLPDWSLNPVVEAIQALRGVAQISAVTLVSEIGDFRRFNNPRQFMAWLGLVPKERSTGASVSRGSITKAGNTRARRMLVEGAWTYRLPARVSQEILKRTEGLPEAIRAIAWKAQVRLCQRYRRMQASGRPTNIVIVAIARELAAFAWAIATTVPITPTKAA

SEQ ID NO: 155924 - protein, 385 aa, unidentified
MQDILTCAMGLDIHRDVIVACLAKGELGTDPEIEIRSFSTLIPEMRKLRDWVLEAECRYVAMESTGIYWQPIYEMLEPCFDGQINILVVNARHMKNVPGRKTDMRDAQWIATLLRAGLLKGSFIPDKTFRELRHLTRYRKSIVRDITAQKNRIDKFLQSSGFRFTAFLSDAFGASGRNIIRHLMEYGNISREALDRCLKTQTRKRIDEILIALNGSLSEHQRGFLRMIFGHLEALEQHRHTVEDAITKEITKHEEALSLLCSIPGIDVTAAAAIIAEISTDMSAFPDSQHICSWAGLSPGNNESAGKRSLYLSGWYWRIKQRKGAKRATIALARKLLALIYTMLKTGSPYNEDCFEIRRKQSERKRASRMVNELQKLGYFVVAPD

SEQ ID NO: 155925 - protein, 367 aa, unidentified
MSKAETGRLCVGVDLHKTQFTICALNEDGEYLLEKQYPTKEEGYSEFAREMHRFEEQGCSIELAVETTGNARFFKNRMESEYFAVKVVNTNRFKVITMSTKKTDANDAATLAYYLMKDMLPEAHLCSQTSEEIRRLLKTRSVLVQSMVKIKNQIHGMMLGYGIETKAAQLQSKRKRQELINDLEDHNFSAYTAPSLKVMLKILDDLSAEIKGIEKLLEEMVASNEDVALLMTVPGIGINTATVIAAYTAELERFEGNYKKFASYVGIIPSVHNSNETTHYGRITKHGPQELRTAFVQAALGMIRLTNVSSEWRIIKEYQRRKGDKGSGRAIIALARKITRIVFVMLSKREGFNPEMMRCEEAIQQTA

SEQ ID NO: 155926 - protein, 316 aa, unidentified
MLYVGIDIAKNKHDVTALNVQGKTVLKPLTFSNNKAGFELLDLSFRQLNQDCLIALEDTGHYAFNLLNFLHEQGYKVYTYTPLLIKEFAKSLSLRKTKTDKKDAHGIALKLLSDPNREQFQHNNRQVELKILTRHIHRLKKKQSDWKVQYTRCLDIIFPELDKIVGKYSEYTYQLLTCYPNPQKRLEAGFDKLIEIKRLTASKIQDILSVAPRSIGTTSPAREFEIIENIKHYKRLIDKAEKCVNDLMAEFNSVITTVTGIGNRLGAVILAEIQNIHAFDNPAQLQAFAGLDSSIYQSGQIDLAGRMVKRGSPHLR

SEQ ID NO: 155927 - protein, 409 aa, unidentified
MEVILRCCAGLDVHKDSVEACVRRMSAGGKVEHEIRHWGTTTRELVSMAEWLGSMGVTHVAMESTGVYWKPIFNILEAGFEILLVNAHHMKNVPGRKTDIKDCQWIAQLLQHGLLKGSFIPPRPQRELRDLTRQRTQLVDEASRISNRIQKVLEDANVKLGSVASNVVGASGRLMLEAMVAGEDDPARLADLAQRRMRSKIPQLEQALYGKLTEHHRWMLKLLLDQLQTTEQFIARLDERIAELTRPYQPVLEKLDAIPGVDRRVAEVLMAEIGPDMTPFPSDAHLASWAGISPGNNESAGKKRSGKTTKGSRWLRQALVQAAWAASHKKDSYFQAHARNLMHRRGRKRGLVAVAHSLLTVIYHMLKQDTDYRDLGPQFLDRIRSTQLVRFHVRRLQSLGLQVELTSAA

SEQ ID NO: 155928 - protein, 409 aa, unidentified
MSQNIAGIDVHKKLLVVVIVDRAKPEVMLQSRRFGTGSAELVHLSAWLGQHKVEEVVMESTAQYWRPVWMELEPHLRLHLAQAQSNKAPKGRKTDLADAKRLVRRFAAGELMLSFIPEPEQRSWRMVTRGRLQLVRERVQLQNQIESLLEEGRIKLSVVLSDLLGASGRRILRALAKGDSSPEEMALLGDKSLKCGLPALVDALTGAMGEIHCQLLTQHLDRIELIDRQIDELNKLAATRMQLYQDAIARLIEIPGIGAEAAQEILAEIGPEAAAFPSAEQLASWIGVCPGSNESAGENHSSRCAKGNRFLRRLFCQAAQAAARTNGSHLQSVFKRLIVRLGYVKAVWAIAHRICKIVWNVLHKGARFVESSEARNPRAIQRAINHHIKALRRLGYSIPLPTQPEVTTA

SEQ ID NO: 155929 - protein, 420 aa, unidentified
MARTVEIVYPICCGIDVHKSFIVACVAVTDEHSHTEHHIKRFSTFTGDLRRLANWLASYDCRDVCMESSGKYWIPVFNALEKTCSVCLTHPKYVKAIKGKKTDKKDAKWISELFKCDLVRSSFIPPPDIRQLRDLCRYYVKLTSFVSSEKNRAQNCLTMCNFKLDEVFTDVFGKSATRVLDALLEHGNGNFELDGLLSAKCKSSSEKVRAALDGELNPMQTEKLSLIRQHMNDLNSLKDSLETLIYNLAEKYKPQIDLLLTVPGISTQLTAIRILAEIGADMSVFETAKQLTSWAGLTPQNQESAGKKKTTRVGRAGAYLKPLLVQIALNCGKSNKCPELKNKYLDLKKRRGGKKAVIAIARKLLTAIWHILSKNETYNAELYRIADNSPVDRKLTTAQAVAFLRSKGFVIVDVETGEVA

SEQ ID NO: 155930 - protein, 392 aa, unidentified
MFYVGIDIAKQNHEASIIDSNGKLLDKSISFSNSQVGCDKLIALLEKFEADTSNTTIGMEATGHYWVSLYSYLLDLGFTVNVINPIQSDAFRKMYIRQTKNDSKDSFIIAQIMRFGEFSTTSLADEDIMALRQLSRYRLALVDECSDWKRKCIALLDQVFPEYSKLFSDTFGVTSRELLSKYPTPEDMLSIDTETLSKLLSKASRGRFGISKASEVQESATNTFGVNFAKDAFAFQIKQIISQINFIEEQLKELETEISTLLHQNNSVITTITGIGDVLGAIIIGEIGDISRFESAPQLVAYAGLDVAVKQSGNFVGTQTKISKRGSPYLRRAIWLAATVAAFKDPALSVYYQSLRARGKHHLTAIGAVARKMCNIIFAVLRDNKPYMPNIK

SEQ ID NO: 155931 - protein, 387 aa, unidentified
MYFIGIDISKFKHDCAIIDEAGDTVTASWSFANNCEGFSLLKQLLDALDGQKKIGFESTGHYGHNLKLFLETNNFSFMEFNPLLVSKFVRSKSLRNTKTDSLDAVSIAQYLMTVEYKPYPPSFYHMDQLKSLTRFRDSLVRQHSRQLVELTNILDKVFPEFKPFFDGKFSATALYILTHYQSPEKIANMNAKSYEALRKKSRGKFSMVKFAQLKTLAKNTVGRSDAFLLKQMEITIDIENQLDAKIGEIESQILECIHALNPPILTIPGIGELTAAIILSEYGNINNFENPAQLLSFAGLEPGYYQSGLAEHQGHMVKHGSSHLRYALMNACLPLITYEPVFAEYYAKKRAEGKPHRVALTYVAKKLLRVIFTLQTKNISYDPTLIR

SEQ ID NO: 155932 - protein, 366 aa, unidentified
MKKISTVQAFKSEIFKEQKLTIGLDLGDLWSFYCVRDEAGQIVFEQKVPTTPEAMKQTFGKIPRSLIALETGTHSPWVSRLLTELGYEVIVAHAQKVQLITKSSRKDDRHDARTPSRLARIDPELLGPVRHRSAQAQIHLTVIRARAELVSARTALVNAARGLVKSYGQRLPKCGTYPVSGKLAEGLSAELRDVLEPLLKEVESLNERIKEYDERMEKIAKEVYPQVSLLKQVKGVGTQIALTYVLTIEDPYRFAKSREVGCFLGLRPGRRNSGKSEPQKGISKEGDRYLRTMMVQGAHYILGPFGEDSDLRRWGLKLAERGGKNAKKRAVVAVARKLAILLHRLWVSGEVYEPLRNSQKAMSAVA

SEQ ID NO: 155933 - protein, 417 aa, unidentified
MIPAVVERCAGIDVGKKLLLVCVVIGPAHQEGKAETRKFGTIRSELEKVRAWLKSEGCTHVVMESTGCYWKPVLNVLEDDPDYPLHIVLANPQQVKAVTGHKTDPHDAHWLAHLLRHGMVRPSFIPPRALRDLRDLTRRRKQIIGGASQERNRIQKLLEDANIKIGDVLSDVFGLSGQLMLEALLDGQVEPMAIAELAKGNARKKIAELAAALEGHQMRPVHRTLIRHAMEHMAFLARQVESLDDAIEGLVREAQFRDAHQLLQTIPGIQETAAATILAECGPDMKQFPQPENFSSWAGVAPGNNESAGVRKRAPAMKGNPHLKTALVESGWSASRTQGTEFKEQYERLRGRIGHKRAIVASAHLLALQIYQVLSSAQPYQPRSRQFKPREIRRLHRHHSRRLKWIDRWLKDKPLEA

SEQ ID NO: 155934 - protein, 412 aa, unidentified
MRLFCGIDWAEDHHDVAVVDAEGTLVAKRRIGDDATGFTVLLQLLADAGDSSDEPIPVAIETSRGLLVACLRATGREVFAINPLAVSRYRDRHSVARKKSDAGDALVLANILRTDLDSHRRLPDDSELAQAIAVLARAQQDAVWDRTCAHNKLRSLLREYHPGLLAAFAGKRGGLLRPDARAVLAAAPTPRAAAKLTRAQLRALLVRAGRKRGIDSEIDRIQPILRREYLHQLPLVEDAFGRQALALLRQLNAAATNADELAAAVIERFDTHPDAEIITSQPGLGHLTGARVLAEVGDDHSRFRDARALKAYAGSAPVTRASGKTLAVMHRRIKNQRLADAGYRWTFTALTASPGARAHYDRRRQAGDHHAAAQRNLFNRLLGCLHHCLTTRQPYNETVAFPNPQTSMSAAA

SEQ ID NO: 155935 - protein, 417 aa, unidentified
MGEQVARGWVGIDVGKGHHWVCLIDETGSTLWSSKVVNDEAAILDAIGEVLGRAQQVSWAVDITGTSSALLLALLSAHGQPATYVPGRTVNQMSTAYAGEAKTDARDAYVIAETVRHRGDLTPVDVPAALVTELRLLVTHRTDLVADRVRLINRLRDVLSGYFPALEREFDYSTSRGAVVLLTGYQTPAAIRARGRVRLTKWLTARKVRSGEHTATAAVEAANAQHTTVPGQDVAASIVAEIAAALLELDQRIRALDARIGDTFHAHPQAEILESMPGIGTILGAELIAAAGDLSRYADAGHLASAAGLVPVPRDSGRRTGNLHRPMRYSRKLRRVFYLSAQTAMMREGPNRDFYLKKRGQGLKHVQALIALARRRVDVLWALTRLSRSRAPYEVSPNKGSGQASPAGRQPAAQLIG

SEQ ID NO: 155936 - protein, 456 aa, unidentified
MPRGQRRTTRAVTTPVLHPHAAGVDIGATELYVCVPLDRDPQPIRRFGTFTEDLLALAAWLAQCGVTSVAMESTGVYWIPLYQILEERQFEVCLVNARHVKNVPGRKSDVQDCQWLQYLHSVGLLRGSFRPPETVCAVRSLLRHRDSLVQLAATHTQHMQKALTQMNLQLHHVLSDITGVTGLAILDAILAGERDPQELARHRDPRIKASPETIAKALVGDYRLEHLFTLRQSLASYRHYQQLIGECDGEVQALLGDFASQIDPAVHPLPPSTSARRTPHGTAPRFDLRAELYRVLGTDLTQVPGLQTPTVHTLFAELGADLSPFPSGDHFASWLGLCPDNRISGGKVLSVKTRRVKHRVAQALRLAAQSLSRSQSVLGGFFRRMRAKLGAPKAITATAHKLARIVYHLLTTRQPYDESRLAAVEADHRRRTESRLRTQARALGFQLVPVTEQSVS

SEQ ID NO: 155937 - protein, 405 aa, unidentified
MNMNAVGIDISKRKSMVSILRPGGEVVAKPFEISHLSGDVQSLIDRIHSLDGESRIVMECTGRYHEPIARELVAAGLFVSAINPQLIHDYQDEDSSLRKVKSDKADSLKIARYTLDRWEKLKQYGLMDEIRNQLKTMNRQFDFYMKHKTAMKNNLIALLDQSYPGANTYFDSPAREDGSQKWVDFTATYWHVDCVRKMSLNAFVEHYQKWCRRKKYNFSRAKAEEIHGTAKELVPVLPKDDFTKQILKRATEQLYAVSKTVEQLRTLMNETAATLPEYSVVMAMKGVGPSLGPQLMAEIGDVARFTHRNAITAFAGVDPGVNESGDYSQKSVHASKHGSPVLRKTLFQIMDVLIKTKPQDDPVYLFMDKKRAQGKPYYVYMTAGANKFLRIYYGRVKEYLASLPQ

SEQ ID NO: 155938 - protein, 341 aa, unidentified
MKLIRVGVDLAKNVFQLHGVDRSEKPVWRRKLVRADWVKALLGQIEPGCEIGMEACSGAHHWARLLQSHGFTVKLIAPQFVKPYVKSNKNDANDAEAICEAMSRPHMRFVTVKTVEQQDIQAIHRIRSGLVEQRKAIGNQIRGLTSEYGLTASKELLHLRAAIPRWLEDLDNGLTELFRRLLRGLWQDLLAIDVRVTELDREINLVAQNDPVAVRLQQLRGIGPVTATALLATIGDATQFTNGRQMAASLGLTPKQNSSGGKERLLGISKRGDAYLRSLLVHGARAVIRTAQSKSDRLSTWVMRIATTRHPNIAAVALANKTARIAWAMMSRGTDYDPSLA

SEQ ID NO: 155939 - protein, 360 aa, unidentified
MAKARSLVGLDVHAAKIVAAVLDAETGELQCFRMTADVGEVAGFCAQLPSPVRVAYEAGPTGYGLARELVKRRVECVVAAPSKIPRGAGDRVKTDRRDAEHLVRLLLAGKLHPVRVPGPEEEALRDLVRAREAVRVDLMRARHRLSKLLLRHGIRFEDGHAWTERHRQWLATVDLRWPAAQATLLDNRGAIDALCHRRDGLERQIVAMLPSSPWRMQVGRLRCLRGVDTLTAVGLCAEIGDFERFARAEQLMSYIGLVPSESTTGQQRRLGSITKTGSGHARRLLVEAAWHYRPRPNRGKTLLDRQDGQPQAAVAVSWKAQLRLHRVWARLEARNKRRTIIAVAAARELSGFCWSITQLE

SEQ ID NO: 155940 - protein, 361 aa, unidentified
MSKRIVATGNPVLSANKLANLQQARVFCGIDVSAETLTVAVIEPGRPSIQREFANSASGHKALLGWLRTWKARVRVCLEATGIYSMNLALALDAAEGVEVAVLNPKRVHDFARSLCRSKTDSADAQVLAEFSMRMDFKPWQRPSRTALALRAISRHIEALGLEHTRTHNRLHAAQESIATPRCVIEDMKRSLAGLERRMLKLRREAREQIDGDDQLREQFLLMIGMPGIAEISALQILGELVLLAPDLKARQWVARSGLDPVHQDSGTSVHKPAHISRAGSRHLRRALYMPALAAVRCDPHLKAFYEVLLARHKSKLQALMAVARKMLHAIYGIFKTRTPYDGSRLFPALKIACALESTSK

SEQ ID NO: 155941 - protein, 398 aa, unidentified
MNNTVTSRLMVGIDIGKRFHQATVIDDSGRIIGGSVRFANNTPGGEMLLSRVDSVNPSRLPVFFCLEATGHYWLPLYSFLTSRGYPVAVINPYQSDAWRKVHLSSTKTDKEDSYLIADLFRFGAVSSTVLPSEELVSLRNLTRFRMALSQQITDTKRRIVTILDQIFPEFETFFSAIFGKTAKAILEEYPTPDSLEKVSLRKLANLVSRLSQGRFKTEKAREIKDAAASSFGVTFAMDSFTLELRLLLGQLEFLAGQIQTVEKEIATVMAKTPTTLTTIPGVSLLLAATIIAEIGDIKRFKTSSQLVAYAGINPTVRQSGQFSSNQNRMAKKGSPYLRLALWQAAVVAIRFNPVLKDYYQKRLAEGKNQMVVIGAVARKLTGIIFALLRDNKDFVVLK

SEQ ID NO: 155942 - protein, 325 aa, unidentified
MNIRSHITREVSVMAVICGIDLSSTTMEARIGASGVEGSFANTEAGVKLLAGFCKQHDVTLAVMEATGGYERMPYRMLWLEGVASAIAHPHAVRCFAQAMGMLEKTDRLDAGLIAAYAAARGIVAVPPPSEEQQRLRALVTRLRQLTELQVLQKNQKRLVSEAAVLAGFDQILALLKQQMRELEQAIAGLLAADPLWSELDRSFREIKGVAKRTVARLMAELPEIGTLGHKAVAKLVGLAPLAADSGKQRGPRRVRGGRSTVRSILFVIACGVKKYQPQYADFAQRLAQKGKPPKVIRVALAHKLLTQLNAKARDTRQRIASAAA

SEQ ID NO: 155943 - protein, 452 aa, unidentified
MEDEVIKMEVVNPHAAGIDVGSRSHWVAVGQREEDVREFGVFNDDLFSLSDWLKECNVRTIAMESTGTYWQNLYAVLISHGFHVILCNGKFTKNIKGKKTDIKDCQWIQRLHSLGLLSSSFLPDGKTEELRTYCRHRQNLLHESASTSKKMQKYLRLLNLRLDVVVKDVCGLTGLKIIRAICNGETCPEQLAELRHANCHTSKADIARALQSNGREDFLFALKHELEMYDYLHKKIEECDLKIEEKLNSIINDDENKKQHHIDPKPHKKVNKNTPKNIDLNLKSYQMFEGTDLLAIEGMSYSTVLALMSEIGVEGIRKFPTAKHFASWLRLAPNNKVSGGKVLSSKVPKGSNNLKISLRNAANAIGNLKDSTPLRDFFMRINFRKGRVSAISATARKLAVIVWNMVVKGRPYENPEGYLYLQQKRKLGLVKRIRTQIQKYNIKPDDIGFVID

SEQ ID NO: 155944 - protein, 340 aa, unidentified
MKNISILGIDLAKHVFQLHGVNKSGKAVLKKRLNRSELKEFVANLPACLIAMEACSGSHAWARMFEKMGHKVKVISPQYVKPFVQVHKNDMRDAAAIAMAASHQGVPSVMVKSEEQLDLQAIHRVRERLVREKTAISNELRGILADMGVIIPTGHASIRVLLPSILEDAEQPITYQGRQLLSDLREQWLETEAHIHRYDVMLQTYVKENEDCKKLLEIPGIGPINASLLLCYAGDAKRFASARHFAASLGLVPKQASSGGKERLLGISKRGNKHVRKQLVHGARSAYRVLLKEESSGRLSDWAKRMKDSGKHVNKIVVALANKMARIVWCLMMKETNYQR

SEQ ID NO: 155945 - protein, 378 aa, unidentified
MPSETTVYVAVELSVSSWLVAARSAGAEKSRLHRIQGGDTTTLLALIAKLRSRASTKLGRAVDVACCFEAGRDGFWLHRLLTAHGIAAYVLEPTSILVNRRARRAKTDRLDAEGMLRVLAAWLAGDRQVCSMVRVPTPEEEDAKRPHREREHLVQERLRIENRIEALLFTQGIRKRPSLRSWVRDLAELRTGDGRELPCLLRIELERLRRRLVLALELIHEVEADRAEALAATADDKMTQKIAALQRLRGIGPNFAAVLVREVLYRSFANRRQLASYVGIAPMPYQSGGMDRDRSISRAGNPRARTTVIQLAWLWLRYQPGSALATWFRERVGMLQGRTRRISIVAMARKLLIALWRYVETGVMPEGVEIRAEADATA

SEQ ID NO: 155946 - protein, 407 aa, unidentified
MELAALYKRVIGLDIHQAQITACALLEEPDGTTRIEQRQFGGFKRDRRELAHWVASLKPEEVVMESTGIYWKSPYAALEAVGIRAKVVNARHVKHVPGRKTDVGDAHWLATLARAGLLRGSFVPPAKLRELRLIARQRQKLVGQLAAEKNRLHKVLTDSGIRLGVVVSDLHGQSARAMVKALIAGQPPHAVLKLASRRLKAAREEILDALQGELTASHRFVLDELMRHIEEIEARIARFDARLLAELESEHNTLALLQTIPGVDLIGAAMLLVEIGTDMDAFGSAERLASWVGICPGNNESAGKRKSGRVRKGNPYVRRLLCEFAHAASRTTSVFKSKFQSLLVRRGYKRAIIAIGHKILRTLFFMLKRREHYRDSATDYEALSVQRNAPRWIKSLIKFGFIAPTNA

SEQ ID NO: 155947 - protein, 348 aa, unidentified
MTIVEPARLVTGGVDTHLDVHVAAALDELGALLGTESFATTPAGYVELFDWFESFGPLGRVGVEGTGSYGAGLARSLLARGVEVVEVDCPNRKARHRAGKSDTIDAISAARGALSGQAKGQPKGGTGPVEAMRVLLIAKRSARSERIRTLNQMRHLVFVAPDDIRTRFHGLNVYNLTRQAAAMRPRPGNQVDYVTLMTLRELGRRSLALEDEIDRLDDLLEPIVADHAPGLLNIFGAGIFVAATLAVAAGDRPDRIRNEAAWAHLCGVAPIPASSGKTTGRYRLNRGGNRQANSALHRIVLVRMGHHEPTRVYFERRRAEGRTTLEIMRCLKRYVARETFKQLPGGSD

SEQ ID NO: 155948 - protein, 425 aa, unidentified
MNNSPEQQGDSWLEKRGFGGLDWASQKHYVVVVDPKGKVLEDFELEHSSLGWKKFREVMQPYGRIPFAIETSQGFVVEQLLEAGMEVYPLNPQSAQAYRQRKAPSGVKDDRLDGWSFADALRVDGQNWKPLRPESALIKELRLLCRDEVGLIEERTALVNKLRHALAEYYPIALEAFEDWICLSAWMFLQRFPTPQVLEKAGKRQWEKFLHSRHLWRNESGPRRMELFAKATEFCGSQGTTNAKSMLALGLVKRLFVLEAQLSDYRKRIEELFHSHPDHDLFGSLPGAGPKIAPRLLSEIGDDRDRFQGDVQNLQCLAGTGPVTKRSGKHWECHQRWACSKPLRHVLHLFSEHTITQCAWAEIYYRTHRAKDQSHAGALRCLAHRWLKIIYKMWLERTPYDPELHHRNQVKHGSWVFELKTVNCK

SEQ ID NO: 155949 - protein, 422 aa, unidentified
MLGVGIDWAEEFHMVALGRPGEGVFDVARVEHDPRSLDTLIARIAQLEPDPAEVRVVLETSYGMLVERLLDAGYAVVPVNPDLVARRRGPAKKKDDAEDARIACLIALDRFERLRPLVPHGEAAAELRAIGRDDERASRDERRLLNRLRADLIATFPAALIIAGDDIGAPTFLRMLERWPTANALAEASPGELIAFARAGRHGWPDRFADRIHAALAADNFVARDWLVRAKTDTIRLLASQLLALGTQRRAWERRMGELILGAPRTGRAKRPKDGDRGPVVPGGEIYLSFPGLGDRLAARVAGEIGDIANFDTPNGLQCYAGKAPVTRRSGKSELVVANRLACNGHLRDACQQWAFCSLRGSGWARQFYDTHRSRGKGHQAALRALANRWLEVLWHCLTRRVAYSEAVHVANRTHALTRTAA

SEQ ID NO: 155950 - protein, 332 aa, unidentified
MSDGICFVGLDVHARKTAAAAVLLGSGEVFRAQLSGSSSAAIEWLQTLPGPVRAVYEAGPTGFGLARAARVAGIEMMVCSPGAIPKQPGDHTKTDQRDALKLARLLAAGQLRPVVVPEPAFEALRDLVRCREDLRGDLMACRHRISKLLLRRDVVWNGPGATWSVGHLKWLSAIRFEDPIVEMVFGEHLAHHETLLARRDRLDGLLADRAAQGPWATTVARLRCLRGVDTLTAVGLVAEIGDISAFEHPRRLTSYLGLVPSEQTSGTKRRQGSITKAGSSHARRLMIKAAWHHRRPPRISMTLRRRQAGQPTAAIDAAWRAQLAPAPSLGTP

SEQ ID NO: 155951 - protein, 369 aa, unidentified
MKKTVKYIGLDVHKNSISIAIADQGRDAEVRYYGKTGHDMDQLTKIFRKLISQGADLRCVYEAGCCGYHLYRFLTSNGIDCRVVAPSKIPRKSGERLKTDKRDCITLARLHRAGELTPIYVPNEEDEALRDLVRARSDAQNAHKRAKQQLAALLLRYHIVFPGKSKWSKAYFHWLADISMPHPAQQITLQEYIDTVKTCSDRVDRLTEQIRHFSAQSRLNGLIKALQSMRGISLIVAATLVAEIGDFSRFEHPEEIMAYLGLIPSEFSSGEKRRQGSITKSGNGHVRKSLIEAAQAYRLPARKSRAIQKRQEGLPAEICDIAWKAQLRLCNRYRYLTSKGKNANVAKTAVARELAGFVWAIAMELPLAA

SEQ ID NO: 155952 - protein, 348 aa, unidentified
MVHFAGLDVSVKATSVCVVDDAGKVILEQKVPTEPAEIIAVLTSLGVPLGRIGIEAGPLSQWLVNALVAADLPVICVETRHMKALLTAQQISKTDRNDARGIAQMMWVGLFKPVHVKTLVAQEQRMLLTSRKLLQRKLLDVESDLRGTLRNFGLKVGVVSGGRYDARVRELVEGFPRLAVIVEPLLSVRRVMRQQFAVLHKMLLDTVRDDPLCQRLMTAPGVGAVVALTYRATVDQPQRFVHSRAVGAHVGLTPKRYQSGETDYEGGVSKCGDALLRTMLYEAAHVLLTRSGKWSWLKAWGVRVAQRRGMRRAIVAVARRLAVVLHRMWVDGSEFRWSKDSTAVPAVA

SEQ ID NO: 155953 - protein, 400 aa, unidentified
MIYLGIDIGKRHHEAGLINESGNPIGKTIRFANSKKGSEKLLTFLNQHQVTPENCACGMEATGHYWLSLFSFLYQLGYKVTSFNPMQSDALRNFYIRKTKTDIKDAYLIAQVIRIDSPEATPFVQEDLLQLRHLERLRYALVDQSSDVKRKIIALLDQVFPEYEQVFSDVFGLSSTEILLNYTLPEDLLDIDTEKLADVLYRVSKGRYGITRARWKAEQLKESAQNTFGISIGTEAFKMQIHLLLEQIALFEKQLSQIEKELKELSDRQNHYLTTITGVNDVTAAVILGEVGSIDRFEHPKQLVAFAGLDASVHQSGEFNRSKTKLSKRGSPYLRRAIWQAAFVASFKDPALSLYYQKLRERGKAHGTAVGAVARKLTHIIFAILRDQTPYVPRPQTNGD

SEQ ID NO: 155954 - protein, 362 aa, unidentified
MRIIGCDLHARQQTVAMLDTTTGEVVKMTLTPEGNNVREFYSKLPHPMRVGLEATGSMQWFVNLMEELGIECLVGHPAEIRAAEPRKQKHDRRDADLILKLLVENRFPAIWLPSKELQDLRALLRHRHQWVRMRTRIQNALQAIALANGLRRGTPLWSHDGQNTIASLPLAPHTAYRRNELQALYAKFEAEIEKLNQRVEEQSCKRAGARLLMTHPGVGPVTALATEVFLGNPARFADSKALASYVGMIPREYSSGGRQRLGGLTKQGNPLLRFLWGEAGAHAVRRDPELKRFYRRKLVQKGFGKASVAVARKLGIRLWIMLRDQIEYNEFCRRGQQQQKRSDACAGMPETPNGANSHRPVD

SEQ ID NO: 155955 - protein, 438 aa, unidentified
MSNKVIFNLDELFISVGIDVGADFSWMSIALPNQQFVGKPYKILHNSIDSLTTAVSKIKEAEELYSLESRIFLESTGIYHYPLFCYLRDKGFNCSVINPIITKNSTNINIRKVHNDRFDSKKAALVGLKPDLKVSLMPSDLALNCRNLCREYYDLMDNRSAYVNKLQGELRIAFPQYLGIFSKVTINTSLTLLETYTSPSAFLKADKQEIIDIIKSTARFGLTYAQNKYNAIIQAATDANQFGYIIDSNIKRIRLYISFIRKYDEEINSILESLHELVDANEDSDFVKQIHLIETFKGAGFLSAVSIMGEIGDFSAFSKPKQLFAYFGLDPAVKQSGKFEGTKVQMSKRGSAIARRVIHTLTLQSISISRNREAKNPVLREYYLKKCDSKPKLVAMGAVSHKVCNMIFAILRDNKSFEIITPQEHIKQYNASKCDMAA

SEQ ID NO: 155956 - protein, 323 aa, unidentified
MDKNTNYFGIDISKDVFDVMNIKDQHFEFQNSNKGFRAFKKILTPDSICVMEATGYYHLKLAYFLLESNIKISIVNPLSIKRFVQMKLSKIKTDKADARMIRLYAQNNELRFWKGQSENQIETLQISRLLDIYAKQSTALKNKIHGEQTLGNPSQIVVRSLKRSLKLIKKEQVLLEQKLLELVKVDNQQLLSNLESIPGLGRKTATILIVLTDGFSRFDSAAALCSYCGITPIIRKSGTSVNGRPRISKMGNQKLRNLLFMCSFSACKRNKACNDIYNRITNKGKSKKLALMAVSNKLIKQAFAIAKSGLPYDEKFKPVLSHD

SEQ ID NO: 155957 - protein, 340 aa, unidentified
MRILGCDLHRSQQTVAMLDRDTGEEVKKTLLHDGDAVRDFYASLAAPVVVGIEATGSMGWFLQLMETLGITCQVGHPAAIRKAETRRQKHDRRDADLLLRLLVEGRFPTIWMPSTDVRDLRALLLHRHQWVRMRTRVQNALQAIALGYGLRRGQGLWTRAGQAALSAITLPPNADARRTALLALYASLNDEVEQLDARVGEIAAARHSASLLMTHPGVGPVTGLATEVFLGDPTRFRDGKALASYVGLIPSEYSSGPRQRLGRISKQGNPFLRFLWCEATLHAARLDPALQRFHRRTLARKGLPKARVATARKLGIRLWIMLRDQITYDEFCRRGAGPTA

SEQ ID NO: 155958 - protein, 340 aa, unidentified
MHSENIAAYIGLDVHKETLAVAIAAPERLGEVRYYGTINNEAQAVRRLFQKLQGLYGNILSCYEAGPCGFGLYHQLTAMNIKCQVIAPSRIPKSPTDRIKNDHRDAISLARLLRAGELTPVWIPDLTHEAMRDLIRARAAAKRDSRVARQRILSMLLRTDKRYAGKHWTGKHRTWLANQSFSQPSQQIAFQHYCQSLEQIEDRILQLDQEISRLLPEWSLCNLVCQLQALKGVGQLIAITLVAELGDFSRFSNPKQLMAFLGLVPGEYSSGNSIRPRGITKVGNSELRRLLYEAAWSYRTPAKVGAWLIYYRPDSVTQYSKDIAWKAQQRLCSRVMLPTY

SEQ ID NO: 155959 - protein, 342 aa, unidentified
MYYIGLDVHKKTISYCVKDGSGIVHAEGTISATRWDLDRWMKMLPQPWTAAMEATIFTGWIYDHLKPHAAALKVAHPLMLRAIAAAKKKNDRIDANKIADCLRCDFLPECYMAATEIRERRRTLRYRNLLVHQAVQLKNKISGLLMEAGVSYNKQKLHKVGYFKELLATNPDINEGLRPLLRLCRETLVRLQKTESALVRSLQRDSLLAERVQRLMTIPAVGPITALTWVLEVGDVKRFSSIKKAISYCGLCGAEKSSADTVKRTPISKQRNKHLQSVLVEAAKMAPRLSPELALIYDREKQKGNANRASLAVARKLVAYLVAIDRSQRDFLVVEKKNCAAA

SEQ ID NO: 155960 - protein, 407 aa, unidentified
MEVVYRCCCGIDVHKKVIVACLANGGEQELREFGTTTSEIKTLANWLTESGCEMIAMESTGVFWKPLYNLFELMDLDAMIVNAAHMKALPGRKTDVKDAEWIADLLRHGLLKASYIPNREQRELREITRYRKSLTEERCREVNRLQKILEGANIKLDSVVKDITGKSARKLLQRIIDDDIPDSDEVSKLVHGRMRPKLEQIVASIEGITTPLQRKLLAQIIDHIDDLNRRIGELDKLVQEYMAEYEAAIEAIDEIPGIARRSAEVILAEIGLDMGRFPSAAHLCSWAGVCPGNYQSAGRRKHGKTTKGNKALKTILTQCAKSAKTVKSSYFFAQYQRISARRGKNRATLAVAHSMLIAIYHILKNKTAFHDLGSDYYDSFNRDRKINSYLKRLKALGWEPDAIPSSA

SEQ ID NO: 155961 - protein, 339 aa, unidentified
MCNYVGLDVSLKTISICILNEKGKRLVEGEVDSTPEAVSDFLKKTGLEIGQIGLESGNLTHYLKKGLLKMNYQVAVMESRKMAAILATIINKTDKNDARGIAEALRVGHFQECVHRSDEAVEIRTLLHMRQTAVEERTHITNSLRGHLKVYGIKFSKKAGKSFRKKVEDAVKNLTPRIQKMICSLLNILDAPKEVEDVAADHEDVQLLQTIDGVGPMTALAFKTEIDDPNRFENSKDVAAYIGLTPTQYSSGEIQRQGGISKKGSKRTRYLLVEAASAMLTRCKMWSRLKAWGMKLQKKKGTRKATVAMARKLAVIMHKMLLTKKPFERGSEKKAAIAA

SEQ ID NO: 155962 - protein, 392 aa, unidentified
MKAKPQEKNKKSAEHLTQQHWHEMNRKQRRETMRKMESQELSLEVVHPGAAGIDIGNEFHYVAVPPSRDGQPVRRFGCTTAELKAMADWLKHCEIRTIAMQSTGVYWIAVFDILEQAGLEVYLVNARDTKNLPGRKSDVQESQWLMKLHTYGLLRNSFRPVQEIRTMRTYWRQRNDLVQSAGRHIQRMQKAMTQMNIQLANVLSDVSGTTGQAIITAILRGERDPHKLAELRDPHVKASEEQIAQVWKATGNQICCLCSNRSRMAMSSARSRWRSAIGSSRSISNRERIAARVCPSAGREAQGTPQEKERNAPQFDLREGLFRLTGTDLTRIDSIDVMTATTIVSEAGYDMSKWETEHHFVSWLRLGPDNRISGQRSLAKAGCPPIIPSVSR

SEQ ID NO: 155963 - protein, 468 aa, unidentified
MELILGIDPACRAAHQASLARPDGTFVWTGRKFFSRPAELEKLWKAIELGKQDTLRVVMEPTRNAWAPLASWFRHRGARISMVPTTQSADLRAYYSKHTKNDRLDSRLLARLPLLHPEGLREHTGDGPAEPLRRVVKIRSSIVKRRTAVFQRLDAQLELLGPAWYDALGSNYGKAALALLARYGDPHSLIRLGHARLTRFLIRHSRGAWREPHATMLLTAAQESLQLWGSGADARIDFAELAADIATEAEQAQMLTEQIDDLDERCANLYAEADPTAIIASAPGVGPVTCAIIAGRIGDPHRFHSLAAIRAYSGLVPKLSQSGQAEHQHGLTKAGDPLLREALFNAADQARKIDPQLAAKYQRLMSTERHHDSAICHIATILLTRIATCWRTGQHYVLRDTDGRPVTEEEGRRTIRTHHTVDKKTRINAASKRYSQRQKGRTGREQQESPSAPIHRPVHPRIKPTEVA

SEQ ID NO: 155964 - protein, 343 aa, unidentified
MQEPYHYIGLDVHKHTVSYCEKRADGQTVSQGTFRARREAMEAWAAQPREPWIGGMEATLFAGFVYDVLSPYAIEMLVGHPLALKAISWAKHKSDTLDADTLANLLRADLFPACHMASREVRDLRRVLRYRNFLVRQAVAMKNKTTGILMEVGVAYDSRRIHRQGYFYALLDDLGETPPSVRELLCMTRNGLEMFQSAQRRLLDALNKHGLLRERVGRLMTIDGVGEVTALTWALEIDDIGRFPNLKSVQSYCGLCSGRHESAGKNKRMPLSKQRNSHLQTVLIEAAKLAPRFNAQLAQTHAAALERGYNRNRATCAVARKLAAYLTAVDRSGRDYEDRCAAC

SEQ ID NO: 155965 - protein, 343 aa, unidentified
MKEVTIIGVDLAKSVFQVHGAAVDGSTVFRKKLTRAQFASFMAEQPACLVAMEACGSAHYWGREMRKLGHEACLIAPIYVKPFVKRQKNDAADAEAIVEAATRPNMRFVFIKSEEQQGRGALFRTRELFVGQRTQLVNALRAHLAEFGLVVPKGIRNVKQLAEHIENPENILPESIREVGKVYLDQIEGLTQRTSELEASIKAEAKHSDISRQLQTIPGIGPITAIAVEAYAPEMGSFDRGRNFSAWLGLVPKQHSTGGKQILGRTSRMGQKDIRRLLIIGAMSVIKVAVTKGVSPNSWLGRMLVRKPRMVVAIALANKMARMIWAMLTKGEDYRDPMAETVA

SEQ ID NO: 155966 - protein, 337 aa, unidentified
MVKEQQIKHNEVHIKKFINKLKTEWNEIHCCYEAGVTGYPLYRYLKSLGVNCILVAPGKIPRQSSDKIKTDKRDAIKLARLLRSGDLESIHVPSEEDEAVRDYLRSRDSLRLDLGRNRQRLMKFLLRKGNVYSTTKYWTVSHYKWLNNLHFENEILHETFNDYYSRVRVQEENLKAMDQKIQEIAKSEAFRERVGILRCFRGVDYLTAMFLLSEVNDFRRFKTAGSFMSFLGLVPGEYSSGSKRKQTGITKTGSPRLRRILTEAAWQHRFPGTGSKIVAARRTGQPALVVALAEKASLRLHKKFRNLQLRGKTPQVMITAVSRELSGFLWAAMNLVA

SEQ ID NO: 155967 - protein, 340 aa, unidentified
MHILGLDAHSATFSMLILNGQGKVCQEVKRDTSAENLIEVVRAAPGPKVLVVEESHMAQWVKRTVERYVDKVVICDPKRNKWIAADEFNDDTRSARKLAELYRGNYIKEIRHPDDEGAKLRGLFLHYYDLNHQGTRFKNKLKAVFRQEAIKTAGKGIYKDEDHELWLGKLREQKHLQHAARQDFELVDTLARLKEETYEVMVKLAKKDKAFAWLESIPGAGPMIVSGYLALIDTPERFSRKNKLWSYAGFGNKRHTSDEEVYEEHASKCGNRPLKWVVLEHFLHAVQQARKPNRFKRYYEELRRKGLDETGARRAVCRALLSTVRAVWMKGEPYRDDPLN

SEQ ID NO: 155968 - protein, 350 aa, unidentified
MFIIGCDFHSRFQQIAMLDPTTGEVIERRLEHENGEAKTFYSALSSPARVGMEATCDAQWFERMLREYHHELWIGDAAEIRAAMVRKQKTDSRDALHILDLLITNRFPRIWVPSPAERDLRQMLRHRHKLIRFRTSVMNQLHALAMGQGLCRRKKLWAKAGRKELEGLVLDPWARLRREDLLKLLDQLDPWIDKLDEAVIQAAESRPQAICLMQQAGVGPVTALAFVLTIGPVSRFAHSKKVVSYLGLNPSEDSSAGRQRLGAISKQGNPMMRYLLVEAAQTASRLDPELRRDYQRLKFRRGSGVAKVAIARKLAVRLYWKLREAAQPVPSARMQGSPASPVVGESLSPN

SEQ ID NO: 155969 - protein, 364 aa, unidentified
MSHGTSTTTPPAIAILALDLGKFKSVACRYDPATGAHAFETIATTPAAVHDLLVDAAPRTLVIEACGVCGWISDLAESLSVEVRVANVLGEAWRWRRVKRKTDRDDALKLAKLAAADQLPTVHVPRRAVRQHRSLIRHRHALIDRRTGVKNTIRSLLDAQGLSMPGRSRGWTRASVDELKALARPLAGCGAEDLWRGQLDLELRMLESVQQLIREADKKLDELAAKDERVARLRTVPQVGNRLAELVVTALDDANRFKTAGQVSAYAGLVPKQYQSGQMNRLGRITGQGPGLLRRVLVQVAWGLQRRADTRGHAVFERLCHGQRTRRKQAAVALARKILVWCWALLRDGTTWDDTRGRCPAAMT

SEQ ID NO: 155970 - protein, 345 aa, unidentified
MDHFAGLDVSVKETSVCIVDDTGRIVREVKVASEPEALLAVLKNPAYHFERIGLEAGPLSQWLFSALAEAELPVVCVETRHMQAVLKAQINKTDRNDARGIAQMIRVGLYRPVHVKTLRSQKLRMLLTHRKLLQSKAIAIENDLRGTLRNFGLKVGMVGKVRFEARIQELVENLPDLAELVEPLLIVRRALREQIVILHRRLLAIVRDDEVCRRLMTTPGVGPVVALTYRATVDVPARFRKSKSVGAVFGLTCSKYQSGEIDRSGSISRCGDEMMRVMLYEAAQSMLRSKKWSWLKAWAMQIARRRGMKKAIVALARRLAVIMHRIWVDGTEFRWTREQAAAAAA

SEQ ID NO: 155971 - protein, 451 aa, unidentified
MNNGSGVSRGDRNRNARLTRLREAVPVTNAIVGTDLAERKQMVVVCDHDSRVLARRTFRCKAWDLGSALEWAREHAVRAGFTGVTVACEPTGHRWRVLGQLAADRGMAYVCVQPALSSWARKTEDLTSDKTDDKDAVLIARLTAQLRCYLPEPVDETWGRLRHLGARREALLEEHTACVQQIRDPLECVWPAALQAAKQPFKSTTWVAALTVIIVRDGGDFARTRRLGVHRFAEQVRKEVLRRGKTKPCLRIVRNMFNALSDTAGVLSHRLGALERVGWVLTDWDAAHANQKMVQERMVAVLDELGLTELVCSIKGLSAVGAAAILAETGDLRRFTSARAVVKHAGLAPRERMSGTFTGKARLTGAGRPGLRLAAWRAIWGTLHANPVHAARSRHLITRAEHPLKPTQAQAAVAAALLRQLHAIVVTGQAWDPATATHGTTPQRLEVQEAA

SEQ ID NO: 155972 - protein, 344 aa, unidentified
MTSIDYIGLDIHKKTISFCAKAQDGTILDQGTIVARRDTLLAWAKARPRPWIGAMEATLFTGWIYDLLKPLAQELKVAHPAMLKAIAASKKKNDQVDARTIADLLRCNLLPECYMAPSAIRDLRRVLRYRNLVVRQATRMKNRIAGLLMETGTPYNKERLHGRAYFSELLESLREVPRSVVELLQLSRGQLEFFATIQRRLLKGLGQNPDLSARVARLQTIPGVGEILALSWALEVGEVKRLPSIAQAASYCGLTSAQHNSAGKEHRGPISKQRNKHLQTILIEAAKLAPRHNPQLAVVHERELQRGDRNRATLAVARKLVAYLMAVDKSGKPFAMRASGEEAA

SEQ ID NO: 155973 - protein, 479 aa, unidentified
MAATRISGLNRKQRKELARRLQSADPGLEVMHPNAAGIDVGNSTHYVAVRPDRDPHPVRRFECFTADLHRLADWLEQCGVTTVAMQSTGVYWIPLYEILDARGLEVYLVNARHTKNLPGRKSDVQESQWLLKLHTYGLLRNSFHPAAEIRVTRTYWRQRGDHVRAISTCIQRMQKALTQMNIQLANVISDLSGWTGMRIVRAILAGERDPQALAALSHPGIHASRDTIAKSLEGTWQPELVFVLHQEVTMYDAYEQRIVECDRALQDHLKGFTPHLGDTEPDAEPSPTPAAKTQRSRPKRRRKAGSHAPQFDLGSELHRISGVDLTRIDGIDVGVAQTLISEVGLDMTRWQDEHHFASWLGLCPDNRITGGHVIRRGTRHVVNRAATALRIGATTLLRSQSYLGAQYRRFRGKLGAPKAITAMAHKLARLVYRLLRWGHEYVDKGLQYYEDQHRQQQLRSLQKKALKLGLLIVEPCPGD

SEQ ID NO: 155974 - protein, 424 aa, unidentified
MKVTYQTCCGVDVHKSFLVATIVKTTGGIEPSYQKKRFSTFNNSILEFKQWLLDNHCHDVCMESTGKYWVPVFNLLEDKINVVIANPKWVKAVKGNKDDTKDSKWIGDLFRLGLVKGSYIPCKKVRILREYTRYRYKLVSCRSSEKNRYQNALTVCNVALDSIVSDIFGKSSTSIIDYLLEQSGTSINHEEIASKLLRSLKSKEDAVIESVEGYQMTDAQKYRMRLVRAHMDYITAEINDVDKMIENMISSNPDFENAVQFLCTIPGVKRDSAITIISETGTDMSQFSSSKRLCCWAGLTPGSNESAGKKKSVRITRAGVYLKPALVQCAHAAVKSDKSPYYKKKYESLVKRRGKKRAIIAIARMILTAIYQMLSTGEQWNPSDLYKIDMPVALVEKQKAKAIKQAKKLLQREGILPPDEPLAS

SEQ ID NO: 155975 - protein, 390 aa, unidentified
MKVTTLGIALAKSVFQLHGVDARGVVMLCKQLRRKQVLPFLTRLSPLLVGMEACAGSHYWAREIGKLGHHVRLMSPHLVAPYVKRNKNDRNDAEAICEAVSRPSMRFVPIKSPAQQDLQSLHRVRSQIIRSRTALANEIRGLLGEYGIAIAKELRVLRRALPLIFEDQDNGLSGMFREPLAEMMERLELLDERIKRYEQRVKQLFEQDERCQRLAQIQGVGPLIATALVAAVGNAREFRSGRELSAWLGLVPRQQSSGGRNVLLGITKRGDRYLRMLLIHGARAAVRYAEQRTDPGGAWISRLKARRGPNVAAVAVANKNARVAWKLLSTGQSYRPSQPPPAANKETRRTRAPLGQETGRRGAVRVVADPKSAVFPPPSKLARGRAEKLL

SEQ ID NO: 155976 - protein, 411 aa, unidentified
MNFTQNEKLNQVTTETLVIGVDIGSETHYARAFDWRGLELGKTWAEGLAEKTAKSNIMVGAEPTGHYWFNLASYFKEHHIKLVLVNPYHVKQCKELDDNHPSKTDSKDPKTIAKLGIDGRYNVPYIPEGVYAELRIAMNCRERIVREQVVIQNRIERWLKIYFPEYHEVFADFEAKSSLLVLSSMPLPADVVKAGADGVNWIWRENKLRAVGMKRAQTLYETAKRSMGCTEGSHAARLELRLLLEDYHTKKAQYDDVMAVVEDLCTQIPAVRKLMAIKGIGLLTVAGFFAEVGDLGRFQSPKQIQKLAGLAIRENSSGKHRGQSGISKRGRRRLRTLLFRAVLPLVANNSEFGEIHSYYTNRKDNPLKKKQSIIALCCKLIRVFFALATKDEDYDPVRLLGDIHHPVAAAA

SEQ ID NO: 155977 - protein, 325 aa, unidentified
MSSHEIVGIDVAARTLVAIGDEVVLRPAYENTSEGRRALVKALGCSRRPVRVVLEATGIYFLDLACELAAAGLEVMVVNPKAAHHFAEAILQRRKDDPVDAAMLREYGFRMAFVRWTPPRPELFAVRALAREAQAQTKAVTAAKNRLHALTAATLTPAQLIRALERQIRASEALINQLIAAVRELIAGDGELQRLFERTDSIPGFAAKGAVMVMAELVVLPPMGARQWVAQAGLDVREERSGTSLARKPRISRRGNKRLRQALFFPALTAARCCPEAGAFVDRLVAQGKTRLQAIIALMRKLLHALHALWLNNEDFNAAKLFAKA

SEQ ID NO: 155978 - protein, 368 aa, unidentified
MAKKMIANCEGLKRSFPAAPQTATIGIDLGDRYSHCCFLAPDGAVMSEGRVRTTPESMASHFKDLPSSRVAIEVGAHSRWVSQLLQEWGHEVIVANPRNLPMITSSVRKSDTVDAHMLARLARVDPQLLSPVTHRGKEHYPAIAQLRARDLLVRARTRLINAVRGISKTVGVRIPPCSSPSFAEKAAPFLSEELKPSLAPLLETISHLSKQIYSSDKEISRLGRQEYPETAQLRQVSGVGPVTALEYVLVIGDPKRFASSREVGPYLGLTPQRNQSGDTDQQLRISKAGNKHLRSLLVQCAQYLLGRFSPDTDLKRWGMKLASRGGKNGKKRAITAVARKLAVLLHHLWNTGEVYDPLHNASTPCVSA

SEQ ID NO: 155979 - protein, 399 aa, unidentified
MISVGIDVSKGKSTVCIINNYGTIMKKPFVIEHTKESINGLVTTINTLNEETKIVMETTGIYHLPILNYLLDHNLFVSVINPLVMNKYANTNIRPGKTDNKDSILIASYGIDHWFKLTPYHENDTRYEQLKLLSRQYNQYIGMRVKSKLSLLNLLEQTMPQITTLLQNDSQNIHRDKLNSFALKYWHYDNITSFTKQQFVHNYKQWAKKEEYQASQSKAEKIYELASKSIPTLSSKDPSVKMLISEAIRVYREINISTEMILKQMYNIASTLKEYDILKSMKGIGDNLASRFIAEVGNTQRFNCASGLIAYAGIDAPAYQSGQFNSINRRISKRGSKSLRKVGYEIMASFTRQKPIENPVYSYILKKESEGKPKKVAKIAGLNKFIRIYYAKVRDAYLA

SEQ ID NO: 155980 - protein, 352 aa, unidentified
MVVAVQYRRPSLNKNVMVQIYGIDLGMSSFDVSFLSESGSVRHLSGVKNTVHGISKFLLSLPSSAVLCAEHTGVYGDLLLRLCTLNRTCLCFVPGYQIKHSLGLQRGKSDPLDACRIREYAERFYDLLRPCFYPGEEMSELQELYRTRSLLVESRKRLDTLNIGDNCKSSVSLAAVHARRAVLAELNTQISGLDHEIEALIQNSSEFSRNYQILTSIVGVGPVTSCELIIKTENFRKLDTAKKCAAYAGIAPYPKESGKMKCGHKISPMGDKQLKTLLFLCARSAKEHNKEIRLYFLKKHKVEKKHFFVAMNNIANKLLRLIYSLIQKQQTYDRDYIQRDPRCVVISDTNKC

SEQ ID NO: 155981 - protein, 458 aa, unidentified
MRRKGKRTKGMEEAHPFAGMSQVNPNAAGVDIGAEEIVACVAGDETTQIVKAFGNYSVDLQNIGKWLHEHQIKTIAMESTGVYWIPLFEELERQGFECLLISSRSLRRVPGRKSDIQDAQWIQTLHSYGLLESSFRPQGELVALRTLLRHRAQLLEHRSPHIQHMQKALLQMNVQLSQALSDVTGESGLTIIRAIVAGERDSQKLAAMRDRKCKKSAEEIGKALTGTWRTEHLFIVKQSLEMYDFYTRQVEVCDAEIDRMYALTRPEWTGGELKPLPEKKRNSHSKNAPQKQAEIRQHLKRISGVDLSVVDGFGVSLAQTVIIEVGMDMSKFPSEKHFCSWLPKVAPKHEISGAKVLKNKTLKTKNRAGQAFRMAAQSVKRADCVFGSLYRRLKGRLDKAQATVATAHAIARVVYRMLKYKVEYEKINVEEYEQKYQEQQIKYMRKKAAKLGFQLVPA

SEQ ID NO: 155982 - protein, 467 aa, unidentified
MKHNQQRARSGKKSRGSISLLERIQPDAAGIDCGQNSHFVAVPSDRDPQPVREFRTFTAELHRLADWLAQCGVKTVALESTGVYWIPLYEILEQRGFEVLLVNARDVHNVRGRKSDVKDCEWLRELHSVGLLRASFRPAATIVPLRSLMRQRQTLVEEAATRIQRMQKALTEMNLKLHTVLSDLTGQTGLKIVRSILNGQRDPEQLAAHRDHHCHASHQEIVAALTGNYRAEHLFALRQNFAAYEFHLQQIAECDTAIEKLLAKLAEQQPPPSGPLSTPRRKRGSKHAPTFDIRTSLHRLTGGADLSQIHSIGPHAALQIVAEIGTDMRRWPTEKHFTSWLTLAPNNKVSGGRLLTSRTPPSANRAAVILRRCAMSLGRTSTALGAFYRRLAARTGKAKAITATARKLAVLVYRVLSGDLIYNDPGAAAYHQLNRARELKSLRKRAKLLGYQLVNHSTGEVLSIPVS

SEQ ID NO: 155983 - protein, 349 aa, unidentified
MKYVGIDFHKNYSFITEMDETGAIQRQMKLSNDRTTLTNYVDRLPAHAKIAIEATCNWYYFYELVEDHDIDIFLAHPLKTKAIASARLMNDKVSSATLAHLLRADLLPCAYIPDQTTRDIREVLRMYAFLIAQRTRLKNRTHAILLKNGLSCPYADVFGRTSLRWLHDLQLRSCYHEALVSYTRLADALNEEITLLQQTIKALAYEHPYAGTLDTHPGISHYSGLLIAVEIGDIKRFPNVGKLCSYAGLVPTMHASGGKIRMGSITKQGSKWLRWILVECASHAVNKSPHYHALYTRVAQKQGTGTARVAVARSMLRALYAMLKFNRPYQERQLRPAPWGHNLTQGSEI

SEQ ID NO: 155984 - protein, 367 aa, unidentified
MKNTIVHHEGTASLEVAVNKIKLSGSVIKIALDVHARLYVAVAQYDQLLPKPARRLAPSEFVPWVRQLLRAGHVVHVVYEACGFGFNLYRELKALGVHCYVIAPRKLDEGYTRVKTDPRDATTLCQRLSRYVEGNTRELAVIRVPTEAEEQARHVSRQREQLVRHRQKLEAQGRSLLVSHSLPAPAHWWKNQTWSRLSKLLPSWICLRLEVHRPALLTLEQQISALSTELEAAAPGDVPAGVGKLTTVVMTREICSWERFRNRRAISSYTGLCPGEHSSGTKRIPGSVTKRGNPRLRAALVECAWRMVRFQPNYAPVKKRLSVLAKGARATGAQRKKAIVAVARHLAVDLWRVHTGRNTAAQLGLTI

SEQ ID NO: 155985 - protein, 357 aa, unidentified
MKKLFIGIDFSKEKLDATIILACGMNEIGSREYGCFPNNTTGYRKLCNWVKTNAWNTIAEEWLFCGEDTGSCSIGLSKWLYGKGYDIWIENAYAIKHSSGIQRVKNDKADSAIIAEYAWRQQDKVVPFEPLNESLAQLREIFLYRHKLVGQRVAMELRKEDKSQSNKSKAISFINRKSKHLIAEINKTIAECDKAIESIIEADEELKENYAIITSIKGVARQNATCMLVYTNNFKKFGYDPRKIACYYGVAPFGKQSGTSVNTPAHTSHFANKLIKSLLGQAAHIAKIYNPEIRDYYQRLISKGKKPQVALNNVKNKLIRIIVALVRKKVPYDQNTYKYYEEREVIERKKNEKLIYC

SEQ ID NO: 155986 - protein, 375 aa, unidentified
MKNKVRFLGLDVHAETIAVAIAEPDGEVHSLGTIANRAESIRKLVKKLGSVDQLKACYEAGPTGYVLYWQLAELGVACEVIAPTLAPMKAGDRVKTDRRDAERLARSYRSGDLTAVWVPDEGSEALRDLVRAREAAKQDQLRARHRLAKFLLRTGQRPAVGVKAWTQLYMAWVRQLRFQQVAQEATRLDYLHEVEHMAERVKRLEQAITEAVKLSSPELQAVVKDLQALRGIAQISAVTIAAELGNITRFESARQLMGYSGAVPSEDSSGKRLKRGSITKTGNAHLRRIVVEAAWSYRLRPGVGPALRKRQEGVPEEIKEIAWKAQIRLHKRYCKLAAASKDQRKIVTAVGRELLGFVWAIGVKAEAASKLQMAA

SEQ ID NO: 155987 - protein, 368 aa, unidentified
MVRRLDQPARWDDLGKYMEDHRMDVSLIASVGIDLGKTTFHLVALDCHAKVILRRKFSRGQLLAFTANLPWSVIGMEACSGAHFFAAKIRSQGHEVRLIPGQFVKPFVKTNKNDFNDAEAIAEAVTRQNMRFVPIKTDDQLDLQALHRVRDRLVHRRTALINQIRGFLLERGIVFRKGPANLRNQMPAILEDAEQNVTPRMRRLLADLWQEWKQLEANITNISEEIEHISQEDQACRRLRQIPGVGPLVSTAMVAAIGNGAAFRNGRDFAAWLGLVPRQHSTGGRSLLLGISKRGNTYLRRMFIHGARAVLLRVKYDTGGLGHWVHQLEARTARNKVIVAIANKLARIAWAVLYHAESYRPTALATAA

SEQ ID NO: 155988 - protein, 368 aa, unidentified
MNTVKFIGMDVHKKTITIAIAEEGRQNQPRVYGTIANDLGALNKFCRKMVSTSTQIHFAYEAGPCGYGIYRHLNEKGFDCMVAAPSMIPKKSGDRIKNDNRDAVMLARLHRAGDLTAVFVPDAQDEAMRDLSRARGDAVIVAKKAKQRLKAFLLRNSVVFNGRSQWSKAYFSWLADIAMPHPAQQIALQEYLDAVHESLNRVNRLTDQIRQMVADWRLAPMVSALQAARGVSLIVAVTVLAELGDLSRFKKPSQLMAYLGLIPSEHSSGSNIKKGGITKTGNGHARKALVEAAWAYRMQARVSRVLLKRQKDLPQQICRIAWKAQLRLCARFRRLAAKGIPKQKVVTAIARELSAFLWAIAKQVPSVV

SEQ ID NO: 155989 - protein, 357 aa, unidentified
MKVTTIGIDLAKDVFGLHGVDGQGRVAFKKRLVRSRLLEFMSQLPRCLVGLEACSSAHYWARKIERLGHRVRLMSPRFVKPYRKSDKNDANDAEAICEAVTRASMRFVPIKSEAQHEVQALHRVREQLLKSRTALVNQVRGLLAEHGIVAPQGIARARRLRLEILADPERHGLSGLFRETLQEIAERLRFFDERVGAYDDRIERVFKEDERCRRLAKIEGVGPLVATAVVAAVGNASEFKSGRELSAWVGLVPRQHSSGNRSQLLGISKRGDRYLRTILIHGARAALRRADHKRDQRSRWAMRIKLARGYNKAAVALANKNARIIWALLTRGENYRPPAISVASPTADRISLTQVQA

SEQ ID NO: 155990 - protein, 346 aa, unidentified
MTIVEDERAITGGVDTHADMHVAAALDPIGGLLGVQEFPATTAGYAGLLGWLGGFGTVALVGIEGTGSYGAGLARHMAAAGVQVVEVDRSDRQDRRRQGKSDPLDAVSAARAAQSGRAAGAPKGRDGAVEAIRALMVARRSARNERTPAINQARSLIVTGPDDLRARFARHTPAQLVTGLAALRPRPGDVPGYATRIALRELGRRAQFLDAQIVYLDELIVPLVTARAPSLLALYGVGADTAALLLIAAGDHPERLRSEAAWAHLCAVAPIPASSGKVRRHRLNPGGNREANHALWRIVITRMSAHPATRAYVDRRSKEGLSKKEIIRCLKRYAAREVYRHLRAGG

SEQ ID NO: 155991 - protein, 407 aa, unidentified
MVDTTAIDLFLGLDLGKEFHHARGLTEQGKTVHDRRLPNTEPKLLELFKKLAAKFGTVLVVVDQVANIGALPITAARAAGCRVAYLPGLSMRRAADLYPGEAKTDARDAFVIADTARTMPHTLRAIDRDDEALAALTMLTGYDNDLAGEVNRTTNRLRGLLCQIHPSLERVLGKRLAYPYVQVLLTRHGSPAKIQRLGRARCQALLKAHGSRKAHHLTAEIFDALAEQTLIVAGTETSALIVPGLAAQLGAAHTQRKQAEQEIAALLEALPLFHLLTSLPGMGVRTTAAVIVAIGDGTTFPTAGHLASYAGLAPATKSSGTSIRGEHAPHRGNRLLKRALFQAAFTAIGCRSDPSSRIYYDRQRARGKTHTQAILRLARQRVNVIHAMIHTGTLYEARTAGDVDLAA

SEQ ID NO: 155992 - protein, 393 aa, unidentified
MYLVGIDIGKLKHSFCLLEKETGEILVEPVFFENNRDGFNALLSSFKHLPQKDILIGMEDTGHYNLALLKFLLDRNYQVALINPVATNLTRKMQGGISKNDKLDTLTICDVLSSNQRVKSYRISKYSSFDLYEQKQLTREHHNLKEEENQLSNRLQKCIDVVFPEFNSLFKSKYGIVYMNILKEFGSADAIAHADIRTLRKCFDTGRGKHISLTAQELKEAARNSIGFPSSSEVTQIKHLVARIELIKEQIAEIDKKIEEFSIQNNSPILSIPGISHFSGTSILAELGDIHNYSKPSQIIKFAGVAPLTYESSQFTAQHTAITKKGCKYLRKTLYQIITPVIQYNPVFRKFYLLKIAQGKGHRCAQGHCVRKLMRVIYHLLSTGTQFDPALLR

SEQ ID NO: 155993 - protein, 317 aa, unidentified
MNGIGIDVSKQQLDVGTTDGEILQVRNTAAGFAELEAWLKEHPADQIVLEATGGYEQRVLDFLHKAGRPVVRANALRARRLAQGMGHVAKTDRLDACALAKMAVLVKLHAYQPLEPWQLRMREFVRARRQAMQALTVARQQQEMVGDRELRRLLQANITRLQTLVARLGKQIGEQVEQQPQLAVMKSMKGVGPALQAVLASHLPELGRISGKAIASLVGVAPMSHDSGTMRGKRSIHGGRAEIRQVLYMAAMSAMRHEPRLRDFYRSLRARGKEGKVAIVAVMRKMLVILNARVRDAESGPIPALSQPTGGHPEAAG

SEQ ID NO: 155994 - protein, 314 aa, unidentified
MQTHSVGIDVSKRQLDVAVLPTGDAWQAPNTEEGISDLVGRIQALGSTLVVVEATGGLEWPLVGALGAAHVPVVVINPRHARDFAKALGKLAKTDRIDAAMLAFFAERVRPEPRPLPDAQAQVLRALLTRRRQVLEMLLAERHRLAQALPRVQLDIQESIAWLEQRLHRLEQELGDTLRQSPLWREKGDLLRSVKGVGPILSFTLLAELPELGTISRQKIAALVGVAPLNRDSGRYRGKRGIWGGRATVRHALYMGTLVATRFNPVIRAFYHRLLHAGKPKKLALTACMRKLLTILNAILRDRRPWHSTTPLTS

SEQ ID NO: 155995 - protein, 352 aa, unidentified
MIIIGVDFHPEFQQIASVDTATGEFQEKRLAHREEAENFYRALAGKKVRVGMEASGHARWFERLLAELQLELWIGDAAEIRTKRVRKQKTDRQDARLILQLLLEERFPQIWVPSWENRDLRQLLWHRHRMVQSRTRIMNQLQAVALNEGLRCQKRLWRERGRQQLESFRLAPWASRRRRDLLELLDRLNPTIAELTQAIEQEAEKCPPAQRLRTHPGVGALTALAFVLIMGEADRFHCGKQVASYLGLVPLEDSSGNRRRLGHITKQGSSILRFLLVEAAQVTVRSIPEWRSKYFHLAMRRGRKIAKVAMARKLAVCLYWMWRKGWNYEQLTKFGSHAGQPGNRHGVQSNTE

SEQ ID NO: 155996 - protein, 358 aa, unidentified
MSKHSENQEVKVMGIDLAKRQFQVHGVDIGGRKVISKKFSRQKLKEYLVTLLPCTVAMEACAGAHYWGRLLRSYGHDVRLIAPQFVKPFVKSNKNDAADAEAICEAAQRPTMRFVAVKEVEQQDIQSIHRMRSLAVERRTAQINQIRGLVLEYGIEIPTGRFNLLKRLPEILEDAENGLTEFFRKELFGLYEELRHLDARIEHYDEKLKQIAQADERLQRLQTIPGIGPVIATALLAAIGDIQAFKNGRELAAWLGLVPRQHSTGGKATLLGISKRGDVYLRQLIIHGARAVLRWADRKTDRTSRWAAALKVRRHKNIAIVAMANKMVRVAFALLKKGENYRVQPLVAHNTRLGPIEV

SEQ ID NO: 155997 - protein, 391 aa, unidentified
MVCVGIDVAKDKHDCCILDSDGTIRADCITIPNNMDGFKQLLQTIRDCTKKSDKIKVGLEATGHYSYNILGFLLDNGLPTYVINPLHTNLYRKSLSLRKTKTDRVDARTIATMLLSNVDLKSYTDTAYHNEELKSLTRYRFDKVRERAKLKQSVSRLVTILFPELEKLVPSLHIASVYALLSEYPGAKQISEIHLTKLTNLLKTASKGRYGKEKAIQIRAAAKSSIGSVMPAKSLELKHTIKLIQELDSEINEIEDSIQKIMDELNPPILSIPGIGVNSAAVIFAEIGDFSNFSSPDKILAYAGCSPSTYQSGKLTNCYAHMEKRGSRYLRYALYNATKYVCHWNPVFAEYLAKKRAEGKHYNVALSHATKKLVRLIYALQKSGKAYLAAV

SEQ ID NO: 155998 - protein, 344 aa, unidentified
MVKLSRVGVDLAKNIFQLHGVNRAETSTWCRRLRRDNWVKVLLNKVEPGCVIGMEACTGAHHWARELQAKGFHVKLIAPQFVTPYVKSNKNDANDAEAICEAMSRPGMRFVTVKTVEQQEIQAAHRIRSELVGQRTAKGNQIRGLVAEYGLVAPQQMNHLRTALPEWLGDAENGLSDRFRRLLNSLWGDLKRLEQRVTEMDKEIALMAEHDPVAKRLQQLRGVGPMVATALLACVGDGKQFRNGRQMAASLGLTPRQHSSGGKERLLGISKRGDSYLRSLLVHGARSAIYAARGKEDRLSQWVNNIVARRHPNVAAVALANKTVRIAWAMLCHDTDYDPELMAV

SEQ ID NO: 155999 - protein, 398 aa, unidentified
MVGPVTHANVGYTERSSRTVQSQYREDWSVCDPTRIRFVGLDVHKETIALAVADASLPAQALGVIPNDFATLLKTLRRLGPPESIVCCYEAGPTGYGLYRQLRAAGYTCHVVAPSLVPVQSGCRIKTDRRDAAKLAHYLRSGDLTFIYVPDEVTESVRDLERARDDAKIAERVTRHHLSKFLLRHGRIYAGKTSWNPAHMAWVAQQAFELPAERQVLADYREAVELAGARVVRLTARMGEALETWEKAPLVKAFQALRGIDMVSAVTVVAEVGDFWRFAKAGDLMAFVGVVPSEHSSGGSRRQGRITRTGNSHVRRIVVEAAWHYRRQPRMSKAIRLRNDLVSPGVRGIAWKAQKRLHGRLNRLLGRNKPACQAVVAVARELVGFLWAISREEVLLAG

SEQ ID NO: 156000 - protein, 393 aa, unidentified
MTEQPLSDRVVIAVDPHKASWTAAALDASLQPLDVIRVPVSPQGYRQLRGFAQRWNDPGWAIEGAAGLGAPLTQRLTADGIDVVDVPAKLAARVRVLSTGHGRKTDEADAVSVGVAALTATRLNTATVDAAITALRALVEHRDDLVKTRTQTVNRLHVLLTHLTPAGAPRGLTADHAADILRQIRPRDPAVKTLRGLAVDLVTEIRQLDRRIAKAATDIHTAVDTTGSTLAELCGIGTLNAAKILARVGSVHRFRSAAAFASYTGTAPIAASSGDVTRHRLSRAGDRQLNCCLHTMAITQIARDTPGRTYYRKKRAAGKSHREALRCLKRRLSDAVYRQLLRDATTRAGAGPAGHAGATLASSAAGSHPFTSTSDKSLTGPANRNHTTGGHEV

SEQ ID NO: 156001 - protein, 344 aa, unidentified
MITIGVDPHKSSHTAVAIDATGQKVGQRRFVVNAGTFQQFLRWSEQWPERRYAIEGAGGLGRTLAQQLAAAGHDVVDVPSTLSARARLLGTGGDRKTDPADALHVAQFALFRQDLRKVTPEDRSTILRLLTERHDDLVNERTRITNRLHAVLRDLLPGGAPTGLSADKAGALMKGLRPVTATDCCRRDIARDLLADLRRLDRQVKANEAQMRDALAAAHTTLTSLPGLGVVLAARILGHIGDVTRFPTEHHFASYTGSAPLDASSGKNVRHRLNTGGNRALNSALHIIAVCQIRIDGPGQDYYRRKITEGKTPAEARRALKRRLSNVVYRIMKRDQRKHLTAAA

SEQ ID NO: 156002 - protein, 429 aa, unidentified
MNEVDSIRLEQFRQIKKEIRGSREYLIVGIDVAKDKNYAFYGTTTGKTLLKRMIFENTIEGFEKLRIQEDAIKVRHGLKKVIYGLEPTANYHKPLGEHLIRCVRNVVLVAGIAVKNNRRMMDGRWDKNDTKDAAVIGDLISQGKFLFYEYPSMPLRDLRNLLSLKKRLKKQEHGQKVRIRNHLLAQYFPELDKYYKNWGKEGLAIVRWCLDPSIIAGLEYEEFVRRVAPNGRGGIPQQERLRAVWKKAIDSIGCRAGKSLEVEAKLMVEGLKYIRESLRNVEDNIEEICMGFPEYSYIFSIPGFGPDISSKVVGAIGNPFRFENGRQVLKMAGMDLSANRSGKNSEKVTPKLSKNGKADLRYALYQAALIASCKNIHFIRYYTEKLRGREKEKGIKTKMRVKLAAKLLIIAWTLMKKQEFFDPDYLNIE

SEQ ID NO: 156003 - protein, 406 aa, unidentified
MRVVYKHCCGLDVHKKNVTACILTPKGKEIRTFGTMSDDLMQMADWIKSRRCTHVAMESTGVYWKPIYNLLELEDLQVMVVNAQHIKAVPGRKTDVKDAEWIANLLRHGLLQGSFIPNREQRELRELVRYRRSLIDERSREVSRIQKVLEGANIKLSSVATDTLGVSGRAMIEAMIQGIEDPKELSELAKKRLKNKKDDLQRALQGQIGPHQKLMLEAQLKHIDFLDEQISKLDEEVKVRMLPFEKDLERLDTIPGVGRRNAEQILAEIGTDVKNQFPSAAHLCSWAGMAPGNNESAGKRKSGRTRKGNKKLRHALVEAARSAARTKNTFLSAQYHRIAARRGANRAAVAVGHTILTIIYYLLIRKQDYIELGAEFYDQRRKDIIIKQSIKRLESLGVKVSIQHSA

SEQ ID NO: 156004 - protein, 383 aa, unidentified
MRHGGILIEANDSEGEAMKKHSAINQSLSADVTACTTVAVDLAKRVFQLAGEDALGQVLFEERITSREAFQAFLQKLPVSVTVLVETGPGAQAWARLLQTQGNPVRILPAQLVANHRSGPKNDRNDALAILRAGRDCKISAVPLKSAAALAMQALHRARQGYVRRRTAVGNQMRGLLLEHGVAMAQGELAISQLVPRVLEDATQPLPDLLRELIAELLGEWEQLGDRVNVLTGRLETAAKADETAKRLMTVRGVGPIIATALLAKQTAPERFANARLFAAYFGLVPSQHSSGEKTRLGKMSKQGDAYLRSLTIQGAHAVLKQLRPDSQQPDDQRLQRWLDRLGRKEAAVRLANRNLRILWVLLQNDQTYRRQPGTAQEAAMSH

SEQ ID NO: 156005 - protein, 409 aa, unidentified
MERQLERSAGLDVHRDTVAACVRVPGRGGHREQHVQTFGTTVAELLRLREWLEAHGVTDVAMESTGVYWKPIYYVLEEAFTCLLVNAAHIKQVPGRKTDVQDCVWIAQLLEHGLLRASFVPPVPIRELRDLTRYRKGLIQERQREANRLHKVLQDAGIKLASVATNILGVSGRAMLEALVGGTTAPAVLAELARGKLRAKLPALREALAGRFRPHHAFLVSQGLAHLDYLDEAIETVSTEVERLLIPFAAPLRRLDTIPGINARTAQVVIAEIGVDMSRFPSEHHLASWAGLCPGNNESAGKHKAGTTRKGNRWLRMALIEVALAAIRKKQSAFGARYRRVMRHRGHKKAVVAVAHSLLRTIYHVLAEATEYRELGADYYDRRQTTRTTRRAVAQLERLGYRVTLEPAA

SEQ ID NO: 156006 - protein, 342 aa, unidentified
MEISTVGLDLAKSIFQVHAIDAAGTAVVRKALRRAQVVPFFAKLPRCLIGMEACGTSHHWARELARLGHEVRLMPPAYVKPYVKRGKTDAADAEAICEAVTRPSMRFVPVKSAEQQAALALHRTRDLLVKQRTQLVNMVRGLLAEFGIETARGLHHALSLAARLSAGDAPEVQALAQRVVKGLADQIGALQVQLDLLEKDLLAWHRSNELSQRLATIPGVGVISATALAASVTEPERFRSGRQFAASLGLTPLQNCSGGKERMGRISRMGDRYLRRLLVLGMTSLVRRARSTPDAVDPRFVAMLQHKPVRVVTVAAANRTARVAWAIMTHGGTYRTPPAAAA

SEQ ID NO: 156007 - protein, 348 aa, unidentified
MDKIIRIGIDTSKSVFVLHGVNAADEPVLRKKLRRRQVLDFFRIMEPTRIGLEACGAAHYWARELMALGHAVVLLPPQYVKPYVQRGKNDAADASAICEAMSRPRMRFVPGKTAEQQAALMLMGVREQFIARRTQLANMIRGYAAEFGITAARGLDKIEPLLARIATAPEVPELAKELFATLAEQYGELKPKLRRIDAQLLAWHRHNELSRRLAQVPAIGPIGAALLAMKVPDPRAFRTGRDFAAWLGLTPKDHSTAGKQRLGVITRAGDEALRSTLVSGATAVIQQVSKARGNPSPWLIALIKRKPPKLAAVALANKTARIAWKLMVSGEPYNRNHGAAAHTVGIAA

SEQ ID NO: 156008 - protein, 360 aa, unidentified
MNATTVAVDLAKSVFQIAVADERWHIVETQRLTRTQFERWFANRSVSLVVMEACGSAHHWARWLNGLGIEVRLLPAQYVRAYVRRNKTDATDAAALLEAARASDMRPVRVKSVEQQALQGLHRVRSLWMGTRTSRINALRGLLREFGIAIPVGARTGLETISRVLADPGSGVPELIRGTTRLLVQEVRLLEARIAQLERELAALARLSPACTTLLSIPGIGLLTATALVAATSGDVTHFKDARHFASWFGLTPREHSSGNSRFLGSISKRGDRYLRMLLTHGARSVLRAAKVADSAGREVCGVRRWALEVQNRSNHNKAACALANKLARICYATLRDKTAFGESERLSRKINRESFVMPL

SEQ ID NO: 156009 - protein, 345 aa, unidentified
MNIIRVGVDIAKSVFHVHGVDRHSQTRWQGKYARSKWLDTLSKKVPVGAEIGMEACASSHYWARELQKRGYCVRLIAAQFVKPYVKSNKNDQVDAEAICEAMSRPNMRYVAPKTVAQQDVQAAHRIREELVGQRTAKANQIRGLVGEYGVVAPVGIQQLRRALPEWLEDAENGLSESFRVLLHGLADDLRYLDDRITALDERITESVKQDPVARRLMTLRGVGPLTASALSGALGDGKAFRKGRDFAASLGLTPRQHSTGGRDRLLGISKRGDSYLRKLLVHGARAVLRHIGGKDDGLSHWLQALVSRKHVNVATVALANKTARIAWALVHNEAAYDEGLAAAGV

SEQ ID NO: 156010 - protein, 383 aa, unidentified
MSKCTRYLGLDVHAETITAAIAEGRGKIRSLGKFPNRPEAVRKFIEKLGGGKNLKVCYEAGPTGYALYWQLTKLDIDCEVIAPSLIPRKPGDRVKTDRRDAEKLAQSYQNGELTPVWVPTPEHEALRDLVRQRGAAKADESRAKHRLVKHLLRRGLREPNESRAWTHRWWAWVQSLKFDHEAQQVAFEDCIAEVLHMAERLARLDKAIDRLVASAPPHMQAVIEALQALRGVAKLTAVTIVTEVGTFKRFRRATQLMGYTGEVPSEYSSGARKAQGGITHAGNAHLRHVLGEAAWHARHRPWNNKRIKKLLPTLPAGVAAIAWKAQERLHKKFTRMTYRGKNAGTVVTAVARELAGFIWAIGTLVESQATTDNPKADNKPRTA

SEQ ID NO: 156011 - protein, 391 aa, unidentified
MVCVGIDVAKDKHDCCILDSDGMVRADCFTIPNNMDGFKQLLQTIRNCTKKSDKIKVGLEATGHYSYNILGFLLDNDLAVYVMNPLHTNLYRKSLSLRKTKTDRVDARTIATMLLSDVDLKSYMDTAYHNEELKSLTRYRFDKVRERAKLKQSVSRLVTILFPELEKLVPSLHIASVYALLSEYPGAKQVSEVHLTKLTNLLTTASKGRYGKDKAIQIRDAAKTSIGSVMPAKSLELKHTIKLIRELTSEIDEIEDSIQQIMDELHPPILSIPGVGIQSAAMILAEIGDFSNFESPDKILAYAGCSPSTYQSGKLTNCYAHMEKRGSRYLRYALYNATKYVCHWNPVFAKYLAKKRAEGKHYNVALSHATKKLVRLIYALQKSGKAYLTAA

SEQ ID NO: 156012 - protein, 356 aa, unidentified
MDKVIREGAVRVGVDLAKHVIQVHAVDAAGRVLTSKPLARAKFIEWCARLPRGCMVAMEASSSAHHWARKLATLGLDPRIISAQLVEPYRSQGASGKNDANDAAAICEAASRPTMRFIPVKSIEQQSMLCVHRLREGIKEDRTACINRIRGLLAEFGLVFAQSPRELQAVLSEVLEDATNELGALARLTLQRAQTQWHELDEHLAWCDERIDAHAKANAAVKAAATLLGIGPVTASAVVATVGDFKQFKNGAQFGAWIGLTPRQRSSGGKNNLGGITKRGDTYLRTLLIQGAKSAVMTAHRRQDKISTWVVSLRERSGWQKTVVALANKNARILWAVMTRGQAFDANHLSVKSTAA

SEQ ID NO: 156013 - protein, 359 aa, unidentified
MDGSRERPKVTAGLDLGDKYSYLCLIDTDSGEVIEEGSLRTTPEALRRRFASERPPMRIALETGTHSPWVSRLLEGLGHEVLVANARKLRLIYSNKRKTDEVDAENLARLARVDPKLLYPLKHRGEDSQAHMAIIRSRQALVDCRTQLVNHVRGAVKSFGARLPKCPARSFHKRAPEHIPEALMPALKPLLEQIGSLTERIRQYERQLERISKEHYPETDLLRQVEGIGPLTALTFVLTLEDPYRFEKSRSVGAYLGLVPATDRSGERDPQRRISKEGDEMLRKLLVGSAHYILGPFGSDSDLRRHGEKIAARGGKNAKKRAAVAVARKLSVLLHRLWVSGEIYAPLHNAHRRQRKEAA

SEQ ID NO: 156014 - protein, 335 aa, unidentified
MNNYIGIDVAKATLQVYIPIKDENISIENSNKSLKALYNKLKKYYKKDIDKLVFIFEPTGSYSSLLKYFCSEKRIKAFIVNPRQSSNFAKALDNRSKSDIIDAKMLHKFYVMAKEGDIVVPVLNEAQEALSVMLGYYKLLQKERNAFSNHLEALVAKKLNNPIEKKLEKKIEKLKLQEKEMIKEMKNLILSDEELSKSFECIISFKGVGDISAIALLHLFISYPNANRQEITALSGLDVIETSSGTSIHRRSRISKRGNSIYRGILFMPILSSVVNNKYIKSFYDRLKENGKHSTSAQIAVMRKIILITHSLYKKQRKFDNEVYEKRIGWIALKS

SEQ ID NO: 156015 - protein, 348 aa, unidentified
MTQMKFIGLDVHKETVAVAIADATRNGEVRFYGTIPNTAESIRRLFDRLHLPDVELHFCYEAGGCGYGIYRQLRQLGAPCDVIAPSMMPKKPGDRIKNDRRDAVTLARLLRAGELTAIWVPDESHEAMRDLVRARRQAKGDLVAARQMLLGFLLRHGRKFTGKTNWTRSHWRWLGEQAFGSPQQQFVFSEGIRRIEEAQARCDRLDQMLQEAMEGWSLAPLVKSLQALRGVGLVIAATLVTEIGDLTRFQTPKHLMGWLGLVPSEASSGSRTRRGAITKTGNAQARAMLVEAAWSYRLPAREEHRYRTRVADLPEEIGPSAGRHRPDCANGIAGFRPRASRNRKSSPL

SEQ ID NO: 156016 - protein, 453 aa, unidentified
MKTKNELKASTESFKQINFSQGLPVTNFHAAGIDVGDSKNDVAVSNGKTGFIVREYSTFTADLINLVNWLVSLSITTVAMESTGIYWLNLYLLLEEAGIEPYLVNAKHVKNVTGRKKDDTDAIWLQKLHSCGILQKSFQPEGEIRVLRTYVRQRKNLKRISSDSVRRMQKALELMNIKLHIVISDILGKTGLQMVHSIIEGERDPEELIKLKDPRIEASDEDIKKSLVGIWKEEYLFMLKQAYDEYYFYQLQIEACDENIKTLLQSQVAQVLVGEIIDVPVKKKGTKNQFHYNIRPLLKTIIGVDLCQIEGINEISCLELLSEIGTDVSKWASKKHFAAWLNVAPNTKITGGKIISSKMQKKKNQAGQTLRMSASSLSKSKSPLGDYYRKMKSRLGKKEAVVATAHKMARIIYTMIKEKKSYNQETISKSQEEWKEKKIKYLEKQLYQLKNAV

SEQ ID NO: 156017 - protein, 401 aa, unidentified
MASPQEAAWVGVDIGKTHHWVCALDADGKKLLSVKVANDEAEIVELIATVRALAAQPVWAVDIIGAPSALMLALLAQAGQALRYASGRVVAAMSSAYAGEGKTDAKDAYVIADTARLRRDLAVVDQDTDLVRNLAMLTGHRADLVADRVRMINRLRDLMTSVFPALERAFDYASRKGALVLLTGYASPHRIRRIGHTRLAAWLRQRKVRDSADVAARAITAARAQMTVLPGQDLATSLIAELATSILALDERLGRLDAQIAEAFGRHPQAAVIESMPGFGPLLGASLLVGAGDLRAFPSAGHLAAAAGLVPVPNDSGRRTGNLHRPKRYSRPLRRVFYLAAQTSMLRAGPNRDYYLKKREHGRTHSQAVIALARRRVDVRWALLRDNRTWTPAPPALAQAA

SEQ ID NO: 156018 - protein, 424 aa, unidentified
MNLTQNDRLNQVTADTLVVGVDIGSQEHFARAFDWRGFEFSKRAFKFGNTNVGFLSFLRWLEETQSKTGMKKIIVGCEPTGCYWLGFQKFLQEHDVLLVTVNPYSVRKCKELDDNSPEKSDLKDPKTIAGLVKDGRFSTSYLPTGVYAEIREAFVCREQIMKQHVRLSNQIQGWLQKYFPEYFECYKDWDSTSGLMVLEHAPLPQDIIRIGAGGINEIWRNAKVRAAGIKRAMTLVEAAQNSVGLEGGEAARLEIWILVNDYIAKAEQLKRLDEYLAQKVMEVPNVEKLLAIKGVGLSTVIGFVAEVGEIGRFTDPRQIQKLAGLEITKISSGKRKGQPGISKRGRCKLRRVMYESARSLITWNPAFQDVFLYYRHRENRPLGGMQSKIAVACKAIRVFFVILQTGCDFDEERFRKDIIRPQAA

SEQ ID NO: 156019 - protein, 406 aa, unidentified
MDIEAINRRVIGLDIHQAQITACALVEDERGGLRKEHRQFGAFKRDRRALADWCAAIDPAEIVMESTGIYWKSPYAALEKVGIRAKVVNARHVKNVPGRKTDIGDAEWLAMLSRAGLLRGSFVPEADHRELRLVSRQRQKLVGILASEKNRLHKVLTDSGIRLGVVVSDLHGQSARAMVKAFIEGKPPEEVIQLASRRLKASRDEMMDALHGELSPTHRFVLDELMQHIEDIEERIRRFDQKLLEGLSGAGDALMVLQTIPGVDLIGAAMLLVEIGTDMSVWENEERLSSWVGICPGNNESAGKRKSGRMRKGNPYVRRLLCEFAHAASRTESTFKAKFQGLLVRRGRKRAIVAIAHKLLRTIFFMLKRGQHYRDTTVNYEEMSVKRNAARWIKKLTEFGFLPKPA

SEQ ID NO: 156020 - protein, 338 aa, unidentified
MKVHVLGVDLAKNVFQLHGVDRKGRCVLVRRVRRDLLMNLVAELDPCLIGIEACTGAFYWQRQFERHGHTVKIMAPQYVKPFVRRQKNDSNDAEAICTAVQQPNMRFVPKKTLEQQDIQALHRARQRLVNHRTALISQMRGLLLDRGIAIGVAATRARCMIPQVLNEPNEDLSALTREIIASLYDFMLQIDARIRFFDKKIDAIFKANEACQRIAKIGGVGPKTATAMIAAIGDGSDFKNGRHLAAWLGLVPRQHSSGDRRVMLGISKRGSQHLRTLLVHGARAVVRTAVRKTDPRSIWVNDLRERRGHNRATVAVANKNARVIWAVLRTGEPYHAAA

SEQ ID NO: 156021 - protein, 366 aa, unidentified
MKQVAFLGVDYHIKTITIAAYLDKEKKFYETIRLNNDDKTTKKYMKKLSTQFDLKICYEASCSGYVFQRKMQALGYHCDVIAPSLTPRKPGDRRKNDIRDAKKLAQNYANDLLTIVRPPSQGEESIRSLIRCRIAMKESAKKVKQQINSFLLSQGCRWSKSKWTKQHHLWLSKIEMPNVYLQQVLDEYLGHLSYLESRLQYLEQQIKQIANSELYAPSVKKLRALRGIETLTAMVLIAEITDFRRFPNPRSLMAFLGLIPGEDSSDDTRKDVSITKAGNIRCRNILTESVQHYVKKPRISIKMKQLFSQVDAHSAVTAKKCMYRLHKRYWTLVMKGKARQKAIVAIAREFVGFIWAIMQPVSCAAA

SEQ ID NO: 156022 - protein, 429 aa, unidentified
MNCTQNKKIEQVKETTMIVGIDVGSEKHYFRAFNWRGIELTRKPVAFSNSMEGFNSYSNTIVELMQKSELEEALVGIEPTGHYWFDLGQFMGEKDIKFVMVNPHHVHKTKELDDNSPSKNDRKDPRVIAGLVRDGRYFYSYMPTGAYAELRNASNRRFVLVEEQTRAKNRLQKWIAVYFPEYKGIYTHIDAKGGMLVLKKAPTPEEIVRLGVEGIIKIWKDAKLRGNGHKKAMLILAAAMRSIGLKAGLTEARMEIQDLIEDYELQTNRLERVNDLIKGLCQQVRYADKLLEIKGIGITTVAGFIAEVGDITRFDSTKELQKLAGLELVADSSGKHNGKTKISKRGCKRLRYLLFEAAISVVGKNEEFKEIHRYYTTREKNPLKKMQSLIVVACKLIRVFHAILTKGIRYDASKMLKDIRHPGEQLKAA

SEQ ID NO: 156023 - protein, 343 aa, unidentified
MQTITTIGFDIAKSVFQVHCVDAEGKVVLRRQLKRRYVLAFFQKLPPCLVGIEACASAHHWSRELQALGHTVRLMPPAYVKPYVKRHKNDATDAEAICEAVTRPNMRFVATKTPEQQSCLTLHRTRHLFIRQQTAVINAIRAHLAEFGIVAPVGRHGVEQQLGIAADVNDKRLPEVARGCVAALGAQLRMLKEQILQFDRMITAWHRSSEASRRLDDIPGVGPALATALVASIADPKAFRSGRDFSAWIGLVPKQNSSGGKDRLGNISKRGDRYLRSLFTTGALAVIRYAKIHGTRHRPWLTALLARRPTKVAAIALANKIARMAWAMMARGECYKEPAALAA

SEQ ID NO: 156024 - protein, 442 aa, unidentified
MSCLPTGVSTVSISSLMVLPLAAVVNRLLLTGVAVRLFAGDDWAEDHHDVEVMDESGKVLARRRLPEGAAGMARLHQLIGGLLGEDADDGEVVVGIETDHGPWVMALIAAGYRVFPVNPQQSARFRARYAVSGAKSDAGDAHVLADMVRTDAHQLREAAGDSPAAAGIKVLARTHKTMIWERTREVQRLRHQLLEYFPAALEAFADLDAPDTLELLGKAPGPEQARRLTRAQVSAALKRARRRDIPDKATAILTALRGEQLAQPAALAAAYTATVRSLIAVITALNKQITILQGQVEEHFGRHPDAEVYLSQPGMGAILGARVLAEFGDGRHRYRDGKARRNYAATSPITRASGKKKAVMARFVHNDRLVDALNAQAFAALNASPGARAFYDQQRAKGHGHNDALRRLANRLVGILHGCLKTGTLYDEDIAWSHRQRNQQAA

SEQ ID NO: 156025 - protein, 421 aa, unidentified
MKKIKPKTTKAVNQKVLIATVDGGKDKHYGYYRCPDATECKAFDFWNNGRGFQEFWERISSAARTNGLEEIIVGFESTGPYMEPLVQFLRSSKGVRLVQVNPMHTKRLKELTGNSPLKTDRKDPKVIADIIELGHALTVVIPEGPAAELRRLTQARERTIESRTRLFNQLQSLLVISFPEFLQVMTDVKTASAQHLLRHYPTAEEIVALGETSLATLLRKVSRGKLREDRARALFEAAGESVGVQEGRSSMLLEIRLMLETIASYDRFIDSVETEMVRHLEQIPYSRVILSLKGIGPVTAAGLIGEVGDFTKFSTISEVMKLAGFDLYEVSSGKHRGKLRISKRGRPLMRKLLYLAALSTVRKGGVMHEWYQRALGRGMIKTKALVAVSRKLLGIIFALVRDHSVYVENYTKQKPMLQEAA

SEQ ID NO: 156026 - protein, 389 aa, unidentified
MIYVGIDVAKNKHDCCILGSEADKLYPVFTIPNNKAGFDELYEKIFSVTDDKTEIKVGLEATGHYSLNLLGSLIDKGLPTCVINPLHTNLYRKGLSLRKTKTDKVDAGSIAMMLMTDKTLKPYSYTSYHSEELKSLTRYRFDKVQERARLKTSVARLVNILFPELEKLVPNLHMASVYALLSELPGASYIADSHLTHLKTVLETASKGHYGRDMAVTIRDAARDSIGSVMPAKSMELKHTIHLIEVITEEIDEIEASIKSIMDACNSPIMTIPGISYRMGAMILAEIGDFTRFSNADQILAFAGLSPSTYQSGQLDSSYSHMEKRGSRYLRYALFNATKFVCKWDENFGAYLSKKINEGKHYNVAVGHATKKLVRTIYRMGLTGEPYRK

SEQ ID NO: 156027 - protein, 353 aa, unidentified
MSSMQLDVPRITVGLDIGDRTSRIYEVDVAGRRLREATVPTTRGALQRYFEGHSHCRVVLEVGTHSPWIARELLKLEHEVLVANPSAMYGRRRRNKRNDQLDAEFLARQGRADVKLLHPIQHRGIEGQLHLAVLRARDQLVRSRTKLINHVRGAVKSFGGRIVGCSAEAFPTRAMDDMPNALRPALTALIDTIRDLTRRIREYDAEVQRLAQRYPEVQRLQQPAGVGPLTALAYVLLVDDPRRFDRSRDVGAYFGLVPRLDDSSSSQPQLRISKAGDELGRRLLISAAQYILGPFGPDCDLRHHGETIAQRGGRNAKKRAVVAVARKLAVLLHRLWLNGESYEPHRLCLRRIA

SEQ ID NO: 156028 - protein, 456 aa, unidentified
MSHVTSIGLDVHARSVSAAAFNLYTGEVVERRFGPEAGPIAEWALSFESPRAVYESGPTGFAPCRELRALGVDCVVGAVSKMQRPAADRRVKNDRRDAAFLARLLATNNVVVVPVPDAGVEAARDLSRALDDARENVQRARQRLSKFLLRRGYVFDERDSLGRRRCAWTAAWWSWVAKIKMPEPAAKAALDHYIEDVRHEESSKLKLEKLVAAEAARPRWAAVVAALRRIKGVDTVTAFCLAAEAGSFSRFRSAPAYAAWVGLVPSEHSSGEKVARGGITKTGNSATRRALVEAAWHFASCSPLAQAAQIGLGGGARRHREAVREVHGQARRQAPGAARGRQAALRRQRRRRPRAGLLGLGGGLPGGGHAALTPASTDEPLKPFQPGGPAPRRVAGARPRFLYGQPEGRARQERLDGFRTGAPDGESKCGGRGDISRVSRAAPKARGLLACQASVD

SEQ ID NO: 156029 - protein, 356 aa, unidentified
MDKVIREGAVRVGVDLAKRVIQVHAVDATGHVLTSRALPRARFIDWCVRLPAGCVVAMEASSSAHHWARKLVALGLDARIISAQLVEPYRMEGMSGKNDANDAAAICEAASRPKMRFIPVKSIEQQSMLCVHRLREGLKEDRTACINRIRGLLAEFGLVFPQSPRELQAALSDVLEDAGNELGTLARLTLQRAQAQWRELDEHLAWCDERIDAHRRSNPEVQHAATLLGVGPVTASAAIATVGDFKQFKNGAQFGAWIGLTPRQRSSGGKNNLGGITKRGDTYLRTLLIQGAKSAVMTAHRRQDKISSWVVALRERSGWQKAVVALANKNARILWAVMTRGDVFDPNHLSVKPTAR

SEQ ID NO: 156030 - protein, 343 aa, unidentified
MQITTIGLDLAKHWFQVHGVDANGHVVVRRRLWRSGVIAYFRSLEPCLVGMEACATAHHWARELTALGHTVKLMPPAYVKAYVKRNKNDAADAEAICEAVARPSMRFVPVKDAEQQSVLMLHRARSLLVRQRTMLVNALRAHMAEFGIIAPQGLRHVEILTKTIAHDQGRLPELARSILQTIVDQLNGTMARIREIEGRLVRWHRQSQVSRLLATVPGVGIMGASAIAATVADPSLFRSGREFAAWLGMTPRQNSSGGKERLGRTSKRGDKYIRSLLTAGAVAVLRHARNRPTRDGEWVRALLARKPTKLAAVALANKTARIVWAVMMRGDGYQPKEVFGQPA

SEQ ID NO: 156031 - protein, 408 aa, unidentified
MLVHGGVVPPLVAVAVDVGKRSAALSVTDAARCQLLGPVEFTMTASGLREVTARAAQVVPAGVVVRVGVEAAGHYHLPLAAPSVWPAGWQVVELNPAHVSEQRRVAGRRRVKTDAIDLEAITELLLAGRGVPAGARDAVLVELAAWAAHRTRRSAARAAVKNQLLGQLDRCFPGLTLALPDVLGTKVGQLVAAEFADPARLAALGASRFARFAAVRGLRVRQEMAGRLVAAARDALTTTQAGAARQVLAADLALLAALDTQITAAEDEMSRLLPASPFAPLISVPGWGVVRAGNYGAALGDPGRWPSPRQVYRAAGLSPAQYESAGRRRDGAISREGSVTLRRALIDLGIGLWRCDPPARAYAAALRARGKHGGIIACALAHRAGRIAFALVRTQAPYDPARWETTAH

SEQ ID NO: 156032 - protein, 356 aa, unidentified
MYYSGIDLHKDNSFITTLDVKGKIVKQERLVNDKAIITDYFKSIGRKHKAVVETTSSWYWLSDVLQENKIDIKLAHAKHLKAISYAKVKTDKVDSKTLAELLRTNLIPSAHMISKEKRGLRDLMRTRLRFVRKRTSCYNSIHRIGEKFNCLMREHIDKGTMPKGLPEEYILQVKFLDQQIELLNVQIKELEKNLQKVLIPNEDVQRLLMIPAFGIITSFSVYLEIDGIDRFEDVKKFLSYSRVVPGAKDSNQTRRNKSGNKEGNVYLKIAFTDAAVHAVRYYSEVREFYNKMQRRTNTAIARTLVAKELAKITYYILKEKTEYKGFKGKPISRQKSQVWPRLSSPRFGLDKSDPHC

SEQ ID NO: 156033 - protein, 400 aa, unidentified
MHLTANISIPQKNFIAIDLHSDNAVICVRRNALNKAGELVGKNICCGRVSIRDGLDNFIKVFVPHCQDFDHVAVVESTYNWYCLADAFEERGWLLRVADPSTVSQANLKSSDDRTDAQYLAERLRIGSLKHYLPLNYSSRALRDLCRYRMAMVQDCASLKIKLINLYRNQLSKNVRVADLLERCQPHMQPNYRFNSDILEEFKDPNIRLRVAFEISRIAMLEEMIKECNAEIQKQCKDQELVKLCKTIPGCGPVLSAVICTEIGTMQRFKSAGDFVSYCRLCSTSKLSNGKSKGLGNAKNGNAYLSWAFTEVAQYASRNPVIREILQRLLRKYGGLRVKAIRTLAAKIARVTFYVLKNKQPFNAAKCFGMELTKSIVKKLPHKPLREDAAVVLPTVAGQA

SEQ ID NO: 156034 - protein, 340 aa, unidentified
MVYGAIDLHSRFRQIRIVTADGAVVRERRVVTSRSPLRNAFAAVGAVRIRVEASTESEWVAQVLEAAGYEVIVADPNSASMDGTRHRRIKTDTRDVAALSDACRLGVFRRAHRVAAAQRTLRQELAVRRQLVRRRTGLIAHLRARLRQDGFRLGSGSRTTVHERVARLERPASLRGSLTPLLETLAALTPIIATTTRRLTTTANADPVAVRLHTVPGVGPLGALTDRATVDVVTRFPSAGHVSSALGLVPREDSSGERRQRGHITKVGPSEARTMLIQAAWTCWRSRTARTTPLRQWADRLAARRGARIAVVALARRLSRILYAVWRDDTVFRVTPARAA

SEQ ID NO: 156035 - protein, 347 aa, unidentified
MTIVETTRPVTGGVDTHLDVHVAAAVDANGGVLGVESFVTTPAGYLELCSWLETFGTLARVGVEGTGAYGAGLARHLRSRGLVVIEVDRPNRQKRRRHGKSDRLDAIEAARAALSGRASGTAKSADGDVEAIRALLVARRSGRNVRVKYINQIRHLGFTAPDELRERFRAVPADQLAATAAALRPTVGGDTVVYATKLAIATLGRRVLALDADGKRLDDALDVLVRRRAPSLLEVYGVGTHTAAILLVAAGDNPHRLKNEAAFAHVCGVAPLPTSSGKSRQRFRLNPGGNRQANHALWRIVFTRMAGDERTRKYVARRLAEGRTTREIMRALKRYVARELYPHLVAG

SEQ ID NO: 156036 - protein, 318 aa, unidentified
MNTNTLQNINVGVDTGKANLDIYIRPVDIFFTVSNDDKGIKEAVKIIKKHQPERIVIEATGRLEMPFIIACSKANLPFVIANPIHIKRFAGAIGRRAKTDKLDAQLIAHYSEAIQPQLTQLKPEIMRLMSDLVARRHQILTMQTMEKNRLQQLPKTLHSTINPIITSFKNQIEKIETLIIALIEKTPSYQSKNIILQSVPGIGKVSAAAIISNVPELGYINNKQAASLIGVAPMNRESGRYKGKRIIQGGRAQVRTVLYMAMMSAMQSNPVFKTTYQRLLEAGKPKKVAIIACVRKMVVILNSMLRDGTMWNENMAKN

SEQ ID NO: 156037 - protein, 330 aa, unidentified
MKQYNHFFGVDVSKKTVDITHGHNQQLTHRQFTNDDDGMEQLMKWLNEINPVFENTLFCMEATGLYCFPLTRFLAANSIDIWIEHAAQIKKATALARGKNDKVDSQRIALYAIKNLERLRLWRPMNATLEKIKHLARLRNRLVETKKKLVTPIKEFEDMGNTAMAKLLTKTIKSSLTAIDKDLQNIESKIIGIVNEDENLNLLYKLVTSVVGIGFVTAINLLVHTNGFTILKDARKLACYCGVAPFEYSSGSSVRGKTKVHFMANKKLKCNLHMASLSAIKLDADLKAYYERKVLEGKHKMSVLNAVKNKLLARVIAVVNKQEEYVKKSA

SEQ ID NO: 156038 - protein, 365 aa, unidentified
MTKVRTWAGLDVHAAATVACVVDVPSGEISVQRLAGRTSEVTAFCALLPAPVRVAYEAGPTGFELARALATAGVACVVAAPGKIERPAQDRIKTDRRDAERLVRLLMIGGLHPVRVPSGEEEALRDLVRAREDVRGDLMRARHRLSKLLLRHDVRYDDTASAWTTAHRAWLSRVELGERAAQSTLLDYLGAIDALVIRRDTLERTIAELVPHSPWADQVARLRCLRGIDTLSAVGLCAEIGDFSRFDRPGKLASYLGLVPSENSSGQTRRQGAITKSGSRHARRLLVEAAWHYRRPPRRGTTLQRRHEGQPVQVLAISWKAQQRLHHVWRRLDSERGKRKTVVAVAVARHLAGFCWAITTTDTNT

SEQ ID NO: 156039 - protein, 378 aa, unidentified
MRFYNREHKFYCGVDLHARTMYLCILDHGGSIVLHKEVPCEPAAFLEAIAPYRDGLVVACECLFCWYWLADLCQAENIAFVLGHALYMKAIHGGKAKDDKIDSRKIAQLLRGGNLPIAYAYPKGLRETRDLLRRRMYLVHKRAEVVAHVVNTNSQYNLPPFGKKLIYARNRQTLKIAERFDDASVRKSIELNLRLLDSLDDLIGDVELYLERTVKVDDADTFYRLRSIPGVGKILALVLLYEIHDIHRFASAGAFLSYARLIRPLKTSAGKVTAGGGAKIGNAHLKWVFSEAACLLARESDQAKRFLARKEKKHGKPKALGILAARLGRSVYHMLRQKKAFDPIRFWNGEPGVTPAKLKKSAVKRPRRAKGSRCVLEA

SEQ ID NO: 156040 - protein, 461 aa, unidentified
MKKEKCYLGIDVSKGYSDFTLLDEEKNPLEKVFRLDDTRKGHDALKKIVQDKIKEHQMDCLYCGLESTGGFENNWFNSLTAWSKTMPVKVARLNPSGVKNNIAAGLNRNVTDSLSSHYIAEYLIGHESKVSYDVPDNEYSEFRGLYAYIQLENKQKTQLINELKMLLYSGFPEMVRYCKKGIPVWVLEVLKRYPTAEKAARLKSSQLITIKNVTAEKAAAIISKAKETVSSRHSSTQGFLIQSLAQQIMDKQKIIEKAKKFLAENCKGPEVDLVKSVIGIGEYSASCIMIEIENIGRFASPKKLASYFGIHPELKESGDKIKKYRMSKKGRSSMRSVLYMCAMSAVLHDPHFKQIYHNHRSKGKNHRQAIVVIMHKLIRLIWGILTYKKPYEAAIDKANQNKNVIAIKDENKRKENKVKRRYQEADLEAPISNHQTKIRKVQSDSQVDIVEQMRDVPIARM

SEQ ID NO: 156041 - protein, 356 aa, unidentified
MPTQVTKKIDFTGKQLFIGLDVHKKSWSVTIIVDGMEHRTFSQPPDPRALVNYLQRMFPGGSYNSAYEAGFCGYGIHRELNSLGINNIVINAADIPSSQKDQLDKRDPIDSRKIARALEKGLLRPIHIFNRDMEELRSLNRTRFYLMRDYRRSKTRIKSFLQYYGEPIPSEFDNNQWTLKFLSWLKQVKMQTRSGQEAFSNLISSYEFQRSQLLSLSRQIRERIREFDRELYTLLKTISGIGPLTASALITELGDINRFPHRDHLSSFVGMIPRVKQSGESSYSGGITFRCNEYLRTLLIESSWQAIRQDPALMQYYHEHLINNKGQKVIIKVARKLLNRVRYVMKNRQPYVTGVA

SEQ ID NO: 156042 - protein, 315 aa, unidentified
MKYHIGIDISKKDFHVCFDENGIIEKFGTAAIGIDEFLKRLKEKKMTKGKTVIGMEATGSYHLPVAYQCTQAGYVVNVINPLITKKQNQTNLRCVKTDSSDAKLVRHCVITGAGYPFHETAETIKLKTLVRQRARFSMLRHRSRLKDEEVMNRERYLNVKITALNKELFDFLNDRIRCLDAELRTYECATQKLLMSIPGVGPQTAVTCLSEIGKISRFSDAQKLTAWLGLDPRVHQSGTSIHGKGYITKRGNKLLRTRLFNAASVAVLHENMFQKFFQQKRSEGKPYRVALCAVMRKMVHVIHAVWSRGTPFINS

SEQ ID NO: 156043 - protein, 457 aa, unidentified
MVDEAIFILFVQEKKKSFLAAMTLINFVAANQKYYAFNLLSVFIMVFWSVQYLLQHLLVQTQLSDQLLQPLILILQLPQTPQFRHARPGKFFLPVNGMDYLLPLRLTVRNVLTRRITMNIVFLGIDLAKNVFQLCGLNQAGKPVYTKRTGRKELLQTLANIPACLIGIEASTGAFYWQREFEKLGHKVKVISPQYVKPFVRGQKNDGNDAQAIAVALMQPTMQFVPPKSPEQQDIQALHRARQRIVNHRTATVCQIRGLLLDRGIPIGSAVSRARRAIPLILEDAENGLSSRMRKTIAELYDLFNDLERRIHFFDKEIETVFRQSEACQRIAKVKGIGPKTATAVVAAIGKGTEFKNGRHFAAWLGLVPRQHSSGDRQVLMNMTKKGDKHLRTLFIHGARAVVRVATNNNDGHMNQWVNQLKERRGFNKTTVAVANKNARIIWSMLRNDTGYQVVCN

SEQ ID NO: 156044 - protein, 402 aa, unidentified
MNAVGIDVSKGKSMVAIMRPFGEIVSAPFEIKHTASGINSLVELINSVEGESRIVMEHTGRYYEVLAHQLSEANLFVSAINPKLIKDFDNDSLRKVKSDKADAVKIARYALDKWQNLKQYNVMDELRNQLKTMNRQFGFYMKHKTAMKNNLIGILDQTYPGVNTYFDSPARSDGSQKWVDFASTYWHVDCVRKMSLNAFIDHYQNWCKRKKYNFSQSKAEEIYGKAKELVPVLPKDAITKLIIKQAVDQLNSASTTVESLRTLMNETASKLPEYPVVMAMKGVGTSLGPQLMAEIGDVSRFTHKSAITAFAGVDPGVNESGTYERKSVPTSKRGSADLRKALFQVMDVLIKTHPQDDPVYQFLDKKRTQGKPYYVYMTAGANKFLRIYYGRVKEYLSSLPES

SEQ ID NO: 156045 - protein, 385 aa, unidentified
MNQISCSATSSHTLHCALELSKKSWLLAIQFPDREQPSVYSIKGGDTEKLMAKLTAARDYWAKVSGSLPVITVCYEVGYDAFWLARFLKARGIECLVIDPGSLQVNRRGRRVKTDRVDVKMLLRTLIAWCRGERHVWSLVRIPSVDEEDLRRSHRERSRLVRERTAHINRIKGLLFAQGIRDVKVKSQYKTLAVDKLLTADGHRLPPRLASEIARELQRLAMVQEQIAEIERERDTAPTPCEATERKRQLLLQLKSIGPAISALLSREVYYRQFANRRQVGSFLGLTPSPYSSGEEERCQGISRAGSGQVRAIMIETAWLWIRHQPKSALTRWFVERTAGQSTRMRKIMIVAVARKLSIALWRYVEQGLVPQGAILNPPTTGRAR

SEQ ID NO: 156046 - protein, 350 aa, unidentified
MIIIGCDLHTRYQQIAMLDTETGELVERRLEHESGEARAFYAALSGGVRVGIEAPGHTHWFEAMLAELGHELWMGDAAKIRASVVRKQKTDARDAEHLLNLLREGRFPQIWRPSPAERDLRQLVWHRQKLVWMRGAVKNQLHALAMGEGVCRKKKLFTAKGRKELESLALGRWASYRRQELLRMFDELAAATAQLDEAVEQAAKNQPLAVRLMTHPGVGPVTSLAFVLILGPVERFERSKQVVSYLGLNPQEHSSGGKQRLGSISKQGNPMMRSLLVEAGHTAARFDPALKRMYQRLKFRRGASVAKVAVARKLAVRMYWMLRSTADYAQLVRMQGSPWATLVENSPSLG

SEQ ID NO: 156047 - protein, 343 aa, unidentified
MDYFAGLDVSVKETSVCIVDDAGKIVREAKVASEPEALLQVLTNTIYRFKRVGLEAGPLSQWLYSVLAEAGLPVICVETRHMRAVLKAQINKTDRNDARGIAQMMRVGLYRPVHVKTLRSQKLRVLLTHRKLLQSKAIAIENDLRATLRNFGLKVGIVGTVKFEARIKELVANLPDVAVLVEPLLVVRRVLREQVGILHRRLLAIVRDDDVCRRLMTIPGVGPVVALTYRVTVDVPARFRNSKAVGAVFGLTPAKYQSGENGRTGAISRCGDEMMRMMLYEAAQSMLVRSAKWSWLKAWAMKIAKRRGMKKAIVALARRLAVIMHRMWVDGTEFRWTREVAAA

SEQ ID NO: 156048 - protein, 417 aa, unidentified
MKTLDHFAAIIGIDWADRKHDLCLRVTCSEALEYSVLPHSPKAIDDWATALQQRFPGQQIAICIESRKVPLIHALLKYPFLVLFPINPQTLARYRRTFQPSRAKDDPTDAFLLLDLVSRHPERFHPWEPERPELRTLASLVEQRRTLIADKVRYTNRLTAALKQYYPQVLEWFDDKDTRVFCAFVEKWPNLAKVQRARSDTLRRFFHAHGVRRPKVIERRIEAIKAAVPLTNDPAVIEPNQLLVMSLIHRLALTLGYLAKYDRLIDERFQALDDAPLFDGLPGAGQQLAPRLLVAFGEDRKRFTSAESLCRYAGIAPVTERSGNKQWVHWRYSCPRFLRQTFVEWANESIRFSFWARAFYQLQRERGKTHQMAVRSLAFKWVRILYRCWQERKPYDEAKYLMALKAKGSPLVAELAR

SEQ ID NO: 156049 - protein, 330 aa, unidentified
MTQYIGIDISKAKLDVAWLRDIDKVKVKTKSLNNLPKEFSKVLDWLQATVDGDLSDIHITLEATGVYHENIAYYLHDQGLSISIVNPAFVRSYADSLGSRHKTDKQDSVLLARYAHSAKPDLWTPPPAEARHLKSLLSRLDALQQDLQREQNRQEKADATDTAIIVKASIEQMISALQEAIATLNDDIDDHVDSNPNLKQDQMLLQTIKGVGPVTSRQMLSLMHNKSFTKASQAAAFLGLIPKQVQSGTFKGRTRLAKNGSSDIRAKLYMAAVVSTRWNPDIKAQYERLLANGKCKMQAICAAMRKLVHICFGVLKHQMPYQPQIAEIAT

SEQ ID NO: 156050 - protein, 423 aa, unidentified
MKYALVTFLPGVPPGGVCAGIDWADSGHAVCVVDLGGRVRDRFTVAHDRAGIAALIARLRENRAAEVAIERGDGVLVDALLAAGLTVVVIGSRQVRNLRSRYGSSGAKDDRFDAFVLADTLRTDRARLRPLVPDTAATLALRAAVRARKDLVTHRVAACNQLRAHLQVAFPGAVGLFHVLDSRLSLEFLAAFGSCRAAAGLDEQAITAWLAGVPRRGRTAPPAVLAARLAAAPPGCGDDAAQAAVTAQLAGAVAGLAARIKALEEHIAAQLAAHPDAHVFTSLPRAGTVRAARLLAETGDCRARYPDPWSLAGIAGIAPVTRRSGSYLSHHFRWNVNRHLRDAICDFAGDSRHASPWAAAIYTAARDRGKDHPHAVRITARAWIYVIWRCWQDHTPYDPAKHTALQAILTRQDTTQHNTASKP

SEQ ID NO: 156051 - protein, 461 aa, unidentified
MSANKPTGAKKKSVPKKVDWKALEVVHPDAAGIDVGGSEHWVAVSPDRDPEPVRRFGCFTADLREMACWLVEKGVRSVAMQSTGVYWMPVFEILEQQGLEVYLVNAQHTKNVPGRKSDIQECQWLLKLHAFGLLNNSFQPNDEIRIARTLWRHRGNLVAEASSVVQRMQKVLTERNVQLSNVLSDISGVSGMKIIQAILDRVRDPWELAALVEPGVKATPEDIVKSLEGNWREELLFVLRQHVEFYQIYQKKIRACDLQLRKHLQSLGSKLDLQAQPLGPRPKGKKLSRNAPTFDLRTELYRITGIDWSQINGIDVLTAQTVISEAGADLSAFPSEKQFASWLGLCPTNQQSGKKILNRRTRKVVNRATVAFRNAAMTLVRSQSYLGAQYRRLRTRLGAPKAITAMARKLACLFYRLIKHGQQYVDKGTEYYEARYREQQIRSLAKRAQKLGLQLIIPKTA

SEQ ID NO: 156052 - protein, 342 aa, unidentified
MNNVTIIGIDLAKRVFHAHGAYADGSVAFRKRMARSQVLPFLTRQPTCVVAIEASASAHEWGRAIQGLGHEVRLIPPSYVKPYVKRQKNDTADAEAIAEAGPRPTMRFVAVKTEEQQARAMVFRTRDLLVRQRTQLINASRGHLAEHGVIAPQGPAHLKTLAAAIDAAEPSMPKLVRDVGRVYLEQIDRLSCKIAELEKTLRREAQCGEETRRLQTMPGIGPITAMAVEAFTPPMTTFKRGRDFAAWLGLVPVQHSTGGKQRLGRTSKMGQRDIRRLLIIGAMAVIQWAARRGTRPGSWLARMLDRKPLMLVAMALANKMARSIWAMLTKKEDYRDLGSAAA

SEQ ID NO: 156053 - protein, 430 aa, unidentified
MKSNTQNAKIEAITEKTLVLGIDVGSETHYARAFDYRGVEYSKKPFKFSNTEAGFVTFKAWVLDIKEKHGKDKVIPGMEPTGHYWFNLGKFLQDNEMKPVLVNPHHVKKSKELDDNHPTKNDRKDPKVIAGLVREGRYMIPYLPDGVYADLRTASNIRFQLQAELTRIQNRINRWFNIYFPEYKTVYGKPDAKSGILILKEAPLPEDILTLGIDGVNQIWRDAKLRAVGKARAKTLIEAAEHSVGSKEGAVSARMEIRMLLEDYESRNTRLQEVMVLIEELVKGIPMAEKLLEIKGVGIRTVSGFLAEVGDISRFNNPKELQKLAGLALVENSSGKHKGETTISRRGRKRLRYLLFEAAMSLVAKNPEFRELHNYYTTRRLNPLKKMQSLMAIAAKLIRVFYAMLTKGADYDPKKMVSDIKRPAVYLQAA

SEQ ID NO: 156054 - protein, 356 aa, unidentified
MSRDIKYIGMEVHKEAIVIAVLDGGGKLVMESIVETKASSILQFIHGLRGELHVTWEEGTWAAWLYDLLQPQVGQVRVCDPRRNALLKEGNKSDKIDARKLADLLRTGMLRPVYPGEHGLRTLRELGRSYQTMSKDLNRVMNRIKALYRGWSIPCAGTQVYAPRYREEWLNKIPHAGVRRRAELLYQQLDGLQGLPRTLRPELLAESRKHKAAKLLRQIPCIGPIRAARLLALMQTPHRFRSKRQLWTYSGLGIETRDSAQYRYVQGQLQRTKKPQQIRGLNRNHNHEMKEIFKGAATRASCGVGPLRDFYVTLLAKGMKPEMARLTLARKIAAIALTLWKKEERFDAEQLKPQAA

SEQ ID NO: 156055 - protein, 422 aa, unidentified
MLQETHDTEELIERIAALDIGKAELTCCVRVPSADQPGKRSQEVMTYKTMTRSLLVLADRLAELGVTRVVMEATSDYWKSPFYLLEAHGFETWLVNAKDVKHLPGRPKTDRLDAVWLCKVAERQMLRPSFVPPPAIRQLRDLTRYRVDLIGVRTAEKNRVEKLLEDAQIKLSVVASDIFGVSGRAMLAALVAGERDPKVLAQLARQRLRAKLSLLEEAFYGRFSDHHAFLLTTMLDRIDQTSAAIATLEAKIEQQIVPFQAAVDQLDEITGVGRAAAQVLIAEIGVDMGRFPTPGHLVSWARFAPGVKESAGKKKGKASTGRGNPYLARVLGEAAVAAGRTDTFLGERYRRIARRRGAKRAVVAVGRSILIIVWHLLSDPEVRFHDLGPGFYDTRIDADRKRRNHVRQLEALGYKVTLEPAA

SEQ ID NO: 156056 - protein, 340 aa, unidentified
MLYVGLDVHKEFCQACVIDDSGRALSNERFSSTNEELDRFLDRFQDAKFVLESTGIWEFIYEGIERRGFEAVLAHPLKVRAIAEARVKTDKVDAETLAQLLRADLIPRSWIPSKDMRDLRQLVRQRAYLVRQAARFKNRIHAEILRRGVRRPENLRTPFAQRSIRWMRSLDIPTVTSCLNCLESVQAQVQEINAQLLVEFERRDDAQLISTVPGIGFYGALLILAEVDDVRRFHHPEKLCAYAGLVPTVSQSASSVKYGSISKDGSAYLRWILTESVHVHTRYEPGSQLSRFHARLAKRRGRRVATVATSRKLLRIIYWMLVRHEPFHSHGFNPVKRLHS

SEQ ID NO: 156057 - protein, 343 aa, unidentified
MTHHVGLDVSVRETSICIVDEAGTIVKEARVPTEPSIIIEVLTTPGIACRRIGLEAGPLSQWLFNELARAGLPAICVETRHMKAALAAQVNKTDRNDARGIAQMMRVGLYRPVHVKTRISQEKRTLLMSRKLLQGQIRALENDLRGSLRTFGLKVGATSAGAFDERVRELVVEHPALAAIVGPLLTARGALRTQFVVLHRMLLKLVRSDPICARFMTVPGVGPVVALTFQATVDQPQRFAKSKAVGAHFGLAPRQHSSGETDYSGRVSKCGDAMMRSALYEAAHTLLTHTRRWSSLKAWGVRIAMRRGLRKATVAVARKIAVILHRMWIDSTEFRWGAEPVAA

SEQ ID NO: 156058 - protein, 345 aa, unidentified
MEITTIGLDLAKNVYQVHAINGVGEVVVRKAMRRAQVLRFFERLDPCLVGIEACGTSHYWAREIGKFGHEVRLMPPAYVKPYVKRGKTDASDAEAICEAVSRPTMRYVAIKSSEQQAALALHRTRHLFVKQRTQLVNMIRGLLAEFGIEIRRGITHALILAERIAAGEIPAIPPLAAKMIMGLAGQILDLQARLREIERELLAWHRSSDIARRLATIPGVGTVCATALAASVTDPHRFRSGRQFAAWLGLTPLQHSSGGKERLGRISKMGDKYLRRLLVVGMTSLVRRAKYKPEAVDPKLADLLSRKPVRVVTVALANKTARVIWAIMTRGGTYRAPQTAGASVS

SEQ ID NO: 156059 - protein, 357 aa, unidentified
MQKKNTTLNFKGQTFIIGLDVHKKSWNIAIRSNGLLLKIFSMNPNADELWKYLTKNYPEGEYRSVYEAGFSGFRSHRELLQKGIHNIVVNAADIPTSSKEKMMKTDPSDSAKLARELESGNLKGIFIPDELSQELRSFCRLRYQMMQNQTRVKNRIKGYLAYYGHNLPENHQLVHWSGRFIEHLKTLEFNYPLGKVQLEIYMAELLEIRSRLLLILKTIRKYIRDYKRQDELELLLSIPGFGYTTAVTFLTELIDINRFSRFDQLAGFVGLVPSTKSSGEKDKTIGLSNRFNKYLRTILIEAAWTAVRKDPALILSFSRLTKRMSKQKAIIRIAKKLLSRMDHVWRHRTKYVFSVVE

SEQ ID NO: 156060 - protein, 361 aa, unidentified
MQQSMSLVGLDVHASQTHAAVLDVSTGELRGVRLRMAPVGVVEFLAGLPGRVRAVYEAGPTGFGLARAGVERGIDVRVVAAGKVPRASGDRVKTDKRDAERLARLLAAGELRFAFVPSIADEQFRDVIRAIEDCRGDLMRARHRLSKFLLRREVRWTGRGSTWTQKHMSWLRAQRFDDVCSTATFIDYLAGVEMLITRRAALLAALEQAIPDSSHAPTIAALRCFRGIDTLSAAGLCAEVGDWQRFRPKQLSGFLGIIPSEHTSDTRRRQGSITKAGPVHARRLLVEAAHHYRHRPAIGDALARRQHGQDPRVIEIAWRAQRRLHQRWQLLAGQRRKPAGVVAIACARELAAFCWEAATLT

SEQ ID NO: 156061 - protein, 344 aa, unidentified
MFYAGIDAHMKSSTIWIVDRKGRKVSSSTVLTSAEGFAAGLGRWARRGLKAAVEASGITPWICQLLRDLGVRVVVVNPNRVRLIAESRKKADRVDAETLAELLRLGGLPEVHQPSLEARRLRTELSVRRQLVRQRTGLINQARGLLRGWGVILPVRFFQSRGGWKDLQAKRLPEYVRPLLETMKGVYEQLTKAIRQVETTLKQREHSDERVAQLETIPGVGRVSALTLVAAVDKIGRFGRAKQLTAYNGIVPTVRSSGEREQQGSITRQGRSEVRAVWIQAAHSLVRSRQPGARPLQKWFWKVARRRGVRTAIVALARKMLSLAFYLLRDGTRYEPLRLRQAAA

SEQ ID NO: 156062 - protein, 370 aa, unidentified
MAKRSMFVGMDVHKESIDVSLAEEGRDGEVRHYGVIPGDLEAVAKVVRALRAPARRLRFVYEAGPCGFGIHRYLTAQGEDCVVVNPSSMPKRSGDRIKTDRRDGDALARLHRAGELTAIYIPTPDDEALRDLVRAREDAVGLSTQAKHRLKAFLLRQGRRYPGRAGWTRPYRRWLADLSFPLAPQHVALQEYRDTIDETERRVERLTDQLRQQTPAWRWAPVVDALQALRGVSFVTAVGLVVEVGDIRRFDHPRQLMAFLGLVPSEYSSGPSVRRGGITKAGNPHARRLLAEAAWAYQGVPRIGRQMLYRQEAVPKTICDIAWKAQLRLTARFRKLVARGKAKPKVATAIARELTGFIWAIAREVPAPPV

SEQ ID NO: 156063 - protein, 385 aa, unidentified
MNTTTIGVDLAKHVFAACVGDGRGHESQLSTMKRNEFVKWLSTLPAGTVVAMEACSTAHYWGRTLQALGLEPRLIAAEFVKPYRKNQHVKNDARDAEAILAALHAPGMRFVAVKTEVQQQRLCWHRLREGWKAERTALFNRIRGLLSEFGFIIEPGAAKLRRELAEMESDDAYPQTIRQMVGNVRKHLTVLDERLAECDQQIARQGRADPVVKQLCSRPGIGMLTADAMASTFGDARHYKNGRQFSASLGITPRQHGSGGKTHLGRITRRGEPYLRSLLVQGARCVLQAALRLYKSKPETLNRLQLWMLKLNERIGYHKAAVAIANKHARQVWAMLSKGEAYNPDAYLDWEAAHASVSAGDVQHATDFGAAEDDLPTAALAAVGV

SEQ ID NO: 156064 - protein, 424 aa, unidentified
MGKKKSSPGGLAALYGRVCGLDVHKKLVVACVRILDAKDGTVQSTLRKFGTMTADLLELRQWLAEHKVTHVAMESTGVYWQPVFNLLEGHFQVWVVNAQHIKKVPGRKTDMRDAEWIAQLMQCGLLKPSFVPDRQQRELRDLTRQQTKLVQQRNAVDNRIQKVLETANIKLGSVASDVLGASGRKMIEALIAGEKDVTMLADLAQRQLRGKISELQRALEGELTEHHRYLLRQLLGQYDFLEKEIASVSERLGAVAPPSFRVAVEQLDVVAGVGERGARALLAETGTEMSRFPTHKHFASWAGQCPGNHESAGKRKSGKTPAANRHLDAVLTEMAHAAVRTKNSYFKSQYHRLAGRRGKKRAIGAVKHSLLITAYFMLRDNKPYQDLGVDYFDKLNPQQRIRYHVRKLQELGQEVELSPVADAA

SEQ ID NO: 156065 - protein, 288 aa, unidentified
MKYCGIDLHSNNSVVSVIDETDRVVAEKRLPNELPKILAFLVLWQAELVGVVVESTYNWYWLVDGLQAAGLTVHLANTTAIKKYEGLKHSGDETDARYLAHLLRLGILPTGTILPAKHREVRDLARKRMQLVRSRTTHILAVENITARQCGTRITSNQVKQLDETAVEQLHLPDDVALAVRANVAVITTLSAQIAIVEKRLQEKVAPLADYAVLTTVPGIGQTLATVIVLETGTIERFASAGNFASYARCVDSQRMSNGKKKKRRQYQKRKSIPVLGIHRSSQLRDAL

SEQ ID NO: 156066 - protein, 423 aa, unidentified
MSYKIAGIDVHKKMLAVVISDVEVDGEFQFERIRYGTTPEQLRLLAECLIAQKVEEVAMESTAQYWKPVWGALERYWKPICQQREGAGAMSGALHLAQAQSNRGRKGRKKDFPDAERLVKRLVADELTLSFVPDAEQRLWRTVTRRKYQLTRNHTRLQNQLEGLLEECHIKLSSLVSDLLGASARRMLKALAEGETNPAALAAMADKNLRATQAELCDALGACTDLTPIYRRLLKMFLEEIQLIDQQISQLDQELASLLSRHHDAVVRLAEVPGLGVDSAQQIIAEVGAGAATFPSAKQLSSWVGACPGDEESAEVSKSHRSPKGNRHMRRILNQAANAAARAKGTIFEIVYRRLVSRLGHNQTIGAIAHRLCRLIWIILHRGVRYEERGPSVNAKSRRHRTNRMIRELRSLGYHVEPLVTTV

SEQ ID NO: 156067 - protein, 394 aa, unidentified
MFFLGIDIGKRSHVASVMNEEGKVVIKGFSFPNSSEGGEKLLQKVTSISTVDQFKVGMEATGHYWLSLFSFLDEFNFNTHVINPIQTDGWRKGTEIRKRKNDIIDSVLIADLIRYGTFVETSLSDENIFSLKQLSRYRTYLVGTASDFKRKIIAVLDQVFPEYDTLFSKVGIFGKASKEVLLELSSPDAINHISAGTLADLLGEASRNRLGMKKAEELKTAASHSFGIKFAQEAFTFQLRSMIEQLKFLEKQITDTEKEIKKIMDDIDSVIETIPGIGPINGATILGEIGDINKFSSPAKLVAYAGIDASVRQSGEFEGTHNVMSKRGSPYLRKALFSAALVASRYDPVLKAFYDKKRSEGKHHLTALGAVSRKLCYIIYAILKNNEPYEVRLQ

SEQ ID NO: 156068 - protein, 311 aa, unidentified
MTDDTIGIDISKATLDIHRLSDGKMMSFSNCPAGFKALSKFCAKTAVTRVVYEATGAYHGGLERALGAHLPLVKVNPLQARRFAQAQGVRAKTDAVDAKMLADMGHVFALEPDEPAAEIQHDLKELRSFRSGLIKDRTGIMSRMKTQTLPITCRQSKARLAQVDKQIAEINAEIDRLIHSSDTLAHSMKILRSIPGIGAVCAATILIEMPEIGSMDRKQVASLTGLAPMTRQSGQWRGKSFIQGGRKVVRDALYMPALVAMRHNPDLRAKYQAMINAGKPPKVALTALMRKLIELANALIKANRNWVKKAA

SEQ ID NO: 156069 - protein, 312 aa, unidentified
MADMVRLAGIDVSKETLDVHVAPAGESRTVSYDEGGLAELRRWLVGAGVALVAVEASGGYERQVSEVLEEAGLVVVRLNPLRVRRFAELRGRLAKTDRLDARTIAEFARAYPQDRPIKRDPRRERLAEHLLVRRHTQEVIVDCINQLEHLRDARLRRLVLARKASMERLCDRLDRRLAELIAEHADLADLSERLRSVPGVGPVLAATLIALLPELGSLTRRQIAALVGVAPFDRSSGHQTGRKSIQAGRAAIRNALYMAAMVASRWNPAISAFSARLAAKPGKVRLVACMRKLIVTLNAMVRDGAQWQPRTA

SEQ ID NO: 156070 - protein, 329 aa, unidentified
MAWIGIDVSKAKLDAAWLRDATRGKFKDKVFPNTPAGHQALLTWAGRQSGAPLADVHFVMEATGVYHEALACALHDAGARVSVVNPAQVRDYAKSLGVRSKNDRRDSRVLARFGESRRPGLWQPEPREIRELKALLARLEALDGDIRRELNRQEKAQISQASEEVLASIRTMHQQLEQEKQRLLALIDDHIDRHPHLKQDRHLLESIPGVGPVVSRCMISLVRSRPFTGAAQCAAYLGLIPVEHQSGTSVRGRPRLSKAGNARLRAKLYMAAVVAVRCNPDVKALYQRLLARGKCKMSALGAAMRKLVHICFGVLKHRKPYQAQTTLLA

SEQ ID NO: 156071 - protein, 409 aa, unidentified
MDQLIERCCGLDVHRDTVVACVRGPGPNGRRQHEVRTFRTTAVELLALRDWLEAHAVTDVAMESTGVYWKPVFYVLEEAFTCLLVNAAHIKQVPGRKTDVKDCMWIAQCLEHGLLRGSFVPPAPIRELRDLTRHRKVLIQERTRAANRLHKLLEDAGIKLASVATNILGVSGRAMLEALVHGTTDPAVLADLARGKLRKKLPALRQALAGRFRPHHAFLVSQLLAHVDYLDEAITTMSEEVEVRLAPFAAQLTQLDTIPGINTRTAEVIIAELGVDMSCFPSDRHLASWAGICPGNNESAGKHQSGKTRKGNRWLRMTLIEAAGAAIRTKDSALGARYRRVMRHRGHKKAVVAVAHAMLRAVYHLLAEGTTYREPGADYYDRHHTHRVTRRAIQLLERQGYRVVLEPAA

SEQ ID NO: 156072 - protein, 348 aa, unidentified
MTRSYSIGVDLHHCVIQICVLDERGERVAEGRIRYSTLDEGQQAVAWLRRFAPARIAVEALGLNRWFVNACREADLDVLVADPRKLDLKKLGKKTDRRDAREIARRLWLGDLDRMARTYYPSDVEYGRRKLLRVRHRLVQMRQQTINQLRGMLNAYQIPAPQGALYTGPSRQRLASVALPVAELQQAFEALLAVLERLQAQIQALTRAVEEWATSDSAVAALRDTLPSIGAQSAATLLVELGDARRFGCGRAVAAYAGFVPRVGQSADQAHHGAMTKQGNPELRWITSQWAVRLLTRDPLVRQWAAPLRRRLHANKVRMALARRLLVGVWLTLSRGVAFDLRRCLGLA

SEQ ID NO: 156073 - protein, 357 aa, unidentified
MNRNTGMNAGQVIGTMNGLQVVGLDIAKQVFQMHTVEMNTGEIVNVQIKRAKVLEHFVNKPACLIAIEACGGAHHWARELRSLGHSVRLLHAKIVRPFVSGNKTDATDARAIWLAVQQPGVKFVGIKTTAQQATLTLHRQREALMKMRIMQTNALRGLLYEFGATFAKGKNALLKDIETTLDALADILPQMVADSLREQVLRIKAIEVDMQAIEKRLQLQLAQDRQMQRIAQIPGVGLLTATAAIATMGEARAFKSGREFCAWLGLVPKQTGTGGKVKLQGISKRGDAYLRTLLIHGARSVLSHTKQPGPWLEQIKSRRPTNVVCVAQAAKMARTIWAVTAKEQDYSQSYMSVRPLA

SEQ ID NO: 156074 - protein, 353 aa, unidentified
MQIVSALDVHRRQITYKTLELGSGEVRRGRVSPATRESVREWLERFAGCDAEFALEGTTGWRFVVEEIERAGHRAHLADPAETAAKRGRKRRAKTDNADCDLQLKLLLAGELPGSWIPPAHILELRTRVRMRKTLVDQRTAWQQRLLAQLFHQGIPAGLKPRTRAGREALAQAELSAAGRELVALALQMLDTIDRELVPLDQALRAFARRQPGCRALIAKLYGVGAITATAILAELGDARRFTSSDDAVRHSGLDVTVYQSDDKRAPGHLSHEGPELLRWALFEAAQSACRPSSPDHAYYLQVAERIDHNRACLSVARKLCRRAYHILRELGEEALAPVEYAQQAEEAIAAAA

SEQ ID NO: 156075 - protein, 338 aa, unidentified
MERQYVAIDLHLNRSVVVRENEAGEKVGVTRIENDPLALADALREAGEAPEVAIEATYGWYWAVDTLEELGAKVHLVNPSGLAWENRRVKNDYRDCCDLLDRMRLGKLPEAWIAPQEVRELRELVRFRARLVMLRTGLKAQLKAVLAKHGLRPPVKDLWGVSGPIWLDQLDLPRAYTTRIESIRDLVEVYDREIDMLEREIHRQLKDHAGYQAIQAIPGVGRTIAAIMVAEIGDVSRFPNPQALCSWAGLTPKHHESDTKVRRGRITKAGSKLVRWAAIEAVSNGRGGPKLKADYHRIAERRPKSVARVAVARKLVIMVFYGLRDGQIRCLAQGEQAG

SEQ ID NO: 156076 - protein, 404 aa, unidentified
MFYFGIDWSHDFHVLCILNEAGARLSRSRFAHSLTGFQQVESERRKLDVPAAECLVGIETAHNLLVDFLLDHEYSLYVIPPRATDGYRNRQRLSGAYDDDSDAALLAGIVRTDRGSHRRLLPPSPLVQQLRGQVRLIESLRQTIHRQSQQLLAALERCYPQALGLFGDLTAQISLRFLMAYPTAQAAQALSREDFAAFCHAQGYTRTDLIPRRYAHLTAPAPHASPAVAQAYQPHIRLWAEFLLPEVQARQQALAELDRLFSQHPDAFIFASLPGCGDLLGPALLAKFGDQRERFAQPREVQALAGTCPVTERSGKKKFIHFRYACDKEFRRIAQHFALASLSQATWASAYWQAVRPRCASDSHALRCLANRWLAIIWTLWQTRQAYDEAYHLRQRARRSQPKS

SEQ ID NO: 156077 - protein, 338 aa, unidentified
MKLYGGIDLHSNNSVVALLDEQDQVVYHKRLGNDAQGILAELAPYEQAIEGLVVESTYNWYWLVDALMDAGYPVHLANTAAIVQYSGLKYSDDDSDARWLGKLLRLGLLAEGFIYPREERAVRDLLRRRSRLVQQHTANLVAVQNLMARNRGRSLSANAVRRLTPEAVAQLLPDANLALAVQSTLLAMRAQEAAIDLLERQACAQVQLRPAYRHLLSVSGIGKVLGLIILLETGPVRRFAKVGNYGSYARCVGSERLSNGKRKGRGNTKNGNKYLAWAYIEAANFAVRFNPTIKRYYQRKRAKTNGIVAIKTVAHKLARACYYILRDGTDFEVTRAFS

SEQ ID NO: 156078 - protein, 346 aa, unidentified
MKNITTVGVDLAKEVIQVCGATRDKVISNTEMTPQEFKCFLVKTKPCIIVFEACATSNYWKQVALSQGHDARLISAKLVSKIRQNQKTDKNDALAIVQASQLIDIRFIQGKEFSQQELQSISRMRELAVKQKTATSNQLGALLLEFNIRISNRNGGLNGVVQATLEDADNDFSTEFRDALYETWQGYLALVARITKYDEHLSASVDSKPDCKKLMALEGVSTINAVNLYTTLACSGDSIFSSAKDASASIGLTPTQYSSGGQVKLAGIGRRVKNALVRSNLISGAMAVVRQVSQREPRTSKEKWLKALIERRGNKCAAVALANKTVRTAFAMLRDGTEYHAQALTD

SEQ ID NO: 156079 - protein, 425 aa, unidentified
MQEPLSDLHEYAAFVGIDWADREHVFGLQVAGEHQVEIGVLAQTPEALGSWVAKLQKRFGGHPVAIALEQSRGGLIHALMNYDFLVLYPLHPTTVASFRQAFKSSGAKNDPLDARDILEILTKHRERLRPLNPDTEPTRLLRRLVEDRRKAVDGRTQHVEALHASTKEYFPQYIELVNGTLDSRLAGDFLQKWPTFELFQQAKPTTIRQFYYGHNIRSPAVVQKALDVAKTGQTLTTDGAILEGGQRLSQWHAELIQCLNRAIEDYEQRIKEVFNDYSEAYLFSKLPGAGRAMAPRLAAFFGTDRSHYAAAANVQCFTGIAPITKQSGRTKVVHARWACPKFDRQTFHEFARLSLPKCQWAQNYVTYYTQKGKSYQVILRSLAFKWIRILFRCWQTRTPYDDAKYLATLKKRGSPFATLHLKNSA

SEQ ID NO: 156080 - protein, 366 aa, unidentified
MKKTSTVRVNGNMIFKGHKLTIGLDLGDRWSFYCVLDEAGEVLLEQKVATTPEAMKQTFERIPRSLIALETGTHSPWVSRLLKELGHEVLVAHAQKVNLITKSTRKDDRHDARTLARLARIDPELLGPVRHRSAQAQIHLTVIRARAALVSARTALVNAARGLVKSYGQRLPKCGTQQVSRELGAKLNAELREVLEPLLKEIESLNERIKEYDERMEKIAKESYPHVELLTQVKGVGTQIALTYVLTLDDPHRFPKSREVGCFLGLRPGRRDSGQSQPQMHISKEGDRYLRTMLVQGAHYILGLFGEDSDLRRWGLRLAERGGKSAKKRAVVAVARKLAVLLHRLWVSGEVYEPLRNSQKAIRAVA

SEQ ID NO: 156081 - protein, 347 aa, unidentified
MTEHTTVGIDLAKSVFELAVSRREGHVQERHRLSREGFLRFLAQLQPSTVVMEACGSAHHWGRQIESLGHRVVLLNPQDVRPYAKGRSKTDRGDAAALLEAFRCGALTPIPIKTIDQQGMTALHRLRSGWAATRVARLNALRGVLRELGAFIPVGASRVVPAVRALVEDAESVIPAPLRPILWQALEEINDLNQRLKTVDLQLRAMAKQTPAVQHLLSVPGVGLITATALVAFLGDAKRFSNGRRLASFLGLVPREHSSGLVRRMGSITKRGDPYLRTLLIHGARSLLRVARLRPQENALHAWAFRRSEHAPYNRAAVALANKLTRILWRVWRDGRNYEERQSLVAI

SEQ ID NO: 156082 - protein, 348 aa, unidentified
MRFYTQQHRHTCGIDLHARSLYVCILDDTGQTLVHKNIKASPEALLKVIADYRDDLIIGVECMFSWYWIADFCADQGIEFVLGHALYMKAIHGGKAKNDRIDSEKIARILKGGMFPYAYVYPRGMRAHRDLMRRQIKLTRERGELMGHIKNTLSQYNLPAHPKNLRYAKHREPLRTAFPDPSVQRSIDLDLARIEFYDGQLSKLKWYLNRTAKSVDPKTVIRLQSVHGIGDILSLVILYEIHDIARFPRVQDFVSYCRLVKCQRESAGKKHGTGGARIGNPYLRWAFGEGAALFLRGNPPAQRWLEKKTRKHNKAKAMTILAHKLGRDVYYMLKRGTLFDQDRFLASS

SEQ ID NO: 156083 - protein, 313 aa, unidentified
MSEVFVGVDVSKDWLDVAFSDARPGVRLANDADGHEAMVKALDGAGPTLVVLEATGGYQRAAAAALAAEGIPVVVVNPRQVRDFARATGILAKTDRIDAEVLARFAQTIRPNVRPLADPERQSFADLVTRRRQLVLMRDAEKNRLGQSQDARVLRSVRTMIRAIETQIEALDEELGDRIKSSPVWQHKVDLLKSVKGVGDQTARVLVAELPELGSLSRQRIASLAGLAPFSNDSGMFRGQRSIRGGRVGVRRALFMATLAGIRYNPVIRAYYEKLVAAGKRKKVALIAAARKLLVILNAIIRTDTPWRIANDA

SEQ ID NO: 156084 - protein, 375 aa, unidentified
MTKEDFIYVGIDLHKETHTAVMIDCYNQKLGEITFPNRPADFPKLVTKVKKCNTDAKEVVYGLENAYGYGRPLAVWLIDKGYFVKDVNTAISHRQAKHRGAMYRKSDSDDAEAIALATLNMLDKLPDACPNDAYWSLGQLVHRRDNIMKQRTRLVNQLHEQLCIAYPSYKQFFNDISRPTALYFWEHYPSRKYLKGKSVEDLRTELVPVSHNRCSTKNCEKILDAVASDKVKNNAYQDARDMVTLSIVSDLQHYDSQLAEVDKMLEQMYKMLGCTLTTIPGVNVITAVKILAEIGDIKRFSNANKLAQFAGIAPLHLSSSGKGKDVATKQGNRRLHATIYFLAIQMVQLSSKGTPRNPAVRAYYEKRKAEGKTSQ

SEQ ID NO: 156085 - protein, 357 aa, unidentified
MLLRFSELKRKAQARAGKSFPIVTIQEAGLDGFWLHRLLQSEGVESHVVDPASIATSRRRRRAKTDRLDGEALLRALMAFKRGEPRVCAMVRPPSPEEEDRRHISRGREVLVAERIEHTNRIKGLLFSQGISNYDPLKRDRRKRLDELKTGDGRPLPPHLKTRIVQELDRIELLLDQIKAVEAACDAMLAAPRAAKPKADAQQAASPSPAAPKVEAGQTVSPPTAVQMLLKVKSIGPQLASLLWCEALYRHFDNRRQVASYVGLAPTPWQSGSVDHEQGVSKSGNPRLRAAIVELGWLWLRHQPDSALSLWFKQRVAANDGRRKKPTIVALARKLLVALWKYVTFGVVIEGAVMKQA

SEQ ID NO: 156086 - protein, 370 aa, unidentified
MDENIKFFVGLDVHKDTIAVAVAEAGREPARLVGSIAHDVVKLRKRLTRYGEPARVLVVYEAGPTGYGLQRELARRGYQCQVIAPSLIPKRAGDRIKTDGRDGVRLAELSRAGELRAVWIPDPADEAIRDLARAREDVVNARTQARQQLKGFLLRHAVRYTGKSSWSKTYYRWLGTLNFGLSGAQTAFTEYWQAVTAADERVARLTGALANSIEGWRFEAVVNALQALRGIDVISAIGLVAEVGDIRRFAHPRQLMAYLGLVPSEHSSGERVARGSITKTGNTHARRLLVEAAWNYRFQPRIGRRAQQRAEDLPQAIRDVAWKGQLRLSGRFARLRARGVQINKVCVAVARELAGFVWAIASAQAKLTPQ

SEQ ID NO: 156087 - protein, 359 aa, unidentified
MDGSKVQPLMTAGLDIGDKYSYLCLIDTQSGEVVEEGRLRTTPEVFRRRFASEPPLRIAIEAGTHSPWVSRVLEECGHEVLVANARKLRLIYANKRKTDDIDAENLARLARLDPRLLYPLKHRSEDSQAHMAIIRSRQALVGCRTQLVNHVRGAVKSFGARLPKCPARSFHKRASEHIPEALRPALEPILETIGSLTERIRDYERQLEAISKEHYPETDLLRQVEGVGALIALTFVLTLGDPYRFERSRSVGAYLGLVPAREQSGDRDPQKRISKEGDEMLRKLLIGSAQYILGPFGQDSDLRRHGEKIASRGGKNSKKRAVVAVARKLSVLLHRLWVSAEVYDPLHNTHRRQEQEEAA

SEQ ID NO: 156088 - protein, 366 aa, unidentified
MEKIYIGVDFHARQQTICYLKTETGELVISELQHQDKEQVHAFYQQFPSPVIVGLEASGYSPWFEALLEQLGCEVWLGHATEIRRRARWRQKNDRRDAELIWDLMVHDEFPRLHRPAATSREVLRMLRYRQKLIKLRTMAKNSLQAIALQAGLAKGKQLFSRAGQEEFKSAAMSPVLQWQREHWFQLLQPLNAQLLETMVWFKAHSKDDLGIQRLRTHPGIGLLTSLCLLHTLQPVSRFRNTRKVTAYAGFDPVERSSAERQHFLGISKAGSRLLRYLLVEAVQTAVRYDEDLKRFYKRLAERRGRPKAKVAAARKLLIRAYIMLRDEIDYAEFRRRAVAARLARTGQGPIKVPEVLIGQPASPGA

SEQ ID NO: 156089 - protein, 351 aa, unidentified
MSHKTAATVVHTIGIDTGKNTLHLIGLDDQGAIVLREKIARGRIAARFANVPRCLIGIEAGMATHYVARELSALGHDVKQVPPAYSKPFRQGHKNDFRDAHAIAEAVQRPSTRCVPVKTDDQLDLQALHRVRSRLVGQRTAVINQIRGFLLEHGIAVRQGLRFLRQQLPDILAKRGDVLSPRMTRIIEDLSGDWRRLDERIKHITEEIEVLAHSSESCRQLMTAPGIGPLIASAMVAAIGNGTAFAKGRDFAAWLGLVPKQMSTGDRTILGRITKRGNRYLRTMIMQGARVILLRPANWAKHSFGLWLTAAAQRLHHNVLATALANKLARIAWTVLVQGRSYEARVVPKVA

SEQ ID NO: 156090 - protein, 355 aa, unidentified
MTDIQQKIIIGVDTHKDFHHVAVISALGESLTDRKFDATPGGYADLIAWITDQGDVLRAGVEGTGSYGAGLTARLRSAGITVIDVLAPDKQERRLRGKTDQIDAYSAARAVLARRATTVPKIRDGDVEAMRILRTTRRMVVKQRTETMNQLHSLLVSAPENLRAKLAGLKAKDLAKACARLRELAGDDVVTAATKDAARSLGRRFLELTVEADRLEDRIRVLVTAYAPELLAVYGVGPDVAATLLTVAGENVDRIGTESALAHLAGTAPIPASSGKTNRHRLNRGGNRQGNAAFHRIVLVRMKRHPETRAYVEKTLARGKTKRDTMRLLKRYLAREIFPILITIQQRHATTQMAA

SEQ ID NO: 156091 - protein, 360 aa, unidentified
MSGSYAGPQIVGMDLHRRRSVLVRMTETGQHLETVRISNDRDYLREVMARAGESPEVVLEATYGWYWAADTLAELGAQVHLAHPLGVKMFSLRRVKNDQRDAADLADLLRMGRLPEAWIAPPATRELRGWVRHRAKLVGLRSNLKCQVHAVLAAAGVQVPMSDLFGPSGQKLLASPTVSAVLAVESRSRVDSLLRLITGLDFEIDTFARLVGGRLRTDLGYRAIQQIPGVGPLLGAVFVAEIGDIGRFGRPQQLACWAGLTPTHRESDTTVHRGRITKQGSRLVRWAAVEAVQRVPAHTRLGQVRDRIGARRGRNIGVVAAARELTGLVFYGLRDHHIRCLPARTRTQAGARADARAGVA

SEQ ID NO: 156092 - protein, 393 aa, unidentified
MRSIGIDLHKTYAYVFELDRDGAKKHYRVALTEDELTTFFRTLGQDAQVVMEASTGSFRFSEMVAQHAGRVVVSDPAQTRGALSQAVVNDHKAAETLARLLQSSFVREVWVPPAANRALRAQTALYQDLSRIRTQLINRLKSLLQQEFIDFRVGTLGPASHSFLNEQFKDQPELRFYLCSLARSINHLHSELTQLEYSLGAWCKQSEDAQLLLTIPGMGVILAITILAQIGDIKRFPTAARLCSYAGLVPRVYESGKTRHYGHISRAGRSAMRWALTLAAWRGSGRAKAIDDFKRRLSERRPKMVASTAAARKLLAVIWSMLTHRKPFRDEDPALSARKRLSLKAWPEPDNQALEVPKIKDRRPSTRPPKGKEENQPDSSFPVCALTGVVPGF

SEQ ID NO: 156093 - protein, 345 aa, unidentified
MQLHTIGIDLGKTLFHLVGLNQRGEVVVRKKFSRKQLLHFTANLQVELIGMEACGGSHFLGRALREQGHEVRLMPAQYVKPYVKTNKSDYIDAEAIAEAVERPKMRFVPIKSDDQLDLQSLHRVRERWVMRRTAVINQIRGLLLERGITLRQGRRHVDEALPGILEDASAKLSGAVRLLLAQLKLELDHLQMRIDEADAVIQKIAGENEACRRLVAIPGIGPVTATAIIAAIGHGAAFKKGRGFSAWLGIVPGEYTTGGKQKLLGISKRGNSYLRRLLVQGARAVLQQSAKQSSGLSTWLAQLTTRVHSNVAAVALANKLARMAWAVLAKNEPYRPPMLVGAATA

SEQ ID NO: 156094 - protein, 335 aa, unidentified
MKVFYLGVDVSKKKLDLCLRSNGKDILYDVIPNDLSSIKSWLTRTFEKFFLSEDSLVVCAEHTGQYTYPLVCATKSIGVYLCLEDAAKIKYCHGIPRGKNDKIDACRIAMYAERYNDCLQPYTASELIIQKLKNLSTERSMLVADRAKYQSQLKDQVDYMEHSIYIAKCNRVEGIINTFTDYIAQIDLEIKELINQAPVIAHQMDLLLSVEGAGERVALKMIMETDAFTSFTDPRKFCCHAGVVPFVYVSGSSQRSKNRVSNRADKSIKHLLHMAALSVSQVKNSPLKKYYDRKVEEGKNKMSVLNAVRAKLVTIMFAVIRTDAFFSRNYQNSLA

SEQ ID NO: 156095 - protein, 415 aa, unidentified
MKKHNNSPKKSEPTSKRAKSRGPVQRDPKEVLAELLGKLREKLDPRVVAAGAGEEDQRGELRPNFDRLTVGVDLGDQWSHYCILGLEGETLGEGQMRTTPQDVAGFFQALNGARVVLEVGTHSAWVREVICGYGHEVLVANPRLMEGSKRRKRKNDRIDANKLARLGRVDPQSLHPMQHRSAEVRQDLVMLRARDALVAARTELINATRGLVKSMGARLPRCSSPSFARKVEEAVPAEIQEALLPLVRMTAALSDSIQGYDEKIEELASEKYGHTTFLRQVKGVGPITALAYVLTLENPERFVKSRDVGPYLGLVPKQEDSGESQPQLGISKAGDTMVRRLLVGSAQYILGPFGPDTDLRRYGLRLCERGGKNAKKRAAVAVARKLAVLLHRLWVSGEVYEPLRHAMSVPIAAAA

SEQ ID NO: 156096 - protein, 347 aa, unidentified
MEHSAIDLHKKDSQIRIVTVAGEVIDRRVPTRPEAFTRLFADRPQTRILIEASTESEWVARHLEAFGHDVVVADPNYAAMYGTRSRRIKTDDRDVAALTDACLRQTYRAIHRRSPARRAVQADLVVREALVQTRTRLVSLTRALTRAEGLRIRSGASHTFVARLREVAVSGALDRTLSPVRAMLELLDEELDRMDRVLTDGAHEDGEIARLMTVPGIGPITATAFVSAIDDIRRFHTASQVTSYVGLVPREYSSGERTRRGRILRSAHPRVQRLLVQAAWSLWRTKGADGAALRAWADSLSLRRGKRVAVIALARRLARILFALWRDRRSYDATRIRDVRVRRAASA

SEQ ID NO: 156097 - protein, 407 aa, unidentified
MLFAGIDWSDRTLEYHLCNEDKRTLTKGTALVCAEGLADLCADLDRYAEPHEIGIAIESPHGPWIQELLDHGYRLYPVNPKAAERFRDVLNVAGNKTDKIDREALALLLAAVHHKLRPLQPDDPDMIALRVACQDRLRLVEERTAKLNELQAILKVCYPAFGGFFGDLDSYTALAFLQKYPTQKQMLAVSTGRLRNWLKRQHYTQPSRIEAMAAHLAGPHLTVAEHLQQARAPLVVYLARALTQLKREIQHADDRINRQFDAMPEAGWARSLPGAGEVLAPAIAACFGRHPNRYETYRDAQAFMGTAPVTIGSGQRMASPLVRFRRSCWKFARRTLQLFADHSRRKCPWAQALYQRLRARGQRHNTALRAVAHKWVKILFAMQRDQTLYDPDRFPTARQRYLSKQTV

SEQ ID NO: 156098 - protein, 345 aa, unidentified
MPIVGGLDIHRKQITFDYLDTGTGQVRRGQVSPADREHLRGWLARFAGREDAAFALEACTGWRYIAEELAAAGIAVHLAEPADTAFARGRKRHAKTDKTDSRHLRQLLAERRLPECWIPPGHILECRALLELYNDLRREHTAWVQRIHAVFFHQGAPALGQDALRTEKGVAALRTAAAAHLSPAGQLQVATALEVTAALEARLHAVRHQLLDAARHLAGAKVLAARLYGVGPVTALALTCWLGGKDRFSSSRKAVRFAGLDITVRSSDRKGRPGRLSRQGPPVLRWAVYEAGKTHARASAPDHAYYAAVKDRQGGKRAAMSEARKIIRQACHILAELGDDALSAA

SEQ ID NO: 156099 - protein, 359 aa, unidentified
MAIVAHLYRFIVGVDTHARNHVLSILECATGAEIVCQTFANTSQGHVRAQAWITKHTRADLREVLVSMEGTASYGTRFRVALEQAGYRVVEAPRLLVRGRKKLAKNDVIDAFQIAARTLGKDETELTIPKQGDYREALRILVAARKQLTRATTVNINSLTALTRCTDLGIDARRALSVKQVHQIAALEEQPGDAIDVLVAKQEAKRLAKTIIDARTQLAENQNQLAMIVQLVTPALLEMPGVGPVTAAQMIISYSHVGRIKSEAAFAALAGTSPIPASSGNKVRYRLNRGGDRALNNALHTVALVRLRNDDQTRSYMKKRLAEGKTKRETIRLIKRYLARKIYRLLTKELTRTQVTLAA

SEQ ID NO: 156100 - protein, 354 aa, unidentified
MITIGVDVHKRTHTFVAVDQVGAMLGQKTVRAITTGHREAITWARSLADGKSVRWAIEDCRNMSSHLERDLLAAGEQAVRVTPHLMADTRRAGRERGKSDPIDALAVARAALREPDLPVAGHDKASREARLLTDHRDDLVVRRTAVTNRLRWNLHEIDPQRADQIGSLTTIKHQNGARTLLESITDGGVLVEIALDELKEIVSLTEKIKAVDKTIAAVTGEATVELRKLDGCGVLTAAKILGETANIDRFATVDKYARYAGIAPVPVWSGNTAGRVRLTRSGNRQLNRAVHTIALTQTRLKGSKGRAYYEKKLAEGKSRKEALRCLKRRLLRTIYNALNQDHQNCHNQQLPSAA

SEQ ID NO: 156101 - protein, 420 aa, unidentified
MEIDQSEQHLIARVAAIDIGKAEMVCCVRVPGTGRARAQEVRTYSTMTPSVLEMADWLTGLGVTRVVMEATSDYWKPVFYLLEEQVPETWLVNARDVKHLPGRPKTDRLDAVWLCKVAERQMLRASFVPPPAIRRLRDLMRYRTDLVAVRTAEKQRVEKLLEDAGVKLSVVASDIFGVSGRAMMAALIAGERDPARLADMALGRMRVKTALLEKAFVARFSEHHAFLLATMLRRVDTANDDIAAIDTHVAAVLDEELHDAAARLMTIPGIGAVTAVAIIAEIGLDMTRFPTAAHLCSWAKFTPLTSESAGRTKGRQSTGHGNRYLARTLGEVAVMAGRSHTFLGARYHRIARRRGKPRAIVAVGRSVLVVIWHLLSQPGATFTDLGADYYETRVNHQRTARTHIKALEGLGYQVTLAPAS

SEQ ID NO: 156102 - protein, 356 aa, unidentified
MNNLSKLDFMGQPIYIGLDVHKKSWSVSIHSQQCEHKTFTQPPEVETLVHYLQHHFPGASYYSVYEAGYSGFWIHDQLREKGVQCLVVNPADVPTKDKERAKKRDRIDCRKLARSLRSGELEGIYVPCRSKLEDRSLVRTRQSMVRKQTRCKNQIKAMLLFYGIHLSEEQVKSHWSRRFLEWIEGLRMERASGDMALKVHLEELRHWRQILATLDRGIRELAKTEEYREWVRLLKTIPGISTLTAMILLTELMDVRSRFSSLDKLSCFVGLIPDTQSSGENEHVGEITKRRHAQLRALLVEAAWVAARKDPALLRAFEEYCQRMRKTTAIVKIARKLLNRIRFVLKNHKSYVPAVV

SEQ ID NO: 156103 - protein, 341 aa, unidentified
MKQEMSILGIDIAKRLFHAVGMDERGKIVWRKRLSRHDLIPFIAKLPPVLIGMEACGGAHYWARRFRAYGHEVKLMAPQFVKPYVKSNKNDSRDAEAIAEAVTRPTMRFVPAKDVDQQDIQALHRVRERLIGERTALVNEVHGLLHEYGMVMPKGVAKFRQAVVGKLEAEKDKLTPLSQEMFWKLVEEFAALEEQLAYYQEKLEALAATHPECQRLMTIPGIGPFSATALVAAVSDASAFKNGRQFAAWLGLVPRQYSTGGKERLLGISKRGDSYLRKLLIHGARATLRWVGRKTDRRSQWMRQLVERRGHNRTAVAVANKNARIVWALLTSHQAYEPAKG

SEQ ID NO: 156104 - protein, 352 aa, unidentified
MTMTTLTRSITGGVDTHLDVHIAAALDERGTLLGVESFATNLRGYRQLLTWLESFGEVELVGVEGTGSYGAGLTRHLHDAKVRVVEIDRPNRQRRRRRGKSDPEDAVAAARAAKAGEANGEAKTRDGNVEAMRVMRVARSSARRARTQALNQMRSLISTAPEPIREELRYLNVYRLLEHCVAYRPAEKRDLVSITKRTLKMLAERSVSLEEEIGELDAVLKPLVRVTAPELIACSGVGTDVASALLVAAGDNPERLRNEATFAHLCGVSPIDASSGKHERHRLNRSGDRNANSALWHIVITRMVCDPRTRHYIERRMKEGLTKKEAVRCLKRYVAREVFNLLPRRHFAIDSP

SEQ ID NO: 156105 - protein, 312 aa, unidentified
MPENAEPDYVGVDIAAERLDYCVNETTEGSLPNSSTGQAELIAKVKRLPHPRVICEASGGYEKLVVAELLAGGIEVCVVQPGRVRAFAYAEGLLAKTDRIDARLLRRYAQKVQLRLAVPVDAVLATLRELLDHRRALTTQLSEVEGRLPLAGATLAKLLGRQRTFLKKQIEQVEKTLRCHIDNDPDLRGKSERLQQIKGVGPILASTLLAFVPELGKIKSSQLSALIGVAPHPKDSGKSHAPRHVRGGRSPVRHVLYMAAVCAARCNPILAAFYQRLKANGKPAKVCLVAVMRKMVCLMNRLISDPNFTLAH

SEQ ID NO: 156106 - protein, 411 aa, unidentified
MNPVVGLDVAKGESQIQAFLDKKTPYKRSFKISHTIEGLGQLLQFLQEIEDITNIKPVIIMESTGHYHSPVMQFLDNLNYLYIVINPLISYRAKISSLRKVKTDIIDAYHLCELYYKEELEPFKKRGVQLLNLRNLTRQHDHLTGISSQAKLHFLAILDQVFPQYRGVFGDVYSNVSLLTLLEFPTSDDILRAGEEHLTKRISSICTSRSKRWANEKAICLLAAAEKNPFQITLYKSLIISLELHIKMVLQYKEHLSNLKAEIDVLVKEIEEYTIIQSIPGIGEKIAATIISEIGEIDRFDNPKKLVAFTGVDPSVFESGKFTATRNRITKRGSSRLRHALFMAVRCAIRDTRKSKSTEEIIPRNKRLRQYYDKKREEGKPFRVTVIACVNKLLHWIYALLKSKTTFQDLT

SEQ ID NO: 156107 - protein, 443 aa, unidentified
MSTLIDAEMNTPAYAAWIGLDWADQKHFWTMRTADGKIQRGELRNTPEAVEMWAADLAQRFPGRSIAMALEQARGAVIGMLSKYAHLVLFPVHSTTLANYRKAFSPSGAKGDPSDADLILDLLLKHPDRLRRLQPDTVETRGLQFLTEERRKLVDQQTSELQRLTNWLKQVWPQMLVWFDDLASPLVGDLLLRWPSLQALQKASAKTLRTFFHQHNCRSEERIQQRLDQIRQAVMATTDAALRETATLCIAHSVRALAQMRSAIQTFDRRIAEIYHCHPDRAIMESFPGAGPALEPRLIAAVGSRRGRFDSAHNLACFTGIAPVQESSGNSSWTHWRWACPKFIRQTFHEWAACSIRSCDWARAFYQHQRGKGKGHHAAIRALAYKWIRIFFRCWRDGVPYSAERYQKALQVHAVAGVPPVAQRTLEVSWISCGGFFKLVKNS

SEQ ID NO: 156108 - protein, 345 aa, unidentified
MMIIGIDAHKRSHTAVTIDGNGRQQATKTVGTTTQDHLNLLKWATALEEVRLWAIEDCRHMTRRLERDLIAAGESVVRVSPKLMADVRDSARTYGKSDPIDALAVARAALREPDLPVARLDGVERELRLLIDHREDLVAERTRIICRLRWHLHELDPGWLPPANIDRTSAFTAVTAHLNTCGKAGLVLRLARRLVEHLQVLTLEIDELTAEITERVTLVAPSLLAIVGCGPLTAAKILGETAQVHRFRSKDDFARLNGTAPLPVWSSSKQRHRLSRTGNRQLNAALHRIAMTQARIHPPARELLARRKSNGDGGMEALRVLKRRLSDVIYRAMLADQNQSAPAAA

SEQ ID NO: 156109 - protein, 437 aa, unidentified
MSKRLQVGFDIHQKHNHVCMMTKDGQMVDPHQRFDNNWPGHQEFVDMLIGVLEEGEFEGVDIAGESSGLLWFYPFYHLTQAKELTPFDPHVYLFNPRTVKHFKKVLAERDKADPKDAYAVVERLRFGGRMPHELTFDERYLPLQRLTRYRYHLSHTLAREKTYARMVPIYLKASDYTRKPKPFSDLFGATSRHILSEYATTDELAAMPLDDLADELDRIGHHRFSDATDNARCLKRAAAQSYPLPLCLIEPINVILDSLLAHIRFLEGELEKLDSLIETTLVDVPGAPYLRSVKGLGLVYTAGLLAEIQNPDRFIQGCKRDKEGNLRPKTKHDAQASLARFFGLWWPRGDSGEFQAEDRRLPKTGNPYGRYYFVEGANSLRRHNAEYTAYYQRKYDQSLKHKHWRATVLTARKLVRLVFALLHDEEMYQPPEVRSSS

SEQ ID NO: 156110 - protein, 408 aa, unidentified
MELTPIYKRVIALDVHQAKITACAIIEHDDGRQEMVKRDFGAFKRDRRALAQWALEIRPDVVVMESTGVYWKSPFAALEAVGIVGWVVNARHVKAVPGRKTDMADAQWLATLARAGLLRASFIPPVQLRQLRLVARQRQKLVGVASAEKNRLHKVLVDAGIRLGVLVSDVHGQSARAMIKALIRGLPISEILDLKGRLGASREELFEALSTEQFSATHAFVAAEIMQHLEFVEQRIVRMDEFLLAGLQAWQPQLKLLQTIPGVDQIGAAMLLVEIGADMSAFGSAERLSSWVGICPGNNESAGKRKTGRIRKGNAWVRRLLCEFAQAAARTRCALKAKFDALAIRKGRKKSVIALAHKMLRTIYAMLSSGSHYEDKTVDYEALSVARNAPRWIKMLRKHGFIGQPAAA

SEQ ID NO: 156111 - protein, 345 aa, unidentified
MKITTVGIDLAKNLFQVHAVDERGRAVLRKQLRRDQMARFFANLPPCLIGMEACASAHHWARTLQKFGHTVRLMAPQFVKPYVKTNKNDVADAEAICEAVSRPNMRFVPIKSVEQQAVLSLHRVRQGFVRARTAQGNQIRGLLGEAGLIIPKGVVNVAKRVPALLEDAGDEVPASFRRLIQRLTEHLKELDRQVDELEAQIKAWHRGSELSCKLEKIPGIGPLGASVLVASIADANSFDNGRQLSAWLGLVPRQASSGGKPKLLGISKRGDVYLRTLLIHGARSAILAAQRKAVNTNVWLASLLNRRHPNIAAVALANKNARTVWALLAHGREFRADYAPEASAA

SEQ ID NO: 156112 - protein, 413 aa, unidentified
MVRSGGGWLEIFCGIDWSETAHDVAVVDETGRLLARRRIADDAAGFTALTELLAGYAGRPERVDVAIETGRGLLVAALRAAGHRVFAINPKAVDRYRDRHGVAGAKSDPGDARVLADILRTDRDRHRPLPADSDLAAAVGVLARAHQDAVWARVQDANRLRSLLREFFPAALTAFADLTTNTALAVLAAAPTPTAAARLSRANLTDLLRVAGRGTRPTEAARLAEIFTVDQLRQPPVVEAAMGQAVRAIVRTLTAANQSISDLEAALAAAFDQHPDGEILRSLPGLGPILAARVLSEFGDDPTRFPDPASRRAYAGTAPITRASGRSRVVPARHVRNKRLADACYLWAFAALNRSPGARAYYDTRRAAGDRHNAALRRLASKLLGQLHHCLTTSRPYDEALAWPQPDTTPAAA

SEQ ID NO: 156113 - protein, 404 aa, unidentified
MNAVGIDVSKGKSMVAALRPMGEVAIAPQEIPHTEVDLENLGYDILSLGEDTRVVMEATGRYHEPVAQMLHEMGIFVAVLNPLLIKQSGGGSIRKVKSDKADALKIAKYGLDNWGDLREHTPMDALRQQLKLFSRQYNLYMGTAVSLQNNLISLLDKTWPGINEEFTSPMRADGSLKWVDFAATFWHCDCVRYAGRDNFIERYRKWCKRKGYNFSEDKAEEIYIASAGHFPTLPKNSSSKLLITAAAKELAATLTGVATIKVEMIRLAQQLPEHGTVLAMYGVGEITAAQLMAEIGDVRRFANRGSIVAFAGVDPAVNQSGAYQQQSTSSTKRGSPHLRKTLFQVVSTYIKRSPLDEPVYQFLDKKRAEGKPYYVYMTAGANKFLRIYYARVKEFLAVLDEPET

SEQ ID NO: 156114 - protein, 334 aa, unidentified
MLDTETGEIVRRRLEHENGEARAFYAALPKPSLIGIEATSYTQWFERMAAEQGHQLWVGDAAKIRASETRKQKYDGRDAEHLLDLLLTKKFPRIWVPTHQERDLRQLLKHRDKLVHMQTALKLQLHFLAMSQGICRKRKLWTEQGRGLLQSLSWDPWASRRRQELLELLDSLAPRIEPLDQAVERQAQQRPDAVELMKQKGVGPVTALAFVLLVGPVERFPNSRKLVSYLGLNPAEHSSGGRQRLGHISKQGNAMLRWLLVEAGQSASRFDPQLRRKYQRLKFRRGANVAKVAIARHLAVRLYWALRQMRDASPPVRKPGSPVSSVVEATPSTL

SEQ ID NO: 156115 - protein, 270 aa, unidentified
MLYAGIDVHKRFCQIIVCTKEGEVVKKGRIKTDEKEIREFFYGLKNVKVAIEASANYSYIVDALAKEGYEVLVAHPLRTRAIAEAKIKSDKIDAKILADLARGNLIPTSWIPPKEIRGLRDLVRQRIFLVKQRTKIKNKIHAELIKRGIECRGNIFTKAGKEWLHSLKIPAIETYLSIMEKLEEEIKKMDKRLKEEEKKFEEVKLLKSIPGVSTFSALVILAEIGDVNRFPDEKKIFSYAGLVPSVHKSGDRVYYGHITKQGSKYLDGYW

SEQ ID NO: 156116 - protein, 331 aa, unidentified
MEQAVVIGVDVSKHELVMAVHPTGDTWTSETTAIDIEAVIARLQTYHPRLIVMEATGGYELPLAAACAAVKLPIAIVNPRQVRAFAHAIGRTAKTDAIDASVLALFGARVEPTPRAVADADTQALAGLITRRRQLLEMLGAERRRLEQAPPTGPITRDLRNHIRWLERRVADVDEEIGTAIQQSAVWRVHDDLLRTVPGIGPTTARTLLAELPELGRLDRRAIAALVGVAPFNCDSGQFRGRRRIWGGRASVRASLYMAALVASRHNVVLAAFYRRLRDAGKPPKVALVAVMRKLLTILNAMIKHHCRWNPKAASTPASTSRPARGVAVLA

SEQ ID NO: 156117 - protein, 410 aa, unidentified
MTDTNITRTKPVLVAIDISKARHEVLISVPGKKRRRRLTVLNQLEDFNRLIATLSDYGCPVRVAFEATGNYHRALAYHLAAAGFEMKLVSSVALARTREALHNSWDKNDPKDAQVILHMMEIGNEQFYHDPLVCGTNDIQELSKTHDVVSKSKTELWHRVLTHYLPLYFPEADRFHRSSRSDWFFAFLERYPSPHFISAMSKDAFTADAWDVVGRKVAKERFLTDIYETAKTSVALPVAPDSDAISMFRLVIAEGRSLIAQRNQIEDRAVALLKDLPDYQLLTSVPGIGPINALTILAEAGDLRRFGHHRQFLKFCGMDLATIQSGTFRGQTKLSKYGNARLRRTLWMAGQVAILQRTNSFRDKFERYISKGRHNTHLRRKAYTAIAAKMARTVHGIIKHGEPYRPFFEG

SEQ ID NO: 156118 - protein, 358 aa, unidentified
MVDKVTEAAVVGGVDTHKDLHVAAVVDQNNKVLGTQYFSTTRQGYRQMQAWMTSFGTLKRIGVECTGTYGSGLLRYFQNAGLEVLEVTAPDRMERRKRGKSDTIDAECAAHAAFSGIRTVTPKTRDGMIESLRVLKTCRKTAISARRVALQIIHSNIISAPDELREQLRNMTRMQLIRTLGSWRPDASEYRNVTNVYRISLKSLARRYLELHDEIADLDVMIAAIVDELAPELIKRNAIGYESASQLLITAGDNPQRLRSESGFAALCGVSPVPVSSGKTNRYRLNRGGDRAANSALHIIAIGRLRTDAKTKEYVARRVAEGHTKMEAIRCLKRYISREVYTLLRNQNRRINSIPITA

SEQ ID NO: 156119 - protein, 337 aa, unidentified
MTFLAVGIDISQHTLDVALCPAKGQAIVLGSFPNNPSGFEKLNNVLSKSLRRHHAEGIHVVMEPTGGYEQPLALFAYRRDWVISLPNPRQVRDWARGSGIRAKTDRVDACVLAQYAAAQKPPPWKPLPEEVAQLEALLERREDLTAMLRQERNRRHALKARGTYQGVVAQSLEDSISRLEQEVAAIDQAIREHLDAHPHLKECAKQLQTVPGIGKRNGLFIMVLLYRWSTLTNNQGSSKGLTAYVGLDPLPYESGHSVRKRRCISRQGNRRVRHKLFMGALGGVRGHNPLRDFYQRLVGRGKAKKLALVAAARKILVWAWAVFRDNTTFNPQQATAR

SEQ ID NO: 156120 - protein, 339 aa, unidentified
MSLVLRSFLPFPDSCKGTSPHQQGRGTKMVERFGGIDVSMDRLDVMVVPDRVGFSVENNAAGWTKLIERLRGSPLTAIGIEPSGGYERGIIRALLAAGLSVRRINPNKLRQFARARGVLAKNDRLDARLIAEYVAIMPTRIVQSDPAAQRLAEVVTMRRQLCDEHVTVENQATHVEDAMLRRLNKRRLARLDSDIRLLDKRMAEIVAAEPALDQRYRLLISMPGVGPVLAFTLIALLPELGQMSRKQIAALVGLAPYDFDSGKLRGHRSIYGGRMPVRNVLYMAALSACRYNPALKTFHKRLASADKKSKVVIVAVMRKMITTLNAMLRDNAAWQIKTT

SEQ ID NO: 156121 - protein, 343 aa, unidentified
MKITTVGIDLAKNVLQIHGTDENGKPLVRRQLKRNQVMTYFANLEPCLIGMEACGSAHHWARKLQSLGHEVRLISPQFVKPFVKTNKHDVADAEAICEAVTRPTMRFVPIKNVEQQAMLSLHRAREGFIGDRTATANRIRGLMAEYGLIIPQGIGHVRSKVPELIEDASNELPGIFRRLIDQLLNHLRWLDEQIKMIEKEIHAWHRNNADSQRLEQVPGIGVIIATAMIAMIGDARNFKNGRELAAWIGLVPRQHSTGGKQTLLGISKRGDAYLRKQLIHGARALAYHVGRKANPDRWLVKLINRRNMNVAVVAQANKTARIVWAMLAHGRDFRPDYALKAAA

SEQ ID NO: 156122 - protein, 416 aa, unidentified
MQFGAFIGLDWADEEHALSLCAANDTQIQRTTLKQTPEAIAQWANELRTRFPNQFIAIALEQSRGPLLAALTNFEHIVPHPVNPKSLARFRQALYSSNSKDDITDADLLLEILLKHRDHLRPWQPDTVHTRQLALLTEQRRNLVDTRTALTNQLLAHLKMIFPQALDFVGDLATPLAAAFLKKWPTLQSLQKVTPAALLKFYYGHNSRANGALTRRLELLKTALVLTSDPALLNTHSMAIQALAAQLAALHPFIRKYDQEIAGLFATHPDAALFESLPGAGAALAPRLLVCLGTDRQRFSCAEALSCYTGIAPVTEQSGKSKWVHMRWSCPKLLRQTWHEFANCSIRFCPWALECYQDYRKRNIDHHEAVRKLAFKWQRIVWRMWQERQPYDELRYQTALLRKRTKPTAQPVNNKN

SEQ ID NO: 156123 - protein, 422 aa, unidentified
MATSHPPLAARIGLDWADRHHAVSLREAGSTSVETSRVEHTPEALAQWLGELRHRFGGRPVGVCLELSRGPVIHALLAHDFVIPYPVNPLTLKRFREAFATSGAKDDPTDGALLLELLVKHEDRLRPWHPDDAETRALARLVQARRKAVDLRTKLTQQLRAELKGYFPQALRWTGDLASRLASDFLLKWPTLEALQRARPQTVRTFYYAHNCRRSDLIEERLAEIPTAVPLTTDPAIVETSALTVQMLARQLQALSPSLARYEEEIEQRFRRHPDSEIFRSLPGSGAALAPRLLTAFGTERDRFGSATEVHQYTGIAPVTERSGNRTHVRWRWGASTFLRQSFHEFARLSIQHSRWARAYYELQRERGKGHHAAIRALAFKWIRILWRCWQDRTPYDEDRYLRALRDRGSPLAQRLELPAAA

SEQ ID NO: 156124 - protein, 421 aa, unidentified
MEEITEEAAGLVARVGALDVGKAELVCCVRVPDEARAGRRRQEVRTFATTARSLLELRDWLVCLGVSLCVMEATSAYWKPPFYLLEDAVECWVVNARDVKNVPGRPKTGRLDAVWLSKLAERGMLRPSFIPPPWQRELRDLCRYRRTLIHERTREKQRAERLLEDTQIKLSSVISDIFGTSGRDMLEVLIAGQRDPYVLAGLARGSMRGKKSVLQEALTGHFRDHHGYLLRMMLDRVDALSVQVEALTGRIDEVIAPFAIQVAQLDEIPGVGITGAQELIAEIGVDMARFPTASHLVSWARYAPRARQSAGKNKPGTTGKGNPWLASALGEAGIGAARARTFLGARYHRLARRRGKRRALVAVGNSILVIAWHLLSDPEAHFTDLGHGWHDRLAPARRKRQLIAELERLSGQKVLLQEAAA

SEQ ID NO: 156125 - protein, 291 aa, unidentified
MVVVGVDVHKRTHTFVVVDQVGCKLGQRTWAATTAGHQQAVCWVREQFGAEVVWAVEDCRGLSGRLERDLLAAGQRVVRVPPPLMAEQRRTARAPGKSDPIDALAVARVALREPDLPVAAHDEVSREMKLLTDRRDDLVKQRTAMMSRFLGKLHEIEPGWSPPAGSMDRPTWQRKLADRLADVPGIVAELARDELADITRDTVTINALERRIAILVGPMAPTLLAMPGAGALTTAKILAETAGITRFKSEAAFARHAGIAPIPVWSGNTAGRVRLSREGTDNSTPRSTASP

SEQ ID NO: 156126 - protein, 363 aa, unidentified
MRFYGEQRRFYCGIDLHASKMYVCVLDEQGNVVLHRNLRTEPEALKRALAPYRASLVVGAECMFSWYWVADWCRQEGIEFVLGHALYMKAIHGGKAKNDRIDSEKIARLLRGGTFPLAHVYPKEMRGTRDLLRRRNLFVRRRAELLAHVQNTFTQYNVPTASGKGRDRLREGDVGSSFEDGSVQVMLDADVEVIEQLDETIARLETHVLKHAKVHDPARLHLLQTIPGVGKVLSLVMLYEIQDVDRFENIGQFVSYARLVSCAKESAGKKQGSGGRKIGNAHLKWAFSEAAALMIRSSPEAKAFMEKMTRQRGKARAVALVAAKIGRAVYWMMKRKQPFDARRLWKSSLPKGVREMEGAAMKG

SEQ ID NO: 156127 - protein, 402 aa, unidentified
MSGLGHIHGAHAPVEVPSTWGNRRSELPKPITSLGGWLFPDSMEIRAHDWSRGPSIEWRTAMEEYVGLDVSMKETSVSIRRAGERIWRGKCASDPRIIAELIRKRAPAVRRVVFETGPLSIWFYHSLRTEGLPAICIDARHAKAALDMATNKTDANDADGLAQLAEVGFFREVRVKGFDSMLTRTLVGARTRLVRITTELSNQIRGVMKTFGLLVPAGKGSIFEKNVRSLLTDQDGLASIVLPMLEAWRGIRIRAAELGRQLVRDARQNQACRILMSIPGIGAITATAFTTAIERPDNFKKSRSVGAWIGLTTRRYQSGEVDYDGHISRRGDAHLRGLLYEAAAVILTRSSTDSTLRTWGLKLRERIGFKRAAVAVARKLAVIMHTMLKTGELFNPNAGAIA

SEQ ID NO: 156128 - protein, 413 aa, unidentified
MDVLHPRCCGLDVHKSSISACILLREAGRVQKHQRRFGAMTQDLQELAEWLGRFGVTQVAMESSGVYWKPVWNILEGQFTVVLANAQHIKNVPGRKTDQKDAEWIAQLLQYGLLRPSYVPCEIIRDLRDLTRMRASLSQEAARLSSRIQKVLEDANVKLASVATNVLGKSGRAMLEDIISGEDDPEHLASLALGHLRVKIPQLRLAFEGKIRSHHRFLLRRLLDQVQFVEQEIALLDQRLEDIGGQRPELAQAVERWDTIPGIDRVAAWALLAEIGDNMAQFPTAEHLASWAALCPGNHESAGKRLRGTTRQGSPWLRRMACQCAWAAARTKNTYLSSQFRRLAARRGKKRAIIAVAHTIIVIGYHLQTNQSNYEDLGGNYFDRIHSDGLKRYLVKRLQQLGHKVTLEPMEAA

SEQ ID NO: 156129 - protein, 350 aa, unidentified
MTIVAQLFEHVVGIDTHARTHTYCLIAAATGAVIDTATFPTNKAGNARAITWIVRRTSGSVLAAVEGTSSYGAGITAALSEAGFDVAEVRPAARSTHAHRGKSDALDAEAAARAVLGREFDRLAKPRQGGQRTALRVLLASRSILDQQRTANRNALLALLRSMDLGIDARKPLTDAQVRTISAWRTSRATPEHDPLAITRREARRLACSVVEQGELLKENHRQLHQLAEALAPGLQVQPGVGPVTAAIIICAYSHHGRVRSEAAFAALGGIAPVPASSGNTDRHRLSRSGDRQLNRAFDVIVRTRMSYDETTRDYVARRRAEGRSNREIRRCLKRYVCRSIFRELQTAMA

SEQ ID NO: 156130 - protein, 402 aa, unidentified
MTYDYVTGMDACKYFHHACVLDIDGTQVLSKRINQNEQSLRALFSAFSAYDHKVLVVVDQPNNIGRLTVAVAQDIGIDVRYLPSLAMRQLSRIHAGNAKTDIRDAYIIAHAAKNLPESLRSVDRVEEAFLQLKVLNGIDEDLARSYTRLINQIRSALVGCYPQFEQALRGQIIHRKWVLHLLARYGGPTKIKRLGKAKAAAFARRYKARNPEPVLDAIFAAISEQTVTIAGAHYAEMGVAMSAKDALLKLEHRQQIEKEVIELINDIPHTQFLLSMPGIGPKTAAQILMTAGDMSDFPSAGHLASYAGLSPRTNQSGTSIMSNSLNRAGNKKLKNALWQSSFASIRFHERSRQFYERKRREGKRHNAAVVALARRRLNVLYAMMRNHEHYHDPAPSQEDLAA

SEQ ID NO: 156131 - protein, 342 aa, unidentified
MESTTIAVDVAKEVLEVAVSIRPGQVSQQKRLSRTAFMKFCTDQPPATVLLEACGSAHYWARRLQTLGHRVVLLPPHATRPYVFRNKTDRTDTRGLLEAYRNEDIHPVPVKSVSQQALTALHRLRSTWLAARTARLNTVRGLLREFGCIIPVGAHHVLLNVWDLLADPDSGLPDALRPALAEACTEIRQLEDRVRLVEHQLEALADQTPAVARLRSIPGVGLITATALVAFVGDVQRFPSGRHFASYLGLTPREHSSGLIRRLGSISKRGDVYLRMLLTHGARAILWKAKSRPNPDRLRAWALQVQRLRGHNKAAIALANKLARIVWAVWKHDVDFREVTAA

SEQ ID NO: 156132 - protein, 337 aa, unidentified
MKYCGIDLHGNNNWVVIIDEQDRVLYSRRQANDLSRILAVLEPHRSELSGIVVESTFNWYWLVDGLQEAGYRVLLANTAAIKQYEGLKHRGDESDARQLAHLLRLGLLPEGYIMPKAMRAVRDLARKRMQLVQQRTAQILSIESSLSRHCGWKLSSNRIKCLCQADLDEMKLEALPLQGIQANVAVMQALQTQIESLEQVLADYCGDEPGYPLLRTVNGIGKVLATVILLETGSVERFADAGHYASYCRCVGSAYLSNGKKKGEGNSKNGNRYLAWAFVEAANFAVRHCEPARRFYQRKKAKRNSIVAIKAVAHKLARACYHMLKLKQPFCVERCFA

SEQ ID NO: 156133 - protein, 335 aa, unidentified
MTCYLGIDVAQASLSVAVADGQQAAVYVGEFPNHPTGFEQLVATVNSRWPAQPVQVVVEATGGYEASLVETAHALGWRVSVVNPWRVRQWAKGQGRRTKTDRQDALLLARFAAATQPPAQDPLPEEVADLAELERRKEDLQSLLGSEQNRLRQARQRPRTPPSVLRSLERTIQVLQEELRQVEQAIEQHLTHQATLAQQRRLLLSVPGVGPKVASYLLVLLHRFCAYTAQQGDKKALTAYVGLDPVQQESGRTVAKRPTISKQGDKRARTLLYLGALGGIRGNNPLRTFYQALVARGKARKLALVAAARKLLTWAWAVFVQKTRFDPSRFAHAQT

SEQ ID NO: 156134 - protein, 367 aa, unidentified
MKKISTVAAKQIKNFREQKLTIGLDLGDRSSWYCVLDEAGEVRLEQKLGTTPKAMKEVFGKMPRSRIALETGMHSPWVSRVLSELGHEVIVAHARNVRLIGESRRKDDRFDARTLARLARIDPQLLSPVQHRSAQAQAHLMVIRARAGLVRVRTSLINTARGLTKSYGERLRGCSPRNLNVETARQLSPELQAALEPLLGAIESLSQRIYEYNQQIAKIAKESYPQVARLEQVKGVGTLIALTYILTLEDAQRFRKSRDVGCYVGLQPGRRNSGQSEPQLHISKEGDPYLRTLLVQGAHHILGPFGADSDLRRWGLKLAERGGKNGKKRAVIATARKLAVLLHRLWVSGEAYEPLRNSRQVLLPAAA

SEQ ID NO: 156135 - protein, 395 aa, unidentified
MSNVIMIGCDLHDRNMLLRYAVGTAEPQQLAYDNDAAGRRRMIARLKAIAEKNQAEKIIFAYEASGLGHGLSDELHQEGIECFVLSPTHLPKTPKSARLKTDAKDAQMLLEQLRGFVLAGNDLPVVWTPPQRLRDDRELVRARVDVADEMTRVKLKINTLLKLHQLKVVSPTKCKWTKAFVTWIREKLIPDLDLCVATKLKLLLDRFDMYRKEQGELDKALKKLSREPRYKVACNELRKLPGVGQLVALTFLTEMGDLERFANRRQIAAYMGLCPSSNESGEKNDRKGRITRQGPARLRKVLCQAAWVSVNRSEEAAADYHRIKQGQKHRSKKALVAMMRKLGIKMWHRALACGVSSELKGRDRPSSKDFVGLAQSGLAQRTVSAPSLQLGQCAG

SEQ ID NO: 156136 - protein, 407 aa, unidentified
MSQNKTDPDRFVGLDVHKHYLIAVAVDADKQEVMGPRRVPLVRLGTWVQKTLTPQDAVVLESTTNAFQLHDDLVPHVHSVTVAHPSHVSLITRAQVMTDKIAARTLAKLHAVGLLPSIWVPPLAVRDQRALVAQRTKMVRLSTQAKNRLHAVLHRHHLLPPAGKLFEPDMHEWWLELEVSALERARIQCDLDTLVFAQGQIEHLEEVMVSLSVEDERVLLLLQLPGVGLITAFTLLAAIGDISRFPLAKHLVGYSGLGARVHDSGQTRRTGRITKAGRRDIRGAMVETAHTAVRSHPHWQAELERLEPRLGKNKAIVAIARKLLVAVWHVLSKGCADRFADPERVARKLLDHAYRLGPTRRPQGQTAAQYVRQQLDRLGLGAELAAIPLGKTRRIVLPPSQLGANAN

SEQ ID NO: 156137 - protein, 320 aa, unidentified
MTIVTSQTVIGVDVAKAELVVYRADREEIQTVINDKSSIKRWLRSLPSGSLIALEATNIYHLQTVELAYAMGHTLYVIDGYRLSNYRKGTGGRSKTDMSDARLLARYLTNEIDELRPWNPPPKGYRELQGLLRKRAVLVRLRVTLSQSWAEEPLLKRELKHLLLSIGKLDRTIQKKLHNILAEANLLGQVDRCQAIEGIGFLSAAALATAFSRGDFKSSDAFIAFLGLDLRVKDSGQKVGRRRLTKRGDSENRRLLHNAAMAASRSESWKPFYESYLARGLKATQVLVILARKLARVAFALMKHQSKYQPGRPGESCLAT

SEQ ID NO: 156138 - protein, 319 aa, unidentified
MAEAAYVGIDVSKAELVVAVRPSGERMTLANDRAGIKRLVGRLDELKPQLVVVEATGGLQRQLVAALWLAGIAVAAVNPSWVRNFAKGHGVRAKTDRKDAELLALFAERERPEPRPPADAETQALQELVMRREQLLEMLVAEKQRLARASNAMRKELRHHIAYLEGRIKEAEEDIDKTVRRSDAWRRKSEIVRSVPGFGKAFCAMVLAKVPELGTLNRKQIGALVGVAPMPDDSGSRHGRRMIAGGRFEVRNKLYMCAMVAARRNPVLKQFYERLVARGKPKKLALAAVMRKLIVTLNAMIRTNTLWRPPCPHASVGEN

SEQ ID NO: 156139 - protein, 343 aa, unidentified
MQVSTIGVDLAKNVFQVHGVDSTGKVVITRRLRRKQVIDFFGKIPRCLVGMEACGTAHHWAREVAKLGHTVRLMPPSYVKGYVKRSKNDAADAAAICEAVIRPSMRFVPIKSTDQQALLMLHRTRDLLIRQRTQLINALRAHLAEFGLVAETGREGLAQLAEIIADESNRQALPSAMKQALQAIVDQLAALELQIGALDSAIHAHHHVNDMSCRIETVPGIGVIGATAIASTVTDPSNFKSGRNFAAWIGLVPRQHSTGGKERLGGISKQGERYLRRLLVNGATAVVQHARRHPQKHPWIIRLLARKPAKLVAVAVANKMARIARAIMAKGGYYRAPELAAAT

SEQ ID NO: 156140 - protein, 345 aa, unidentified
MNTIKVTQSQGKGKSLCLGDFDHFLALDWSMKVMAIGHMRRRNKEPETFERPSDLKELKQYLATLKGRKILTIEETTTAQWLYVELIDHVDRIILCDPYHNRLLSNGPKTDKIDAGKLCLLLRAGLLKEVFHSLSGLYELRRLVSAYEDLVKAGVRVLNQKASMKQGHFESGKHAPFILEHAEKSIELYQCSKEQYERKFTEVSRRNKLVKNLMEVSGIGIIGSVKIVAIVVDARRFARAGNYLSYCGLIKHEKISGGRSYGRRGPRFNHTLKAVYKLAAMSVVSGKNNPIREYYEYLLAKGIAEHNARHAVARYIARLTYGMLKTGKRYQRYQWRNQVAGHQAA

SEQ ID NO: 156141 - protein, 399 aa, unidentified
MTTSPEVIGGADTHTDTLHVAVITTLGQHLDDHEFPTTAVGYTAAIAFLTSHGTLRRVGIEGTSSYGAGLAAACLTAGIEVVEVNSPSRGDRRRKGKSDPLDAFHAAHAVLSGRATAAPKDPSIEAIRSLHVARRSAVKARTATMQQIHTALVRAPEPVRGKYRELTDSKLVTALARCRPAAAGDPVIRSVLTALRALAERHLFLGNQIKDLDANIDELVTAANPGLRASHGVGSDTAAQLLITAGGNPERLTSEASFAARCGVAPVPASSGRTVRHRLSRGGDRHANNALYRIAVVRMSNHPPTHAYVVRQVAAGRSKPEIIRMLKRAIAREIHRHLTQATPVPAYDDLRPARQAKNITLTAAANHFGVWPIVISRIERGLQRHDQLADQYRDWLAVA

SEQ ID NO: 156142 - protein, 355 aa, unidentified
MPIVADCYRYVVGVDTHSATHSYCIIEAATAKVVDEAVFPTSAAGLARAVAWIGRRTATAAVTEILLSVEGTNSYGTRLTRALLGAGYRVADAPAPKRDRGKSKTDAIDARTAALAMVPRERDGLADARTGDLHECLKTLVAARDRMAREKTRQFNALVAMLRDHDLGIDARRKPGLPTVKQIARWRERAGDSRAEQFARAEAIQLAQRIVALQGLLAQNLASLRELVTAHAPVLLQMPGVGPVNAAIILTAWAYHGRLKSEAAFAALGGVCPIEVSSGNREHRRLNTGGDRQLNRALHSIVLTNSRSDQQTQQFIAARIAQGKHPRAIRRTLKRYTARRIYRLLTHLEVTTAAA

SEQ ID NO: 156143 - protein, 343 aa, unidentified
MGEVSTIGLDIAKSVFQVHGVDAGGAVVIRRRITRAKLLEFFAALPPCLVGIEACPTAHYWSRRLQALAHNVRLLPPSYVKAYLKRSKNDANDAAAICEAVTRPSMRFVATKSEQQQSGLMLHRSRQLLVCQRTMLSNAIRGHMAELGIISAKGRNGTAELLKIIANEQDDRIPEAARFSLDVLARQYVAVRAEIVAIERRIHAWHRSSEESRRLEEIPGVGPIVATALVAEVGDWKVFSSGRSLAAWIGLVPRQHSTGGKERLGRISKQGNRHLRWLLVAGAMAVIRYARQHGTKRPWLARLMDRRPIKVAAVALANKIARMAWAMMVRGERFKEPRLLPAA

SEQ ID NO: 156144 - protein, 316 aa, unidentified
MKNIRFVGLDVHAETIAVGVAEASGEVRSLGTIPNRRESVGRLIRKLGKPEQLRVCYEAGPTGYVLYWQLSELGVKCEVVAPTLVPVKAGDRVKTDRRDAEKLARCYRSGDLTAVWVPDAAHEALRDLVRARLAGKRDQLRARNRLSKFLLRHGRRAPEGASAWRTKYLMWVKSLRFEQTAQQLTLEDYLHEVEHAAERIARLERSIDAAIEILPVKMRAVIEALQSLRGIAQISAVSIMAELGEVSRFEHARQLMGYSGAVSWEDSSGERVHRGNISKAGNAHLRRIVVEAAWSYRHRPATAKPLPHVSGAAARG

SEQ ID NO: 156145 - protein, 326 aa, unidentified
MMMIGIDVSKAKLDCVWLRDPVNLKIKSKVFPNTPMGHQSLLVWLDKQTGGIPAELHCVMEATGIYHEGLAYALHEAGVQVSVVNPAQMRDYAKSLGTRTKTDKQDSLVIARYGVAQQPRLWQPEPPEVRRLKALIARYEAVKQDIQRELNRLEKAQISQTSEAVITSIETVHQQLDEEKTRLKRLLDEHIDQHPGLKQDQALLESIPGVGPVVSQQMVAVLRSRSFDTASQCAAFLGLVPIQHESGSSVRGRTHLSKAGNAQLRAKLYMAAIVAIRHNPDIKRQYERLLRHGKSKMSALGAAMRKLVQICFGVLKHQTPYLPQAT

SEQ ID NO: 156146 - protein, 346 aa, unidentified
MMIIGCDFHPSWQQVSWLDTETGETGEHKLVQASGDAERFYRQLSAPALIGMEATGNSHWLVDLLAELGHELWIGDAAQIRASYVRQQKTDKRDAAHILKLLVEGRFPRIWMPSSAVRDLRQLLLHRYKLVIIRARVKNELQHLCLNKGVQRKHKLWSKAGQQVLRELPLKLWAGRRREDLLELMAMLDRQIDPLDEAVKAEAQRDKMALLLQTQPGVGPITALAYVLTMGDVGRFPRGKQVASYLGLIPREHSSGGRQHLGAISKQGNRMLRMLLVEAAQTAVRLDPEFRKAYLHRCHQKPKAVAKVAAARKLAVRLYWMLRTQKPYPEVVRIESSPRVPLVGAS

SEQ ID NO: 156147 - protein, 349 aa, unidentified
MKATTIGFDLAKTEFQVHGVDAAGKAVVRKQLRRAQVLPFFARLSPCTIGIEACGSAHHWARKLTELGHTVKLMAPHFVKPYVKANKTDAADAEAICEAVARPNMRFVPVKSVEQQAILAVHRVRSGLVAERTAQLNRLRSLLAEFGLIAPRGRRALMERLPVLFADETLPGVARTLFERQSMRIRQLEADISVEEAVILNWHRNNELSKRLDAVAGVGPITATAMVASFGDGREFDNGRQMAACVGVVPRQHSSGGKTRLLGISKRGDGYLRMLLIHGARAVIRTLECRAKGGVNPTDQWLVKLLARRNPNVAAVALANKTVRVIWALLAHDRTYDRNWSGQRAVATA

SEQ ID NO: 156148 - protein, 352 aa, unidentified
MEKNNKLDFGGQHIYVGMDVHKKSWSVSIHTEQFEHKTFTQPPEVEKLTYYLERTFPGATYHTVYEAGFSGFWLHDKLRAKGIDCMVVNPADVPTKDKERAGKRDRVDCRKLARGLRNGEINGIYVPPRVKVEDRTLVRTRQSMVRKQTRCKNQITSILFFYGIVIPEEGRWSRRFINWIESIRMERASGDFALKAHLEELKHLRQIIANLNKAILSLSRDEEYRADVLLLKSVPGISTLTAMILLTELADFSRFSSLDKLASYAGLVPDIRSSGETEYAAGITFRRNAALRALLIESSWVAVRKDPALTMAFNKLSVRMKKTKAIVHVARKLLNRIRFVLKNRQQYVPAVV

SEQ ID NO: 156149 - protein, 356 aa, unidentified
MSQHHHDVTAGIDIGDRYSHLCLLDTESGEVIEEGRILTNHSAFEKRFSGSKPMRIAIETGTHSPWISRMLQECGHDVLVANARKVRLIYGEGRKNDKIDAEKLARLARLDPKLLAPVKHRGEASQAHLALLRSRDALVSARTKLVNHVRGAVKSFGARLPKCTAESFHNRVAEHLPQELVPALGPVLETIASLTEHIREYDRRLESIAKEIYPETNLLRQVRGVGVLSALAFVLTLEDPSRFAKSREVGAYLGLVPATEQSGKSDPEKHISKHGNKMMRKLLVSSAHYILGPCGEDCDLRRHGEKIASRGGKNSKKRAVVAVARKLSVLLHRLWVTAEVYDPLYNASRPRGQAAA

SEQ ID NO: 156150 - protein, 408 aa, unidentified
MSIALPNQQFVGKPYKILHNSIDSLTTAVSKIKEAEELYSLESRIFLESTGIYHYPLFCYLRDKGFNCSVINPIITKNSTNINIRKVHNDRFDSKKAALVGLKPDLKVSLMPSDLALNCRNLCREYYDLMDNRSAYVNKLQGELRMAFPQYLGIFSKVTINTSLTLLETYTSPSAFLKADKQEIIDIIKSTARFGLTYAQNKYNAIIQAATDANQFGYIIDSNIKRIRLYISFIRKYDEEINSILESLHELVDANEDSDFVKQIHLIETFKGAGFLSAVSIMGEIGDFSAFSKPKQLFAYFGLDPAVKQSGKFEGTKVQMSKRGSAIARRVIHTLTLQSISISRNREAKNPVLREYYLKKCDSKPKLVAMGAVSHKVCNMIFAILRDNKPFKIIAPQEHIKQILLNAT

SEQ ID NO: 156151 - protein, 344 aa, unidentified
MGEVTTIGLDVAKSVFQIHGVDAAGTVVVRKRISRAKVLEFFSILPSCLVGIEACPSGHHWSRELRALGHTVRLMPPSYVKAYLKRSKNDANDAAAICEAVTRPSMRFVPIKSEQQQSGLILHRSRQLLVRQRTMLSNAIRGHLAELGIISAKGRNGTSELFKIIADEKDGRIPAAARFSLDVLARQHAAIAAEIGAIEKRIHAWHRSSEESRRLEQIPGVGPIVATALVSEVGDWKEFASGRSLAAWIGLVPKQHSTGGKERLGRISKQGNRYLRWLLVTGAMAVIRYARQHGTRRLWLARIMERRPIKVAAVALANKIARMAWAMMVRAEPFKEPRLLPAAA

SEQ ID NO: 156152 - protein, 343 aa, unidentified
MKYIGLDWHKRKIFSTVLEDDGTILARNTIGTNKQDIYYYLNNIKSKDNISIAMEASYNWQYTYRIAENITDNIVLAHTSKTRIIGEAKIKTDKIDSHILAYMLKADMLPKVYVPTKLSMENKVLLRSRISLVKLRTQIRNRIHAIIDRNKDCYTGLDELTDIFGKTGLSILKNTIIADIDYRILTEYIVLIEEINRKITGIEKIISERIVTDPDIELLRTIPGIGILTAFLVKSEIDNIERFSSKEKLCSYFGLIPSTHQSGSRSYNGRITKQGNKFLRWALTEAAQIAIRHSPYFSYYYNKIKAKSGFGHATVAVARKMLEICYIILKEKRSYFERPVSFK

SEQ ID NO: 156153 - protein, 393 aa, unidentified
MKATVFVGIDVSKDSFDVSCVDEQEVVRWTFKFSMDRQGFDDFLKHLSQEQSPVIALESTGIYHVNLLTFLSKHAFDIKQVSPSLVKRFIESYSLRKTKTDAKDAHMIALYVRRNHNTLISYKPEARQGLTQLTRTREDIQRDIRKTKNHIKRLLILTFPELEKTVDVFLHSVRLLLKQYPSARIVRQCGARGVKKAFEAILSQQGRKMKLTPGSFIHMAKESIASGDEKDEKALLYHLEHLAFLEKRIMDMEKRLIDEAHKRYQKPMAILTSFKGMGNILASQFLSEVGDIHRFQNYKKLIAYAGTDPVIKESGLAKSKGGISKRGSAHLRHVGFLIARCAILHDTRFKLYYKRKKEEGMSYKMAVIATWNKMAKIIHHLLTHEIYYVPDFV

SEQ ID NO: 156154 - protein, 316 aa, unidentified
MIHLPVPIETALGLDVAQDSVTLYDLVSSRCLTVPNTHAALTAALQPFQDRQLAVCEATGGHEAVLLSVLLELGIPAHRADGGKISAFARSLHLAKTDRIDARSLALYGRERGAILPRWSPPPACQQELTALVRRRASLVAARKSERNRAKAPGAEAIAASLARTLAFLDSEIKDIETAIFRLIAATPELAQRNAVLINLPGIGKIVAAGLLALLPEMGRLSRRQAASLAGVAPHPDQTGTTRNRGRTKGGRRMLRPVLFIAALTAVRGDNPFAEFYHRLLAARKPKRLALVAVMRKLLVVANARLVELKSFNQCN

SEQ ID NO: 156155 - protein, 355 aa, unidentified
MERYLGLDVHAASSTLAVISEAGRQLQTHVLETNGRALVEAVRLIPGRKHLVFEEGAQSAWLYEILSPHVDEAVVAGVTKSRGQKDDRRDAYGLAEKLRTGTLDKRIFKAPRQFAMLRELARTHQAIGRDLVRVQLRLKSVYRSRGIGTPGRTVYGKTHREQWQQQLPATARTTATRLYEQIDFLVALKEGAEQDLIHESRKHSIARVLETTPGLGPIRVARLLPIVVTPHRFRTRQQFWSYCGLAIVMRSSSDWIRTPDGHWMRAQVQQTRGLTRQHNHALKDLFKGAATTIITQALDDPLYHDYERITEAGTKPNLAKLTLARKVASTALALWKKEEPYRPKHRTALETNRGG

SEQ ID NO: 156156 - protein, 413 aa, unidentified
MSFAPATSPARVCAGLDWASVDHAVCILDPDGHILERFFVAHDAAGLRTLVRRLLKAGVDEVGIERGDGPVVDALLQAGLTVLVIAPGQVKNLRSRYGSAGNKDDRFDAYVLADVIRTDRVRLRPLVRDSAATTAMRTTVRARRDLVEHRVAAANQLRAHLQLVFPGAASLFSEIDTAISLSFLDRFTTQTQADWLSPKRLGTWLGSVSYSGRTDPETLHARLLAAPRGTTGADTEVHAATTNAYVALLRVLNSQIAVLEDNLAAQLTTHPDTHVFTSLPRAKTLRVARLIGEIGDARGKFPTADSLAALAGVAPSTRQSGKVKAVTFRWSADHQLRDALCDFAGDCRRANPWAEDLYQRARSRGHDHPHAVRILGRAWANIIWRCWQDGVAYDPNRHNALQRVLNEQVPKAA

SEQ ID NO: 156157 - protein, 349 aa, unidentified
MDKITAVGLDLAKQIIQVHAIDVTGRVVLRKVVRRERLLSLLAQFPRCVVGMEACSGAHHWARELTQLGHDTRIMAAEFVRPFRKSLAAKNDANDAEAVCTAMLQPNMRFVTNKSVEQQALLCLHRVRQGMIEERTASINRLRGLLAEFGQVAPQSAPALQRALSVLLAAEDARLPALVRRCTQDLREHVRTVEGRIAALDREIAQHAQGSESARRIAALCGVGPNTASAVVATVGNARDYRNGRQFAAWLGLVPKQYSSAGKTKLGRITKRGDAYLRTLLIQGARSALQAALRRAPAKRDRLGAWIVQLAQRVGYHKTLVAIANKHARIIWALLAHDAAFDRAYAGTQ

SEQ ID NO: 156158 - protein, 328 aa, unidentified
MNSICLSTEQVILPVLGLDVAKKSIQAELRIAGKNVRFGFANNPKGFAQLARILDQHNAPKIWAGLEATGPYSHALALWLHARAHRVSVLNPRRVKQYARSAGNRNKTDRLDAAVVADFLCAHRPAAWRPPLQELVQLRALVRRREELSLMLQAEKNRLEGVASQVRSSLERTIVTLCAEKARVEKLIGQQIRSHKQLCRDHQLLCTIKGIGSLTAAILLAEMAGPGQVQRARQAAAHAGLVPRHEESGTSVRRNRGIGKEGNRYLRKALYMPALVAIKYNAPLRYFASRLRAAGKPKMKIVCAVMRKLIHIAFGILKHQQPFNPSLA

SEQ ID NO: 156159 - protein, 318 aa, unidentified
MMPQVDEIVGIDVSKRKLDWCIRGVANGIVVNTPGDCEALAEMLVGRGVTVAVMEASGGYERTAAAAMRNSGILARVVDPKRVRKFADAAGKHAKTDRIDAEMIAWYGATFPSDQQTLEDVDRAPLAALVGAREDLKDMRTQCLNRGEHGQTGLAEQVRKDLIEHLDQAMAKLDAAIAAEIEAQPRFSEDAAILTSTPGISLQATAGALAWLPELGQLKHEKIGALVGVVPYDDRSAGRDGARHIAGGRHRLRRLLYMATLGAATQHNPVLKAYYQRLRAKGKPAKVAIIACMHKLLIILNTMMAKRQHWHTPEPAVA

SEQ ID NO: 156160 - protein, 353 aa, unidentified
MSHLELTAGIDLGDRHSHLCLLGTESGEVIEQSRISTNPKAFEKRFRGCQQMRVAIEAGTHSPWVSRLLEECGHDVLVANARKLRLIYAEGRKTDKLDAEKLARLARIDPKLLAPLKHRGEASQAHLTLIHSRESLVGTRTKLVNHVRAMVKSLGYRLPACSTRTFHRRVAQHLPEPLRPALGPVLEIIASLSAQIREYDAKLEAVAKELYPETRLLRQVKGVGLLTALAFILTIEDPSRFEVSRTVGAYLGLVPSKDQSGGYNPQQHISKRGDELLRKLLVSCAHYVLGPFGQDSDLRRHGLKIAGRGGKNAKKRAVVAVARKLSVLLHRLWVTGEDYEPLYNANHFGGQAA

SEQ ID NO: 156161 - protein, 403 aa, unidentified
MVKENFIYVGIDLHKETHTAVMIDCYNQKLGEITFPNRPAAFPKLVTKVKKCNTDGKEVVYGLENAYGYGRALAVWLIDKGYLVKDVNTAISHRQAKHRGAMYRKSDSDDAKAIALATLNMLDKLPDACPNDAYWSLGQLVHRRDNIMKQRTRLVNQLHEQLCIAYPSYKQFFNDISRPTALYFWEHYPSRKYLKGKSVEDLRAELVPVSHNKCSTKTCEKILDAVASDKVKNNAYQDARDMVTLSIVSDLQHYDSQLTEVDKMLGCTLTTIPGVNVITAVKILSEIGDIERFANANKLAQFAGIAPLHLSSSGKGKDFATKQGNRRLQATIYFLAVQMIQVSSKGTPRHPAFRAYYEKRKAEGKTSQQALICISRRLISIIYGMLKNGTEYRMPVVESAGEK

SEQ ID NO: 156162 - protein, 333 aa, unidentified
MDREYIGVDLHKAFFQACALTASGERLWEGRFPRTAEGVTRFIARGVGAAQAVAVEASGPTWAFVDALQPTGARICVVDPRKTKLKAGFAAKTDRLDARRLADALRRESVVSIYVPPPAIRQLREVCRGRHQLVRLRTRLAQMIRALLLRCDAGEPPGTRLYAPRAQAWLATVQLPPDAARTLQRLVRLYREIHTDAQAADAEVRQLAARDPIATALEGMVGVGPVLAVTVRAEIGDITRFPRGAALACYAGLVPRVDSSADRCYRGRITRDGSPWLRWALVEMARHAIRRPDAVGRWARRLAVRKGLAKARVGLARVLCDDIVTTWGKIATR

SEQ ID NO: 156163 - protein, 397 aa, unidentified
MYIVGIDIAKRKHEAAVIDGEGAVIIKPFSFTNNCSGYNRLLAMLVKAKLPLDEVSFAMEATGHYWLALFTRLQKEGFRVQVINPVQTNSIRSFYIRQAKTDPRDALLIAEVIRFGHFSESTLHPENIYELRELCRGRHAIVSMQADVKRKVVALLDQVFPEYEAAFTNLFSDTSMAILQTCPTPKELSEMPLEELCHLIEVSSRKRFRMAKAQELQALARGSFGFAMAGDVFSTMIRLYAKHLDFLKQQVREMDRKIAEIMKTLDTPITTITGIGPTLGAYILSEIGDISRFSSAAKLAAYAGIDPTMRQSGEYNGVRNRMSKRGSPYLRHAIWLAASSAVLHDPALKLYFQKKRDEGKPYMASVGHACRKMVSIIYAVMRDNKAYTPCIPNEISA

SEQ ID NO: 156164 - protein, 408 aa, unidentified
MTVVGIDVSKGKSMVAAMKPGGELVAAPYEVRHSDIELSHLALDVLCMEPDTRVVMEATGRYHEPVAALLHSEEIFVSILNPLLIKQSGAGSLRKVKSDPKDALKIAKYGLDNWSTLREYTPMEAIRQQLKLCARQCDLYNKNIVMLTNNLISLSDKTFPRVNELFSSPEKADGHLKWVDFYRSFWHCDCINRMSPDAFEERYKKWCKRKGYHFSTDAADALYAASCGSYTTLPRDNNAKLLVTVAADQLIALRENQSKLEAEMLNLCKQLPEYETVMAMYGVGKSTGPHLMAELGDVRRFPHRSSIVAFAGVDPGVVGSGKMQLSSVTTSKRGSPQLRKALFQVVSTYVKCKPENEAVYQFYAKKRDEGKPFFVCTTAAANKFLRIYYARVKEYLNAAESATQVEEG

SEQ ID NO: 156165 - protein, 349 aa, unidentified
MGEVSTIGVDIAKSVFQIHGVDAGGTVVIRRRVGRARVLEFFADLPPCLVGMEACATAHQWARELKKLGHDTRLMPPTYVKAYVKRGKNDAADAAAICEAVTRPSMRFVPIKNVEQQSVLMLHRTRDLLIRQRTQLINALRAHLAELGLVAAKGREGVHQLVTVVTECGGERLPSNARFACQAIVTQLHAVQIEISGLDKRITQTHRVNADSKRLDTIPGFGVILSTAVVATMTDPKAFKTGREFAAWIGLVPRQNSTGGKDRLGSISKQGDRYLRRLLVVAATSVINSARARPYKYPWVIELLGRRPTKVVAVALANKMARIAWAVLAKGEPYRAPTRSSNAVVPAAA

SEQ ID NO: 156166 - protein, 453 aa, unidentified
MSTQLSRGIRTSRSDERDLIGALNKHRVCPVRRPDWWCTPITRKEGNYIMTKNDLVVIGGVDTHKNVHVAAVIDDRGKILDTSQFATTSAGYRQLLKWLRSFGELEKVGVEGTGSYGAGLHSFLASEGVEVLEVNRPNRQMRRRRGKSDTVDAEAAARAALNGEATVVPKSHDGIVESIRALRVAFTSARNSRTRVALQIRDLIVTAPAQLRTEIEPLCTAQRVTRCARYRPGDPTNPREATKLALRSLSRRYEALSEEMDELSVVLDQLTYKANPALRSARGVGVDVAAILLLAAGDNPERLRNESAFAALCGVSPVQASSGMVVRHRLNRSGNRQANNALWRIAVVRITHDEETKIYAARRLAEGKTKREIIRCLKRHIAREMFAHLTKPGVVPVGTELRTARNAAKISLTTASTELGTYALRISRLERGLDHDREFAEQYQAWLAQKQAA

SEQ ID NO: 156167 - protein, 405 aa, unidentified
MRYYVGVDWADQTHAVWVVDESGTKIAARAVSHTAEGLGEWGRELDEWRAQGIDLWAAIERPDGRVVDVLLDHGVVVYPVNPKALDRARDRFRQSGAKSDPFDARVLADFLRTDHAHLRALQPSSEAAQELKLLTEDCQRHIRQQTRLVNQLTATLKAYYPRALEVAEVTSALAREFLPAYPTPEALTALTERQWQRWARAHRLPEARAGELWAVLRPPQLPVPAHVVRAKARLMQTLMEQLRPVVAAVAQYRKAIDDFFARMPAAQWARTLPIGKHGITAPTLWARLGDAPGRWESFRHLQAHAGTVPVTKRSGKQQRVVQFRFACDKALRYVVDQVAYLSLLSSAWARPYYDQQRARGHSHRQALRALGAKWLKIIFIMWQRQVPYDEQYHLATMTRQQLGRR

SEQ ID NO: 156168 - protein, 337 aa, unidentified
MSVYVGIDVHRKRSQVAVVTEDGTVQLNKNVVNGSEPFLRLIGDLPSGTPVAFEAAFGWSWLAELLEDYGFEAHLVHPLRCKAIASARLKNDKVDAAILAQLLRADLLPEAWLAPPRVRQLRALLRHRASLVRLGTQLRNRIHAVAADHGYDRSASYWTGPGRGWLAELDLPAASREIVGDCLAVIDGLAPVIDRIDGELHACARADPRVKVLRTLPGVGEFTALVMLAEIGDITRFGSARKLASWAGLTPTVRGSDLKVRHGHISKQGSAWLRWVMNQAAQTAKRSPEFAASYAAIAKRRGKKIATIAVARKLLTRAWHLLNEMQATDTNAPLRRP

SEQ ID NO: 156169 - protein, 344 aa, unidentified
MDYFAGLDVSVKDTSICIVDDAGRIVREVKVASEPQALLAVLKIPAYRFKRIGLEAGPLSQWLYSALAEAELPVVCVETRHMQAVLKAQINKTDRNDARGMAQMMRVGLYRPVHVKTLRSQKLRMLLTHRQLLQSKAIAIENDLRGTLRNFGLKVGMVGKVKFEARIKELVENQPDLAELVEPLLIVLRALREQIVVLHRRLLAIVRDDEVCRRLMTIPGVGPVVALTYRASVDVPARFRKSKAVGAVFGLTCSKYQSGEINRSGRISRCGDEMMRVMLYEAAQSMLRSKKWSWLKAWAMQIARRRGIKKAIVALARRLAVIMHRIWADGTEFRWAREQALAAA

SEQ ID NO: 156170 - protein, 345 aa, unidentified
MNKQVSTPQAMVFCGIDVSAASLAVALIAPDGSLAQREFSNNASGHEALLVWLKKRNSPVRVSLEATGIYSLDLALALDAEACVELMVLNPKLVNRFQQTVCRSKTDAADAMVLAEYSQRMPFCRWQRPAASHLALRTVSRYIGSLVVEQAALKNRLCSAESTATTPRAVRVDLKRSLAAIERRVKRLRVEALKLVESEVELRERYQLLTTVPGIAAVSALTMLSELILLAPGMTVRQWVASSGLDPAHQQSGTSLNKPSRISRAGNRRLRAALYMSALSAARYDRHLAAFYRALRARHKTGLQALMAVARKMLHAIYGIFKNGIPYDGRRLFPSIQTEVESIAG

SEQ ID NO: 156171 - protein, 436 aa, unidentified
MTSHCRSCNYKISGGVLLAFKIFRFNCCGLDVHKTWIFACIGLTDANGRTEYKEKRFSSFSRGLRDLAAWLASYNCTDVCMESAGKYWIPVFNVLEKTCNVILAHPKYTKPQKGNKTDRKDAKWICDLFMCDMIKPSFIPPAEIRHLRDLVRYRFKLTNMLTGEKNRAQNCLTVSNLKLDDVFSDVFGKSSRSITEYILAHPGETFDVTPFVDRRCKTPIEEIQAAVDGAVSPEQAIKLRQCLDHIDELEKHKAEMEREILRVSDPYLDALELIRTVPGFDKNPFTAIQVLSEIGGDMSVFPTDQHLVSWAGCCPRNDQSNFKIKSTRISRAGSYLKPVLVQVANALIKSKKHLEITERYRRIKSHRGHKKAIIAICRMLLTAIWHILTDLKPYTAEGYLAPRPVKTEKILTTSQALNLLKLRGYVIKDDLPDTAS

SEQ ID NO: 156172 - protein, 372 aa, unidentified
MRVVGLDIHRVFAEAVMLENGAVRRLGRIGMTRDPLTAFAKTLTHDDHIVVEATGNASAVAEVIRPHVGRVVIANPRQVRLIAEARIKTDVIDATVLARLYASGFLPEVWIPDEATLALRRQVTRRTQIVRQRTRLKTMVQSILHSHLVPPCPHADLFGPRGRTWLLAQPLPGDESDAVARHLREYDRLSEDVKVVERELAREARANANVTRLMTIPGIDLVVAVGLIAAIGPVARFAGPDRLVAYLGLNPSVHQSGSCKPRHGRITKQGRSHARTMLVEAAWQAVRGPGPQRAFFQRVSARRGPHVAAVPVARKLAVIIWHLLTRGEDYAWVRPALHAKKLRELELRSGEPAGRGQRGTGYRRGKRTRLRG

SEQ ID NO: 156173 - protein, 385 aa, unidentified
MNRIIKIGMDVHSKTFNLCAIEANIAGEDKILGSTQVTADYHEVVKFIEGLKKKLNTINPVDTFDIECGYEAGCLGFSLRNQLTAMHIKCHILAPSTILQPNGKRVKTDARDAEWIAKQLAWGSCTFVHIPTEKDAGIKEYLRMRDDHKSDLKKNKQRINALCLRNGYVYSGTKWTARHWEWLKKLELLEFVRETLDEYMATYQLQQSSIERFDARIEELAADGEYAESVKKLGCFLGIKTHTALSVIVETSDFSRFAKGSTYAAYLGLAPGESSSGEHICRTGITKAGNCHLRRLLVESAAGICKGKIGAKSKALKARQSGNTSEVIAYADRANIRLRSKYYHMIRNGKKRNVAVTAIARELACFIWGMMTGNTLPRNDLRVVA

SEQ ID NO: 156174 - protein, 335 aa, unidentified
MLIIGCDLHTRFQQIAYMDMTTGEIVTRPLEHENCEARKFYAGLPEKARVGIEATGCTQWFERLLAELGHELWVGDAGKIRAGVVRRQKTDTRDAEHLLDLLLTNRFPRLWIPTPEERDVRQLLQHRSKLVSMRTSVKNQLHYLAMNQGVCRKRQLWTKRGRAELLALNLGPWASRRRQELLELLDRLDPRIEELDEVVKAEAERRPEVVNLMQQKGVGPVVGLAFALTLGPVERFANSRKVVSYLGLNPREYSSGGHQRLGPISKQGNEMLRWLLVEAGQSAAQYDPELRRKYQRLKFRRGANVAKVAMARQLAVRLYWRLRSAGCGTAGSHAK

SEQ ID NO: 156175 - protein, 384 aa, unidentified
MNKHSILFIGLDTHKEFNEVAYIEEHRGAKPVHLGRFSSSKVAVQKLVRQFESKYPGATLHFVYEAGPCGYWIYRLITSLGHCCYVVAPSLIPKKPGEKIKTDKRDALKLAKLLKSEDLTPIYVPEPEDEAVRDLSRAREVAMKDLKDAKYQLKALLLRNNINYRGTANWSQKHLRWLTELVLPHPAQHIVLQEFLHTINERISRIERLDNELTHHVHQWRYYPVVKAIQAMRGVRLLVATGVVAELGDLSRFDHPRKLMSYLGLVPSEHSSGGKRHIGAITKCGNGRARRLLVEGAHTYRYAANISTDMQKRQEGLPKDIIDIAWKAQLRLCKRYKKMIAKGKHYNLVVTAIAREMIAYIWAIAKEVVLTPVNTKLRLARVSA

SEQ ID NO: 156176 - protein, 410 aa, unidentified
MTGFDLLSFALFIGLDVGKTEHHATALSRSGEKVYDKALPNDETRLCALLAELTTAHGPALLVVDQPATIGALPVAVAQQADNVEVAYLPGLTMRRMADLHAGSAKTDARDAFIIAETSRTMPSALRQIAASDEQIAELAVLSGFDDDLLGQTTAARNRLRGLLTQIHPGLERALGSHLHHYGVLDALVTWPTPQKLKTAGRGHVRNRIKKHNPRLAERITEAIFDALDAQTVVVAGTGAAATIVPILAGQLKDLYSQRANVLEQVDALVEAHPLHQVLTSMPGVGVRTAARILTEVVGKNFKTAGHLASYAGIAPTTRRSGTSIRGEFANRGGNKRLKSTLFNSAFASLHHGPSRAYYDKKRAAGKTHKQAVIALARRRLDTLYALLRDGTFYQEPDNARGSSGHALAA

SEQ ID NO: 156177 - protein, 347 aa, unidentified
MVAILPHHWSVGIDLHKDTLTACVYCSCCGEIRFQKLVCKCRKQIAEFFGSLPRPHVVAIEAVGFYRWLWEMLEPLVDELVLADATQARALAGRRLKTDREDAQNIAELLACGRLPLAYAPPFEVQVLRDCSRQRNAFSRQHAHVLNCAKSVMNANNRPGPARMDSAALIRYLQAFEQKLPERHGRYLWQCVDQLVLIERQLAQLERELERLLAQPSFAPAAAILNSFPGVGLVTCATVLAEVGDFSRFTYRKAISRYGGFDPRTFDSAGKQRSGHISKRGPSNLRWVLGQAAWSAVRLDPHVKRIWLRISRKAGKKAATVAIARRLLLWMWRAVRTGQPYRAPIAA

SEQ ID NO: 156178 - protein, 346 aa, unidentified
MKEKNNQMLKQNVGVDLDKDKFEAAFFVIHAHMDTSVVATRKYENREQGIANFITWLNKHRREDLSVHITMEATGVYYELLAYRLVEKQFPVHVMLPNKAKKFAQSLDMKSKTDKLDAKALGKMGIERKLRPWQPASKNLRKLRFLTRERESLINEKTRASNSLHALKHSHEAPEKSIARYEAQIEFFEERIKEVETDIHSLIQKDEILEQKVQRIVTTPGLNINTVAILIAETNGFAAINNIKQLISYAGYDPRIQESGQWKGHSKISKQGNSHIRRALYFPALSFKQHSQWHGKFFERLKTRKEKGMVAAVALQRKLLILAYVLWKNDDVFRPQYAQKMTSGIG

SEQ ID NO: 156179 - protein, 355 aa, unidentified
MSQEKYIGMDVHQATVSVAVVDSGGKLIMECILETKAGTMVEFIKGLRGTLSVTFEEGTCAAWLHDLLKPHVSRLVVCDPRKNALLKDGSKSDRIDARKLAELLRGNQLTPVYHGDHGLRTLKELGRSYLTITGDLTRVMSRIKALYRSWAIPCSGTTVYAARHRSEWLAKIPQPGVRLRAERFYQQLDLLRPLHQQARCDFVVESHKHPAVKLLRQIPFIGPIRAALLVALLQTPHRFRTKRQLWAYSGFAVETHDSGEYRYVRGKLLRNRERISVRGLNDNYNHDLKNLFKSTAISASTRPGPLRDFYVALLAKGMRPTMARLTLARKIAAITLTMWKKGVDFDAKQLDQQAV

SEQ ID NO: 156180 - protein, 466 aa, unidentified
MENNYILYVGMDSSKGKADAAILKVSDRRSVKPKFLRKKLSFKFVKSEVTSFLETVRSYSDDNCTSICFALEVTGIYSTNVYNFIKDNLNDNESIKFLNTDFVNQWRNAHNIAKSDPLDAQTISTIIGTDSDVQYVNDNVFKNKNGYQDLKALVHRHYQIKKIYSQEINRLIAQCDCLFPELQYVFEPKSAAFIAVLSSYPTTHDIINASRLEVFNVVYEATKHRCSMDKIDKLFDLCHDTLVPDNISSYGRSIILDLVENIKNIKGQLKMIERYIRDVASLNPAYKLLLTITGCGPLTAATVIAETGDIKRFKNADCFVSYSGTNPRNKRSGTSVETMGKISKRGSRYLRHAIYMIAEFARRHNPVLKHQFERIKNGNKKRHKLANIAIANKIARYIYSIMKNESGFVILHEHIMRLPEETQNTFFNSISLDFPKNTRKQIYQYSDINGEVHKFVYTKLEETMII

SEQ ID NO: 156181 - protein, 311 aa, unidentified
MPAKPPPTYVGLDISKDQLDYCLSETAEGRCAYDPAGRAELIQKVRSVPRARVVCEASGGYEKLIVAELLQAGIEVCVVQPGRVRAFAHAEGLLVKTDRIDARLLRRFGEKIDPRLTAPTDPAAATLRELLEHRRQLTTQLAEVAGRLSLAGPTLGPLLTTQRTFLIEQIAHVEKLIDQHIDHDPNLKGKSERLQQVKGIGPVLAATVLAYVPELGQIDSAQLSALIGVAPFADESGHTSSPRHVRGGRATVRHVLYMAAVSASHSNPILTAFYQRLRANGKPAKVCLVAVMRKMACLMNRMLQEPDFVLA

SEQ ID NO: 156182 - protein, 368 aa, unidentified
MMGWMAPLRHLGAKVLVGQNQSADKEPSMNEITTVGLDLAKNVFQVHGVDAEGTTVLRKQLRRAQVLAFFSRLPRCLVGMEACATAHYWARELRTLGHEVRLMPAQYVKAYVKRNKNDAADAEAICEAVVRPTMRFVPAKTAEQQAAVLLHRGRERLVRQRTMLVNALRGHLAEFGVIAPQGLRNVGRLIAIIRDEEDARLPGLARQVLQVLAVQIEQLEAAIAALEKQLMGWHKSNPVSQRLATIPGIGPIIATAIAAMVAEPSGFRSGREFAAWLGLVPRQNSTGGKNRLGGISKRGNQYLRRLLINGASANLLRSKATNADPWVIGLRRRRPSLVVAVALANKTARIAWAVMHRQENYQRMATAA

SEQ ID NO: 156183 - protein, 352 aa, unidentified
MRTSQKTSETITPIGIDLGKNTFHLVGLDKRGAIVLQRKVSRSQLERHLSNVPRCLIGMEACSGSHHIGRRLTALGHDARLIPAQYVKPFLKGHKNDYRDAEAIAEAVQRPTMSFVAIKTPEQMDLLALHRVRSRLVGQRTGVINQIRGFLIERGIVVRQGVAPLRKALPDILSSNTDVLSPRMVSLIADLMQDWRRLDERIETVSAEIEALAQQDDSCQRLMTVPGVGPIISSAMVAAIGNGAGFKQGRDFGAWLGLVPKQESTGDRTILGKISKRGNKYLRTLFVQAAHVVLVRRPSAAMRGLWPWIEQASRRLHRNMLAIALANKLARIAWAVLARGRAYQPRIAANAA

SEQ ID NO: 156184 - protein, 343 aa, unidentified
MKLHAIGIDLGKTVFHLVGLDSSGNVIVRKRCSRVQLLKYTANLRVQRIGMEACSGSHFLPRALREQCHDARLIPAQYVKPYVKTNKSDYIDAEAIAEAVQRPTMRFVPIKTEEQLDLQTVHRVRERWVMRRTAVVNQIRGLLLERGDTLPKGRSQVDRALPDILADPALRLAGSFRVLLGQMQLELEQLSARIEQMDAVIQETAKDNEACQRLTAIPGIGPVTATALVAAIGNGAGFRRGKDLAAWVGMVPREYSTGGKQKLLGISKRGNSYLRRLFVQGARVVMQYRTKQAPGLSNWLSQLMARTHQNVAVVALANKLLRMAWAVLCKNETYRSPALATAP

SEQ ID NO: 156185 - protein, 334 aa, unidentified
MEKVTTVGIDLAKSVFSLHGVGSAGRVVLRRTVRRDQLLGAVASLSPCLIGMEACSGAHEWGRRFQEHGHTVRLMAPKFVAPYRKSGKNDGNDAEAICEAVTRPNMRFVPVKSAEQQALLAMHRVRQGFVVERTATINRLRGLLSEFGVVLALRSVTVRRQAAAAAEGLPELARRAIGDLLEQLRVLDERIGGYDREIEAQVRLSEPAQRLMKIRGIGATTALAIVATVGNAREFRNGRQFAAWIGLVPGQYSTGGKTRLGHISKRGDAYLRNLLVQGARSVLNSAAMHQDRMSRWALELQPRRGYFRTLVAIANKNARIAWALLAKNETLRPA

SEQ ID NO: 156186 - protein, 365 aa, unidentified
MKKISTARIKSQAANKKKVTIGMDLGDRTSRYCLLDEEGVVIGEASTPTTKAGIAKVFGAMARCRIALEVGGHSPWVSRQLEALGHEVIVANPRNVRLIGESTRKDDRLDARTLARLARIDPLLLSPVRHRGSEAQADLAVIRARRVLVRARTMLINAARGLTKSFGERLRKCGAGQVAPTLAAELSPEIRAAVVPLLAEVETLNQRIAAYDRQLEQLVKEHYPEVERLTQVKGVGTLIALTFVLTVDDPNRFQRSRDVGCYMGLRPGRRNSGKSEPQLHISKEGDCYMRSLLVQGAHYILGPFGVDCDLRRWGLKMSERGGKKAKKRAVVAVARKLAVLLHKLWVSGEAYDPFRNSRQLVARAA

SEQ ID NO: 156187 - protein, 381 aa, unidentified
MKTTATPNEHDTTTERVLFLAFELSEKTWKLGFTTGPGQKPRERAVAARHQARLLQEIAQAKRRFGLPDTAPVISCYEAGREGFWLHRFLQAQGITNQVVDSSAIEVNRRKRRAKSDGLDVRKLVSMLMRYEQGEREVWRVVHVPSVEAEDQRHLHRDLETLKQERASTTTRIKGLLSSQGIRLTSLSKFPEQLDALRLWDGSEIPSGLRRRLLRVWAHHQFLSAQIAALEAERRALLQSSQEAPIDKVRQLMQLKGIGINGAWLLVMEFFAWRALKNRREVGGLAGLTPTPYQSGASAREQGITKSGNRHVRWMTTELAWSWLRYQPESALSCWFRERFGSGGKRLRRIGIVAVARKLLIALWRFLNTGVLPEGAELKAA

SEQ ID NO: 156188 - protein, 413 aa, unidentified
MRLFVGDDWAEDHHDVELMDSAGRRLAKARLPEGVAGIARLHAMIGEQLGEDADEDDAGQVAIGIETDRGPWVAALIAAGYTVFAINPLQASRYRERHGVSGAKSDTADAHVLADMVRTDSHQLRPVAGDSAQAAAIKVVTRTHKTLIWERTRCTQRLRHALRDYFPAALEAFEDLDAADTLELLGRAPDPAAAAKLTTAQISAALKRARRRDIAAKAERIQAVLRAAHLGQPDIVAAAYAASVRALIAVLATLNEQVQTLQGQVEAYFGQHPDAEILLSQPGLGPVLGARVLAESGDDPGRYISAKARKNYAGTSPITRASGKKKTVMARHVHNDRLIDALISQAFTALRTSPGARACYDHQRARGAGHNPALRQLANRLTGILHGCLKTRTLYDEATAWPQYTATSEKTAA

SEQ ID NO: 156189 - protein, 414 aa, unidentified
MIIAEEPTGARVCAGVDWAKDDHAVCIVGAEGEALQRFMVTHDRAGLTNMVHRLLRAGVDEVGIERPDGPIVDALLAAGLTVLVIPPAQVKNLRSRYGSAGNKDDRFDAYVLADVVRTDRRRLRPFERDTVATTALRTTVRARRDLVIHRVAAANQLRAHLQIVFPAAAGLFDSIDSEVSLQFLERFTTQGQADWLSVKRLSSWLASIGYSGGTDPGVIYARITAAPRGTIGADAATHAVMTHAYVAVLRTLNTQISTLAASIAEQLDVHPDAKIFTSLPRSGSVRAARLLAEIGDARGRFPTASSLACLAGVAPSTRQSGKVKAVTFRWGADKELRDALCDFAGDSRHSNPWAADLYAKARARKCDHPHAVRILARAWVNVIWRCWQDHTVYNPADHGALQRILNQDQQPAAA

SEQ ID NO: 156190 - protein, 356 aa, unidentified
MSYDVKYIGMDVHKEALVIAVLNEGGKLVMESVIETKASSILQFIHGLRGELHVTWEEGTWAAWLYDLLQPQVQHIVVCNPRRNALLKEGSKSDKVDARKLADLLRTGMLRPVYHGENGLRTLRELGRSYQTISKDLTRVMNRLEALYRGWGIPCAGTQVYAARSREEWLSKIPQAGVRRRAELLYQQLDGLQALRRNVRPEFLAESRKHKAAKLLRQIPCIGPIRAARLIALMQTPHRFRSKRQLWTYSGLGIETHDSAQFRFVSGQLQRAKKPQQIRGLNRNHNHEMKEIFKSAATRASCGRGPFHDFYAGLLAKGMKPEMARLTLARKIAAITLTLWKKEERFDAEQLKTQAA

SEQ ID NO: 156191 - protein, 366 aa, unidentified
MKKISTVPIFESEIFKEQRLTIGMDLGDRWSCYCILDEAGRILLEQKVATTPEAMKQIFEKIPRSLIAMETGTHSPWVSRLLTELEYKVIVAHAQKVQLITKSNRKDDRHDARTLARLARIDPELLGPVRHRSAQAQIHLTVIRAQAELVSVRTALVNAARGLAKSYGQRLPKCGTQQVSRQLGAGLRAELREILEPLLKEIESLNERIKEYEVRMEKIAKESYPHVELLKQVKGVGTQIALTYVLTLDDPQRFPKSREVGCFLGLRPGRRDSGESQPQMRISKEGDRYLRTMLVQGAHYILGPFGADSDLRRWGLKLAARGGANAKKRAVVAVARKLAVLLHRLWVSGEVYEPLRNSQKAMRAVA

SEQ ID NO: 156192 - protein, 438 aa, unidentified
MSNKVIFNLDELFISVGIDVGADFSWMSIALPNQQFVGKPYKILHNSIDSLTTAVSKIKEAEELYSLESRIFLESTGIYHYPLFCYLRDKGFNCSVINPIITKNSTNINIRKVHNDRFDSKKAALIGLKPDLKVSLMPSDLALNCRNLCREYYDLMDNRSAYVNKLQGELRMAFPQYLGIFSKVTINTSLTLLETYTSPSAFLEADKQEIIDIIRSTARFGLTYAQNKYNAIIQAATDANQFGYIINSNIKRIRLYISFIRKYDEEINSILESLHELVDANEDADFVKQIHLIETFKGAGFLSAVSIMGEIGDFSAFSKPKQLFAYFGLDPAVKQSGKFEGTKVQMSKRGSAIARRVIHTLTLQSISISRNGEAKNSVLREYYLKKCDSKPKLVAMGAVSHKVCNIIFAILRDSKPFKIIAPQEHIKQYNTAKCDMAA

SEQ ID NO: 156193 - protein, 436 aa, unidentified
MEKMRENAAGIDIGAKKVFVSIENQEVKSFYTFTEDFELLRDYLLKHKVKTVAMEATGVYWSILYEILVEVGIDVWLVDGRETKQVPGRKTDVKDCQWIQQLHSLGLLNRCFVAEGDIKDLRYFVRLREDNIRTSSMHINHMQKSLTEMNIRLKEVISQIHGVSGMKIISAILAGERNKKVLLNMCDTRIKKNKKEEILKSLNGKYTKTGLFALQQAYNGYYFYQNQIAQCDKEIEVIMKRIGNNCNDKDLAGKRKPIRHNKPDVANLGANLVNVFEGKDASVISGITDYTWMQILAETGTDLKKWLTEKHFTSWLGLAPGQHWSGKMRRNKRKKGHPIAGQIFRKIAQSLIESKNIALGSFGRRIRAKKGPGIAIKAVARKLAILYWRVMVKGVDYAEEGIKNYEEKILAQKRKTIQRLALDLNMLVSDNQDVMV

SEQ ID NO: 156194 - protein, 262 aa, unidentified
MTVVTVGIDLAKNVFAVHGVNAAGKAVLVKPLVRRAKLLELIATLPACLIGIEACTGAHFWAREFQKMGHTVRIMAPQLVSPYRMGGRHGKNDAADAAAICEAVTRPNMRFVPIKSVEQQGQLFVHRAHQGYVSERTALINRIRGLLSELGIVLPQAFKAFLSGVAQVLEDLPGFCNQVIGDLLNELYHIEEKIKNSEKLIQQLARDNSAAQLLMQFRGIGPMTATAIVASIGNGHDFKNGRQFSAWLGLTPRQQSSGGKHG

SEQ ID NO: 156195 - protein, 386 aa, unidentified
MQASNVCTPTVGHVGTIFVAIELSQKSWLMTIHSPDRDRISRHKLTGGDHAGLLGLLETIRTRASHKLGSAPAIVSCYEAGYDGFWLHRLLTAAGIRSHVFDPASIAVEQRGRRAKTDRIDGELLLRTLMAYCRGEPRVVRIVRPPSPEQEDARRETRERDRLVQEQGGHTNRIKALLRLLGMAVGNPRRRDWLAWLMRQRDWQGQAVAPQIKAEIEREHARLMLVREQLAALEQRSAQAQPTPAAAEMARRRGILFQLKGLGPAFSGTLAAEVFYKDFDNHRQVGAYVGLAPSPWKSGGIDREQGISKAGNPRARLAAVELAWLWLRHQPNSALTHWFLARTANASKRVKRIAIVALARKLMVALWRYLTTGLVPDGAVLKPVEA

SEQ ID NO: 156196 - protein, 435 aa, unidentified
METYAGVDWASDKHDVLVADAAGEKLLAATFAHDEPGLRSLCRQLVRLNVTLVAIERPDGLLVERLLDAGLRVLALHPNQVAATRDRFRVSGGKSDRFDAFVLCELARTDHHRFRVLEPDSDQTKALRALTRAREDLVGMRTALGNQLRAELERFWPGPIGLFSDLHSQISLAFLERYPSPTDTRGLGEVRIAAFLARERYSGGQTPSQLLAKLRRAPAGRVGEHELATRRQLVLTLVSMIKLVGEQIKELERQIATHVREHPDGPIFLSFFKGSVITAAELLAEIGDCRERYPSRDALAGDAGQAAVAKESGKRKTATFRWGCNKRLRQSFHTLADSTRHWHPWAQDLYADARARGHDHPRALRTVGRAWSRILWRCWQDRVPYNPDRHHALQRHVTVTIPSSSGPRPDLAATQRMAGAAVTREGGPQGRARSA

SEQ ID NO: 156197 - protein, 345 aa, unidentified
MDHFAGLDVSVKETSVCIVDDTGKVVREVKVASEPEALLPVLTNPLYRFKRIGLEAGPLSQWLFSALAEAGLPVICVETRHMRAVLQAQINKTDRNDARGMAQMMRAGLYRPVHVKTLRSQKLRMLLTHRKLLQSKAIAIDNDLRGTLRNFGLKVGIVGAVKFETRIKELVENLSDLAILVEPLLTVRRVLREQLGILHRRLLAIVRTDDVCRRLMTVPGVGPVVALTYRATVDVPARFRTSKAVGAVFGLTPSRYQSGEINRTGAISRCGDEMMRAMLYEAAHTMLVRLAKWSWLKAWAMKIARHRGMKKAIVALARRLAVIMHRIWVDGTEFRWTREQAAAAA

SEQ ID NO: 156198 - protein, 371 aa, unidentified
MKSILSVGMDVHKNSFSLCAYDGYTGEIVSESTFASDVKLVIKFIETLKSRYENDVEIKCGYEAGCLGYSLYKSLTARGVDCIILAPTTMQVSAKNKMVKNDRMDALNIAKNLASGSYKSVYVPDEEDVEIKEYIRMIHDFKKELKRVKQEICAFVLRHGYQYDGKSKWTIRYMNWIRELEMSEIQRETLNEYIAEMENLNDKINRFMNRIDEMYQSERYHEKVSKLRCFKGIETFAAMTIQVETADFERFPSAKAYASYTGLTTGEHSSGDKNNRIGITKQGNTVIRKTLVECAQSLVKGNVYAKKSQGLKSRQKGMDVNIIAYADKATERLKKKYQKLIERNVPRNKAIVAVARELACFIWGMETGNIH

SEQ ID NO: 156199 - protein, 346 aa, unidentified
MDHVGIDLHKRDSQICWLHDTGEVREVRIRTTRERFAATFGGQAPAHILIEASTESEWVARCLEGLGHVVVVGDPNYAPMYPRRRRRQKNDQRDALALATASRTGTYRAVHRVSAAQRAVRQALTIRDTLVQTRTRGVSVVRSLVRGEGLRVASGQTEGFVGRVAAEPVPEPLATTLAPLVTLLTTLEAAIGAIETHVRTLTADDARVHRLQGVPGVGWITATAFVAAVDAAGRFADAGQLAAYLGLVPRDRSSGEGHRSGPITKTGPSRIRWLLVQAGWRVLRATTADAQPLRRWGLQVAERRGTRVAVIGLARRLARILYALLRDGTAFDPMQVAAGRAVRPAA

SEQ ID NO: 156200 - protein, 429 aa, unidentified
MRTESTPGARGPVFCGVDTHADSHWLCVLDWRGRKVLSRQFPADAAGYEALAGAIAAAGEPACVAMEGTSSYGAGLTRHLASLGMPVREALSPARTQRRRPGQGKCDESDAERAARAAMSGSRLGTPKSQDGWVDGVRCMLAARSGAVKARTSAINTARSLLTTAPEGLRSRFRGMGGPRLMEELPSVRAEGALGAALGALADLWAAARDAALDMELAIEASLEENCPALLAMYGCGPVSAAKLAVAAGDNPGRLRSEASFAAICGACPVPASSGKTVRHRLNRGGDRQANSALHEIARQRVMRDPETAEYAERARGRGKSDREVMRCLKRYVAREAYRALMRPHEIRRPEDASGLVAARRAAKVSQVRAASILGTSEKYISMLERGQRELKPIRRAYEAWVEAGLPLDWDRQAFEAERKMDSKKHLAK

SEQ ID NO: 156201 - protein, 437 aa, unidentified
MEEAEDEPLFCERAAGIDIGKQMVSVTIRVPSDTRRGGRQQETREFGTTRRQLLEMADWLRCWGVERAGMEATSDYWKPVYFLLEQQGLDLLLYQASQVKALPGRPKTDKLDSVWLAKVTERGSLAGSFVPPDDIRRLRAHTRYRRKLTQARTAEKQRAEKLLEDAHLKLSSVISDIHGVSGRAMLEAVIAGERNPRALAALARGVMRRKLALLEEALDCSFFTPEHAFVLRMMLDNIDHYTAQIAVLDERIAILCQPYQRQIDQLDAIPGFGVTTAQDLIAEIGVDMSVFPTAGHLCSWARVAPRAKESGGKRKGQSATGRGNPYIGAALGEASSSAGRTQTFLGAKLRRLCRHMPRKKAQGAVMRTQLAIAHALLSDPAAEYHELGPGYYDQQAGTRRQARGHVRSLERLGYEVTLKPLAGTDPETGEIIARAAG

SEQ ID NO: 156202 - protein, 346 aa, unidentified
MEYIALDVHKKYTWARVENTKGDRLYESRLAHAHGTIRNFVHRFSEGSPVAVETVGNWYWVVDEIEAGGGKPQLVNARLAKLMMGSVNKSDKLDAKGMNRLQRTGTLPTVWIPSSSVRDARELPRTRMVLSRQRTQLKNRVHATLGKYGYGVEGASDAFGKRGRQIVMELLNKLPPHTQQALQNVLDQLDHVAANLKAIEANMIEVFAPCPQTHWLKSLPGVGDILAVVIWTEIGTIERFSRAEQLASYCGLVPREHSSGGKIRFGAVRHDVNMYLKWAFVEAANSSILNRERCGYEHISRLYQRIKSRRGHGKAKVAVARHLSEASFWMLKKGEPYREPVSSTQR

SEQ ID NO: 156203 - protein, 361 aa, unidentified
MEEIIDRNNALYVGIDVHRYEHTAVCADRFEEEKGSLSFANTPIGIQQFINWLSAIGEPNLTKIIGVEGSNGNGRFLTESLSQDYSQIYEINPIRTKQRRNFGTRGDKSDAVDARLIIEVLTRKLDELPRITIQDRSKTMTTLEQLVIFHEDLIFQITRLKNQLHLLFHEIEPEYQSHRGSSFSVRILDVWLKKCGKKVILSDPKHIKYFMILEKIRQLRRLKRTSKRVDGEMKPLINQIKPNLLTFPGVGIVTAGKIITAVKGIDRFRLDTFIKYAGIAPVEKQSGRNKKHKQNKCGNRQLNNAIYTVALTQLRGHSKAKAYFQKKIAEGKTKKHAIRCLMKRVACIIYGLLRSRENYRG

SEQ ID NO: 156204 - protein, 364 aa, unidentified
MSTLHYVGMDVHKETIDVSMYKENDSRPYCEKRIPNRDTSIKKLFKGIMKTGSVVACYEAGCMGFTLQRTLEGMGVTAVITAPGKMPRRSSDRVKTDRRDARTLATYLRNGDIEAIRVPTEDEEVVRDYLRGREDVRLDQARTKQRLQKFLLRHGYVYESVRYWTGPHEKWLRSLEFKNPLMKETFDEYHVGIQELGGKLRMMDKRIDEIALSEPYAAKVKKLRCFKGIDFLTALTLVSEVGDFRRFKSAEAFRAFLGLVPSEYSSGGKRRQGGITKAGNTHVRRFLIESSWHYRYSLSPSKRLMERRYGQPTDVIAYADRAMKRLQHKFFKLVLRGKTSQVAVTAVARELAGFVWGMMVGCTA

SEQ ID NO: 156205 - protein, 391 aa, unidentified
MIYVGIDVAKDKHDCFITNSDGEVLFKPFTITNNLDGFNELYQKIESVTEDATKVKVGLEATGHYSYNLLGYLIDKGLAAYVINPLHTNLYRKSLSLRQTKTDKVDARTIASMLMSDVNLKSYSDISYHNEELKSLTRYRFDKVKERAKLKSSVSRLVCILFPELEKLVPTLHMASVYSMLSEFPGAKHVASAHLTRLTNLLSEASKGRYSKDTAITFREAARASIGSNMPAKSLELKHTIKLIQELDSEIDEIENEIKVIMDEINSPILSIPGINYRMGAMIIAEIGDFSRFDSPDKILAYAGFSPSTYQSGQLDGAYAHMEKRGSRYLRYALYNAAKYVCHWNPTFAGYLAKKRAEGKHYNVAISHAVKKLVRVIYHLEKTTQQYIKVA

SEQ ID NO: 156206 - protein, 342 aa, unidentified
MQAITVGLDIAKSVFQVHGVDCNGQVVIRRQLKRRYVLTFFEKLAPCLIGIEACASSHHWSRQLLALGHDVRLMPPSYVKPYVKRQKNDATDAEAICEAVSRANMRFVPTKTPEQQSGLVLHRTRHLFIRQQTSVINAIRAHCAEFGIVAPVGRQGVEELLNVTADAEDEQIPEIARACLSALGDQLHRIKAQILEFDRMIGAWHRSCEASRRLDEIPGVGPALATALVASIADPRTFRSGRDFSAWIGLVPKQSSSGGKPRLGSISKQGDRYLRGLFTAGALAVIRYAKIHGIGHRPWLTALLARRPIKVAAIALANKIARIAWAMMARGERYREPVALAA

SEQ ID NO: 156207 - protein, 414 aa, unidentified
MNGWPRSTSERRSSRWRCAPPASNPGKRRQQVRKYNTFHQTLAEMVAWLVAEGVTHVTMEATGIYWKPIFHALCAAERPMEVLLVNARHVKNVPGRKSDALDAVWLAELTECGLLRGSFIPPPQIAAIRELTRYRKKLIEQRASELQRLGKVLEDSGIKIDSVASTLTTVSAREMIEALINGERDPAVLADLARGVMRKKIPELRMACAGRFGDQHALMCTLHLEHIDHLTDMIARLDTRIDEASLPFDPQIQLLATIPGIGERAAQVIISEIGVDMTRFPTAAHLASWAGLCPGNNESAGRHRSGKTRKGNTELCAVLTECAWAAGRTSTYVGAQFRRFHRRFGKKGGRKAAIATAHTLIVIVWHVLADTTGYRDLGADYFTRRLDNPEARKRRLIRELEALGHKVTVEPAAA

SEQ ID NO: 156208 - protein, 344 aa, unidentified
MKVTTVGIDLAKNAFSVHGVNEHGRTVLRKVLKRNHVAEFFANLPACVIGMEACASVHYWARKLQAMGHTVRLIAPQFVKPYVKTNKNDAADAEAICEAVARPNMRFVPVKTIEQQSVLSLHRVRQGFVRARTAQANQIRGLLAEFGIAVPKGIGYLNRQVPELIEDAENELTGSFRLLIQRLMDHLKELDRQVRELEAQIQAWHRSDDTSRRLARVPGIGPLTASALVASVGDPKSFRNSRQLAAWLGLVPRQNSSGGKNVLLGISKRGDTYLRTLLIHGARSLLQVAKRKECKGGWLSGLLQRRNANVAAVAIANKNARIVWALLVHGREFHPDYHAPAATA

SEQ ID NO: 156209 - protein, 387 aa, unidentified
MGVIIGMDPHKRSATIEVIDDRARVLAAGRYGTDRAGYGEMLKAGRKFGDRVWAVEGCNGVGRHIAHRLVASGETVLDVPAKLSAQVRVFATGNGRKTDPVDAHSVALAALRSPALVRVEVSPDLVVLGMLADRRDELGRARTQTTNRIHRLLLELIPGGAKQYLSAAQARALLATTRPRDIVGKTRRRLAAELITELDGINRKIRACKKEITVLVEAQDSTLLQLHGIGPSSAARLLADVGNIHRFASRDHFASWNGTAPLDASSGQQLRHRLSRAGNRRINRALHIMAIAQLRTPTEGRAYYDARKAAGKTSMEAMRCLKRRLSNVVYRQMLHDQHTRQVTGPGGHSGTTLKSSVTDLTPDIGSSDKPLPGPAAPQPRTPIQAAS

SEQ ID NO: 156210 - protein, 341 aa, unidentified
MSKPDTYIGVDLHKKTCYVTVMNSGGKIKKQTEISTEAEIVSRFFKRYPDVPVAVESTMNWIPFYENLESLGCKVSLSNPLQTKAIASARIKNDKVDSKILADLLRTNLLPTAYIQPRKIRDLKELVRERAHFVQMRTQIKNKIHSVLFKTNNRHEFTNLYGKAGMKWLAELELRDIYRQELDRYLETLKHLNEQVEKISEIIETTAKLDFDCQLLMTIPGISYYSALMIKSEIGDISRFKSAAKLCSYAGLIPSTYASADKIRTGRITKRGSKWLRRTLIDAVTSGSRNHNRIGAFYKKLKKSKGTGKAKVAAGRKLCSIIYAMLTDQVPFKNFAPVKQR

SEQ ID NO: 156211 - protein, 331 aa, unidentified
MKHWLAIDVSKLTLAVVLQIEGRKRADEREFNNDAAGHARLAQWASERGAPLAQLTGVMEATGVYHEALAQWLHDRGCRVIVANPARVRDYARGIGLLHKSDKVDARALLRYGQQQADALVAWTPPPPEIRTLRALYARLAAVQEDLQREENRRRQAQTSAQPTLVIDSLNSSVAHLQQECQRLQQAIEDHFDQYPPLKAQRKLLQSIPSVGPVSGDMLLCLLLSHRFTQAREAAAFCGLIPRTCQSGTSVHRRGKLSKQGDARLRAKLYMPAVVALKHNRQLRAIYDGLLKAGKPKLSALCALMRRLVHIAFGILKHQTPYNPDLVGKVA

SEQ ID NO: 156212 - protein, 432 aa, unidentified
MSTRVLSFEDWSISTTPCLRRVRTVTSRGERVQVLGVGIDWAEEFHLVALGRPAEGVFEVARVEHTPTAVAALITRVLGLEPDPAEVRVVIETRHGLLVEALVDAGVTVLPVNPDLVARRRGPARKKDDAEDARIACLLALDRFTDLRALVPHGELAGELRAIARDDVRAARDERRLLNRLRADLIATFPAALVIAGDDLGAPVMLKLLERWPTAAELAAADRDQVEAFARAARHGWPDRFAGRVADALAAEHFQARDYLVRAKAATIRLAATQLLLIRDQRRAWQHRMGELLLGAPRYGRNKQPGDDRGPAVPGGEVYLSFPGLGDRLAARIAGEIGDAIGQFTTPNALQCYAGKAPVTRRSGKSELVVATRLACNRFLATQRHRGKTHNAALRALGNRWLEVLWHCLTRGVPYDENVHVANRDRAPSKTA

SEQ ID NO: 156213 - protein, 325 aa, unidentified
MEIKKLCCGIDVSHTTLDVCYQNNLGELFHLKVGNNNKGFAKILEHTGTGYHFVMEATGVYYIRLAFYLHQQDCQLSVVNALSIKRYIQMHLERNKNDKKDAGWICRYAIEQSPSYWEMPDSAYFESKQLYNTIREYAEQIKRFNNQLHSVRLLPVPSKATIMSLEKMKQQLEKEMKNLEENLQVILQQWQPAQLKSVSSIKGIGKRATAMLIVYTQGFKNTHNHRQLISFAGLSPTEYSSGSSIQGKPRIYKRGGKNLRDVLYMCSMNAIKTNTACKALYERLRTNGKTGKQALIAVCNKLLKQVFAVVKNNSLYQPNYCSASL

SEQ ID NO: 156214 - protein, 370 aa, unidentified
MLDTTTFVGLDVHARSIKAVSLDVMTGEVRAATFGYDAGAVAEWVRSVDPGARCVYESGVTGFDLQKRLSGLGVDCVVGAVSKMIKPSADRRRKNDRNDAEFLARMLSVGNVVEVWVPDDECEAARDLTRALEDARDDLSRSKQRLSKFLLRHGLVFDERTPTGRRKGNWTRAHWSWIESIRFAEGADNDALAYYVDAVRRAAEEKARLEGLVEAEARKPRWRRRVDSLRCLKGVDTASAADLVFEAGEFSRFRNARSFAAWVGLTPSEHSSGESDRRGAITKAGNKHLRKTLVEAAWHYMTCSGRPKDLAKGQVPDRGARRHAAKGVRRLVDRREALLARGVHGNKANVATARELACWVWAVGLMAEEA

SEQ ID NO: 156215 - protein, 339 aa, unidentified
MPRFYAGIDLAARSSWLCIVDPVGRKQLSRKTPNDPKEIARLLQPYLPELSAVVESTFNWYWMVDLLQDLGADVKLAHPLYLKAIAYAKVKTDQVDAHTLAQLLRLNYIPEAFIYPRQLRPTRDMLRRRHRLVNLRACLYRDLQLQLMKHNVTTFGRSAIKQIDGRNLRALLSHIHDRRGGVALLHLIDTLDKEITVLDQSIRASVRRHKPVVLLKTIPGVGKTVAPTIYYEVGQIHRFPSDKAFASYCRLAPTIAQSGTVTRSGKNRKQGNRHLKWAFSEAAHMAIVRYPAIRDYFNRLLKKKKKRILAKAILAHKLAVAAYHVLKEEQPYRPGILPS

SEQ ID NO: 156216 - protein, 410 aa, unidentified
MDTLIERCAGLDVHKDTVVACVRVPARGGGREQSIQTFGTTTAQLLALRDWLVAHGVTRVGMESTGVYWKPVYYVLEDALECWLLNARHLRNVPGRKTDVADAAWICQLVEHGLVRPSFVPPKPIRELRNLTRYRKAQIEERTREAQRLDKVLQDAGIKLSSVASDVLGVSGRAMLRALIAGTRDPETLAELARGTLRRKIPALRQALHGRFGPHHALLVGTILAKLEFLDEALEHLSAEIEQVIAPFAAEAALLRTIPGVDRRTAEAVVAEIGVDMSRFGAAGRLASWAGWCPGNNESAGRHGSGKTRKGSKWLHTYLTEAAKAAARTKGTYLGAQYARLRGRRGSARATVAVGHSILVAAYHILDRHEPYRELGPDYFRRRHSPEHQTRRLVRQIEALGYHVRLEEVA

SEQ ID NO: 156217 - protein, 343 aa, unidentified
MQTISTIGLDIAKSVFQVHGVDAAGQVVVRRQLRRRHVLAFFAKLPPCLVGIEACASSHHWSRELRALGHTVRLMPPAYVKPYVKRQKNDSTDAEAICEAVTRPNMRFVPTKTVEQQSCLMLHRARHLFIRQQTSVINSIRAYLAEFGIVAPVGRRGVEQLLEVVADAADDRLPEVARICLTALGSQLRALKAQILQFDRRIVAWHRSNTTSKRLDAIPGVGPALATALVASIADPKAFRSGRDFSAWVGLVPKQSSSGGKDKLGSISKQGDRYLRSLFTAGALAVIRYARIHGTDHRPWLTRLLTRRPTKVAAIALANKLARMAWAMMARNECYQEPAALAA

SEQ ID NO: 156218 - protein, 367 aa, unidentified
MSSVASQAGLIHLGMDTSKNAIVVAILLPGEEVPVTDRIANEEAAIRRLIGRFADRSVLRCWYEAGPGGYELYRLLASMGVACQVVAPSLIPKGASDKVKTDKRDSRRLARLGRAGELTAVRVPGPAEEAVRDLVRARTAVVEDRKRAQQRLTSVLMRHGRIWRGATYWTAAHRSWIAGQRFAEPALASAVGYYRATLAVREAELAAIEAELLPWAGREPLAGPVARLGCYRGIAELTALSLAAEVVDWHRFPAARAFMSFTGLVPAEYSSGERTRRGHITKAGSEPVRSALTEAAWSYRHAPAIGARLARRQAGAGPDTLARSWTAQRRLHARYVHLLHAGKAAPEAATAVARELAGFVWAEMTAA

SEQ ID NO: 156219 - protein, 358 aa, unidentified
MKKNTKLNFNGQNIYVGIDVHKKSWSVAIILNQLLIKKFSMNPSPKQLIEYLRKNYPNGEYYSVYEAGFSGFWAHRELLRLGINNIVVNPADVPTRGKERRSKTDRVDAVKLARELSVGHLTGIYVPEESIEALRVLVRLRRQLVKEQVRTKQRIKSLLMYLGKTVTDEGINDKTWSKGYIRALRYLAIEQQNAKKALDTLLDNLEYIRKQIAYIVNQLKEHISKDERARDVTALLRSVPGVGFIFSVILYTEIIDIERFGRLDELASYIGLTPAVRSSGERQITLGLVNQNNKYIRNALIEAAWVAVRKDRALQMAYGKLLKKMPKNKAIIRISKKLLNRIRSVWKYGHVYVLSVVE

SEQ ID NO: 156220 - protein, 387 aa, unidentified
MAQVNDLSRSLTAFDPISTLVVVVEMSKASWLVSGVVPGVERQPLKKLEPDATALLRLIERWRNEAVRAGRPISRIALAYEAGRDGFWLARWLIARGIEAHVIHSASVAVSRERKRAKTDRLDAAMLMRVFLGWLRGERGHCGMVAIPTMEEEDARRPSRERESLVDERSRITNRMKSALARLGIRGFKPHLRKAPERLAGLRTAEGTGLPANIIEEFRRDMARLALVREQISSIEKTRAERLERAPDTGPHAMVRLLARVIGIGIETADMLVQEILSRKLRDRRAVARYAGLTGSPDESGLKRREKGLAKAGNARVRRGLIQLAWRFLMFQKDSALAQWYRTRTEGPSGARKTTMIVALARKLLIALWRLVTTGEVPDGVELRPAA

SEQ ID NO: 156221 - protein, 348 aa, unidentified
MRIIGCDLHARQQTLAMLDTTTGEVVNLTLMHEGDKVREFYSQLPRSVLVGIEATGPMQWFLNLMEELGIECRVGHPAQIRAAEPRKQKHDRRDADLILKLLAENRFPAIWLPSKELLDLRALLLHRHQWVRIRTRIQNALQAIALANGLRRGPGLWSYDGQAKIAVLPLLPHASYRRSALQAMYRKMEEEIENLTQQVAEQADQRSGARLLMTHPGVGPVTALATEVFLGDPKRFADGKALASYVGIIPREYSSGERQRLGGVTKQGSPLLRFLWYEAGAHAVRRDPELKRFYLHKLIQKGLGKARVAVARKLGIRLWIMLRDEIDYQEFCRRGQMQQSGAACGGDA

SEQ ID NO: 156222 - protein, 421 aa, unidentified
MGGLRAKRIKMVKEGTLIATVDIGVANNTGYCTTLDGRSTKSFRFDNTKEGFEKFWCMTIASKNRFGCDEVLVGYESTGPYAEPLVHYLANKQVNIVQVNPMHTKKMKEVNDNSPLKTDDKDPRVIADIIRLGRALTIVVPEGDAASLRRLNNARERHVGEQTAFLNQLQQLVFLIFPEFKTVLKNMKGKTARYILKRYTIPERIGTLSKEVLGEEMRKRSMGKFGIKEAESLIGLARETVGIKEGIAGIFMDIRHILMQLEAEGQFISEIEAEMRATLERIPYSVRLLSIKGLGIVSVAGLIGEVGDFSKFSTQSEIMKLAGLDLYEISSRRRKGQRRISKRGRSLLRKILFYAAIQMIRKNGIMYDYYARLTNRGMERMRALIAVSRKLLRIIHAIVRDNRDYVGQYQLPERRVIKMAA

SEQ ID NO: 156223 - protein, 449 aa, unidentified
MEQPQEADDEAYERVWERVAAIDVAKATGVVCTRVPGDGPPGRRSMHVRTVSATMAAVTELGDRLRCQGIEVVTVESTSDYRRVWCVVLEAAGLKVQLVNARSVKNVPGRAKTDKKDAAWLAKLTERGMLQPSLVPPYDIRRLRDYTRLRADLVHDRSRHWQRLEKLLERALIKVSSVASTPGTQSVRAMLEALIAGERNPKALADLAIGKMRAKRGELAEALNGKFEDHHPELARMLLDQIDALTAQIDRLAARAGELIAQIPAAWGVDADGATGPGAGKDPDAAVLPAVARLDEITGCGIISAQAIIAEIGLDTTVFGTAGRLVPWAKRCPQTRQSGKKSTAGSPGKGDPWLNGPLGEIAASASRTDTFLGERYRRLAKKRGKRKALAAIARSVLVIIFHLLADPAARFHDLGPDHYDNRVSRDRKILNHVRQLQALGLNVTIEEAA

SEQ ID NO: 156224 - protein, 411 aa, unidentified
MEADASFVAAGVDTHKDVHVLCVIDALGRKVREGAFPATAAGYRDLADAIGAPGKCLVVGIEETCSFGAGLTARLAGSGFNVVEALRPKRDKRRKGASKNDFVDAERAARTAIAGDGASIPKSRDGWAETARPALRAREILVRTQMQVANAVKALINTAPEPVRGKYAKLSGKKLMNALRRRKPATGDAIRDSLMLSLSTLAATWVDVESKASELEAFVEAIVRENAPAVLEIDGCGALSAAELGLAVGDSPGRMRSEASFAVLCGASPIEASSGKTVRHSLNRGGNRRANRALHSIVISRMRSDARTSEYIAKCVPEGKSKREAMRWLKRYVAREAYRALMSPTATRHAAGPSLAARRKRAGLLRRGVAAREGIGPSVISSIETERAKHAAARDAYEAFLDGAEKLNNAG

SEQ ID NO: 156225 - protein, 367 aa, unidentified
MKNTIVHHEGAASLKVAGNKIKLSGSIIKIGLDVHARIYVAVAQYDQLLPKPARRLAPLEFVPWVEQLLRAGHTVHVVYEACGFGFGLYRELEALGVHCYVIAPRKLDEQFTRVKTDPRDATTLCQRLSRYLEGNTRELAVIRVPTEAEEQARHVSRQREQLVRHRQKLEAQGRSLLINHSLPSPAHWWKNQTWSRLSKLLPAWICVRLKVHRPALLTLEQQISALSAELEAAAPADVPAGVGKLTTVVMTREICSWERFRNRRAISSYTGLCPGEYSSGTKRVPGSVTKHGNPRLRAALVECAWRMVRFQPQYPPVKKRLSVLAKGARATGGQRKKAIVAVARHLAVDLWRLHTGRNTAAQLGLTI

SEQ ID NO: 156226 - protein, 335 aa, unidentified
MQIYGIDLAKEKFDVSFFDLTSKKVSNQPSHKVVKNNFKSIGRFLETLPSDAVLVAEHTGVYGDTLLKCCMDSNVKIAFVGGYVIHRYRATPDRAKTDVLDCALLRDFGERYPDKLKYKTFPEEALYELRQLARHREMLVEQRKQLITADKSEDCRPIRSLAVKRSMDRIKEMLDTEIAETEKEMLKVINGHESIRHNYELVKSVNGVGLITAVELLVKTENFTKITTARQYAAYAGTAPYEKSSGKMDKGAHISKIGNRRSKTLLYICAESARLHNKEIKLYYERRTLIDKKPRHYVLNAIANKLLRIIFTLVEKGEYYDANFIRQDPRVVKYN

SEQ ID NO: 156227 - protein, 343 aa, unidentified
MVDNKSFSITKGGIDELLTFLLGVELTIDRIGIEGSGFLGQPLVLALAAAGYDVREVQANRTAERRKRRRRAKTDAEDAEAIAREALSDPELPPAGKHTAPSPTWQTLTVIRDWRESLVLQRVRLLTESEAVLVTLPVAIRATLPSTSRVLPQLQSLVDGVANPDLLSPAERLKLDRLAASLNDIITLTARIKELDRQIPALLSDLGCTLTEVRGVGVVTAMDLLVEIGDPCRFTTEAQFARWCGIAPVALSSGEGHGPARRHRLDLGGNRAVNSILHIVHVTQVRCHPPAKEYMAKRVTDNKTKREARRSHKRQLANIIIRHMWTDARRSTATTPTSSAAAA

SEQ ID NO: 156228 - protein, 356 aa, unidentified
MSEGSWVGLDVHARSVVAGVIDGVSGEVRSLRVPPGNAETVAWLETLPAPVRVVYEAGPTGYRLARACAGAGISCVVAAPSRIRPAADRVKTDRRDAERLARLLRLGEITPVRVPDPEEEAARDLVRAREDARGDLMRARHRLSKLLLRHGAVYDATAWTRAHDVWLRRQRFQSGPLAIVFDECYGRMLDAKTRRDALDKAIAELAATPPYVDVVDRLVCLRGVSTLTAFALTVELGDWRRFRPESLGPFLGLTPSENSSGERRRQGGITKTGNTHARRLLIEAAWHQRRPQRMSTVLTRRRDGKPPAVQAQADRSARRLHGRWHALEARGKPRSIVVVAVARELAGHCWALATME

SEQ ID NO: 156229 - protein, 340 aa, unidentified
MNATTYGLDVAKRVFQMYWVDAQTGEIANRRFGRDELIGFLVQRPAGRVALEACGSGHWWARKIKALGHEVVLLHAKFIRPFVQTNKTDAADARAIWTAVQQPEMRTVAAKTADQQAMLSLHRMRALLVKLRTMQVNQLRGLLYEFGATFRAGRMAGLAEIQVRMAELADTLPEAMLCSLQDQLKRIDALELDIDRLEQRIGAWQKQEAECRALAAVPGIGKLTATALVAMIGDAKTFKSSREFASFLGLVPRQSGTGGKIRLGSISKRGDPYLRTLLIHGARSVMYHAKVPTRWQKEIQARRPANVAAVALAHKMARTAWAILAHGQAYRKDYVSVKPA

SEQ ID NO: 156230 - protein, 403 aa, unidentified
MNNVVGIDVSKGKSMVSVLRPFGEVVAKPFSVGHTGSELKELADYLKSLDGETRVVMEHTGRYYEPVARFLHDEGVFVSAVNPKLIKDYGNNTLRKVKTDKADSRKIARYGIDNWAELRQHTPMDTIRMQLKTLNRQQSLYTKTKTMMKNNLIALLDQTYPGVNALFDSPVREDGSQKWVDFATTFWHVDCVRNMSLTAFAERYRKWCKRHGYNFSQSKAVEVHAGAQDLIAMLPRDALTKTMVRQAIDALNAISASMERLKAEMQALAAQLPEYPVVMAMHGVGDSLGPQLMAELGDVTRFTHRNAITAFAGVDPGADQSGTHEAKSTRVSKSGAPELRRALFLVMDCLLKTQPQDDPVYRFMDKKRAEGKPYLVYMTAGANKFLRIYYGRVKEYLASLEGN

SEQ ID NO: 156231 - protein, 342 aa, unidentified
MNGDYGGRQYVGIDLHRRRSVIVRMTPEGEQLGWVRIDNDPVALGLELAKAGPDPEVVLEATYGWYWAVDALQTAGAKVHLAHPLGVKGFAYRRVKNDVRDAADLADLLRMGRLPEAYIATPHERELRELVRHRAKFVALRSGLKAQVHGVLAKQGLLPEVSDVFGPTGQAWLRTASLDLVYRQRIDSLLELIDAYDGEIELFRVMIANRLRGHRGYRAIQQISGIGPTFAAVLVAEIGDVTRFSRPEKLCCWAGLTPRHRESDTSVHRGPITKQGSKLVRWAAIEACQRTRPGTKLAVDRTRIITARGRNIGVVAAARRLLTLVFYGLRDGQIRALAAGAG

SEQ ID NO: 156232 - protein, 353 aa, unidentified
MLTIGVDFSKRTSVYSVWDATGHRIQRCKLDNEPQVMRQFFQELPEEPIQLAMEATRNWGLYYETVRGYVDQFYLAHPVKMKAITQSETKNDQHDADLIARLTQSGFLPTAHISSLGTRQLRSLLRFRTFCVHQRTAVRNQVQTLIDRNVWPAQRPGAFKNPFSRRGLAWLTTLSLPERERFILTQCLATVTHLTHQIAAIERYVEAQALDLPGLACLRTVPGFHRSKVHLYTVLLEIDDIQRFHKARNLAHYAGLIPREHSSGATHRTGALVKQANKHLRTALLESVFGALRADRGLRAYYQSVKDRRGSGPAIIATTRKLSYAVYHVLKDQTAYRAPSVPPVTASGPLAEA

SEQ ID NO: 156233 - protein, 483 aa, unidentified
MKPKQPEKSKKTSCGPTQGHWHEMNRKQRREMMRKVQSEDISLEVVHPDAAGIDIGNESHYVAVPPTRDSESVRRFGCTTAELKEMADWLKQCGIRTVAMQSTGVYWIAVYDILEEAGLEVYLVNARETKNLPGRKSDVQESQWLMKLHTHGLLRNSFRPSQEIRVLRTYWRQRNDLVRAAGRHIQRIQKAMTQMNIQLANVLSDVSGMTGQAIIKAILTGERDPYVLAAFRDHRVKASEEEIARSLEGHWQEDLLFVLQQEQDGYEFCQKQMAECDQRIEQYLKQREDRSAGANLPEEKRKERLRKKKKGNTPQFDLRTELFRMTGADLTQIDGIDVMTATTILSEVGWDMSKWKTEHHFVSWLRLCPDNKISGDKIIGKGRLPTNNRATSALRMAASTLRLSNTYLGAQFRRLRTKLGAPIAIKAMAAKLARLVYRVLRYGMQFVDKGAEFYEAQHRKLQINYLKWRAAKMGLQIIEAPAA

SEQ ID NO: 156234 - protein, 361 aa, unidentified
MKKSMQHLIAEVPRSITKVGMTIGIDLGDIWSHYCTLNEDGEVVDRGRFRTTPSGVEKWFTDVPRARVAMETGTHSIWVSEQLREMGHEVIVANVRELRAISHSNRKSDTVDAEKIARYARVDPEILRPVSHRTVAQQEALTLIRARNLIVRLRTAAVNSVRGLAKPCGYRLPASSTLCFAKRCMAVLPPGLAQALGPVLEQIAAMTVKIQQYDRTIKQLTETEYPETQALLQVYGVGQLTALTYVLTLGGKERFKRSRDVGCYLGLRPRRSQSGDRDPQLGITKAGNIYLRSLLVECANHVLGPHGRDSTLRRWGLNLASRGGKQSHNRAIVAVARKLAVLLHRIWITQEPYVPFYAVAA

SEQ ID NO: 156235 - protein, 335 aa, unidentified
MPLYCGIDLHSNNHVICVIDDKDKRLFEQKLDNHFELTIRALTKYKKRLKAIAVESTFNWYWLVDALMADGFKVELVNTAKVVQYSGLKRTNDRYDAFHLAHLMRLGILPTGYIYPKAERGLRDLLRKRIQLVQDRSSHIIRFKSQIQMHTGRTIRADYIKARKFQAPLIGDDNVQLALQSHIVLIRALTLQIKVLEKSILKQVEPTPGFDHLKTASGIGDILAETILLETGDITRFKGPGNFASYCRCVDSRRESNGKKKGENNRKNGNKYLAWAFIEAATFAIRHSDKANRFYHKKAKATNPIVARKALAHKLARACYWVMRNQEDFNEDLVF

SEQ ID NO: 156236 - protein, 353 aa, unidentified
MFHKPGEATTMKITTIGLDLAKNVFQVHGVDEQGKAVVRKQLRRNQVAAFFANLPPCLVGMEACGSAHHWARKIEQLGHTVKLMAPQFVKPYVKTNKNDAADAEAICEAVSRPQMRFVPIKNAEQQAVLALHRARQAFVKARTAQANQIRGLLGEYGIIFPQGICHITKRLPAILEDGENELPGSFRALLARLGEHLKELDRQVGELEVQIHHWHRENEASRKLEQVPGIGPITASALVATIGDANSFKNGRQLAAWLGLVPRQHSSGGKSVLLGISKRGDSYLRTLLIHGARAVIRVAERKEGYPQSWLGQLLGRRQKNVAAVALANKNARIVWALLAHDRNYQADYAPSAV

SEQ ID NO: 156237 - protein, 371 aa, unidentified
MNQLIKQCVGVDISKESFTACVCSRLLTGEEQLSEVLEFKNLKSGFNQLIKWSRKITVPSLEVTFVMEATGVYHENLAHHLHKLKQPVCVLLPNKVKHFAKSLNVKTKTDKVDARVIARMGAERKLSNWSPPHPLFKQLRDLTRGYSELMKEKTVFTNRLEALNSGYEPLSMIMKSHKEIIKQLDKQLARFKVEIEKLIFSEEWLAEKVKKILTIKGVGLMTVAVILAETQGFEFVQNIRQLCSYAGYDVVQRQSGTSVSGKSKISKKGNSWIRGALHFPALVASRHNSIMKTTYQRINNRNTYKMIGATAIQRKILVLIYTLWKNDTIFDEEYEAKRKARKVPQRKAGRGISSLPAQDELKPKDLKFSFV

SEQ ID NO: 156238 - protein, 455 aa, unidentified
MAKKGKKTKPIPENMLIIHPHAAGIDVGAEEHWVCVPADRDAQPVQKFSAFTCDLPRLADWLTACRITTVAMESTGVYWIPLFQILEARGFEVALVNARHVKNVPGRPKTDRFDCRWLQKLHTYGLLAPSFRPPEDVCQLRSLLRHRDNLIRMTVKHIQHMQKSLDQMNLHLHHVISDVTGVTGMRIIRAIVAGERDPQTLATYRDYRIQSSEDTIAKALEGDYRPEHVFTLTQSLALYDFTHQQIAACDQEIERVLSTFASLGDPDEHPLPPPTTAHRQPQRNEPAFDLRTHLYRITGVDLTQVPGLQAPTIHIVLAEVGLNMHKWPTDKHFASWLGLCPDNQISGGKVLSTGSRRVQNRASRALRMAAQSLRTSPSYLGAFYRRMRSKLGPAKATTAPAHKLAKIIYHMLKEKTSYRERGAEYYMHKDQERKLRQLRKQAKHLGFDVVPQASH

SEQ ID NO: 156239 - protein, 374 aa, unidentified
MLSARPAGACRPPPDQQKELAITTIAHPERPRVTVGVDTHLDVHVAHAKDQLGRRMATVSIPTTPAGYQDLLAWARGLGEVEAWGVEGTGCYGAALTRFLVAHGQVVLEVNRPDRQARRRRGKSDPVDAEAAARSVQAGEVTTVPKAGNATVEMIRSLRVARQTAIKARTQAINALKALLVTAPAQLREQLRGRSAAMLVRQAAALEPGPLVTPTAAAKLALRCLACRYQALHAEVATLDTELARLVAKAAPGLVARFGVGPDSAGALLVAAGDNPGRLRSDACFSMLCGSSPIEASSGKTRRHRLNRGGDRQANAALYRIVVVRLRWHQPTKDYMARRLTEGKTTKEIIRCLKRYVAREMFTVLNQTVPTPAT

SEQ ID NO: 156240 - protein, 407 aa, unidentified
MAKVIIGVDPHKLSATIEVLDRRERLLGSGRFSTDQAGYTAMRTYTKAWPERVWAVEGSNGAGRPLAQRLLEAGEHVVDVPAKLAARVRLFDTGHNRKTDARDAHSIAVVAVRTRTLRVLAADGELEGLRMLCDRREELTRLRVQTVNRLQRLLAELIPGQGQKDLTALQAKAILATVRPRDIAGKTRRRIAVEELADLVAVEAKMKKATAELKTIVLARGSRLMDIHGIGPVVAARILADVGDITRFADRNRFASWTGTAPLDASSGEQNRHRLSRAGNRRMNHMLHIAAVTQIRLDTEGRAYYRRKRAAGKKPLEAMRCLKRRLSDVVYRQLVADAERAAMTAPSTEAGTGPGGHCGATQESSAVDLPPHIDTSDQPLPGPADPTLQPSRTVRKSPSRKTPQTTR

SEQ ID NO: 156241 - protein, 351 aa, unidentified
MPYFIAFDTHCEFTEMAVLNSRGKLVRRQRCPTTIPTLVEAIESVKRPRQVTFEEGPLAGWLSRNLRDHADQVLVCDPRRNAYVAKEGDKDDPIDAERLAQLLRGGFLKEVHQVDSLDRSLLKQHVAFYHDRVRERVRQGHQLTALLRRYGVFASISKVNDPDERRLLWKQLPRRKVLHEDLDCVLKVYQLLLEQEERLRARLTQLARKEPAIRRFREVPGFGWIRAATFYVYIDAPARFRSKSALWRYCGIGLERRHSGSGPQRVRLCIGGSRPLKNILMGAAKSAIAQSNGPFADRYEEWTQQKGVNPATARRNIARSLAATLWSLWKNDANYDPDKSRRPEKSSLETR

SEQ ID NO: 156242 - protein, 326 aa, unidentified
MEHELHYIGIGTAKEKLDVDVLRPDGRHRTKKFANTTKGHNELVSWLKGHKIDHAHICIEAIGTYMEPVAECLYDAGYIVSVINPALGKAFAQSEGLRNKTDTVDARMLAEFCRQKRPAAWEAPHPLERALRALVVRHQALTDMHTQELNRTETAREVQRPSIDAHLLWLEAELKRLEKQIKDLTDDDPDMKHRRKLLESIPGIGEKTSAVLLAYIGLKDRFAHARQFAAFAGLTPRRYESGSSVRGANRLSKAGHVSLRRALYMPAMVATSKTEWGRMFRDRLAANGKKGKVILGAMMRKLAQVAYGVLKSGVPFDASRHNPVAA

SEQ ID NO: 156243 - protein, 399 aa, unidentified
MVEATTHVGLDVHKQSISVAMLLPGSAKATQWEMRNESGEVRRLVRRLRRDAGGGAVQCAYEAGPCGYVLQRQLARAGVACQVVAASLIPRKPGERIKTDRRDARKLAELLRAGLLTEVRPPSEAEEALRDLCRCREDARVDLMRARHRLSKMLLRRDLRYVEGRPWTQQHRAWLWSLKLEHAAERMALEDYLLAVDQVSTRLATLEAQLKELADQEPYRERVGWLRCLRGIDTITAVSILAELHGFERFERPRQLMAYLGLVPSESSSGASVHRGAITKTGNRHLRRLLTEAAHHCRHRPGVGAALRRRRAGQPAAVIALADRAQQRLHRRYSRLLLGRGLPVQKVVVACARELTGFVWALLYLQPRQLISPGDTARPRRLGPSATARGLRAAAEKTR

SEQ ID NO: 156244 - protein, 357 aa, unidentified
MRRLTCGMDLHSDNLVVGLQDQDGKRIAHRRLECDLQKVLEFLKPFKKEVEAIAVESTFNWYWLVDGLKAAAYPVVLANPAKIQQYSGIKHADDTSDAFFLAELLRLKILPTGYIYDPVLRPVRDLLRRRMSLVHQRTSLMLSFKALFARTTGQSMKLGALKTMSVAEAQRLYEHPANQLIAGLQKKHIEDLDQSIGKIEKTVLKVAAHLPYYPKLKTWPGVGIILGLTITMEVGQIERFASAEDFASYCRTVDSKHLSNGKKKAENNQKCGNKYLAWAFVEGAQFAKRYDEQCRRWYDRKAAKTSTVIATKALACKLSKAAWYLMAQNTNYDPARVFPELAAAKAEKPKKMKIKEP

SEQ ID NO: 156245 - protein, 317 aa, unidentified
MTSTAAFVGIDIAKADFVVASRPDGTSWTATNDPVGIAATVDRVGALAPTLIVLEATGGYESALAVVLAAAGLPLVVANPRQVRNFAKATGQLAKTDRVDAELLALFAERVHPTPRPLPDGALQHLDALMTRRRQLLEIVTAEHNRLEHATAPVGRDIAPHLRWLDRRIAAVDRDVDDAIQQSPAWRAKEDLLRTAPGVGPVLSRTLLANLPELGQLNRKQIAALVGVAPFARDSGTHRGKRVVWGGRAPVRAVLYMGALVATRRNAVIRIFYLRLVAAGKPKTVALIACMRKLLTILNAMMRTHTTWQQIDQPANA

SEQ ID NO: 156246 - protein, 319 aa, unidentified
MVDSIYVGIDVAQEWLDVWLHPKHQYKRFSNTTQGISKLLEHLTEQDNPVAKVVLEATGGLEYQAARRLQKAGVPTAVVNPYFTSAFRVMRGKRTKTDATDAEMLAMFAEKMDPEIRPVPTAQEKEMRELTARRVQLIEMVTAEKNRLKRIDSESVLLSVRVMITLLAEEKERIEKRLQKMVQEHETYANQYRLLTSIPAIGPAVAITLITELPELGQLNKKEIASLAGLAPHNRDSGKTTGKAAIRTGGGRRCVKAALYMGALVATRHNPVLKTFYKRLVENGKPKKVAIVAVMRKLLIIANQMTKEQREWSENYQHP

SEQ ID NO: 156247 - protein, 401 aa, unidentified
MAEGRDKVWVGIDIGKTHHWACVLDANGKTLLSMRIANDEAEIVSLVAKVCGLAPQLVWAVDIIGAPSALVLGLLARAGQSVHYASGRVVAVMSAAFSGEGKTDLKDAYVIAETARLRRDLAVIDPDTDLVRNLAVLTAHRADLIADRVRMINRLRDLMTSVFPSLEREFDYSACKGALVLLTGYASPDRIRRCGQTRLAGWLRHRSVRDSAGVAARAVAAAKAQSILLPGQDLTAEIIAELATGILALDQRLKGLDAQIEALFMEHPQAEIIQSLPGFGPFLGACLLVSAGNLRAFPSAGHLAAAAGLVPVPNDSGRRVGNLHRPLRYSRPLRHVFYLSAQTSMMRAGPNRDYYLKKRAQGVTHTHAVIALARRRIDVLWALLRDDRIFSVDPPSRAVAA

SEQ ID NO: 156248 - protein, 339 aa, unidentified
MKLYGGIDLHARNNYLGIINEENKRIIGKKLKNEPEEILGVLNPHQDEIEGIVVESTYNWYWLVDLLMREGYRVHLANPTGIQKYSGLKHADDKYDAFWLAHLLQLGILPEGYIYPKEERPIRDLLRKRGHLVKLRTSLIVSLQNIITRNCGIKVAVNDVKKLKENLISPLLEGNEDLALAGEVSKESIDYLTGQIRKIEGVVEKRVALKEPYKYLLTMPGVGKILGLTIALETGAISRFAKVGDYVSYCRKVSSKWTSNGKSKGKGNKKNGNKYLAWAFSEEAELARRYDEKSRNYYQRKMQKTNSIVAHSALAHKLARAAYYIMRDKVAFNSEMLFG

SEQ ID NO: 156249 - protein, 408 aa, unidentified
MKDSGKRYIGLDVHKHYLIAIGVDEELNVVLPVRRVEFSYLEAWMKKTLTKQDEVVLEMTTNTWQLYDELCQHAGSVLVVHPPHVALITRSQVMNDKIAASILARLLAKGLLVGVWVPPQEIRELRGLVAQRKKMTGLVTQAKNRLHAVLQRHHLAPPEGNPFQEAQSAWWLALPLGKFEKVNVQSDLETLRFAENQREQLTLMMEEIASQEEQVTRLLQLPGFGVVTAVTVWAAIGNIQRFADGQHLVGYAGLGTKVHDSGMTTHTGRITKAGRRDLRMALIEAAQVAANSHPHWKAELARLQPRLGRNKAIVAIARKLLVVVWYILAQHKTDRFAQPEAIAQKFLKFAYQLGKANRPTGQSAAQFVRQRLDVLQLGQELTSIAWGSKKPIPLPPSTNKVSDVPHTK

SEQ ID NO: 156250 - protein, 428 aa, unidentified
MNYTQNKKISQINERTLVVGIDIAKHAHVARAQDFRGLEYSKALTFDNSHKGFNELLKWIYRTAEDYDKTNIIAGMEPTGHYWFALAQFLRQQGIKIAIVNPMHVKKSKELDDNSPTKNDIKDARVIAQLVKDGRYAEPNIPQGVYADLRIAMDIRDQINKELNTVKVRIQRWLDRFFPEFLDVFAKWDGKAALLTLKFFPLPSQIVALGAENVLKVWKPEVKRAVGIKRAVDLCDAAKTSVGLKEGLEMAEYELQYLVDNYEVLADRLEKLMIKIEAIVNKIPGAKEMIDIQGLGLVTVASFLSETCDLFKYSHPRQIQKLAGLNLKENSSGEHKGETTITKRGRRKLRSTLFKAIMPMVAKNDEFKALHQYYTTRSVNPLKKKQSLIALCCKLIRVLYAIGTKGIAYNPQKLMNDIKHPEIKAKAA

SEQ ID NO: 156251 - protein, 329 aa, unidentified
MKTNTFIGIDVSKDTIDVAIYGYKDSKKFSNDTKGFEKMLRWIESITEKSPEVFCFEATGLYSLPLSCFLQDRGLKFCLVSGLMVKRSSGIKRGKSDRTDAMTISRYAYLHREELRPSQVPSKSLLKLNQLFSLYRRMVKQRAGYIACLKEQMPILPQDDHKVVLDTQRQMIELFTNKIKLLEEEMLDILGEDESLKQNSELLRSIKGIGLIVALYMIIITNNFTRFDNWRQFACYCGIVPFEHSSGISYQGRTRVSHLANKQMKTLLSNAAATAIQFNAEMKDYFHKRVSEGKNKMAVLNIIRNKLVSRAFAVINRQSPYVDLHKFAA

SEQ ID NO: 156252 - protein, 355 aa, unidentified
MNDAKYIGLDVHQATISVAVRDSRGNLVMEAILETKAETILQFIRGLRGSLSVTFEEGTWAAWLHDLLQPHVTRVVVCDPRKNALLKVGNKNDRIDARKLSELLYLNKLSSVYHGEPGIRTLKELARSYLAMTRDLTRVMSRLKAIYRSWAIPCAGKQVYAARNRAEWLAKISEAGVRRRAELYYQQFDALAALRQQARRELLAEARKHPAMKLLRQIPTIGLIRAALLIALMQTPNRFRTKRQLWAYCGLALRTYTSGEYRFVGGQLKRSKKVLAVRGLNINHNHDLKNIFKGAATRAASTVGPFQDFYQACVARGVKPHLARLTLARKIAATTLLVWKKGVRFDAEHLKQQAA

SEQ ID NO: 156253 - protein, 338 aa, unidentified
MKLYGGIDLHSNNSVIHLIDKSGSNVLKKRLSNNLPMILALLEPYSDAIEGLVVESTYNWYWLVDGLMEAGYKVHLANTAAIQQYSGLKYGDDDSDANWLANMLRLNILPEGYIYPKEARMIRDLLRKRLQLVQQRTLNLISIQGLYTRHLNKRLNSSKVKQLTPQIIAQDFCDPNVQLAVNGNLAVQQCLTQQIKNIEKSLKQQLKLKNEFIQLTSIDGIGLILALTIMLETGSITRFEKVGHYASYCRCVSGARYSNGKKKGTTNAKNGNKYLAWAFVEAANFAIRHNETIKKFYQRKLAKTHMMVAKKAVAHKLARACFYVLRDHIEFDTKKAFG

SEQ ID NO: 156254 - protein, 351 aa, unidentified
MIIGCDFHPRFQQISFLWEETGECGQRRLMHTVEAEQYYRSLGGTKVRVGIEATGSYGWFRRLLSELGHELLVGDATQIRASNPRRQKTDKRDAEHILGLLIQDRFPAIWQPPAENEQLRQLLLHRSRLVRLRTRVTNQLDGIAKNEGLLVPGGWSGKRRMAIEALPLPGWYGERRKDLLGLLDRIEERIAPLNKAVSQAAANNVEACLLMTHPGVGPVVSLAFVLAIGNWQRFPRGKQVGSYFGLIPAEESSGDKRRLGHISKQGNTLVRWLLVEAASTAQRYDASWHRQYVRLSMTKHHGVAKVAIAHKLAVRLYWMLRSGEDYQHVRERGSHARQSECPGGRSRRPIE

SEQ ID NO: 156255 - protein, 344 aa, unidentified
MQVSVLGIDLGKNVCSIVGLDVSGVVVLRRRVKRETLIGLAAKLPPSIVAMEACCGAHHLGRLFASHGHEVKLMSPEYVRPYVKAQKNDDRDAEGIAEAATRPTMRFVELKAQDQLDMQTLHRSRDRLVGERTALINQLRAILLERGIVVPQGKRNLERHLAALLDGSDRQGLSPRMHLLIADGRAQWQELDRRIAVFDAEFAAFTKENEDAKRLTTIPGVGVMIASAMIAAIGKAETFEHGRDLAAWLGLVPRQSTTGGKPKLFGISKRGNKYLRKLLIHGARAALPHLAGRDTALGRWAKGLLARVHQNVAVVALANKLARIAWAVLRRSEAFTAKGASLAA

SEQ ID NO: 156256 - protein, 342 aa, unidentified
MAALYYIGLDIHKKIIAYCIKSVDGSVMDRGTVAATRLALSSWVEALPQPWVAAMEATMFTGWVYDFLKPYAKELFVAHPEMLKAITAAKKKNDRADAEKICDLLRVDLLPVCYVAPAEIRELRRVLRYRNHTVRMATAVKNKMSGLLMEVGAQYAKKRLHGRKYFNELLESVEDVPSSVKELLTYSRASLELFGSVQKRLLAALTENDLIRARVERLVTIPGVGEVTALTWVLEIGDPHRFSISQAISYSGLCSAQKESAGKEIRGPISKKRNKHLQTVLIEAAKLAPIWNPQLAKVHQRELAKGNKNRATLAVARKLVTYLLTVDKNAVDFVVSCKAEAA

SEQ ID NO: 156257 - protein, 341 aa, unidentified
MAAIGIDTHKDSLAACLVDALGAALDERTFANDPMGHRALLDWLLARAPEATVGIEGSASFGAAAARYLVAAGRSVREVPPQLSRRERTRTRRAGKSDPGDALAIARVTVRESDLPPVRLADRSHDIQLLVEAREDVVGEMTRARNRLHADLRSLVPGYGASAANLTAGRHQRTVARLLRGRPEVRAELARARLAELRRLALEERRLAARIAALVAGHPLLDLPGAGVLVTAKLVGEIGDIGRFRSAAAFAALAGVAPIPASSGQTRRMRLNRGGNRQLNRALHTIALIQAWHHPPARAYVARKRAEGKTWREALRALKRQLVRTVFRLLQAGAGSVRLAA

SEQ ID NO: 156258 - protein, 324 aa, unidentified
MELSAIGIDVSKETLDVNVFTGGKPLGKQFANTEQGFGQLIGWLAHRRLGRVHACLEATGRHSLGVALALHAAGHVVSIVNPAQIRDFARTRLGRNKSDAVDAGHIREYGTMFRPPAWRPPSPALRRLCELQTMRAGFVASRVEWQNRAGSLGGEAAARALAEATIAHFAAQIAAVDAAIAETIDTDDDLRGKHDLLLSIDGVGQTLAALVLAELPGSDVITSSAQAVAYAGLNPRQFQSGSSINRPTRISKVGNATLRSGLFMPAMVAIRHNPAVAALAARLRAKGRLTPKQILIAAMRKLLVICFGVLKSGRPFDAALAMPA

SEQ ID NO: 156259 - protein, 365 aa, unidentified
MFTERTSVGLDVHARSVAAAAIDGVTGELVQAKLTPSYDHIRSWIGDLPGPVAVAYEAGPTGFGLHRSLSAAGVRCVVVAPSKLQRPSGDRVKTDAKDAVHLARLLRLDEVTPVSIPTLDQEAARDLVRAREDCRGDLMRARHRLSKLLLRHGIVYYGGQAWTGKHDTWLRHEARDHLVATAGRATGQTFEFDYENVVVTKAHRDRLDAAIEEMALDSEFTPLVHRLGCLRGVSTLTGFALAVEIGDWHRFTGNTIGSFVGLVPSEYSSGASRVQGAITKTGNTHVRRLLVEAAWHHRARYTVGKTMRDRWALAPAEAQARGDEGNRRLHARWVKFIERRKRPTIANVAIARELAGWCWSLAVLE

SEQ ID NO: 156260 - protein, 399 aa, unidentified
MFYCGIDIAKYKHEASVIDMSGKALSNSITFANDRQGCEKVLAIFEKSEITPDNVVIGMEATGHYWLSVYTFFLELGYTVKVINPIQSEAFRKMYIRQTKNDSKDSYIIAQIMRFGEYSATTLSEDNIIALRQLSRYRLALVDACGDCKRRVIALLDQVFPEYDKLFSDTFGKTSSELLLNCPTPEDMLAVSTRKLTNILNKASRGRFGKEKAEELKDAAKNTFGIAFAKDAFSFQIKQLIQQIIFTEKQLSELEEQIANLLHETNQYITTITGIGDVLGAIIVSEIGDINRFERPNQLVAFAGLDVTVKQSGEFSGTKNRISKRGSPYLRRAIWLAAQRAAFCDPILSEYYQSLKARGKHHLTAVGAVARKLCNIIFVILKENRPYLPIPPKKSQNLS

SEQ ID NO: 156261 - protein, 421 aa, unidentified
MRAFGLDVHRDFCEVAIAEGGRVRSAGRIATRVPALELFAQSLANDDVVALEATTGADRIVEVLRRHEIRVVVANTRKLKSITEAKAKTDRLDARTLAKLLASGLLEPVWTPDERTRALRRLTNRRERIVRARTRAKNEAHGVLSRNLCERPPVTDAFGKAGRAWLAELALPVDERLTLDGCLRQVDFLDGEIAAIDREIAKQALAWPEVLRVMTVPGVNVQTAAAFMASIGDIRRFRSARKLVSYLGLDPRVRQSGNSPARHGRISKAGASEARHMLGEVAWKVTLTPGPLRAFFERVRARRGAQIAATATARKLVVLFWCLLTREQDYAFGRPAMTRNKIRKLELLAGAPPQKGRHGIAGGKSKAVFEAERELSRQAEAAYRRLISDWQATAPPRVGAGATPGRASQRPSKGKAARQAG

SEQ ID NO: 156262 - protein, 432 aa, unidentified
MRAPVQGLMFGTAGRGKGRCHLEQTFDLFCGIDWGSEQHRICPLDRDGQVVGERWTQHRGASITELITWLCDRGGATPSVFAIAIELPRGAIVEALTEHGFAVFSINPKQLDRFRDRYSPAGAKDDRRDAFVLADSLRTDPHCFHAVRLDEPAVIRLRDLSRLEDDIRDEQRRLNNQLWEQWHRFFPQLLALCPSTDEPWVWDLFEAAPTPAMAARLSEKKISKILARHRIRRIGFREMRAVLATPPLQLTPGTAEAASEHAMLLLPRLRLLRQQRTKIASRLRKLLEELAAPDPAEGETKEHRDAEVLLSLPGVGRIVAATMLSEASQAIADRDYHGLRCYAGTAPVTRQSGKRTVVLMRHGCNERLRNVLYHWARVSIICDPRSRSHYAQLRARGHSHGRSLRGIADRWLRVLIAMLKHRTLYDPTLQSA

SEQ ID NO: 156263 - protein, 403 aa, unidentified
MAYQKVVRVASDCYRGSFKICLIPQFLVGLHKRFNGAISRNCITTLTKGAAMVTIVAKYYEYIVGVDTHAKQHVYAILNNLGECIGNGECRVLPRDFRRTLLLIRRKVANAKILFAIEGTSSYGETFTHFLLNEGEDVCEVKPPKIKSRGNTGKSDQIDAEMAARSVLYLPVRKLIQVRKGEQRKILRIALGSRSNLVKQQTMDKNALIALIRSVDLGIDGRRALSDRTIYELANSRSSRKDAHHIAIARTTARELAIAIVGRAGQLSRNEQLLKQTVQAVAPNLLELPGIGPVSAAQILCVYSHKGRIPTAEAFCCIAGVAPIPASSGNTMRHRLSRFGDRALNHAINVIATVRMRTEANTIAYMEKRSKLGNSRREIKRLLKRYIARSIFKELERLELGVD

SEQ ID NO: 156264 - protein, 370 aa, unidentified
MTKITKFVGLDVHKSTISIAFCEGGPMTEAVQAGTIPNDIPRVIRKLETLGAHEDLRVCYEAGPTGYALCRALLAAGIHCIVVAPGKVPKEPGKKVKTDERDARDLARLLRSGYLSGITLPDQAREALRDLVRAREDLMRDLRRARQRLKSMLLRHDRKWSGKSCWTLKYREWVRSQRFGAEADNIVLKHYLQEVEHLEALRDLLTDDVERLVPTLDQNELFRSLQALRGVSTIVSSTVVCEIGELKRFPTASRFMSYIGLVPSEHSSGKSRSRGAITKAGNGHVRSVMIEAAWACRSTPNRSLQLLRRQKGLDPKIVDIAWSAQQRLHKRYVHMRRKGIEQNVVIVALARELAGFIWAIGQEVETKSVA

SEQ ID NO: 156265 - protein, 427 aa, unidentified
MYRIAGIDVHKKKLAVVVSDVEVHGEYQFERCWFGANPEQLRFLSQWLAEHQVEEVVMESTALYWKPVWGALERYWQPICQKREGAGATSGILHLAQAQSNRGPRGRKKDFRDAERLVKRLVADELKLSFVPDSEQRLWRTLTRRRYQLTRARVQLQNQLEALLEEAHLKLSSLVSDLLGVSARRMLQAIADGETNPEALAGLADRRLRATPAQLSDALGACTELHAVYRRLIKMMLGELKVIEEHTAELNQELATLLRPHQDAVERLAEVPGLGVDSAQQILAEVGANAAVFASDKNLCSWVGVCPGDEESAGESSSHRSPQGNRQMRRLLNQAANAAVKTKGSIFEIVYRRLVPRLGHNQTIGAVAHRLCRLIWLLLHKGVRYEERGPAVSQRSRQNRTSKMIRELRTLGYRVEFLNAVPSNPMP

SEQ ID NO: 156266 - protein, 345 aa, unidentified
MEHYAAIDVSLEWSSVCIVDPTGQIVREARVRSEREALVGFFAASGLRFARIGLEAGPLSQWLHAALVEAGLPAVCIETRHVRAALKAMTVKTDKNDARGMAQLMRMGWFRPVHVKAPIVQEIRALLTARKLLVAKLRDVESSIRGILRGFGLKVGAVSKGKFEARIRELVAGQAGLERVVGPLLRTRAALRAEYATLHGELLEAVREDEVCRRLMTVPGVGPVVAMTFRSAIDQPERFAHSKAVGAHFGLVPRKYQSGEIDRTGRISKVGDAMVRTALFEAANVMLTRAVRFSALKAWALRVASRQGMKKAKVALARKLAVVMHRMWLDGTEFRWSRQATPAAA

SEQ ID NO: 156267 - protein, 325 aa, unidentified
MARMQGKTTSDVSQLFAGIDVSKAHLDLQLSCERRSRRFPNDPAGFAAIDAHLRARADTPCLVALEPTGRYHFPVWRALHEAGHGVAPINPLHVRRFAESDGELAKTDALDAAVLARMAAQRLPCAKEPPSEEQLRLKALTTSIADRIDRRAMLKGQRAEARDPLIAGFDEAEIAQLSDAIDALKAERARLIQLDPHRARVSAILCSIPGIGEASAHQIIADMPEIGTLDEKQVAALLGTAPRANQSGKRDKRRHIKGGRRRLRAALHMPAIVASNANPDLKAFKQRLKAKGKKNAVILTAILRKLIVLANALVAQNRMWTQKCP

SEQ ID NO: 156268 - protein, 369 aa, unidentified
MPRMPQAPEPSPIGNEHAEDDAEVILGVDTHKEVHVAAVLSDRGALLGTRSFPATASGYQQLLDWATGFGTVRRAGVECTGSYGAALTRHLATAHVEVIEVNQPDKAARRRRGKTDTLDAEAAAQAVLSGRASAAAKSGDGPVEMVRMFKLAKASAIKSRTQAINQLKSVLVSADPQLREAMAGLSNPRLIQRCTELGTGTPTDIAGAAAYTVQLLARRILALTTEINELKRRIGDTLAAHAPLLLQRHGVGPDTAAALLIAAGDNPERLHTEASFAALCGTSPVEASSGKTQRRRLNRGGDRQANCALHTIVLSRLRWDPRTRDYLKRRMAEGKTHREAQRCLKRYIAREIYQLIRPRTAPPHPAPAT

SEQ ID NO: 156269 - protein, 408 aa, unidentified
MNPLYVGIDVSSKNNVIYLMLPNGDKHSSFSLANSHDGSTQLVKRIFTAMTSNNIDSVLIGLEATSVYGDNLVYFLKEDTTLASFDRKIHVLNPKQVNKFKESYNDLPKNDYVDAFVIADCLRFGRINKEVYMDDYRYKALQNLTRARYFAVTNLTKEKQRFINVLFKKYSTMTQEKVFSDTFSTTALAVYEKFESAETLAKMDLQELTAFIMEKGKNRFPDPDAVAKALQKAARSSYRLPKTVNDSVNQVLAISITSIRSLESQIKAFDKAITKQMELLPNVLISIPGIGPVLSAGIMAEIGDINRFQNQAALAKYAGLAWQQHQSGDFEAQTTRMIHSGNRFLKYYLCEAAFSLVRCDKEYSRFYHLKYKEVNRFQHKRALALTARKFVRLVFALLKDNRLYRPAE

SEQ ID NO: 156270 - protein, 393 aa, unidentified
MICVGIDVAKDKHDCFILSSDGEVLADVFTIPNNAEGFGQLLQTIRRCTSPQSKIKVGLEATGHYCYNILGFLLDKGMPTYIINPLHTNLYRKSLSLRKTKTDRVDARTIAAMLMSDVDLKSYTDTVYHNEELKSLTRYRFDKVRERAKLKQSVSRLVTILFPELEKLVSSLHSASVYALLSEFPGAKQISSTHMTHLKAVLKNASQGRYGQEMAETIRNAARSSVGSVMPAKSLELQHTIRLIRELDAEIEDIETAIQAIVDEMQSPITTIPGMGVRMGAVILAEIGDFSRFDSPDKILAYAGMSPSTYQSGQLSLSGAYSHMEKRGSRYLRYALYNATKHVCHWDPTFAAYLAKKRAEGKHYNVALSHAAKKLVRLIFAMEKSQRPYCAAA

SEQ ID NO: 156271 - protein, 355 aa, unidentified
MNSEKYIGLDVHQATISVAVMDSQGKIIMESILETKASTLLEFLAGLRGSLFVTFEEGTWAAWLYDLLKPHVTEVLVCNPRKIPLHKQGNKSDKIDARKLAERLRLHDLKPVYHGETGVRMLRELARSYLTVVKDLSRVMNRLKALYRSWAIPCAGRDVYYTRHRRQWLEKIPEAGTRRRAEQLYLQLDMLQHLRQHARRELLVEGRKHAITAKLRQIPALGPIRSALAVALIQTPHRFRSKRQLWTYSGLGLETRDSGEYHYVHGQVRRRKKQATIRGLNKDYNHDLKGLFKGAATRASVLPGPFQDFYQRSLAKGIQPTMVRLTLARKIAAITLTLWKKGEDFDLNKLNSQAA

SEQ ID NO: 156272 - protein, 396 aa, unidentified
MISIGIDVSKRKSTVAIINVMGEILQTPFDIEHSKHGLEKLWDLIKDYPKDQVKFIMEATGIYHLGLLNELQKQGYFVHVANPLLIKKYFDAEIRKGKTDRKDALKLSRYGTEKWWLLQEHSTTDQVYLDLQFLSREYNSFLAAKIKLKVQLSNLIERTFPGLEKILKGHYWALLLDFYELYPCASLVREMSEKKFSTKFIKLAAKKGHRKGAQIAQSIYQLAHECVTFETNNQVAALSVKHCVTLLRSTEEATIDIITQMNELAKELPEYEVVKKMKGVGDKLAPRLIAEIGDVRRFKDSKSLIAYAGIDAPPYQSGQFEGTNRHISKRGSKSLRKCGYEVMMALKSSKPKEDNAVYEYMLKKEAEGKNKKLVKIAGLNKFLRMYYARVMEVYQN

SEQ ID NO: 156273 - protein, 444 aa, unidentified
MAVSGMILIREVADAPVIMGISKPAGLKSPCGEVKIMNPLFVGIDVSSKNNVAYLMKPDGSKHSSFSVQNNLGGAKLLSEKIVSALHSMQLNDVVIGLEATSIYGDSLVYALREDGSLGRFQRKIHVLNPKQVRKFKEAYPDLPKNDWVDAFVIADHLRFGRIAKEVYMDDYRYQALRTLTRARFDIIQNLTREKQRFANYLFLKCSGIAQDKDIQNTSATTIALMEHFETVDDLANADLDELTAFISEAGRGRFVDPDATAKAVQAAARGSYRLPKTVNDTVNQAMSVSIASMRALKEQVKVLDKAIEQHLEIIPNTLTSIPGIGKVYSAGIIAEIGDIHRFNAQASVAKFAGLVWHRNQSGDFEAEHSQMIKSGNRYLRYYLLEAANSVRRCDSEFRRYYDLKLKEVNKYQHKRALALTARKLVRLVFRLLKDNRLYIPPEG

SEQ ID NO: 156274 - protein, 420 aa, unidentified
MKAYNVNDFAALIGIDWADKKHDICEHPKNTKQYHYTVIKHKPEALHKWAMDLKLRYPDQKIAIVCELKKGPLIYALAKYDHLVLFTVNPSAVANYRKAFTPSGAKNDPTDAFIQVEMIKLHIDKLSVIIPESTSMRALAQLVEYRRSLVQDSVDLSNKITATLKNYYPQALEWFKEKDTFIFCDFISKWPSLTTVKKARKQTLLDFFNRHNSHYETVNNARLLSIKEAVPLTKDEGVIAPNQLLVEVLIAQFKVLLMGIEQLDKAIKQLYKKQQDKAIFDSLPGAGPQLAPRLLVAFGYNRERYTDASQMQKYAGIAPVIESSGKKTWTHWRYSCPTFLRQTFVEWAGFSIRYSFWAKAYYEQQKSKGKPHNSIIRSLAFKWIRIIFRCWKTSTPYDESKYLEALKRRGSPLLKFAITS

SEQ ID NO: 156275 - protein, 363 aa, unidentified
MDVHKKTYSLCALLKETGEIIGETKIPADVSLIIKFIENAKKSVDSDDVQIKTGYEAGCLGYSLYWQLAEKGIECDILAPSTMHRSAKNKVVKNDRRDAKNIAANLANGTYKSVYVPTDEDVEIKEYIRMMHDFKIELKKVKQHINAFLLRFGHQYPGKSKWVPAHIKWFKELELSDMHREILDEYLSQLEILSEKIERFKHRLEELSQKETYNEKIGQLRCIKGIDTTAAMTMHAETSDFDRFPTANAFASYCGLTPGEDSSGESYHRLSITKQGNSMIRTTLIEAAQVLVRGTIGKKGKKVKSKQKNQDVKVIDYADKAVIRLQKKYHRMIFRGVKRNIAITAVARELACFVWGIETGHIS

SEQ ID NO: 156276 - protein, 401 aa, unidentified
MQTVRDNGSRVKRFRELKATLRTNRERLLVGIDVAQRAHVVHLRQAHTRVVTPALTIPNTTRGFTQLWQAIQRAQRTTGCREVVCGLEPTGTYHQAVAAFLEQQGADVLLLSSSVAYWNRRTQDGTWDKNDRKDAANCADLLEQGKVLFYSQPTGPLADLRRLVKVLRRARSELASCKARWRTTLRPTLAPMGEPLPNRLRVELPAVLQAWEPAAPGRSALPKGRLPLGLATACADLGAQVTAVQARIATIEAALTPVAERLPAYPLLRTIPGVGPTVGAILVAEIGDIAWYTQFSQLRKLAGLDIVRVQSGQFAGQQRISKCGRGLLRWALYQAAVGLVRTTAGQRRFAALKAKRRGDRCGGFKAMVELAAKQLRLVWGVWRNGRPYDPTRAGGVRRQRR

SEQ ID NO: 156277 - protein, 323 aa, unidentified
MNKDIKYFGIDISHLVFDVTDSQGNYYQFKNSISGFKKFVKLLSINSHCVMEATGYDHYQLAYYLLECGMKVSVENPLTVKRFIQMKLSKIKTDKSDSKLICEYGKQVELKLWKGTSKHQTECLQMTRLLAVYTKQSTMLKNKLHGEAVLGNPSKIVVSSLKRSLKQVQKEIKTLEDKLLILVKEVHQDLLTRLKTIPGIGAKTSLMLVVLTDGFKRFKSGSELCSYAGLTPVIRKSGSSVNGRSRISKIGNQKLRNLLFMCSFNACRYNKACREIYERIVAKGKSKKLTLIAVCNKLLKQAFAIAKSGLFYDDSHRSNLVKN

SEQ ID NO: 156278 - protein, 310 aa, unidentified
MLYLAIDQHAKQLTVCVRNEDGDTVLRRQVSTRPEKVDAFFQQLTSMDTEFMAILEVCGFNDWLVEHLRTWKCREIVLIHPEKPSKKKTDRRDAQKLADLLWLNRERLAAGQVVRGLRRVYMVTQQEREDRQLTSLRKNLGHRRVRTLNKIHRIVNRHNLIWQYPTKTFQTRTGRSWLAEIQLPVIDRLEMDVLLKEWEICEEQIALVDQEIAERASRVDPDCLLNAAQILMTTPGVSHYSGLTLASRIGPIQRFPRPRSLANYFGLTPGCRNSGNAQDRLGSITKQGSKTARFILGQLVVHLLKHDPKM

SEQ ID NO: 156279 - protein, 350 aa, unidentified
MIIIGADYHPGFQQIAYVDTDTGELQERRLEHREIAEKFYRDLAAQETRVRVGIEASGHARWFERLLSELRFELWIGDAAEIRTKRVRKQKTDHQDAELILRLLLEDRFPRVWVPSWENRDLRQLLWHRHRMVQARTRIMNQLQSVALNEGLRCKKRLWRDAGREQLESFALAPWASRRRHDLLGLLDRLTPTIAELTQAIEGEVEKCPAAQRLQTHPGVGALTALAFVLIIGRPDRFQCGKQIASYLGLVPLEESSGQRRRLGHITKQGNSLLRFLLVEAAQVTVRSDQQWRNKYFHLALRRGRKIAKVAMARRLAVRMYWMWRRGWDYEQLKKFGSHAGQPGHRDGAR

SEQ ID NO: 156280 - protein, 361 aa, unidentified
MNANNTQNSSNRALVEAGVTIKLGLDVHAAKIAVCVQVDGATPQPSQLMISERVLGWISALRRKYPVARVVSCYEAGPLGYALHRQLIAAGIENIVVTPQRLDVDGRGQKTDRLDARALVERLDRYVGGNRNALGVVRVPTPQEEQARSLVRMRTQLSRTRRKHEARGRSVMLAQGIRVQGPWWRKSAWAKLAPTLPEWLHRIVAVWQKLAIEAHEEERQVRSELEASAPAELPRGVGALTWVTLAREILDWNRFNNRRQVASYTGLCPGISQSGERTHYRGINRHGNPAVRHALVELVWRLVRWQPQYPPVRSLVDKSLSPRSRRKAAVAAARRLAIDLWRLATGRSTPERVGLTAAFSG

SEQ ID NO: 156281 - protein, 343 aa, unidentified
MEPFPPHLNAVFEVLSMSTSETDYRWLGIDVSKDSLDVYDPSQAVSTRYANTSEGVDALWQTLQSRSDWAVVCEASGGYETLVATTLAAHGCRMSVVNPRQVRDFAKASGILAKTDALDARVIARFGRLLQPPATVFASEAAQQLQDWVRRRQQLVEMLSGEKNRLQQLKGRNKAVLKDEVEAHIEWLKDRIQQLDEKIEQLSQQQSQWREDKALLTSVKGIGPVVSTTLLADLPELGQLNRKQIAALVGLAPFNRDSGRYQGKRTTWGGRATVRSALYMATLVAVHHNPPLRTFYQHLLDQGKEKKVALIACARKLLTCLNAMLKFRTPWQDELVTARYTPA

SEQ ID NO: 156282 - protein, 432 aa, unidentified
MKKIRENAAGIDIGAKKVFVSVEEQEVKNFFTFTEDFMQLRDYLLNHKIKTVAMEATGVYWNILYEILEEAGIDVWLVDGRQTKQVPGRKTDVKDCQWIQQLHSYGLLNRCFVVEADVKELRSYQRLREDHLRSASMHVNHMQKALTEMNIRLKEVLSQIHGASGLAIIQAILKGERNKETLLRMCHSSIIKNKKEEVLKSLEGKYTKAGLFALQQSLDAYNFYQHQIQQCDQMLGKIIKKIAAGNIEQKQQSTRKPIRHNKPDINNLGMSLMKIFDGKDATVLSGVTDYTWMQLLSETGTDLLKWPSEKHFTSWLGLSPGQHSSGKTKRNKRKAGRPKAGQIFRQIAQGLLTSKYIALGAFGRKLRARKGPSIAIKAMARKLAVLYWRIMVKGLDYVENGVKKYEEQLLAQKQKSLIRLANELNMQVSLIK

SEQ ID NO: 156283 - protein, 336 aa, unidentified
MKDIIYDHYIAIDWSAINMAIARMTKKSNKITVIDVPSDIYELQFYLKNLKGTKILTIEETTTSQWLYTELNEYVDKILICDPYRNSLLKEGPKTDKIDATKLVQLLKAGLMKEVYHSNDKFIYLRRIVSGYEDLVKAGVRLQNQRYSLLKICGKDGFEKNNIKLGSRDEQFVLESIDRQIIAYHEEKKGYEKEFEKLARKYPEIKHQKSLPGIGLINAVKIVARVVTPYRFTDKGHYLSYSGLIKLEMISGGKSYGKKNSRYCRMMKSVYKTGVVAAIGGNNPINDYYEYLIKEKGYSDFNARNKACRRLSILSFGVFKSGKKFQPNRKDQVKGK

SEQ ID NO: 156284 - protein, 391 aa, unidentified
MIYVGIDVAKDKHDCFITNSDGEVLFKAFTITNNLDGFNELHQKIASVMDDVTKVKVGLEATGHYSYNLLGYLIDKGLPTYVINPLHTNLYRKSLSLRQTKTDKVDARTIASMLMSDVNLKSYSDISYHNEELKSLTRYRFDKVKERAKLKTSVSRLVCILFHELEKLVPTLHITSVYALLSEFPGAKHIATAHLTRLTNLLSEASKGRYGKDTAITFRDAARASIGSNMPAKSLELKHTIKLIQELDSEIDEIENEIKIIMDEINSPILSIPGINYRMGAMIIAEIGDFNRFDSPDKILAYAGFSPSTYQSGQLDGAYAHMEKRGSRYLRYALYNATKYVCHWDPTFAAYLAKKRAEGKHYNVAISHAVKKLVRVIYHLEKTKQQYIKAA

SEQ ID NO: 156285 - protein, 364 aa, unidentified
MKRKVYVGMDVHKETIQIAYLTSNTKEMVKEQQIKHNEVHIKKFINKLKTEWNEIHCCYEAGVTGYPLYRYLKSLGVNCILVAPGKIPRQRSDKIKTDKRDAIKLARLLRSGDLESIHVPSEEDEAVRDYLRSRDSLRLDLGRNRQRLMKFLLRKGNVYSTTKYWTVSHYKWLNNLHFENEILHETFNDYYSRVRVQEENLKAMDQKIQEIAKSEAFRERVGILRCFRGVDYLTAMFLLSEVNDFRRFKTAGSFMSFLGLVPGEYSSGSKRKQTGITKTGSPRLRRILTEAAWQHRFPGTGSKIVAARRTGQPALVVALAEKASLRLHKKFRNLQLRGKTPQVMITAVSRELSGFLWAAMNLVA

SEQ ID NO: 156286 - protein, 371 aa, unidentified
MNTVINIGIDVHKDSYSLCSYSFATKQAFAQTRIASNSNLVIKYVRKLQEAQPNVEVLCGYEAGPTGYGLYRDLEKAGIGCVIMAPTTLPKASGNRVKTDRLDAMELSKHLAFGTYSAVHIPTSEDEAVKNYTRLRNTRVDALKKAKQNLLSFLLRSGRVFSEGSNYWTNIHYTWLKRQQFTDPVDQETFNEYLQEVHEQQDKVDRYNQRIEQLSQLEAYRDKVARLRCFRGIETHTALSLVSEIGDFSRFANAQQFSAYLGLVPGEDSSGQREKRGGITKAGNTRLRLLLIEGANSTLRSSLYGQKSKKLKARQEGNEADVIAYADRANRRLHRVYQNLTNRGVIKNKATVAVARELSCFIWGMMNNRID

SEQ ID NO: 156287 - protein, 349 aa, unidentified
MKRTTIGLDIAKRVFQVHAVDHETGEVVRRQLKRAEVLEYFAQLPAALVVMESCGTAQHWARELTKLGHEVKLIAAQFVRPFVKTNKNDAADAQAIWTAAQQPEMRFVAIKTPEQQAILALHAIRQRLMKNRTAYVNQLHGLMAEFGVCLPRGWRAMLPQAVGALGEEVSPIPGVLRTELQRQIERIKEVSAQMTDVERQIGCWKRKERECERIAAIPGVGPLTATAAVATIGDARTFKSGRQFAAYLGLVPRQSGTGGRVQLLGISKRGDTYLRTLLIHGARGVLSRMEPAAKNTWLGRLASRRPNNVATVALANKMARQIWALMAYRRTYEPNYATVATATVAKEST

SEQ ID NO: 156288 - protein, 345 aa, unidentified
MKKTIVGVDLAKKVIQVCVVQANQIVSNDEMSPAQFTSWLAMAKPAIIVFESCATSNYWKQVANDKGHDARIISAKLVSQIRQNQKTDKNDALAIVQASQLVDIKFLNGKTFAQQELQSIMKMRELVVKHKVALRNQIEALLLEFNIRVSSRNGGLGGTVQGVLEDAENGFCMPFRQALNATWKLYLQTVEDITEKDKCLAQAIKLHPECEKLLALEGVSTINAVNLYIAIGCGEAGTFKTGRDAAACIGLTPLQHSSGGKTKLGSIGKSMKNIAIRSYLVNGAMSVINHVDKREPRTKKEKWLKQLLERKSKKCAAVALANKTVRTAFALLRQGTEYKAEPIAA

SEQ ID NO: 156289 - protein, 413 aa, unidentified
MEWVACVGIDWGDKQHACMIQPREGTRQSGVFGSSPEEVHKWVLGLRERFPSGAIVVGVEQGQWSLIYALMAYAFVILVPLNPRASKAYRESLRLSGASDDPADAALICDFVLKHLDELRAWRPDDVRTRKIRLLCEQRRSLVDQRTALTHALAAALKEYFPQALQWFGETSPHLRMFLTHWPTLEQARLASIRDITSALKESGRRKASAAAQELIEKIRVSVPLTDDTAIIETHSMYALALGTLIDSLDQQIAKYDKTIAAAWAHHPDREVFGSLPGAGPVMAPRLAVAFGLDRSRFDEARELQQYSGIAPVTEKSGRHCWIHSRWGFPKFLHQTFHEFAAASMPHCEWANAFYHAQRDRGAGHHQAIRSLAFRWIRILFRLWKTGQQYDEAIYLDALKRKHSPIVNRLTAA

SEQ ID NO: 156290 - protein, 360 aa, unidentified
MNEITRVGVDLAKRIIQVLAVNAGGMRVTGRALARDKFLPWCAQLPAGCVVAMEASASAHHWARKLAAMGLDARIIAAHLVAPYRLQGRSGKNDANDAAAICEAASRPRMHFVPIKSVEQQSMLCVHRLREGFKDERVACINRIRGLLAEFGLVFAQSPAALRKVLSDVLEDADNELGGLARLALQRALAQWQELDAHLVWCDERIAAHGKANESVRQAEQLMGVGPVTASAVVATVCDFRQFKNGAQFGAWLGLSPRQNSSGGKYNLGAITKRGDPYLRTLLIQGAKSAVMTAHRRDDPISRWAHALREKSGWQKAVVALANKNARILWAVFVRGKPFDARHVSVKPGSHAAAGIVPGS

SEQ ID NO: 156291 - protein, 438 aa, unidentified
MSNKVIFNLDELFISVGIDVGADFSWMSIALPNQQFVGKPYKILHNSIDSLTTAVSKIKEAEELYSLESRIFLESTGIYHYPLFCYLRDKGFNCSVINPIITKNSTNINIRKVHNDRFDSKKAALVGLKPDLKVSLMPSDLALNCRNLCREYYDLMDNRSAYVNKLQGELRMAFPQYLGIFSKVTINTSLTLLETYTSPSAFLEADKQEIIDIIKSTARFGLTYAQNKYNAIIQAATDANQFGYIIDSNIKRIRLYISFIRKYDEELNSILESLHELVDAHEDADFVKQIHLIETFKGAGFLSAVSIMGEIGDFSAFSKPKQLFAYFGLDPAVKQSGKFEGTKVQMSKRGSAIARCVIHTLTLQSISISRNGEAKNPVLREYYIKKCDSKPKLVAMGAVSHKVCNMIFAILRDNKPFKIIAPQEHIKQYNAAKCDIAA

SEQ ID NO: 156292 - protein, 346 aa, unidentified
MDKLIRIGVDTSKSVFVLHGVDAAEQPVLRRKLRRRQVTEFFGKLEPTRIGLEACGAAHYWARELQGLGHEVVLLPPQHVKQYVGRNKNDAIDAEAICEAMSRPRMRFVPVKTPEQQSALMLAGMRDGLIRRRTQLTNTIRGYAAEFGLIAAKGLDKIEPLLERIAAVDDVPELAKELFAAYGQDYAALKRRIREIEARLMDWHKRNELSQRLVEAPGIGPIGASLLVMKVPDPHAFRSGRDFSAWIGLTPKDHSTAGRMRHGGITRAGDETLRTVLIAGATAVIQQLKRGRGHPSPWLVELVKRKPPMLAAVALANKMARVVWKLMVSGERYNPAHRRAAAMTKA

SEQ ID NO: 156293 - protein, 413 aa, unidentified
MSNSNVVPTPPEPASLRYVVGIDIGSQTCAMCCLTPEKRQVFKPSTFANTREGFDWLFEKLASLKSDPSSILVGLEATSRYGENLSQALLKAGYRLCLLHPAQVHAFAQQRGLRAKTDQLDAGTIARVLLSGEARFGYLPDEHTGTYRELLRLQQQLSEDVVRYKNELHALLVVLFPEFVQVFADSTRPTALAVLKRYPSAQAVVDAGVEQLSHLLHELAPHHYGRPTAQALFALAQTSIASGVAVMARSKSMSIVCDQLEHTLINLAQLEQEIDQLLTNDPQAKRLLAVAEFGPLTVAVLRAELGDVQRFAHMDQVVAYVGLDIQVKQSGKWKGQSKLSKRGSGRVRRLLYLAALRSLHEKHSPFKDYYQRLVDRGLKKGTALVAVMRKMIIVGVHLLKTQDLYDANKVGIQ

SEQ ID NO: 156294 - protein, 344 aa, unidentified
MDHFAGLDVSVKETSICIVDDTGRTVREVKVVSEPEALLQVLSNPGYHFKRIGLEAGPLSQWLFSALAEAGLPVICVETRHMRAVLKAQINKTDRNDARGMAQMMRAGLYRPVHVKTLRSQKQRMLLTHRKLLQSKAIAIDNDLRGTLRNFGLKVGMAGAVKFEARIKELVENLPDLAVLVEPLLVVRRVLREQLGILHRRLLTIVRDDEVCRRLMTVPGVGPVVALTYRVTVDVPARFRNSKAVGAVFGLTPSKYQSGEINRTGAISKCGDEMMRVMLYEAAQVMLTRTNKWSWLKAWAMKIAKHRGMKKAIVALARRLAVIMHRIWVDGTEFCWTRKEAAAA

SEQ ID NO: 156295 - protein, 383 aa, unidentified
MLTVEARVHPLVQARALSKLLKPISNGDAPMSYDYHIGVDYHKAYTHLVVQDGGGKVLRSGKVKNDPRSLAGFLAPYLENSHAVMEASRNWTVMYDWLDELCDDVVLAHPLKVKAIADAKIKTDKIDATILAHLLRADLIPESYVPCEAARELRQALRERMFFVRLRTMVKNRVVTIFDRYPEQTRALREMSDLFGKIGRGQLELLSVSVIDREHIDRALAFIDDINQRIRESEKTIRRFSKDNADVKRLKTMPGVGEFFARLIAAEIDDVTRFRSAKKLAAYAGLVPSTYASGGKCWNGRIIKAGNKWLRWAFVEASIPAMRAEPALKFEYERLKATKGANRAKVVMARKLLTIAYQMLRDQRDYEHRDALGERPSDPSRLS

SEQ ID NO: 156296 - protein, 392 aa, unidentified
MVCVGIDVAKDKHDCFIISSEGEVLADVFTVANNRDGFETLLWKIHTCTNPADEIKVGLEATGHYSYNILGFLLEKGLHTFLLNPLHTNLYRKSLSLRKTKTDRIDARTIASMLMSDVELKSYTNTAYHNEELKSLTRYRFDRIQMRAELKRSVSRLITILFPELESLVPTLHMASVYAVLSEFPGASQIASSNLTRLKTVLLSASRNHYDREKAVEIREAARRSIGSVIPAKSLELQHTLRLIRELDKEINEIEAEIKAIIDDMAPPILTIPGIGYRMGAMILAEIGDFSRFDSPDKLLAYAGFSPSTYQSGKLNATGTHAHMEKRGSRYLRYALFNAAQCVCKWEPSFKAYLNKKRAEGKHYFVAVSHAVKKLVRLVFSLQTSGRVFQPV

SEQ ID NO: 156297 - protein, 408 aa, unidentified
MELIYAICCGLDVHKRSIQACLRRLGPDGRLHQETRSFGTMTRDILEMADWLAAAGVTHVAMESTGVYWKPIYNLLEGRFTVLLVNAKHVKHVPGRKTDVKDCQWLAQLLQAGLLKGSFIPDRPQRELRELTRHRTQLVAEKTRASNRIQKILEDANIKLASVASDILGASGRDMLRALIRGETDSTKIADLARRQLRSKIPQLRPALEGKVTEHHRFVLGELLDHLEYLEGQIERFTRRIEEVSRPFAPAIARVATLPGFDQRSAQNVVAEFGADMEVFPSVQHLASWAGVCPGSNESGGKRKSGKTTKGNRWLRTALVQAAWAATCKKDSYFQAQYRRLAARRGKKRAILAVAHSLLTVIYHMLKNGSTYQELGGDYFDKLNKNRLLPYFVRRLKDLGYQVSLEAA

SEQ ID NO: 156298 - protein, 362 aa, unidentified
MSMRTILAIDLGKFKSLFCWYEPQEQKFRIRTAASTPAAFHDLLVEREVDRVVIEVCDMAGWVKDLCQTLSIAIQVVNPNGEGWRWRNVKKKTDKEDAKKLCRLSLSGDVKTVWLASRIERHWKSLILYRHKLVERRTAIGNSIHALLVCEGKAMKGRECWSGESMEALRAMARPIGECGKEDCWQGHLGMELESLEHVRRQIRELDQKLNEIGEKDPRVVLLRTIPGVGPRLAELAVAVIGDPNRFENAGQVGSYGGLVPRRYQSGQMDRSGRISKAGCGKLRKLLVEIAWGMLKHNEEGRKVFMRICKGHKTRRKQAAVALARRVLTWCWAMLRDGTTWRKPGKEMDLEKELENGLSVLE

SEQ ID NO: 156299 - protein, 405 aa, unidentified
MDITPIHRRVIGLDVHQNKITACALIEQADGSVAVEQGEFGGFKRDRRALAAWVHGLAPDIVVMESTGIYWKSPYAALEKVGIAAWVVNARHVKNVPGRKTDISDAQWLATLARAGLVRASFIPPAEIRHLRLIARQRQKLGGMLAAEKNRLHKVLADAGIRLNVLLSDLHGQSARAMVKALLADAPIHAILARAGRLRASREDLFEALQPEELSAKHRFVLNEIMAHIEYLEATMARFEQQLLVGLAPWEPQMRLLETVPGIDRLGAAMLLVEIGTDMDSFGSAERLASWVGICPGNNESAGKRKSGRTRKGNAWVRRLLCEFAQAASRTRCALKDKFSALAIRKGHKRSIVALAHKMLRIVYAMLANTTPYQDRTVDYEALMVGRNAPRWLKMLAKHGYIATA

SEQ ID NO: 156300 - protein, 444 aa, unidentified
MSDVTLALSPEPDWAAFVAIDWADKEHCWKLCAAGSKKYEEGALENTPEALVDWATKLRDRFGARPIAVGLEQSRGPLVYALSKFPHLVLYPIHPSTAARYREAFFPSGSKDDPGDTALLLEILLHHRDRLRRLEPDTVETRLLQMLVEERRKLVDERTRLGNQITAWLKTYFPQALDLVDKIISPMACDLLDRWPSLEQLQGTNPSTLNKFFLKHNCRSEKRIQERISSIYKATRAVEDAALLEAGSTAVKVLAKMVQSLNLAIQSFDQRIEVVSSTHPEAGLFNHVPGAGPALRPRLIVAFGTRRDRFTSASDIQNYSGIAPVTRQSGRSKSVHFRRACPKFLRQTFHEHAAHSIPKCPWAKAYYQHLRDMGVGHHAAVRALAYKWIRILYACWRDEKPYDDAIYTQALQKRHSPLAKLLPAFSLETNAEGHKKISTNRLTE

SEQ ID NO: 156301 - protein, 430 aa, unidentified
MTKRTSTPADAVLVAIDMSKHRQEVLIERPEGGRRRRMTVMATKADYDRLASELGDVARPVIVGFEATGNYHRTLAHRLLSAGFELRLISSVALARTREALHNGWDKNDSKDAQVILHMLRIGATQRYVDPLAAGINDLQEMSKTHEAISKAKTQTWHRLLTHYLPLYFPEIERFAGNSRSDWFLALLERFPTPASMITLGKEAFTREAWGLVGRKVSKARLLNDIYETACASVALPVDEDSIAIAMFRMVIAQARSLIRQRDEIERTAHALLSDNRDYQLLRMIPGIGPINALTILAEAGDLRRFAHHRQFLKFCGLDLATCQSGTFRGRTKLSKYGNARLRRTFWMATQVAIRQRDNSFRDKLGRYVAGHGNDPDRRRKAMTALTAKMARVAHAVIKTGAEYRPFVERADTRWKDPSLSCREGAAATL

SEQ ID NO: 156302 - protein, 385 aa, unidentified
MTESSDYESVQVFIGVDVGKDTHHAVAINRSGKRLFDKALPNDENKLRSLISDLKQHGQILLVVDQPATIGALPVAVARSEGVLVGYLPGLAMRRIADLHAGEAKTDARDAAIIAEAARTLPHALRTLKLADEQIAELSMLCGFDDDLAAQTTQASNRIRGLLTQIHPALERVLGPRLEHPAVLDLLQRYPSPEKLASLGEKKLAAQLCKLAPRLGKRLAADIAQALAEQTVVVPGTNAAAVVLPRLALQLITLRKQRDEVALEVEQRVLAHPLYPVLTSMPGVGVRTAARLLTEVACRAFASAAHLAAYAGLAPVTRRSGSSIRGEHPSRRGNKALKRALFLSAFAALRDPLSRAYYTRKMSQGKRHNQALIALARRRCDVLFA

SEQ ID NO: 156303 - protein, 316 aa, unidentified
MICGVDVSSKSLDARIGRDGAAACFTNNPKGIAELAEFCRCHKVHLVAMEATGGYEKKPFALLWAAAIQVAVVNPRAVRNFAHGMGLLEKTDRIDAGVIAWYAQTKGCVAVSPASAEQQQLKAMVTRLRQLTELRAAQRNQRLLVTDKVVLKSFRKLLDLVQQQIHDLEVAIAGLIAADAVWHKLDQSFRSIKGVADRTVARLMAEMPEIGTLSNKRISKLAGLAPLACDSGQWKGKRSVRGGRRTIREILFVVAAGVSRHNADFRAFRERLAAAGKAKKVIRIALAHKLLVRLNAKARDVLQQLREAPPAAVLLS

SEQ ID NO: 156304 - protein, 405 aa, unidentified
MIDWSAAKHDICVLNENGGVIATTVVPHTADGLLKLEALRQKLGVAPAECLVGIETAHTLVIDFLWARDYSHIYVIPPNVVKSTRGRYRQSGARTDTSDALLVADLLRTDLARLHPWRPDSLLTHQLRNRVGLVSHLTQTAVRLSNRLYAVLMRYYGAGLTIFSGLQTQIALQFLLAYPTPTAADALTFAQFKTFATEQHYPHPHKLAAAFARLKDAHPVSTAQTITVFEAEMQQLAQLLLEVVQAKRSHVRELQDLFKQHADYAIFASLPGAGDILAPALLTKFGDDRQRFPNAESVQALAGTCPVTEQSGKRRVISFRTACDHDFRAIVQQWAKASLKHSAWAQAYWQQTRPQCRSDSHGYRCLGNRWLAIAWKLWQTHTPYDEAYHLQQRLKRQQPRPAEHQ

SEQ ID NO: 156305 - protein, 361 aa, unidentified
MKRVQSNKLDFSGQNIYVGIDVHLKSWSVAILSEYSALKRFSQSPEPEALHKYLVSNYPGANYFSVYEAGFCGFWIHEKLTGLGITNIVVHPADVPTMSKEKLRKTDAVDCNKLARELRSGSLEGIYVPKADVLEIRSLIRTRNMIVKDSTRTKNRIKSLLRFHGVDIPEEFTRSSIGRWSKRFLAWLHSIELSTEYGKKTLELHLEQFVRLRNMLLQETRAIREISRKAPFEKPMRLLTSVPGIGVTTAATLMVELDDVVRFKNADHLASFIGLVPMCHSSGESNGTGDITVRRHFMLRCLLVEAAWIAIRRDPAMTVAYTEYRRRMNPQKSIIKIARRLVNRIYYVLKHEKEYIPCVVE

SEQ ID NO: 156306 - protein, 410 aa, unidentified
MRRVRDRVAGIDVHRDTAVACCQVWADQQLTVDKKTFSTTASGLRSLREWLAEREVELVVMEATGDCWEPVFYRMAGQLREGRVVKAQHVKNVPGRKTDMADAEWLADVAAHGMVRPSFVPPLEVRSVRDLVRYRKTQIKARGQEIQRLEKVLQDAGVKLTSVASRVWSKSAEAMVGALIGGERDPEKLAELAKGRMRSKIPELIEALEGSWRPHHSVVAARILAHIAFLDAQIDELNTEIVEATRPFDAAVTLLETIPGVSTLTAQSIVAEIGVDMTRFPTPGHLAAWAGLAPGSRESAGKHKPSGTRKGSRHLRTAMIEAAKSASRTKGTFLAARYRRVARRRGHQKATVAVAHSMLVAAWHMLSTGEVYNDLGEEHFDRYQQPERRHHRAITELQAAGYTITTPQAA

SEQ ID NO: 156307 - protein, 385 aa, unidentified
MLKIVYPICCGMDVHKSFLVACIASTNECGVTTYKSRRFSTFTKDLRLCADWLSANNCKDVCMESTGKYWIPIYNILEASCKIVLAHPKYVKAIRGKKTDKKDAKWIADIFKHDLVSGSFIPPADIRQLRDLVRHRWKLNNFIVGEKNRAQNCLTVSNYKLDDVFSDVFGKAATQITSYLLEHLNEPLSDVSNFRTKGMKATDAEIRDAADGNICAEQAEKYTSQLSLVMSVPGIQTFSAISVIAEIGVDMSVFPSSKHLCSWAGLTPQNNESAGKKKTTRISRAGAYIKPLLVQCALCAIRAKRNPEIRNRYLSIKKRRGHKKAIIAIARMLLTAIYNILKKNEPYNAELSHKVDVPPAHRSVTIEEAVFILQRQGDLITPCTS

SEQ ID NO: 156308 - protein, 342 aa, unidentified
MYYIGLDVHKKTISYCVKDVIGRICQEGKVGATRWELDLWIKALPQPWTVAMEATIFTGWIYDHLKPYAADVKVAHPLMLRAIAAAKKKNDSIDAGKIADCLRCDFLPECYMASTEIRERRRTLRYRHLLVRQMVQMKNRVSGLLMETGVSHNKRRLHKLGYFPELLANADAVSESIRPLLQLSRDSITQLQRTESAMIRSLQRDPLLAERVRRLQTIPAVGKVTALTWALEMGEISRFRSIRQAISYCGLCGDEKRSAEKVMRTPLSKQRNKHIQRVLVEAAKLALRRNPDLALVYENAKKKGNANCATLAVARKLVAYLMAVDREQRDFEPVREFVGIAA

SEQ ID NO: 156309 - protein, 327 aa, unidentified
MMIIGCDYHPSWQQIAWVETETGEMGERKLMHADGEAERFYRQLGPALIGMEATGNSHWFVDLVAEMGHQVLIGDAAAIRAKQVRKQKTDRRDAAHILDLILKNDFPKIWMPSIAQRDQRQLLIHRWGLVRLRARAKNELQHLAMNKGVQKKARLWSKTGQKLLRELPLQYWAGQRRENLLRLMTIFDEQIAVLDLAVEKAAQESEMARLLMTQPGVGPITSLAFVLTMGDVTRFQRGKQVASYLGLIPCEYTTGGRQRLGAISKQGNRFLRMLLVSLPQETEERGQGGGGAQVGNTTLLDATDQHSVSRDRSHGEQLAGGPGRRKR

SEQ ID NO: 156310 - protein, 465 aa, unidentified
MERLSPLHSLTRTSTVQLMVAPPSEVSTREGFAFLPRPSGRHAEQEPNRDVLYTRCCGLDVHKARVTAGCRWMDHAGRSHHEIRRFATYRSELRELANGLRQQHVEPVAMESTGSYGRPVWNELESQGLPRLLANAQHLKTVPGRKSDVKDPEWIRDRWQHGLIKPSFVPDPKMRDRRDLTRRRSKVVSDHTRVVNRIPARWEDANIKRGNVVSDILGVSSRAMLQGLLEGRCPGEWAELAQGRLRSKRQELQQAWDGHFRAEHAFLLQRLLLQTHFLEQQEGVLRREMGRRLDDQARHAMALGDTLPGVHEAVAWVLVAEMGTRVEPFPDADPAASWTAICPGNHESAGKRRSGKTRKGDAGLRAALGEAAWAASRTKGTYLSALFRRIAARRGPKRAIVAVAHAILIIAYQMLKHNEPYRELGENYFDKINPEKTATRLIRRLQKMGYQVSITKSAAETPCAP

SEQ ID NO: 156311 - protein, 412 aa, unidentified
MEVLYRSCCGLDVHAKTVVACLLKDGHKEIRTFATMTDELLALSDWLASEGWTHVAIESTGVYWKPVFNLLEGQQQVLLVNARHVKAVPGRKTDVRDCEWLADLLRHGLLKASFIPPVEIRELRELTRYRQTLVKEQAAVANRVQRLIESANIKLGQVASNALGVSGRLMLRAVADGETDAAKLAEMARGTLKQKRAELARALEGRVTAAQRFVLAELLTRWDELEAALARVGTAIKEEVAKCHDPFVAEAVALLQTIPGVGERVAQTIVSEIGVDMQRFPSDGHLASWAGMCPGNNESAGKRKSGKTTKGSVYLRAALVQAAWAATHTKETYLAAQYRRLVKRKGKNRALVAVGHSILVIIYHVLARHASYSELGGDYFDHHQVAQQRQRLIRQLEALGLKVSIEELPAAA

SEQ ID NO: 156312 - protein, 343 aa, unidentified
MGDVITNGLDIAKSVFQIHGVDADGAVVIRKRVSRAKVLEFFAAVPRCLVSIEACPSAHYWSRKLEVLGHTVRLMPPSYVKAYLKRSKNDANDAAAICDAVTRPSMRFVSTKSEQQQSGLMLHHSRRLFVRQRTMLSNAIRGHIAELGIISAKGRNGTGELLEVIANAKDNCIPAAARFSLEVLARQYIAIATEIGVLEKRIHAWHRSCEESRRLEEIPGVGPIVATALIAEVGDWKAFASGRSLAAWIGLVPKQHSTGGKERLGGISKQGNRYLRWLLVAGAMAVIRYARRHGTKRLWLTRMMERRPIKVAAVALANKIARMAWAIIVRGERFREPRLLLAA

SEQ ID NO: 156313 - protein, 337 aa, unidentified
MGKEYVGIDLHRRRSVIYRMDEAGERIDCVRINNDPVWFGQEVSKSPKGSDVVIEATYSWYWAVDLLRDLGYVVHLSNPQGNDWGHRRVKNDERDARDLADLLRLGRLAEAWIAPPGTRELRELVRFRYKLSNLRTGIKAQAHAVMAKNGILPVRNDMWGESGTAQFDSLELPDAYHHRLSVLRDLVDYYDDEIARLDRNIHSMIKDDRGYNAVQAIYGVGQVFAAVFVAEIGDVHRFDSPQALCSWAGLTPLHRESDGKVHRGRITKQGSRLVRWAAIEAVARYHGGEAFSESFEAIAKRRGRTRANIAIARKVLTLVYYGLRDGEIRCLQHTKAA

SEQ ID NO: 156314 - protein, 341 aa, unidentified
MNKLSVVGVDLAKNVIQVSVLSRSNRELQNRALTRRKFAGFLGSQKRSLVAFEACATAHYWARVAQGHGHAVKIIPAKAVTPYRQGHKTDENDALAVAEAASRPSIKEAPLKTVEQQGLQAIQRSRELLVHARTGLSNHLRGLLMEFGIVIPQGFAALHRQIPEILEDGDNELPDLYRPTLSLLYGRLCELRDDLKRLNAEIEGLVHKNPACARLMALEGVGPIGSVLLFATLGTGGAFVNGREFSAYLGLTPKQYSSGGKVNLVGLGRRVANKRLRAVLIQGARAYVYKMKEPRTSKGRWLRGITERGGHGKAAVANKNVRTVWAMLTQGTEYRRYPAAA

SEQ ID NO: 156315 - protein, 343 aa, unidentified
MDYGAIDLHVRHTLIRFVNQEGTVLLDRRVTTTVEELQHVFGGRPRARILIESGTDSEWVAQAIEACGHEVIVADPTYALMYGHRDPRIKTDRRDVAALAEACRLGIYRRAHRVSAAQRERRRALRVREQLVRTRTQLINLVRSQLRQEGYRLPAGCSTTVVRRCQALPLPPGLRAALEPVLTVLTTIGDELRACTETLAAVAAQDPIVQRLQTAPGVGVITALTYRAVVDDVARFADARGVAAYLGLVPREDSSGTRQRKGTITKAGPPGLRTLLVQASWVVWRQRRGGGALHAWVHQLAARRGRRIAVVALARRLGRILFAMWRDATDFGVAPTAPGATVA

SEQ ID NO: 156316 - protein, 354 aa, unidentified
MSPVNSRIAAIGIDIGKNSFHVVGQDERGAIVLRQKWSRGQVEARLANLPACLVGMEACVGAHHLSRKLQALGHDARLMPAKYVRPYSKGQKNDFRDAEAIAEAVQRPTMKFVATKTAEQLDLQALHRVRERLVGQRTGIINQIRAFLLERGIAVRQGLRFLRAELPTILATRSDALSPRMLRLIEDQAGDWRRLDARIEDLSEEVEALARQDQACERLMTVPGIGPIISSAMVAAIGTGDAFSKGRDFGAWLGLVPKQISTGDRTILGSISKRGNRYLRALFVQAAWVVLVKLGKKWERYGLRSWIEAAKKRLHHNVLAIALANKLARIAWAVLHKGRAFECVKVNEMAPRSA

SEQ ID NO: 156317 - protein, 373 aa, unidentified
MPKYSTAFGMDVHLRSTTVCALDADTGEAVTRRFPGNPWGEIAGWMDGFPGPSLAAYESGYLGFAPQRELAGLGVECVVAAVSKIPRSAADSASKNDRNDAARMAKAILAHDISPVWVPSPEVEGIRDLAGAYDGATARLATAKQRLLAFLAKRGFVYGGTTPAGNPRKYWTYDFLRWLDKVRPEDDGGVRTLAALRNEVEAAAEARADLLSEYRAAVDASPIAAEAAALQSIKGCAFALAAAFASEVGDFTRFRSGRQVTAYFGLAPSQRSSGDSVRLGGISGAGNALVRKLAVEGSWCYAAARHQPKLMPRDTGVPLEIRMHGRKGSERLLRRREEMIARGMPAAKANAATAAELVRWLWALGTMCREGAE

SEQ ID NO: 156318 - protein, 446 aa, unidentified
MPRKPEEIDAEDCGEVVERAAAIDVAKASGKVCTRVPHPHIPGRRVTKVWDVGATTGAIMALAEELTRQGIERVVVESTSDYWRPFVYLLEAHGLLIWLVNARDVKQVPGRPKTDKLDAVWLCKLNERGMLRPSFIPPVEIRELRDYTRLRADLVAERTRHKQRVEKLLEDSLIKLSTVATDIFGKSGRAMLDALIAGERDPDALAELALGKLRSKRPALREALTGRFDQHHADLIAMLLDQVDTLTIKIDTLTLRVEQLLADIPAAAAPPRPGPDTGDTATAPLSAVARLDEITGIGMMAAQTIIAEIGLDMNQFPTAGHLISWAKLSPRTIQSGTRNRTAKTGKGNPYLKRVLGEAAASAARTDTFLGERYRRLVKRRGKLKALVGVARSILVIIWHLLVDPTARFHDLGGDFYTRAVNTQRRTRNLVHQLEVLGHHVTLTPAA

SEQ ID NO: 156319 - protein, 338 aa, unidentified
MKVYAGIDLHSSNNYVGIINEEDQRVYQKRLPNQLEHILEALKPFKESMEGVVVESTYNWYWMVDGLQAHGYKLHLANPSAIKQYEGLKHTDDKWDSFWLAHMLRLNILPEGYIYPKEERPVRDLLRRRLLFVKHRTAHILSLQSMISRNLGTGMSVRAIKRFDEGAAEILFHQPHLVLAAKSNIAVIRFLTERIKLIEKAVKSHITLRDEFKYLLTVPGIGDILALTIMLEVGDINRFPQVGDYSSYCRCVKSERLSNGKKKDENNRKNGNRYLSWAYVEAAHFATRFCPHAQAFYQKKMAKRNRVVAIKALSNKLARASYYIIRDQVPYDTSKLFR

SEQ ID NO: 156320 - protein, 570 aa, unidentified
MVVVGTDAHKYSHTFVATDEVGRQLGEKTVEATTAGHATAIMWAREQFGLELIWGIEDCRNMSARLERDLLAAGQQVVRVPTKLMAQTRKSARSRGKSDPIDALAVARAVLRETDLPLATHDETSRELKLLTDRRDVLVAQRTSAINRLRWLVHELDPERAPAARSLDAAKHQQALRTWLDTQPGLVAELARAELTDIIRLTGEINTLAQRISARVHQVAPALLEIPGCAELTAAKIVGEAAGVTRFKSEAAFACHAAVAPIPVWSGNTAGQMRLSRSGNRQLNAALHRIALTQIRMTDSRGQAYYQRLQDAGKTKRAALRCLKRRLARTVFQALRTVHQPSSEHTQPAAACHRSYCSSHLGEPPRLTDMTQKTRIQPLPPKRAGLLIRALYRIAKRRFGEVPEPFTVTAHHRRLLIANVVHEALLQRASRKLPPSVRELAVFWTARSIGCSWCVDFGAMLQRLDGLDVDRLTDIDNYATSSKFSDDERAAIAYAEAMTADPHSVTDEQVADLRARFGEAGVIELTYQIGVENMRARMNSALGITEQGFNSGDACRVPWAAPDVPSAESR

SEQ ID NO: 156321 - protein, 374 aa, unidentified
MEEISVIGIDLARSVFQLEALSSDGAVVWKRRLRRAAFMRFMEKQAPRCLVGFEACGGAHYWGRFLGDLGFQVKMMAPKAVKAYREGPHKNDGRDAHAAAEAASRAQVRAVRVKSKAAQAVQALVRVRLLQIKQMVQTGNQLRGILTEFGIVMPRGHHRLQQAIIALGEDPRYQRLPPELREAIVGLREQLAEQVERVRLATAALAQATRADPACELLRSVPGLGPINAAGLSVALEAPQSHRNARAFAASLRLVPRQWQSADKQQLRGIAKQGASDIRRNLVLAGQSLLTMIERRQEPPQDRLLIWAQRLLRRKQCDVTAVAVAAKLARIAWAVLAKGQAQIPQVEEGGVPTPEKVHEIGGRQQQTPGDELHR

SEQ ID NO: 156322 - protein, 352 aa, unidentified
MPTITTVGLDLAKKVFQVHGVDAEGKVVVARKLRRKEVLAFFAKLAPCLVGMEACGSAHYWAREIAKLGHSVKLMPPKYVKAYVKRGKTDAGDAAAICEAVTRPSMSFVPVKGVEQQGLSMLHSARSQLIGQRTQLINAVRAHLNELGIIAARGLLGLAELAAIVRDESDQRLSATARAALMVLVHQIEIVSTEIAALDTALRKENKASELGPRLETILSVGPVTASAFRARVTDPKLFDNGRHLSAWIGIVPENDSTGGKVKQKGLSKKGDRYLRSLLITGAMAVVRQAKIRPDKRPSVTKLLTRMSKKQAAVAIANKTARIAWAIMVHGGVYDAAHRAPQCRAEACAATK

SEQ ID NO: 156323 - protein, 417 aa, unidentified
MWNKATRVKSSVESASNKHIGGILMVCVGIDVAKDKHDCFIISSEGEILADVFTIPNNAEGFDTLLQAIRRSTRPEDKIKVGLEATGHYSYNILGFLLDKGLPTYVINPLHTNLYRKSLSLRKTKTDRVDARTIAAMLMSDVDLKSYTDTAYHNEELKSLTRYRFDKVKERAKLKQSVSRLVTILFPELEKLVPTLHMASVYALLSEFPGAKQIARAHLTHLKALLNDASKGRYGRDMATELRDAARCSVGSVMPAKSLELQHTIRLIRELNTEIEDIESAIQTIMEEMQSPITTIPGIGFRMGAMILAEIGDFSRFDSPDKILAYAGMSPSTYQSGQLSLSGTYSHMEKRGSKYLRYALYNATKYVCLWDSTFEAYLAKKRAEGKHYNVALSHAAKKLVRLIYAMEKSRQPYNSVA

SEQ ID NO: 156324 - protein, 400 aa, unidentified
MLSIGIDVSKGKSTVCGMKPGGEIVYAPFEVQHTREGMSELVSLLRSSGEEVRAVLESTGSYHCPVVAALLENGIFVSVVNSLRMKRFCSQSIRKVKTDRIDAMQIALYGLAYWQELQPTRLPEDTYRELQLLARQYYQMTSMLIKAKVDFNALCDQVLPGMQELMNDHAGRHKLSDFVLRYHHTTHILEMGETRFRKDYCKWAEKKGYRNCERMAALIFATAQNGIPVLPNAPSTQIVITEAIRVLHTVEASRDAILTQMQALAKTLPEYSLVREMPCIGDTLAPRLIAEIGDVRRFHSKRALIAYAGIDAPPYQSGKFCANNRHISKRGNRYLRKTGYEVMQSYVMHKPANDPIFMFIEKKRSEGKCGKLAMVAGLNKFLRIYYGKVTELYRSLPAIE

SEQ ID NO: 156325 - protein, 385 aa, unidentified
MIYVGIDISKYKHDCFIATKNSNHFSFENNQSGFKTLLDHFQSFQKQDIIIGLEATGHYGDNLKSFLTSHGYTFMEINPFLVKKFSDSKSLRKIKTDKKDAKLIAEFMTTVDYKAYHHQSYHISALKSLTRWRSKLISFRTSQYNMMTKTLDIIFPEFKPFMKEQGYSDTSLYILKRFTTPAKIAKMNDSHYDAIRKRSMGKFNYPKFSKFRALASETVGISQPFQVAKLKSLISYVEKLNEDIHHIESEIKEIMKHYPTYFQSIKGMGIITAAIILAEYGEISLFDNPSQMVSYAGLDSSIHQSGTMASTGKLVKRGSKFLRSALIKVTMTVMIYNPVLYSYYDMKRKQGKHHRVACVHLAKKLIRIIHHLEKTQTTFNPQLLN

SEQ ID NO: 156326 - protein, 360 aa, unidentified
MNNQKYVGLDVDQATIVAYVSDGDGGFVMETMLETKPNSIRQFFKGMEGPVHVAFEEGCMAAWLYDLIRPLVKEVIVCDPRQNKLIQSGNKGDRVDANKISRLLRLGELRSVYHGDQSIRDLKELVHTYDSLVRDSTRTMNRLKAVYRGQGIASRGKRIYSKLTREDWIKKLPAQAARSHATCLYKQMDSISELRAYAKREMVKAARKHSIYKQLAKVPGFGPIRVSQVIAEVGTPHRFRTKRQFWTYCGFAVVTHMSSEYEVIDGRRRRRNKPLQTRGLNNNFNRRLKAVFKGAATTAIEKEPFKQYYRRLIENKMRAEMAQLTVARKISAIVLTMWKKGDSFDPDRVNQAEKSPGDEH

SEQ ID NO: 156327 - protein, 311 aa, unidentified
MKDFVGIDVAKAHVDVHVSSSSQATRWLNNRSDIRKCVKRLVVLQPALIVLESTGGYERDLAVALDAASLPVVVVNPRQVRDFGRAKGRLAKTDRIDARLLAEYAAAMSPERRGIPDRRRRTMQALVARRRQLVKMRTAEFNRCDHTHDKAIAHSLRVVIKTLDGEIGKIERQLADLIAEHPELQDKMQRLLSVPGIGQTTAAMLITEVPELGELNRRQIAALIGVAPINRDSGSFRGKRMTGGGRQAVRTRLFMPTVVACHYNPVLMRFYQRLLQNGKNKMTALVAAMRKLLTILNTMMAKGENWNPKLT

SEQ ID NO: 156328 - protein, 398 aa, unidentified
MNAVGIDVSKGKSTVAVIQPFGVVIAEPFDVSHTESDLNKLVQLIKSLSGETKVVMEYTGAYYEPIANALHNQVIFVSVVNPLLIDDYGTNRVRKVKTDKKDSLKIASFAIDKWLDLREYIPANDIRKTLKILNRQYVQYNKILVMQKNNLISLLDSCFPNANTLFTSPRRESDGHEKWVDFVLKFPHIHSISKLSLSAFKVKYQSWCRKNNYNYSDKKVADIHSYCKTQISVLPMTVSVIKIITEAAVMLNSTLETLCTFRDEMDRLSSTLPEYNAVMGIYGVGKVLCSQLIAEIGDVRKLNNSKSLVAMAGIDPPPNQSGKVDTKSRSISKRGSPVLRKTRFQIMTIIIQNKPVDDPVYQFLNKKRSEGKPYRVYMIAAAHKFLRIYYARVMQALN

SEQ ID NO: 156329 - protein, 380 aa, unidentified
MTVPVQFVPRNYDVFAGLDVDKKSMAVSFTDHEQLKQALRLPYSAELLLSYVRKHFPGQRVAFVYEAGPTGFGLYDELVAAGHPCLVVAPSMVPTAPGQRVKTNRLDARKLSEGLRGGQLRSIHVPSTNYRELRHLVHLRDTHVGELRATKCRIKALLTYEGMVFPGNDQWSARVLRELHALPCSPAVHFELDHLIGTLHFHFNAAATVQKEIRRYCQNDPELRQSISLLQSIPGIGWIVAAHLVARLGDWREIDNVRSIAGFLGLVSSEHSTGEKENRGAITRAGDSRLRNKLIQSAWVTIRKDPELREFYRRIYARHPQQGAARKAIVAVARKLTTRIYAVLKQQRPFVLREVSTAPLTAEETAGPRERLDGQQNEQP

SEQ ID NO: 156330 - protein, 342 aa, unidentified
MKTVTTIGIDLAKNSFSVYGVDAKSKPVLSRTLSRASVVRFFANLPSCLVGMEACASSDYWARTIESLGHEVRRIHPRYVKAYLLGAKNDANDAAAICEAVQRPNMRFVPHKSPEQTDIQCIHRIRQGYVKSRTALVNQTRGLLAEYGIIIRQGICAVRNQLPALITDEKNELSGLMRRNLTSLYESLCFLDDRVHEQDKLLKVVAKENEACQRLMKVPGIGIMTATILLTIAGVASNFKNGREFAAFLGLVPRQNSTGGKVRLLGISKRGDCYTRTLLIHGARAALCRMISGYTPEYRRNLWAVELAARRGKNKASVALANKTARVVWSLLTQGGEYKHAA

SEQ ID NO: 156331 - protein, 431 aa, unidentified
MLKINPLSTLYVGIDVSSKSNYVCALDFYKNKYINSSFANNQPGAEELALKILECLKEHPDITTIVAALESTSVYSIHIANYLSSCEELMRFKPYVFVLNPKCTANYKKSYIGLGKSDPIDAFVIADYARAGNIESEPWRGSQFLALKRLTRHRLHLVECMTREKTYLVSNLYLKFSELQMLEGDDQPFCDIYGATSSSVLMEYLSPEEILVSSEEDLIAFLAEKSRNRIKDISKTADLLKKAARDSYRLDKALYEPLNVSIASSFNCIETFKREIKVIDNAIEKEIKGLNPNAFIILQSIDGIGPVFAGGIIAEIGDITAFHSSDALAKYAGLTWKSNQSGDFDGEDTPMIKAGNRYLRYYLGEAANSMRKHNVEYGAYYRKKYNEVPKHQHKRAIALTSRKFVRLVYGLLARNQLYSGVSLDTSIKDSN

SEQ ID NO: 156332 - protein, 425 aa, unidentified
MKITQTAQKIKVNFAMDVSVDVHKDTLNCFFETEGREYYDEFSNRNTMIEKKLKAYHQVATEHGRKTLRIICEPTGQYQNKLFRTARKMGFLTCFVNTESVAKFRVIETNDTGKTDIKDPRVIRTLGRLEKTIKHRHLDNEYLVLRKLNRVYDDAERAIISLKGRINKLLVELYCDYSFKKDFLYNTSGVALVEKFQCNPYRIVKSGYKRFSKAMKKSAPRIWEKSLQRLWNDAQSSVLNELPEEYVETLQEHLLQLYQDYLQQAARREEVSERMIILLKRLRAKDPNIPPATRGVINDRNLARLLGETGPLHDFANWRLLMRYAGLNIRMRQSGRYSGLNKITKKGRVLLRKILMNIALPLVKRSSIYGEYYHRKKDVDKMVGNKAMTCVARHFLRKFYGWYKSGEAFNLDRFFTCETQYRKAA

SEQ ID NO: 156333 - protein, 387 aa, unidentified
MSKNKGRVVGLDVHPDNFAGAVVEGTDPASAQVLSTSTRVELEQLEQWALRHTRREDTLVLEASGNAFAVAARLRAIGREVEILESHRAGKVGKVYCANDRVDAVKIARIYLSALSPIVWQPDQKTIERREIFSAYQAVVKESTRAKQQLRSMLNEHCVRLEKGFRLCHPNAIRRLLALREWTPARTMLLQQLHGSLLAARARRTLLRRHMAQEIAAEEALLRLTRLCGINLVTLYGVAAAVGDVRRFSHSKKLVAYLGLNPSVSQSGNFEGSGALKRHGRGALRALLIQSGKKLLEVNNPLQKWGLAIAARRGRNKAAVAVARKLCVALWHVLMGHVIGALERLDTLETKLSKFATEIGPAALRAFGYNNKAEFVERILYVLRSYP

SEQ ID NO: 156334 - protein, 334 aa, unidentified
MKKDHYIGVDISKKTIDVAIYVKNPTGKFPIPHETFQNGNDGFKEMNRWLRSKGVAISKSFFCMEATGTYSYELCMFLEEHKVSYSVQSPLHLKRSFGLTHGKNDKVDAGRIAYYAYLHREDIKESRLSSDSVRKLKSLLAERKSLVVEIARCKAQLKEVGAHTPESGTVKRTQALQVFLEAQVEAIEEEMTQTIECDEKLNKNYRLLLSVDGIGIVNAINTIIATHNFEMFDNARQYASYIGVAPFEHSSGTSVKGRTHVEPGAKMLKADLTGAVRTCINHDKEIKKYYERKMAEGKAYGVVANAIKFKLLLRMFAVIKRQTPFVRKPDFIFN

SEQ ID NO: 156335 - protein, 384 aa, unidentified
MDQATPSTASANTLHCALELSKKSWLLAIQFPDREQPSLYPIAGGDAEKLMAKLTQARDRWAKTSGALPMITLCYEVGYDAFWLARCLKARGVECLVIDPGSLQVSRRGRRVKTDRVDVKTLLRTLIAWCRGERHVWSLVRIPSIDEEDLRRSHRERSRLVRERTAHINRIKGLLFAQGIRDINVKSRYKTLAVDELVTGDGHRLPPRLAGEIAREIRRLATVQEQIAEIERERDAAPTTCEATERKRDLLSQLKSIGPAISAFLSREVYYRQFANQRQVGSFLGLTPSPYDSGEEERCQGISRAGSGHARAVMIETAWLWIKHQPKSALSRWFVERTAGQSKRVRKIMIVAVARKLAIALWRYVELGLVPQGAILNPQMKARS

SEQ ID NO: 156336 - protein, 460 aa, unidentified
MKRKRSKLKINRTMPTVHPNAAAIDVGATMHMAAVRADRAPEPVRSFGTFTTDLHRLVDWFTECGVETVVMESTSVYWIPIFELLDARGFAVFLVNARDAKHVPGRKTDVSDAQWLQRLHSYGLLRASFRPKGQIAELRAYVRQRERLLEYAASHIQHMQKALTEMNLQLHHVVADITGATGLRIVRAILAGEHDPKVLARLRDYRCHASAETIEKALTGSYRAEHLFALEQALALYDTYHEKVSACDVRIEAVLKELSIGRGRSPRSNPLPSPRRPRTDQANAMAFDVHTALFALLGKDITKIDGLGPYLSLKLIAECGDDLSAWPSTKHFTSWLCLAPSNKISGGKVLSSRTRRSGSRAAALLRLAAVTVGRTDTALGAFYRRLSARIGKSKAVTATARKIAVLFYNAVRHGMDYVDPGASFYETRYRARVIDNLHRRAKAFGFALQPIEPIPGIAVS

SEQ ID NO: 156337 - protein, 428 aa, unidentified
MHSTQNERINQITSSTLIVGVDIAKFKHVARAQDYRGVEFGKPIAFENNREGFELFVSWFQKILTEQGFKNVIVGMEPTGHYWLNLAHFLREKQVKHGVVNPLHVKKSKELDDNSPTKNDVKDAKVIAQLVKDGRYAVPSLPQGVYAELREAMKIREHLTTDLCVVQARVHNWLDRYFPEFLTVFKDWECKSAIQMLSLYLLPHELVDVPDETLLRHLREVAKRGLGSGRVKNLKEAASCSVGIRQGAELAKMELKLLLTQYEWLQNKLEELGTKLDELLMQIPHVQLLLAIKGIGRDTIAGFLAEVGDIGQYRHPKQITKLAGLNLKTNSSGTHIGQTKITKRGRKRLRALLFRVMMPLVAKNTAFRALHEYYTKRQVNPLKKMQSLIALCNKLIRVFFGILTKGHEFSEEKMMQDIPRFAELPQAA

SEQ ID NO: 156338 - protein, 491 aa, unidentified
MKPRVYVGIDLGGKFHQVQVTSASGERLGKSFRIGRGRAGLAELEDGLGRVAGMEREAVYTIEATQNYWLELVHPLKRAGASVYLVSPSKSSALRTFYRRHTKNDAIDAEALSRLPVVDPALRPATASDPKWDMLKRLVRQSWQLKGLMANRKRRIMARVLMIYPGYEEVFRDRYCGASLLFCRRYLDPAKARHLGRKRLGVLLRKRAWGKFDEVRAERLWHVIENAPELSLSYDDHQFLVNQDLDLLEAEERSQQALRERIAELYSELDPETRLSSMPGLGDFLAAAITAYIGEPGRFQNADEVVAISGLCPRLKSSAGTDTANQPLTQQGDPVLRGCAYLAAEIARHYDPELQAFHRRLTARGKHYKQASCALAAKILRRCFALLREGRPYEVSHHEQMAQRQKEAGKTVRESVHEVAERLNDTSGPSSPERADYAAGAAPASTETIAEGCKRKSASYDARTAPIAGVPDFRVMAHSPEITSPEDPENA

SEQ ID NO: 156339 - protein, 310 aa, unidentified
MTNICGVDVSKARLDGWIEGSGHQSFPNSQEGIAALAAWVADQGVALIVMEASGGIEQGPYLALWRQGCPCAIANPKAVRRFAEAMGHLEKTDRIDAEVIAHYAAARRLKPTLPPSAEQQRLTALATRLRQVSADLGVQKQRLHSTRVPQAMASLRKTIAFFTAEANEIVTQIAALIETDPLWQALDRTFRSVKGVAGRTVATLLAELPEIGTLSNKAIAKLAGLAPIANDSGKRQGPRSIRGGRTAVRTILFLVADVARKYDPSLTAFRDRLLDQGKPKMVVRVALARKLLVRLNAKARETRQALAYAH

SEQ ID NO: 156340 - protein, 402 aa, unidentified
MNCVGIDVSKGKSTIAVMRPFGEVVVSPFEVCHTASELSELARLLKSLDGETRVVMESTGNYHAPVAWLLHGAGLYVSVVNAMLVHDYGNNSLRRGKTDKKDAVKLANYGLDHWLTLPRYVPEEDTRLMLKTCYRQYQQYSKVQTMLKNNLISLLDTAFPDANRLFTSPPRADGSEKWVDFVATFWHCECVCGLSKKAFTAKYQKWCRKHGYNFSQDKALDIYASACGRFGVMPKTNTAKLLVEQAISQLQTTSAALAALKQEMQSLAASLPEYPVVMEMFGVGSTLGPQLIAEIGDVRRFHSKKALVAFAGIDAPPYQSGQIDVRSRSISKRGSASLRRTLFLVMGVLLQCAPMDEPVYQFMNKKRSEGKPYRVYMMASANKFLRIYYASVKTYLDSLEHN

SEQ ID NO: 156341 - protein, 316 aa, unidentified
MKNYIGIDISKSSIDVYDGKKSYKFENNEEGFKKVVALTNSIDETIFIFEPTGIYSYDITGFCDKNSINCVIVSPKVSRDFARSLKVRSKTDKIDAKVLYKYQSHVEPNMVRVPKINHHAVKIQEMLNSYELLKSNIQQFKNQLESISNDNKSLIRLTNKMIKFNETEADKLFDEIEKLLLKDDDTKKRYEAMLTIPAIGNKSALYLILFFIKYPLANARELTALAGLDPVMRDSGTYRGKQRISKHGGQQLRNMLFLPTLAALRFNDRIQVFYTRLTSHSKSKKLAVIASMRKLILMAFSIYKSGQNYQPLAMNN

SEQ ID NO: 156342 - protein, 391 aa, unidentified
MICVGIDIAKDKHDCCILDSDGTVRADCFTIPNNMDGFKQLLQTIRNCTKKSDKIKVGLEATGHYSYNILGFLLDNGLPTYVINPLHTNLYRKSLSLRKTKTDRVDARTIATMLLSDVDLKSYTDIAYHNEELKSLTRYRFDKVQECAKLKQSVSRLATILFPELEGLVSSIHGTSIYALLGEYPGAKQISEVHLTKLTNLLTTASKGRYGKEKAIQIREAARASIGSVMPAKSLELKHTIKLIQELASEINEIEDSIQKIIDELNPPILSIPGMGVNSAAVILAEIGDFSNFSSPDKILAYAGCSPSTYQSGKLTNCYAHMEKRGSRYLRYALYNATKYVCHWNPVFAEYLAKKRAEGKHYNVALSHSMKKLVRLIYALQKSGKTYLAAA

SEQ ID NO: 156343 - protein, 351 aa, unidentified
MIIVGVDYHPSVQQVAFLDTETGETGERRLNHSDGEAERFYRDLQRRQVKVRVGIEATGHARWFERLLAELKFELWIGDPARIKAARVRKQKTDRQDAQLLLRLLVEGRFPRIWVPSPENRDLRQLIWHRHRLVQMRTRAMNQIQAAAMNEGVRRKKTLWSKTGRRQLEALPLAPWATRRRQDLLELVDRLNTTIDELTAAAEQEARKRPEVLRLMTHPGVGPITALAFVLVLGSPDRFGCGHQIGSYLGLIPCEDSSADRQRLGHITKQGSSLLRFLLVEAAQAAVRWDPDWRRRFVHLAMRRDRRIAKVAMARKLAVSLYWMWRKGFDYPQTLPFGSHAGEPGYVHGVK

SEQ ID NO: 156344 - protein, 344 aa, unidentified
MTYYTGIDVSLRSVSICVVNDKGKVCLEAKVAAEIDAIVDRLRRFSSDVKSVGFEAGTLTQYLTYGLQAAGFEVICLEARQVSVTLAAMRNKTDRNDARGLAQILRTGWYSRVHVKSLHSHQVRALLASRKAILKKCVDLENELRGLLKVFGIRLPSRVGHGSFDAELRDTVSGDEMLACALVPLLDARTVLYKTYLKLDNAVKGLVRVDPICRRLMSIPGVGPVTALTFKAAVDDPSRFKSSRTVAAHFGLTPRRFQSGELDNPGHISRAGDADVRSALYVAAHSLLTRNAQWSTLKAWGVGIAKVRGHRRAVVAVARKLAVILHRMWIDGSEFRWGLAPASA

SEQ ID NO: 156345 - protein, 374 aa, unidentified
MKTTRFVGLDVHAATITVAIAEPSGEIREMGTIPNDPEAIRKLMRRLGEREALRVCYEAGPCGYTLYWQLTRLGISCIVVAPTLVPVKPGDRVKTDRRDAKKLARSFRSGDLTPVWVPDAAHEALRDLVRAREAAKKDQRRARHRLQKFLLRHGHRPPAGTKAWTERYRRWLSTVRFDAPAQEATRVDYVAEVEHARDRVARLERALDEAIEATPADMRAVIDALQALRGIAKLAAATIVAEVGPLSRFDRPRQLMGYSGAVSSEDSSGPRVHRGAITKTGNAHLRRIVVEAAWSYRHRPAIGPTLRRRQAGQGEAIKASAWKAQHRLHGRYRHLLARGKLPQQVVTAVARELLGFIWAIGVAVEGEQSTRRVA

SEQ ID NO: 156346 - protein, 374 aa, unidentified
MSMAIKYVGLDVSKDKIVLAIANEGRSEPRYWGSIDHTKEAVRKLVNQLTKEGDVKLDVCYEAGPTGFDLQRWFLELFVECSVVAPTTLTRNTRIKTDKRDAIRLAQLWRARELTPVYIPSVEDEALRDLVRAREDAVEDQNRSRQRLTKFLLRHQRLLPKEKKPWSFAHEQWLDTLRFEQECEDIVFQEYRNCIRECGQRILRYEKEMEKQATSSSQAPMIQAFQALRGVALITATTLAAELGDISGRFVHPGQIMSYSGLVPSEKSSGGSRWQGGITKAGNSHIRRVLIEAAWNYRHSPAIRRGLRERLDGLSPTIQDISWQAQKRLYKKYKNLSAKGKQRGTIVTAIARELLGFIWAIAKEMEKQKQVSCS

SEQ ID NO: 156347 - protein, 326 aa, unidentified
MQGKDVSEQETKGECNAGIDVCEGWLDVHILPAEHAFRVPNNHDGHRTLKRRLERYDLGLIVIEATGKWHRQIHRSLHAGGYKVRVVNPLRARLFAEGMGLLGKTDRLDARMLAEFAESLGDAARPPAPELMEELQELVQARVSAVEEQTALTNQLKSAETVFLRRQLGRRLKRIAADIKAIETELLRRVKADEALARRYAILLSIPSFGPVVAMTLLARLPELGSCDDKQIAALAGLAPWPDDSGQWQGPRHIRGGRHMLRIVLYLAAVSATRFNRDMAAFFRRLTASGKQSKLALIAVARKLVILANILIAADRLWQPEAPKCA

SEQ ID NO: 156348 - protein, 357 aa, unidentified
MQTQVSKLDFTGQNIYVGFDVHLKSWKVTIMTDRLSHKTFSQPPQPKVLYQYLTKTFPGGIYHSAYEAGFCGYWIHNSLKALGIHSIVVNPADIPTTDKEKVHKEDARDSRKIARSLRNGDLTPIYVPSLKTLEDRSLVRTRSMLVKDLSRNKNRIKSFLYFHGIEIPQHFGQKSWSKRFIDWLDSLQMSEKSSKNSLEILVLSSKNLRAAVLQVTRQINELSKTESYKEDLILLKGIPGIGLLTAMSLLTELETINRFEKFDHLCSFIGLVPSTHSSGDKEIVGDITRRGHMVLRSAIIESAWTAVRHDPALIKSYHDYCKRMDPNKAIIRIARKLLNRIRYVLKNKQPYEFSVVK

SEQ ID NO: 156349 - protein, 392 aa, unidentified
MHKDIHVAVVIDCWTNILGEITFENRPSKFDKFMQDVKKIYKDLTPCFGLEDTRGFGRNFASYLLGHKYTVKHVNPAYTDSMRSSAPMSKKNDSFDAFCVAKVLRDMVDTLPDEEHNDLHWTIRQLVKRRNSLVKGIVIAKNQLNSNLTNVYPSYKKYFCDVDNKTALLFWEKYPHPQYLKGVTPELLLEELRTIHKGMKQEQAEMILTLSEQNSPKEKDFQYERDLIIKSLVREIRFKKQENEDIDNELERLVDLTGYKLQTMPGINLITASNIISEIGNVERFPNSDKLAQFCGVCPVNFSSAGKGKDQRSRQGNRVLNAIFHFLAIQLVQISPSGKPRHPVFREYFEGKIKEGKTKPQALVCVSRRAVRIIYGMMRTKTEYKPFEKVQE

SEQ ID NO: 156350 - protein, 354 aa, unidentified
MKGEFQNSKVLVRGKEVFIGVDVHKESWHVTARVDEEEVFHGRIPSQYHALRRLLDYFKDCGVKVAYEAGPCGFWLHDRLSQDGIEVIVVPPSLIPVESGNKVKTDKRDSRKLAKLLESNMLKRVYVLSEEDRADRELLRTRRQVLEHRSDVARQIKSKLLFHGISSPLATERWTKGYIRWLRELTLGRKVLKVSFESLIELYEYLTEHLIKINQEVIELSRSRKYLHKVNLLKSVPGIGTLVGMELLVELSEMERFRSADELASYIGLTPSEYSTGQYVRQGRITRCGNKRVRTCLVESSWILIQKDPLMRLKYNQLKQFKGAKRAIIAIARKLIIRIRRILLNNEPYVIGVC

SEQ ID NO: 156351 - protein, 355 aa, unidentified
MDCEKYIGLDVHQATIVVAVMDSAGKLVMESILETEAATILQFFAGLRGTLSVTFEEGTWSAWLYDLLNPHVDKLVVCNPRKNALLKDGNKSDRIDARKLAELLRGNQLKPVYHGETGVRMLRELSRSYLTIVKDLSRVMNRLKAVYRSWAIPCAGRDVYYRRHRAQWLAKIREAGVRRRAERLYEQLDMLQHLRQQARRELLAESRKHAITAKLRQIPYLGPIRSALAVALIQTPHRFRTKRQLWAYSGLALETRISAEYRMVEGQVRRSKKLISIRGLNKDHNHDLKGLFKGAATMASVRPGPFLEFYQAALAKGIKPTMARLTLARKIAAITLTLWKKGENFDAEKLKSQAA

SEQ ID NO: 156352 - protein, 359 aa, unidentified
MLIIGCDFHPKFQQISMMDTTTEETKKLRLEHTAEAAAFYRSLRGQTVRVGLEATGSYAWFRRLLQECGHQLWLGDPAAIHAANPRKQRNDKRDADCMLTLLHENRFPQVWMRPAEAEDLRQLLVHRVRMVQIRTKLKHQLDSMAKNEGLITGHAWRPHTRTQLEALSLPPGYDRRRRDLLDALHYFDQKIQPLTQAVEEAAQGDAQAALLMTHPWVGPNLSLAFVVIVGPWQRFANGRHLGSYLGLIPCEDTSADKRRLGHITKQGNVLLRWLLTEAAQHVHTCEPAWHRLYGALLRRHQGKSGVAKVAVARKLAIRLYWMLRCGQSYEQIRATEQEQAKKGRPSGPQSRSRRKPRCA

SEQ ID NO: 156353 - protein, 418 aa, unidentified
MFKIFRKNCCGLDVHKTWIYACIGITDENGRTDYKQARFSSFSKGLRELTDWLAKYSCKDVCMESSGKYWVPVFNILEKTCWVTLAHPKYTKPQKGNKTDRKDAKFICDLFMCDMIKPSFIPPPDIRHLRDLVRYRFKLTNILTGEKNRAQNCLTVSNLKLDDVFSDVFGKSASSITNYILEHPGEKFDVAPFVDGRCKTPIPEIQAAVDGSISQEQAAKLREILRHMDELETHKRNIETEILRLAAPYHTLLELIRTVPGLSSDPMTAIAILSEIGADMSVFPTAKNLSSWAGCCPRNDQSGGKRKSTRISRAGVYLKPLLVQVANAVVQSNKYPECKERYRRIKSHRGHKKAIIAICRMFLTAIWNILSKLEPYSTEGYLVDRKTNQSKVITKTQGLHLLRLRGYIIKDDLSSSSG

SEQ ID NO: 156354 - protein, 384 aa, unidentified
MKNDLSRSLVAFEQDSTLVAVVELSLKRWLVAGLVPGLRRQPLKTLGADHHALLRVVHRWRDEAVKAGSRIERIVVAYEAGRDGFWLARWLQGQGIEAHVIHPTSIPVSREHRRAKSDRIDTALLMRSLLGWLRGERKHCSMAAIPSLAEEDARRPNREHESLVGERSRIVNRLKATMIRLGICGFNVKLRTAANQLAQLRTPEGEPIPPNTLAELGREIARYRVVCDQIKAIEQERLERLKRAPQQATHAMLLMLAKILGIGIETADMLVHEVLSRHLRDSRAVGRYAGITGAPDESGKRRREKGLAKAGNARVRRGMIQLAWRWLLFQKDSALTQWFVARTAGARANIRKTMIVALARKLLVALWRYVTTGEVPAGAVLRAA

SEQ ID NO: 156355 - protein, 354 aa, unidentified
MPATAQTAIAVIGIDIGKNSFHVVGQDTRGQIVLRQKWSRHQVEARFANMPPCLIGMEACVGAHHLSRRLKTLGHDARLMPAKYVRPYSKGQKNDFRDAEAIAEAVQRPTMKFVATKTADQLDLQALHRVRERLVSQRTGIINQIRAFLLERGIAVRQGQRFLRAELPRILATPPDVLSPRMLRIIEDLAGDWRRLDERVEGLSNEIEAIARQDAGCERLMSVPGIGPMISSAMVAAIGAGDVFTKGRDFAAWLGLVPKQISTGDRTILGKISRRGNRYLRVLFVQAAWVVLIKPKIWERHGLKPWIEAARKRLHHNVLAIALANKLARIAWSVLARGRAFEARKMDQAANQSA

SEQ ID NO: 156356 - protein, 442 aa, unidentified
MSHPTQQPEPEFAAFVGIDWADRQHFWACQMPGSRRIEQGELPQTPEAVEEWAMELHRRFGGAPVAVALEQSRGALIFLLGKYAHLILYPVHPTSLANYRKTFRPSGAKDDPSDASLVLDMLVHHRDRLRRMSPDTVETRTLQMLVEHRRKLVNDRTRFTNRLTSQLKLYFPQILEWFDAVDSPLVGDLLERWPTLQELQKAKPATLRRFFTQHNCRGQEKIDQRLEQIRRAVPATGDSALLTASRSVVCALVAMLRALRDAIVAHDEQIDPLARCHPDFAIFASLPGAGPVLVPRLIAALGTQRDRYRSAHEIQCYSGIAPVKESSGQQIWVHWRWACPKFVRQTFHEWAGHSIGFSQWARTYYDRQRALKKGHHAAVRALAFKWIRILFRCWQNRTPYDEAIYLNALRRRQSPLIAPPQPIVELQLKKRGGFWKITPADA

SEQ ID NO: 156357 - protein, 342 aa, unidentified
MQITTIGLDIAKNVFQVHGIDAAEKVVVRRQLRRGQVMRFFEALAPCLIGLEACASAHHWARELMKLGHEVRLMPAKDVRAYVKRNKNDAADAEAICEAVRRPTIRFVQVKSAAQQGQLMQHRTRDLLMRQRTQIINALRAHLAELGIIAAQGREGVKELLAIIADKRDEALPLDAQASLLVLAAQLQALQTLIGSIEKRIVAQHRANADSKRLETIPGIGVVGATAIAATVTDPKVFRCGRDFAAWIGLVPREGSTGGKRKLGPISKQGDRYLRRILVVGAHSVLRRAKLHPEKYPWLTRLLARRPFRVVAIALANKMARIAWALLAKGGTYQAPRLAAAS

SEQ ID NO: 156358 - protein, 388 aa, unidentified
MNRIIKIGMDVHSTNYTLCAMEPTFGSEERVFGETQVAPDYKEVLLFITSLKMKLGVDNKYSIECGYEAGCLGYTLYHQLTGAGIKCVILAPTTMLTQQGKRIKTDKRDAHLIAQCLCYGGYHPVYIPTGEDDSVKEYLRMRDDHKLALKKLKQQINAFALRHGHKYEGTKWTQKHLAWLKKLELDSMYRETMDEYLASYDQQEAKIERFDKRIEEIASEKQYQANVKKLGCLLGIKTHTALSLIVETGDFKRFAKGNTYAAFLGLAPGEHSSSTSINRTGISKAGNTHLRMLLIEAAKGICRGRVGAKSKELRSRQNGQSAEVIAYADRANERLRSKYYRMIRHSKKQNVAVAAIARELACFIWGMMTGNISIASATATSALAASQG

SEQ ID NO: 156359 - protein, 433 aa, unidentified
MQEVEDEPLFAERVAGIDIAKASVMVTIRVPSDSRRGRRQQETREFRATRADLLALADWLRCWQVTKIGMEATGDYWKPVFFLLEREGFDCVLYHASQVKALPGRPKTDPLDSGWLARITERGSLPGSFVPPEDIRVLRTHTRYRRHLTQARTAEKQRCEKLLEDGHLKLSSVISDIHGVSGRAMLEAIIAGQRDPRVLAQLARGTMRGKIRQLEEALDCSFFTEQHAFILAMMLASIDHLTAQVTDLSAKIDRLCEPYQHQITQLDAIPGVGVISAQDIIAETGIDMTVFPTAAHLCSWARRCPQVTSSAGKRKGRNATGRGNPYLGAALGEAAATAGRTQTFVGAKYRRLVRRMPRKKAQGAISRTQLVICHALLSDPDATYQDLGTDYYQQRADTRRQVRSHARAIERHGYKVTIQAINPDTGELLPVAS

SEQ ID NO: 156360 - protein, 346 aa, unidentified
MRILKQVAGIDVAQKELVVSFGIIKDSLQSEILSNKTFSNTQEGFLKLLSWVKKLSDAECNVHFVMEATGVYHESLAYFLEERNMAVVIVLPNKISNYFKTLDVKTITDSTMAQAIARFGLERKLELWKRPKPIFKSLKQLTRERSQLIEERTMLKNHLHAELSEAEPNESSVIRIKDRIKLLDKQEKQVRLEITKRAQDPQVKDAIAVMCSIPGIAMLTAATVLAETNGFELIRSKKQLTSYAGLDVKEKQSGTSVKGKPRISKRGNKHLRKSLYMPGLATIRFDQHFKGIYARLVSRHGIKMKAAVAVQRKVLELMYTLYKKNEVYDHNYESNPNGQKRERQLL

SEQ ID NO: 156361 - protein, 368 aa, unidentified
MSRMAEQSGPITGGVDTHADVHVAAVVDQVGRVLGTHAFPVTAAGYQAALAWMSSHGELAMVGVEGTGSYGAGLARYLAGRGVEVAEVIRPNRQARRQRGKSDAADAVAAALAALSGEAAGIPKSRDGAAESIRALKVARAGAVKARTQAGNQLRDLILTAPEPLRQQLAGRPSGRRVDMAARFRPGDPACPAEGTKAAMASVARRHQQLTAEITRLDALLDGLVHHAAPAQFLAKKGVATQVAATLLATVGDNPGRVRKEASFAALCGASPVDASSGKQLRHRLNRGGDRHANSALWTIAMTRLACDPRTKAYAARRTTEGKTKKEIIRCLKRYIARETYKALCRPQRPGMPSAPKIKQHFSAQVLT

SEQ ID NO: 156362 - protein, 391 aa, unidentified
MTEFFDAHRPATAFDHDSTLVVAMELSGKSWQLGAVVPGVSRRPKRGLKVGDMDELLRVLERWKAEAAKAGRTVARVVVAYEAGRDGFWIARDLVERGIEVQVMQPASIPVERKGRRAKTDRIDLDMLLRTLLAWLRGEPRVCAMVRVPSEEEEDARRPGRERHKLTRERVSIENQIQSLLWLHGIYGFRARLKKAKEKLEALRMRSGASLPRETMAQLRRLMIRQRLLSEQLAEIDAAREAELAAAAKAPDPERGQRMIRLLVAICGVGLETATQLVREVLCRPFRDRRAVAAFVGLTGTPFQSGGMEREQGVSKSGDKRVRGLMMQLAWRWLKFQSDSALSRWYVERVGDAKGRIRKIMAVALARKLLVALWRYVQDGVIPEGARLAAA

SEQ ID NO: 156363 - protein, 438 aa, unidentified
MSNKVIFNLDELFISVGIDVGADFSWMSIALPNQQFVGKPYKILHNSIDSLTTAVSKIKEAEELYSLESRIFLESTGIYHYPLFCYLRDKGFNCSVINPIITKNSTNINIRKVHNDRFDSKKAALVGLKPDLKVSLMPSDLALNCRNLCREYYDLMDNRSAYVNKLQGELRMAFPQYLGIFSKVTINTSLTLLETYTSPSAFLEADKQEIIDIIKSTARFGLTYAQNKYNAIIQAATDANQFGYIIESNIKRIRLYISFIRKYDEEINNILESLHELVDANEDTDFVKQIHLIKTFKGAGFLSAATIMGEIGDFSAFSKPKQLFAYFGLDPAVKQSGKFEGTKVQMSKRGSSIARRVIHTLSLQSISISRNGKAKNPVLREYYLQKCDSKPKLVAMGAVSHKVCNMIFAILRDNKPFEIITPQEHIKQYNAAKCDIAA

SEQ ID NO: 156364 - protein, 361 aa, unidentified
MQSTPVIAFDQHAATTVAAVLLPGQQTPALHTLTSDSPTILRFVRRLQRHGAVQCCYEAGPCGFELQRALVGQGIPCDVIAPALIPRRPGDRIKTDRRDAAQLAVLFRAGALTAIHIPTEQEEAARDLLRCREDIRADLLRARHRLSKFLLRHGRRFTGTKKAWSKRHEVWLRAQTWPLPALEQTHQAYLRTVDEAVARLRAVEGDLRGLLDLAPLRRRVERLRCFRGIDDLTALTIAAELGDARRFATAPSLMAFVGLIPSEHSSGTKQARGAITKTGNAHLRRVLVEAAWHYRHHPFVGDTLRARQRGAPPPVIAHAWTAQQRLHRRYARLAARGKPKQHVVTAVARELTGFVWAALTQ

SEQ ID NO: 156365 - protein, 343 aa, unidentified
MKVTTIGFDLAKNVFQVHGVDERGHVVFRKQLRRDQVATFFANLPACLIGMEACGSAHHWARKLRGLGHGVRLISPQFVKPYVKSNKNDAADAEAICEAVTRPNMRFVPIKTMEQQAVLSVHRVRQGFVKARTAQANQIRGLLTEFGLVLPQGITNVMQRVPQLIDAATDLPGSMRQLIVRLLENMKVLDRQVKELEAQIKAWHLGSELSRKLEKIPGIGALSASALVASIADARSFKNGRQLAAWLGLVPKQDSSGGKPKLLGMSKRGDTYLRTLLIHGARSAIVAAQKKAKPNVWLSGLLNRRHPNIAAVALANKNARTIWALLAHEREFRPDYIPRPAAA

SEQ ID NO: 156366 - protein, 445 aa, unidentified
MKKEISMQIIHSHAAGIDVGSRSHFVAVGQNSGDVSEFGVYTEDHQELIKWLSGYGITTIAMESTGSYWQTLFSALQQAGFEVLLVNGRQIKNVKGKTDVKDCQWIQRLHSLGLLTGSFLPTDQVEQLRTYQRHRSWLVEQSAKMTNKMQKALRLMNLRLDVVLSDIMGKSGQLIIRAILQGSRSGEELSLLADGRVRKSKQEIAKALEGHWREEFLFELRDCYELYQIYESRIAGCDLRMESLLSEFTKYLSTQQGQNEAMRSKRKRGFKNQPKFDISSLSFDLLGVDLFAIDGVSHNTVMTFISEVGTDIYKFPTAKQFASWMRLAPNNKISGGKMISSRTPKGKNRLALALRNAANSIGSMKKGALKNFFGRIAYKKGRAAAITATARKLAVIIWNMIIKKQPFQNPDETFYIEKVKASVIFNIKAKMKRLNLSAFDLNLTC

SEQ ID NO: 156367 - protein, 309 aa, unidentified
MILHPNIIGIDVCKAHFDIFDSERGRPERLPNSAEAAHALADRLAVRQDGFAIFEATGDYDRHLRGAFDARAIAYARVNPQQARDFARAMGRRAKSDALDARMLARMAQALELAPTLARDALRDRVAALHKRRDQLIEHRAAEKARLKEGHDPDGSITRHLTWLNTEIAHFDRLIAEAIENSPALTEQADLMRSVPGVGPVAATTLIALMPELGTLSPRTAAALAGLAPYDNDSGLWRGVRRIGGGRRRVRRALYMAALAAARSQSSFKRFYQALRARNKPAKVALTALARKLIIVLNAILRDKMAFQG

SEQ ID NO: 156368 - protein, 459 aa, unidentified
MSQRKKTKGKSKGGARMLPVLHPDAAGIDVGAEEVFVAVPPDCATEPVRSFETFTRDLYELADWLQSCGIRSVAMESTGVYWIPLFQILETRGIEVFLVNAQHVKNVPGRKSDVSDCQWLQYLHSVGLLKASFRPPDQICVVRSLWRHRESLVQMAAEHTMHMQKALSQMNLQLHHVLSDITGLSGMRILDAILAGERDPVKLAALCHGRVRSPRETVAKSLEGDYRAEHLFALRQSLAGFRFYRKLIGEVDQELEIVMRQLPRAEGAPDQMPPRTKKCFYQKAGNEPAFDLKAELFRISGVDLTDVPGISTITAHTILIEVGPDLSRFRNASAFASWLGLCPDQKVSGGKVLYTGSRKVKSRVAIALRLGAQCLYHAKNYLGEYYRKMKWRLGAPQALTATAHKLARIVFHMLLTKEPYNESVLVKWDQQANMRAESRLRTQAAKLGFQLAPAAEPQA

SEQ ID NO: 156369 - protein, 296 aa, unidentified
MIYIGIDYHKRYSVATQMDETGKILSQIRLSNDSDTLLGYLRGLPKGTKISLEATGSWYYFYEMAEGMGLDIHLAHPLKTRAIAAARIKTDKIDSTILAHLLRTNLLPTSYIPARATRDAREILRYRASLVFLRASLKNKVHAILGKNGLVARCDEIFSKGGIAWLRSLEVRPCYRQALDGYLNLAEQLNCLIGAVSRQIEQMVKKDPRAVLLTTIPGISYYSALLIISEIGDINRFPTYGHLLSYGGLVPSVHSSGGRTRLGRITKEGSKWLRWILVETGYHAARGAERRDYITE

SEQ ID NO: 156370 - protein, 364 aa, unidentified
MGLERTSVGLDVHARSVSAAAIDGVTGEVFRQRLVPDQQVVIDWVRGLPGPAAATYEAGPTGFGLARAFTGAGIRCEVAAPSKITRPSGDRIKTDARDALLLARLLRLNEIVAVRVPTVTEEAARDLVRAREDARGDLMRVRHRVSKLLLRHGQVYYGGQAWTGKHEAWLRAIAFVGTERAGTRAAYEADLEALALTLARRQRLDEQITAMAQASEFTPVTHRLCCLRGISTLTGFALAVEIGNWSRFTGASIGAYLGLVPGEHSTGGSHHQLGITKTGNSHVRRLLVEAAWHHQPAYRIGATMQARWNQAPAAARVRGHAGNQRLHARWIRLAEHSKKHTVACVAIARELAGWCWSLATLPDA

SEQ ID NO: 156371 - protein, 347 aa, unidentified
MAIDTVVQRSAGLDIAKASLVACVRIPGSDGGWRVIKRKFTTMTAELLALRDWLAEHNIARVGMESTSDYWRPVFYLLEQRFDCWLLNARHMRAVPGRKTDMTDAEWICDLVALGLVRPSFVPPPPIRRLRDLTRRRAILLAERTREKQRMEKLLEDAGVKLSVVATDIFGKSGRAMLDALIAGERDPKVLAELAMGRLRKKIPALAEALVGRFDDHHAFLARMICDHIDTISRMGAELTKRIDTEIEPYRTEVELLCSLPGVETRTAEVILAEIGTDMSRFPTAAHLASWAGACPGNNKTGGKSKPSHTRPEVPRTSRTGDPLGSFSEKVRARASESTEVLPGVQR

SEQ ID NO: 156372 - protein, 342 aa, unidentified
MDVMIGIDPHKGSHTAVVIDQDEVVIDEIRVKATANQVRDLQEWASGHDDRCWAVESARGMGYLLAQQLVGAGERVIDVPAMMATRVRLLGSGRSQKNDPNDARSVAIAALRHPGLAMVGGDDHTRVLGLLAKRHRDVARLKNKAACRLHALLAELTPGGLATEMTVTKANALLATIEGSDEVTRQRVVIATELVDDIGRLEAQMRASKKRIRAAVAASGTSLMNIRGVGPIGAAIILGAVGDIARFPTPGHFASYNATAPIDASSGERKRHRLNPRGNRKLNHALHIAAVSQLRYPGTGRDYYDKKVAEGKTSKEAIRALKRRISDVVYRRLIADTKHTIN

SEQ ID NO: 156373 - protein, 436 aa, unidentified
MRGCRCSMIMGFTKPIEHFILQRKKAITMNTLYVGIDVSSKSNVVYLMLPNGDKHSNFSVANSHEGSTQLVKRILSALTSHSLDTVLIGLEATSVYGDNLVYFLREDATLAPFNRKIHVLNPKQVKKFHDAYNDLPKNDYVDSFVIADCLRFGRINKEVYLGDYRYKALQNLTRARFFAVQNLIKEKQRFMNVLFKKYSTMTQEKVFSDTFSTTALAVYDEFDSAEALANMDLHELTDFIIEKGKNRFPDPDAVAKAIQKAARSSYRLPKTVNDSVNQVLSISITSMKALESQIKEFDKAIKAQMEFLPNVLISIPGIGPVYSAGIMAEIGDINRFDNQAALAKYAGLAWKQHQSGSFEAEVTRLIPSGNRFLKYYLYEAAFSLVRCDKEYSDFYHLKYKEVNRCQHKRALALTARKFVRLVFRLLKDNRLYVPAK

SEQ ID NO: 156374 - protein, 421 aa, unidentified
MNAWNEVTHFAGFDWAKDHHDVLVLDNTGKIAAELRFEHTAAGWSLCQQKLAAFPHLAIAVESGHGAAIERLMVLGYRVYPVHPRSSKSYRTRKLPSGTKTDRIDCWALADALRLEGESWHMLNTPEPLVQRLRLLCRDEVALIEQRTALINQLQQALYEYYPAALAAFDDWTSLSAWAFVARFPTPQALVKAGKRQWEKFLHTQKLYHPEWYQKRLAIFAKADEFCGPEAVTAAKSVLATALVKLLQTLELQLASYRLLITECFKQHPDYHVFASLPGAGPKLAPRLLAELVALQALADQPQVLQCLAGMAPVSYQSGKVSVVYLRRQCNRFLRATLHLWVDLSRHYCDWARIYYEAHKKKGQSHACALRCLGMRWLKILAAMIRSHTPYDAALHARSQLQHGSWVLQLQPKLSITKDAS

SEQ ID NO: 156375 - protein, 367 aa, unidentified
MEKSSKVFVGMDVHKESIDITLAEVGGEVRRLGQIGGDRGSLLKMVRKQQSKGGERVFVYEAGPCGFWIHRELAALGERCMVVSPALVPKRAGDHVKTDRRDSERLASLARAGELEAIHVPDIRDEAIRDLVRGRDDAVIAQRRVRQQLKALLLRNDIRYVGKSSWSGAHRRWLSELKLPEPAQQIVFEEYVDAIAVATARIERLTRAIESEVTTWRFAPVVAALQAMRGIQFVHAVTLIAELGDLTRFGSARQLMGYLGLVPREDSSGEHRRQGSITKAGNSYARRVLIEAAWAYRHPARVTRIIATRQTGLPKAACDIAWRAQLRLSAKYRRLNARHLHHNKIVVALARELSGFVWAIGHSVRPQ

SEQ ID NO: 156376 - protein, 351 aa, unidentified
MEKNITIGMDLGDKSHSICVLRDAEKIMECEVTNTAKDIEKYFKKHPGAKVIIETGTHSPWVSRMLVKTGFNVLVGNTRKLRAIWDSRQKSDVRDAEMLARIGRFDPQLLSPIQHRGEQSQLDLELIRGREVIVSARTKMVNHVRGAVKAMGQRIPKCSTDCFHRRAREALKDSQLLAVEEPVLKMIELMTEKIHELDKRINVMACENYPETGRLQQINGVGPLTSLAYVLILEDGKRFQKSRDVGAFLGMTPRRDQSGETDKQLRISKAGNAELRRLLVGCAHYILGHFGPDCDLRRFGQRLMLRGGKNAKRRAVVAVARKLAVLLHRLWVSGAIYDPLWNTKLHKQTAA

SEQ ID NO: 156377 - protein, 355 aa, unidentified
MSQTLNTAIVVIGIDIGKNSFHVVGHDMRGAIVLRQKWSRGQVEAGLANIPPCLIGMEACVGAHHLSRKLASLGHDARLMPAKYVRPYSKGQKNDFNDAEAIAEAAQRPTMKFVATKTAEQLDLQALHRVRERLVSQRTGIINQIRAFMLERGIAVRQGIGFLRTELPTILATRTDALSPRMLRVIEELAVDWRRLDQRIDGLSGEIEALARQDQACPRLTTVPGIGPIISSAMVAAIGTGDVFSKGRDFGAWLGLVPKQISTGDRTILGKISRRGNRYLRVLFVQAAWVVLVRIKNWERYGLKSWIEAARRRLHHNVLAIALANKLARIAWAVLAKGRAFELTRTDDAGVVQPA

SEQ ID NO: 156378 - protein, 390 aa, unidentified
MEARTVNNLLPAAPHHDAVGCLVAIELSKKSWIVAVNTPLADKISRHTLKPGDGKELLDLCERIRTRVAREMKRRVEIVSCYEAGYDGFWLHRLLEAHGIRNYVIDPASLQVDRRARRAKTDHVDVERLLRSLMAYLRGEPKVWSVVCVPSVAEEDDRRLNRERGRLINERIQHVNRIKGLLAIHGIYDYQPLRRDRMLRLERLRTAADGQTLPPRLKAEILRELQRLELILGMIKTIEAERDAIASPKTETEHTNAKKIQDLAKIKSIGPEFATTLIGEVLYRSFDNRKQLASYVGLTPAHFQSGAMCRDQGISKAGNGKARTVMIELAWLWLRHQPDSPLSVWFRERVGKLKGRIRRITIVAVARKLLIALWRYLETGLVPKGAILKA

SEQ ID NO: 156379 - protein, 385 aa, unidentified
MKEQNFVPREFEIFGGLDVDKKSIAVTFMSHQGILQSFSMPYRAEHLLSYVGKHFDGKKIAFAYEAGPTGWGLYDKLTSEGYLCVVAAPSMIPKVPGQRVKTNRLDSQKLSEHLRGGQLKSVHVPSESYRQLRQLVQLRDTFVQDIVAMKLRIKALLLFEGLEFPPAPSGSQWSLIVRGKLKRLSCSSAVRFKLDQLMESLESSEKRVLKTIKEIRRFYQQDPELCQAMVNLKSIPGIGEIVASHLLARIGDPQQIGNVRQLAGFIGLAPSEHSTGDRVARGHITRSGDGRLRSKLIQAAWSAIRQDPELREFYRSVYQRHPRDRAARKAIVAVARKLTTRIYAVLKQQRPYVVREIVHSAPLTQEETSPQGTTRRRGEPGETLS

SEQ ID NO: 156380 - protein, 387 aa, unidentified
MAQVNDLSRSLTAFDPISTLVVVVEMSKASWLVSGAVPGVERQPLKKLEPDATALLRLIERWRNEAVRAGRPISRIALAYEAGRDGFWLARWLIARGIEAHVIHSASVAVSRERKRAKTDRLDAAMLMRVFLGWLRGERGHCGMVAIPTMEEEDARRPNRERESLVNERSRIINRMKSALARLGIRGFKPHLRKAPERLAGLRTAEGTGLPANIIEEFRRDMARLALVREQISSIEKTRAERLERAPDTGPHAMVRLLARVIGIGIETADMLVREILSRKLRDRRAVARYAGLTGSPDESGLKRREKGLAKAGNARVRRGLIQLAWRFLMFQKDSALARWYRTRTEGPSGARKTTMIVALARKLLIALWRLVTTGEVPDGVELRPAA

SEQ ID NO: 156381 - protein, 388 aa, unidentified
MTPTSGSLSHPITLDYENTLVLAIELSKTSWVLAAQVPGLPRVKAKQTIAPRTEALLAAIDGYRDRSRAAGRTIERVVAIYEAGWSGFWLARWLARHGVETHVVQPSSVPVDRRARRAKSDGIDAELLLRTLLAWFRGEPRVCSMVPIPDEADEDERRRVREREDLVAERVSLVNRVGAVLATLGVRDYNPLRRDRRARLEALRTALGDPLPPHARARILRMLDRLELVCAQIAELERQRDAVLEEEAPDKAEEMIQQLAGLRGIGVQSATVLVREAFMREFANGKTLGSYAGLTPTPFSSGATQREQGIGKAGNRRLRTVMIELAWLWQRYQPGSAQVSWFRERTAGTGRRMRKVMVVAMARRLLIALWRFATQGVVPEGAVTSPTR

SEQ ID NO: 156382 - protein, 326 aa, unidentified
MVEHYIGVDLHKAFFQVCVVNALGERLWEQPFPRTAEGMAAFIARCPSRTAVAVEASTPTWHFADAIREHVDDLRVVDSLKTRLKAGYAAKTDRLDARRLADALRRDSVVGIYYPPMGIRELRELCRGRHTLVQLRTRLLQRLRAVLLRQGIVEARRLVRQDAVLDTLVLPPRAAASVALLRRLLADVRREMADVDREVQALARQDPIALRLQQIPGIGPVLALLLRAEIGDVRRFPTPGHLASYAGLVPRVEASAGRYHYGRITRRGSPWLRWALVEAAVHGPHRADPVGRWTRRLAVRKGALKARVACARSLCGEICAVWIATA

SEQ ID NO: 156383 - protein, 418 aa, unidentified
MKVVFPTCCGVDVHKSFLVATIIKTPKESLQPSYQKKRFSTFNSDLNHFANWLHENNCLDVCMESTGKYWVPVYNILEKRGIRVIIANPKWVKAVKGNKDDTKDSKWIGDLFRIGLVKSSFIPAKDIRILRELTRYRYKLTSMKSSEKNRFQNAFTVCNVALDSVVSDMFGKSATAITDYLTSDENFDAKHCISLLHHSLKKKADDVFQAIEGYEMTAEQKTRIGIVRDHLHYIDALIERVDSCINTMVDKYEGYIALLCTTPGIDRSSAITILSEIGVDMTQFNSSKRLCCWAGLTPGNNESAGKKKSVRISRAGVYLKPALVQVAHAAVKDKHSPYYALKYERIAKRRGKKRAIIAIARMILTAVFVMLSNLEEWNPVDLYRVDMPEHLKEKQLAKAVKQAVRFLETQGLTVLDSA

SEQ ID NO: 156384 - protein, 344 aa, unidentified
MAQVTTAQVTTVGIDIAKNVVCIHGVDAHGHVVVQKRLARQKVLPFMAQLPPCLLGMEASGGAHYWAREFTQLGHTVKLMSPQFVKPYVQSQKNDPNDAAGICEAVERPRMRGVPVKSITQQDVQALHRIRERQITARTAFINQIRGLLTEYGIVIPQRASQVRHKLPLVLEDAENGLTATAREWLHALAEELQALDQRIAATDQQIERVFEADEACQRLAQLPGIGPLTATALVAAVGDATAFKNGRQFAAWLGLVPRQHSTGGKTTLLGMTKRGNCYLRTLLIHGARAVLRVVDRKTDARSRWLQGVKARRGMNCASVAQANKTARVAWALLAKGDRYRHAA

SEQ ID NO: 156385 - protein, 351 aa, unidentified
MDINTIGIDIAKRVFQLHGVDKHGKPVLKKKLLRDQVLMFMANLPKCLVGMEACGGANYWGREISKLGHEVKLIAPQFVKPYVKTNKNDQADAEAICEAVTRPNMRFVPIKSIEQQDILSIHRVRERLIRNRTALANEIRGLLLEFGFIIPQGINKIIIKLTEILDGDYLSPMSYQTFCDLKEEFIDNDQKLKELEKRLKIIASGLDRYQQLTAIPGLGLISATALIASIGNCSCFENGRQLSAWLGLVPRQSSSGGKEKLLGISKRGDVYLRTLLIQGARAVLNAKLKFITEEQKTKKDHSMFAQWMFNLFERSGHNKTIVAVAGKLARVVFSVLKSGNDYVESKVCSSR

SEQ ID NO: 156386 - protein, 389 aa, unidentified
MFYVGIDVASEKHDCCILNEKKKIIRSFSFLNSPDGFQSLLSALSGIQPDEIKIGLEATGIYSENLSVFLRRKGFNVTTINPLLLKKHQCATTLRKTKTDKADAKGIALFIAEEGFQPDLPVSYHIQELKSLTRARFSFVQDRSALKNKVKRLVVLLFPELLEQFSDIFGASATALLKQYPSAEKLAACHTDALAALLRKSSRGRFGRAKAAYLKQLAKCSIGNHSPARVMELKMLLARIDLLSEQIKDYDKQIKIIMDELDSPVPTIPGIGYTLGATIIAEVGNISRFSSPAKLLAFAGLEPSIYQSGKFVPASGRMVKRGSPFLRWALLQAAGYVPNYSSTFALYREKKLSEGKSAAVARSHVAKKLVRIIHSLMTHSAAFSDQLTA

SEQ ID NO: 156387 - protein, 343 aa, unidentified
MAGIDLHGNNLVIGIIDQDGQRLKCQKLACDLKLVAAFLAPYKAQLKSLAVESTYNWYWLVDGLQALGYPVKLANPAAIDQYSGIKHADDQNDAYFLADLQRLNILPTGYVYDAQLRPVRDLLRRRMSLVHQRTALLLSFKSLYTRTTGQAMPLGRLKAMTVAEAQTLYEHPANTLIATLQKEHLDQLDQSIEQIEKTVLASARELPCHAPLLTLPGVGRILGMTITMEIGELKRFPSPGDFASYSRTVDSKRMSNGKKKGDNNQKCGNKYLAWAFVEAANFAKRYDAPCRKWFDRKAAKTSTVLATKALACKLAKAAWHVIHDHSVYDPQRMFPGGEPKQTP

SEQ ID NO: 156388 - protein, 316 aa, unidentified
MVPSPLFGGIDVAKATLDIAVRPTAETWSVSNDATGIDALVLRLGALAPPLIVLEATGGYQGPLVAALVAAALPVVVVNPRHIRAFAQAVGILAKTDRIEARVIAHFAEAVKPAPRPLPDAETQELRALLVRRRQLVEMVSAERARLDTVPPSIQDAIQAHIAWLTTQIAGLDDALTRASQTHPVWQAKDDVLQSIPGVGPVLARTMLGQVPELGTLGPKPLAALIGVAPFNRDSGTLRGRRTVYGGRAEVRAVLYMGALVATRHNPVIKTFYERLLAAGKAKKVALTACMHKLLTIMNAMVRDLKPWQPQEVPSA

SEQ ID NO: 156389 - protein, 359 aa, unidentified
MSTQSKPFSFKGQKIFVGLDVHLRSWSVTVLSEQAVLKKFTQDPSPAALNKFLTNTYPDAEYYSVYEAGFCGFWIHWELCNLGINNIVVNPADVPTMAGERLRKTDAVDSGKLARSLRAGDLKGIYVPDSTTTEIRSLIRLRDSLTKDQTRHKNRIKAHLRYLGIDIPEEFCRPGRTWTNRFVLWLKGLDLETEYGKKTLDLLIAQYEDLRGQQLKMMKELRVLSRTERFDKPLRFLMSIPGIGQLAGLTILSEVDDISRFKDAAHFASFIGMVPMCYSSGEHDGTGNITVRRHAKLRWLIVEAAWIASRKDPVLSAAYVEYCRTMKPSKAIIKIARRLVNRIYFVMKHQQPYVNCYVS

SEQ ID NO: 156390 - protein, 347 aa, unidentified
MRGTVHMQVITIGIDLAKHVFQVHGVDANDKVVFNKPLRRSQVLPFFAKLAPCLIGIEACASAHYWARELRKLGHDVRLMPAKDVKAYVKRNKNDSVDAAACCEAVRRPTVRTVPVKTPEQQAQLMQHRVRDLLVRQRTQAINAVRSHLAELGIVAAQGYDGLRMLLAIIADGSDGRLPENARASLSALVAQIASCQAEIGAIEKRLLAQHRRCDDSKRLETIPGIGVLGASAIVATLPDASIFKTGRDFAAWIGIVSREDSTGGKQRLGPISKQGDRYLRRILIVGAFAVLRQARAHPERYPWLTQLLARKPAKVAAVALANKTARIAWAVLTKKEIYRTRPITAA

SEQ ID NO: 156391 - protein, 369 aa, unidentified
MTVYIGVDLHKTQFTVHERTEETVESFEQIKQYPTTEVGYAAFLARITEYKIGGFTVKIGVESTGNTRFFKAQVEKVGAHVTVINTLKFKVINESTKKTDKHDASTISEFLSKDMLPESYLCSKETENLRRLLKSRERLVHSIVGQKNEIHALLVSMGLQDESRSLQSKKGRQEVLDTLSSRSDLVLEAQSVKLMIEIIEQMSQSVKLIEKQLSELTKDDEMVSRLMTIRGCGKITAWIIRSYTEDIGRFASAKKYAAFCGLVPWVQDSNETVRHGRITKRGPQELRTAYVQLVLGIRRCKDTSGWRIMQRLDYMKKNKGSGKSIVAAARKMAEIVWVLLTEKQDFDSTKMMGRYKPMSLAEQALVAMN

SEQ ID NO: 156392 - protein, 323 aa, unidentified
MNHKVGKDNTVARFIGIDVSKQWLDVACLPERETRRYGNDCAGLEQLCTWIVPLAPELIVMEATGGFETNAATALAAGGLALAVVNPKHVRDFARAFGILAKTDRIDTLVLAAFAQKVHPPVRPLPDEERRELIDLVDRRRQLVTMRAEEKTRLTQATPAARQDIKEHIEWLNERLRRLDIDLTAKLRSSSLWKTKEQILTSAPGVGRVTVATLVARLPELGTLNRRAIAALTGVAPFARDSGQHRGRRMIWGGRADVRNVLYMATVTAARINPVIRSFYLRLKQAGKPAKVALTACMRKLLTILNTMVRNNQPWQIPPTQTI

SEQ ID NO: 156393 - protein, 346 aa, unidentified
MEQYVGLDVSLKMTAICIVDRTGKIEREGMVASDPAAIAAFVRLHAPHVARIGLETGATSTWLWTELNKMGLPVICIDARHAKAALKMQINKSDRNDAVGIARIMQCGWYKEVRVKGLDSHAIKAVLVSRALLVKIKRDLENQIRGLLKNLGLVIGRAKMNVFVVRAAELIEDRPELAAAVEPLLKAREAVERQIADLDRKVMRLARNDVQVRRFMTAPGIGPITALCYLATIDDPTRFKRSRSVGAYVGLTSRRYASGEVDWTGRISKCGDPMLRSYLYEAAGVLLTRVAKWSVLKAWGMRVAKRSGLRKAKVAVARKLAVILHRMWVDGTEFKWSSKEVATQPA

SEQ ID NO: 156394 - protein, 344 aa, unidentified
MNYYAALDVSLRTVNICVIDEQGKICAETKLASEVEDIVAYLNDLNLNIVSVGLEAGTLTQYLTYGLQAAGFEAVCMEARQVKAALSAMRNKTDKKDARGIAQILRSGWYSRVHVKSIKSHQIRALLSSRKAVLSKCIDLEQEVRGLFKVFGIKLPPTLGHGAFDKAVRTTIEADPALSHALLPLLDARLVLYRTFRELDNRTRKLALKDTICMRLMSAPGVGYITALTFKAAVDDPTRFRRSRTVAAHFGLTPRRFQSGEMDNPGRISRAGDSNVRCTLYTAANSLMTRSSKWSSLKVWGMQLAKQRGHRRAVIAVARKLAVILHRMWLDDTQFRWGTEVARS

SEQ ID NO: 156395 - protein, 342 aa, unidentified
MDHYAGLDVSLECSSVCVVDANGKILREAKVASEPTALIAWFRSSGLDLERVGLEAGPLSQWLFAALRQAGLAVELLETRHVRKAFEAMPVKSDRNDARGIAQLMRLGWFRPVHCKSMSAQETRTLLTARKLVQSKLRDVENSLRGILRGFGLKVGKSTEREFAGRIEELVAGHPHLRVIAKALLSVRTVLRSEFAAFEKQVRKMARSDMRTRLLMSTPAVGPVVALTYASAIDDPTRFKSSKQAGAHFGLTPKKYQSGETDYTGRISKIGDAGVRTALYEAAHVMLTRPVKGCSQLKSWAMRIARRAGMSKAKVALARRLAVILHRMLANGTPFNAATAAA

SEQ ID NO: 156396 - protein, 365 aa, unidentified
MQKISTMQASGKTIFEGQLTIGLDLGDRSSAYCVLNEAGEIVFEHKLATTPEAMKQVFGSMPRCRLAMETGTHSPWVSRLLTALGHEVIVGHAQKVRLITKSRRKDDRLDARTLARLARIDAELLSPVKHRSAQAQLHLTEIRARAVLVSARTALVNSVRGLVKSYGERLRKCGTQQFSRDTTSGLSTGLREALEPLLREVESLNERIQEYDRRIEKMAKQTYPETALLKQVKGVGDLIATAYVLTIEDPHRFRKSRDAGCFVGLQPGRRNSGESEPQMRISKEGDEYLRTLLVQGAHYILGPFGKDSDLRRWGQKLSARGGKNAKKRAVVAVARKLAVLLHRLWVSGEVYEPLRNSQKVMSAAA

SEQ ID NO: 156397 - protein, 411 aa, unidentified
MVKENFIYVGIDLHKETHTAVMIDCYNQKLGEITFPNRPADFPKLVTKVKKCNTDAKEVVYGLENAYGYGRPLAVWLIDKGYFVKDVNTAISHRQAKHRGAMYRKSDSDDAEAIALATLNMLDKLPDACPNDAYWSLGQLVHRRDNIMKQRTRLVNQLHEQLCIAYPSYKQFFNDISRPTALYFWEHYPSRKYLKGKSVEDLRAELVPVSHNKCSTRTCEKILDAIAGDKVKNNAYQDARDMVTLSIVSDLQHYDKQLAEVDKMLEQMYKMLGCTLTTIPGVNVITAVKILAEIGDIKRFSNANKLAQFAGIAPLHLSSSGKGKDVATKQGNRRLQATIYFLAIQMVQVSSKGTPRNPVVRAYYEKRKAEGKTSQQALICISRRLISIIYGMLKHGTEYRMPVVESAGENR

SEQ ID NO: 156398 - protein, 423 aa, unidentified
MSCLRHPAGAYLRLEGSISMTSAVADDTTDKVVFGGVDSHADTVHVAVISDNGGHLADAEFATTAAGYAAALAFLGAHGHVNAIGVEGTASYGAGFTRAARSAGLDVVEVNRPDRAERRRIGKSDPIDAYAAARAALSGRASSAPKDDTVTGIRALHNAARSAVKARTAALNQITHILVTAPESIRARFGQLKGADRTDALARLRPAGDAVHVAVLTALKSLARRVKELTAEHHALTRALDSEVTAHNPGLRAAYGVGPDTAAQLLVTAGGNPERLRTEASFAALCGAAPVPASSGRTNRHRLSRGGDRAANAALYRIALVRMSSDPRTRDYVARQTAAGRTKKEIIRLLKRAIVREMFRCLTTTVTVPGIADLRPLRQSKNITLTAAARHFGVWPATISTLERGIRRDDDLANTYRDWLTAA

SEQ ID NO: 156399 - protein, 428 aa, unidentified
MSITENRLNTFRSIKSYIRGSEQVLVVGVDIAKLKHVAFFGTPRGKTLRKSHVFDNTVACFEGLRTLANDLRKQHKLTETIFAVEPTASYHKPLAEYLIEKQEQVVYVSNVAVAKNRALLDGRWDKNDKKDAANIADLVGQGRCLYYDSPDENLRELRSLIAYRARLKKEEHALRMRLRNNVFAQFFPELDKMCPKGGESDDLVLSIAQHCLDPREIAAMSFTAFVTLVTSRKISPKREKELRQLWEIAGQSAGCRVHGAAKWEAQSLVTKLKAVRETVKNNERLMQATAEQFPEYECLMSIPGFGPIVSTMVLAAIGKPHRFESRSQVLRLAGLDLSAQRSGESSDRAKPVISKQGKAALRYALVQAAMVASTANADVKEYFTRCIKGRELERGIALKMKVKLAAKYLVVAWTLMKDNKKFDPSCFK

SEQ ID NO: 156400 - protein, 419 aa, unidentified
MGRVVIGTDPHKRSATIEVRDEREVLLATGRFGMDRAGYRQLLGYVRQWPARVWAVEGANGAGRPLAARLLADGETVWDVPAKLAARVRVFDTGHGRKTDATDAHSIAMVALRTRGLRQLAADEDLAVLRLLADRRDELSHSRTRTLNRLHRLLAELVGGGAPRHLSVLQAKAMLATVRPRDAAGRTRRALAAELIGELEGLDGKLKSLKRRLADAVTAAGSGLMDVYGIGPAGAARVLADVGDVARFTDRNRFASWTGTAPIDASSGEQIRHRLSRAGNRRMNHVLYIAAVVQIRHDTPGRAYYRRKLTEGKTPLEALRCLRRRLSDVVYRQLVADAAKANQDDQDEASPGGQRGATTAQPSAAGPTPNTGTSDKPQPGPAPATLPADQAGLEPPPASAAATTRRRDRGVNLQRWGSP

SEQ ID NO: 156401 - protein, 421 aa, unidentified
MEVIASRCAGIDIGKETLKATVRVQGGRGRKTRREVRTFDTTTGRLLELRDWLVAEGVTLVGMESTGVFWKPVYYVLENVMECWLLNAQHLKKVPGRKSDVSDSEWIAELVAHGLVRPSFVPPPGIRRLRDLTRYRTALTQDRTREIQRLQNVLEDAGIKLDCVASDLMGKSARAMLAALIAGERDPRVLAELALGRMRPKVGALQEALVGRFDDHHARLCSKMLAHIDDLTATICELTGEVQSEIEPIQHSRKRLKSIPGVSDRLAENLIAETGGDMSRFPTPQQLASWAGMCPGNNESAGKHFSGRTRKGNRWLRGALGEAAAAAARTKGTYLSARYRRLASRRGKKRAMVAIGHDILVAAWYIMRDDVDYADLGADYFDTHAMDPNARQRASPSNSKRWAIGSPSSTSPELRLFSSEP

SEQ ID NO: 156402 - protein, 313 aa, unidentified
MSKSFVGIDVSKNVLDVAFSDGRVLQVSNDEAGFAALRQELAGKVPGLVLMEATGGLERSIAAELSAAGIPLRIMNARHVRHFAKATGALAKTDRLDAQALVQFAQALRPEPRSIQPEHMQALQALIVRRRQLLEMLMMEKNRLHTAHRGVRADLRSSIRGLEKRLKGVDEDIDGALQGCGALREKIELLESVPGIARVTAVNLVATLPELGTLNRREISALAGVAPFNRDSGQSHGRRSIWGGRALARSALYMAALVGARHNPVLRTFYQRLRQAGKPGKVALVACMRKLLVILNTMLKQQRPWSPQFTHPA

SEQ ID NO: 156403 - protein, 323 aa, unidentified
MQGKVSPERSATTPVYVGIDVCKERLDVSIHPVGLALVFANNPDGIKRLKRSLKTHQVALVVMEATGKFHRAAHRSLHADGFAVAVVNPLRSRLFAEVMGALAKTDRVDCRMLAILGESLEPDAAAPRSELMETLQELTRCRDAAVAARTALLNQLGATTTRPAAVEIKRQLRAAETAIENLGAEIEALIGADPRLARRLAILISIPGVGTVTAIALIVGLAEIGSLSAKQAAMIVGLAPIAWDSGQSSGARHIRGGRAHVRRALYMAAVSATRCNSALKAFYDRLLLNGKKPKVALIAVMRKLVILANTLVCENRTWEPHHA

SEQ ID NO: 156404 - protein, 307 aa, unidentified
MFIGIDVSKDRLDVHVRPAGGAFAVARDGAGLEALTARLRTLGPRLVVLEATGGFEAVVAAAIAGAGLPLAVVNPAQVRAFGRATGRLAKTDRLDAALIAHFAEAVRPEPRPVASEQAQGLAELVARRRQVVEMIGMESNRRRAARSPKVLRGIERTLAALQAALTELDREIDDQVRGSPAWREAEDLLTSVPGVGPITARTLIAELPELGRITRRRIAALVGVAPVNRDSGASRGHRAIAGGRAGVRNVLYMAALTAVRRNAPVRAAYERLRARGTPAKAALVAAMRKLLTILNAILRDAKPWKAA

SEQ ID NO: 156405 - protein, 429 aa, unidentified
MQNESTPDARGPVFCGVDTHADSHWLYVLDWRGRRVLSRRFPADAAGYEALAGAIAAAGEPACIAMEGTSSYGAGLTRHLASLGMPVREALSPARMQRRRPGQGKCDEADAERAARAAMSGSRLGTPKSQDGWVDGVRCMLAARSGAVKARTSAINTARSLLTTAPEGLRSRFRGMGGPRLMEELPSVRAEGALGAALGALADLWAAARDAALDMERAIEASLEENCPALLAMYGCGPVSAAKLAVAAGDNPGRLRSEASFAAICGACPIPASSGKTVRHRLNRGGDRQANSALHEIARQRVMRDPETAEYAERARARGKSDREVMRCLKRYVAREAYRALMRPHEIRRPEDASELVAARRAAKVSQVRAASILGTSEKYISMLERGQRELKPIRRAYEAWVEAGLPLDWDRQAFEAERKMDSKKHLAK

SEQ ID NO: 156406 - protein, 334 aa, unidentified
MTMEILAIDLGKQSFHLHGIDADGVVISRKVSRAKLENAVTELDPAIVAMEACASAHHWGRRFSASGRQVRLVNPRFVKAFVRGSKNDAIDAEAIFDAASRPTMRFVPVKTTEQQDLQSLHRVRERLVVQRTSLINHARGLLAEYGVVLPKGPWRFRQQVPAAVAEADLSNLARELFTELMDQLTDVEARLAKLDAKLVSICREHEACRRLAALPGVGPVIATALVAAVDDGRHFRSGRELAAWIGLVPRQYTTGGKPRLGGIGRRANHYLRRQLIHGARAVISRLAAKDDGRSAWLKGIVARAGFNKALVALANKTARLAWVLLARKEDYLPA

SEQ ID NO: 156407 - protein, 312 aa, unidentified
MEAKFVGIDVSKATLDVDCLPVSTPRQFSNDASGIAGLVEWLVGSCVERIVLEATGGYEVAVASALAAAGLPVVVVNPKRVRDFAKAQGILAKTDRLDARVLALFAQQIAPPVRTLPDAAQRDLAELLDRRHQLVVMRTQEQARMATVLPVARSDVKQHIAWLDKRIRKHEGVLLKRLRANEIWDAKVTLLDTVPGIGPVNLFTLVGRLPELGTLNRQQIAALVGVAPFNDDSGKRRGQRYIRGGRADVRCALYMATLAAKLWNPVIAQMYDRLIAKGKPFKVAMTACMRKLLTILNAILKSKKPWEDRLAT

SEQ ID NO: 156408 - protein, 392 aa, unidentified
MNRIVYIGMDVHTSNYTLCSLDPGYGVEKDNYFAEVQFTNNFVTNVVNYVSNLKKKLKDCEFVCGYEAGCLGYSTYKDLTKVGIKCVIMAPSTMAVQKGGKKVKNDRRDARVIAQCLAYQTYKEVYVLSEHDEAVRGYLRMRDSHNKALKRIKQQIIAFCTGHGLFSPTKSNWTVAHLKWLKDLKFNDPVEQEIINEYLSSLTFLSDKIKAMDVRIEELASEKQYCENVKKLRCIKGIETNVALTLLAEIGDFNRFSKPTDFASYLGLIPGEQSSGDKVRGTGITKAGNSTLRRKLTESAKGYWRGRIGIKSATFKKLEKELPKEVTEYALKANTRLQRKFFNMIHVKGKNMNVAASACAREMACFVWGLITNHYDKAPAVPKTDEELLDLN

SEQ ID NO: 156409 - protein, 389 aa, unidentified
MKIFVGIDIAKLNHFAAAISSDGEIIIEPFKFTNDADGFQLLVSKLESFDKNSIIIGLESTAHYGDNLVRYLVAEFYQVCVLNPIKTCQMRKNNVRKTKTDKVDTFVIAKTLMMQDDLRFITFFDLDMMDLKALGRFRQKTIKQRTRLKIQLTTYVDQVFPEIQYFFKSGLHQNAVYALLKEAPSPKEIASMHMTHLANLLKVNSHGHFTKEQAKELRVLAQKSVGANDSAISIQITQTIQQIELLDSQLEKIEVEMTDIMKFNDSVIMTIPGIGYINGGMILGEIGDIHRFSNPNKLLAFAGLDPSVYQSGNFQAKTTRMSKRGSRVLRYALVNAAWNVVRNNATFKAYYDAKRAEGRSHYNALGHCSGKLVRVIWKMLTDNVEFNLK

SEQ ID NO: 156410 - protein, 341 aa, unidentified
MEKVTTIGLDIAKQVFQVHGVHGAGAIVCRRRLRRDDVVGFFKALPPCLIGIEACATGHHWARVLMALGHEARLMPASYVKPYVKRQKNDATDAEAICEAVTRPTMRFVPVKSEEQQSVLMLHRVRELLIRQRTMLVNALRGHLAEFGVVTRQGIAGVGKLIALVEDGDHDVIPPLARSALLLLVGQLREVHEKVSEMDRQIHAWHRSNELSRRLETIPGIGPITASAIAATVTDASLFKSGRQLAAWIGLVPRQNSSGGKDRLGRISKQGDPYLRRLLVVGAHAVLRFSGKAKVAPTRWAAELLVKKPYNVVAVALANKMARIVWALMATGRRFEAAPAL

SEQ ID NO: 156411 - protein, 338 aa, unidentified
MKLYGGIDLHSNNSVISLLDENDRLIYEQRLPNEQDIILVELAPYREALVGLVVESTFNWYWLVDGLMEAGYMVHLSNPAATKAYEGLKHTDDRHDARWLAHMLRLGILKQGYIYPKAERAVRDLLRKRAQLVRIQTSQILSIENLLSRNTGKRLNSYRIKRLSAEALDELLEQPEQALAMQSNLVVLKAVMAQIQILEDVVKARVKPRSELKWLKTVAGVGEILGWTILLESGDIRRFSKVGRYASYCRCVESKRLSNAKKKGENNRKNGNKYLGWAFIEAANFAIRYHDRIKRYYQRKRARTNGIVAIKACAHKLARASYYVQRDQVAFDMSKAFG

SEQ ID NO: 156412 - protein, 457 aa, unidentified
MIQSKPKAIAHRVRLENMPCVFPNAAGLDIGSTEIVAALPPDRDGETVRTFTTFTVELKQLVVWLQGHRVDTVAMESTGIYWIPIFEMLEDVGIRVYLVNARHFRIVPGRKSDYNDAQWLQKLHSLGLLEGSFRPDDEICVLRSLLRHRAQLIEHRAPHILHMQKALKLMNIQLPEVLSDVTGVTGMAILRAIIAGERRGEVLAKLRRKECKKSEHDIVEALSGTWREEHLFVLQQSLELFDYYTTKITECDTRIDLQFSAMRPRFLVETDAPGHATGRTKKSKSKNKPAYDARAHLLRVLGIDLTEVTGISDSIAQTIICEVGTDMSRFPTDRHFCSWLGLAPHNDISGGKILRSRTIKAHNRAAQAFRHAAQACARSYSAFGAFFRHIRARRGAQQAIVATAHKIARVFYHLLKYQEAFRPESMHEFDWKRRQRELKSLERRAKALGYSLQSVVG

SEQ ID NO: 156413 - protein, 353 aa, unidentified
MDSKKYIGMDVHKESISIAVRNDVGKIVMECVIETKANIILDFIHGLRGELQVTFEEGTWATWLYDLLKPHVTKLVVCDPRKNARQGNKNDQIDARELADRLYMNKLSSVYHGEAGVRTLKELARSYLTISKDLARVMTRVKAIYRSWGIPCAGKQVYAPRHRAEWLAKITEVGVLRRAEFYYQQLDALRSLRQEVRRELLAESKKHKATKLLCQIPSIGPIRAALLIALIQTPHRFRTKRPLWKYSGFAIETHSSADYRSVKGQLEKSRKQVSVRGLNRDCNHDLKNLFKSAATIASVKPGPFQEFYAALVAKGMRPEMARLTLARKIATIVLIIWKKGVSFDAKYLKPQTA

SEQ ID NO: 156414 - protein, 419 aa, unidentified
MVVSQLHSTRHLQTMSLCLFAKLILPDLVVSVGIDVSKDKHDCFILNSEGEILSDVFTIPNSLDGFTILLQRIRDCSSSQDNIKVGLEATGHYSYNILGFLLDNGLPTYVLNPLRTNLYRKSLSLRKTKTDRVDARTIAAMLLSDAGLKPYTDTVYHNEELKSLTRYRFDKVKERAKLKSSVSRLVCILFPELEKLTPTLHMPSVYALLDEFPGAKQIAEANLTHLKAILHNASKGRYNRDKAIDIRESARASIGAVMPAKSLELRHTIRLIRELDAEIEDIEAAIQSIMNEMHSPITTIPGIGTRMGAMILAEVGDFSRFDSPDKLLAYAGMSPSTYQSGQLKNCYPHMEKRGSRYLRYALYNATKYVCLWAPTFAAYLAKKRAEGKHYNIALSHAAKKLVRLIFAMEKSRQPYCSAT

SEQ ID NO: 156415 - protein, 385 aa, unidentified
MKGHTFKPTEYDVFCGLDVDKRSLSVSFTNHQGFLRSLRMPYNVDHLVTYVRKNFAGQRIAFAYEAGPTGYGLYDRLVAQAYSCLVASPSMIPKAPGQRVKTNRLDSRGLSENLRGGQLKSIHVPSAVYRELRHLTQLRDTFVSEMVGMKQRIKSLLLFEGIEFPPAPSAGQWSFMVKDKLRKLECSKSVRFKLEQLLDGLEFSEKQVLKVTREIRRFCRNDAELSQCLKYLMTIPGIGWIVASQLLARIGDWRELKNIRQLGGFLGLVPTENSTGERTDRGSITHSGDDRLRSKLIQASWSAIRQGGELREFLRSVCRTHARPVASRVAIVAVARKLSVRISVVLMQQRPYEVRQPLPSAPLTQEETSPQGTPRREPEPGEKNS

SEQ ID NO: 156416 - protein, 405 aa, unidentified
MEVIYERCCGLDIHKATITACVIVGRKKEIKTFGTMTDDLLQMTAFLKEREVQMTAMESTGSFWKPIFNIMEVEGISAILVNAAHIKNVPGRKTDVKDAEWIADCLKHGLLTASFVKPRDQRELCELIRYRTSMIEERAREYNRMGKVLEGANIKLTSVASKMDTVSGMNMVRAICDGVDDPVVLASMAKGTMRSKTKELKRALNGLVAPHQKMILKAMLDHIDQLSQLIKDLDAEIEKRMSQDVDLVEALDEITGVGKISAQTIIAEIGTDMSRFPTADHLASWACMCPETKESAGKKKPGKTKKANSTLKKTLVQSGRAAANSKDTYLNAQYRRIAARRGANRAAVAVGHSILVICYHMIKNRTRYNDLGADFFQNRNRDSLIRQNVKRLQALGFIVTLEEAA

SEQ ID NO: 156417 - protein, 402 aa, unidentified
MEQQSEHVIIGVDPHKLSATIEVVDQHEQLLGSGRFTTDRAGYAAMRGYAKTWPDRVWAVEGASGAGRPLAQRLLEDGEPVVDVPAKLSARVRLFDTGHNRKTDAHDAHAVAAVAVRTKNLRVLQLDGELEALRMLTDRREALTRRRVQTVGRLQALLAELLPGQAKRDLTTGQAKAMLASVRPRDIAGKTRRRIAAEELAELVAVEAKIKKSTAELKAIVLARGSHLMDIHGVGPVVAARTLADVGDVTRFADRNRFASWTGTAPLDASSGEQNRHRLSRAGNRRMNHMIHIAAMSQIRLDTDGRVYYRRKRAEGKKPLEAIRCLKRRISDAIYRQLLEDAQRAAEDAGTGPGGHCGATVQSSAVDLHPHVDTSDQPLPGPANQTLRPTPSTRKRSLEATG

SEQ ID NO: 156418 - protein, 320 aa, unidentified
MSATTERTTYVGIDVSKATLDVAILPTGECFVASNDEAGIEELLGKLAEVPEALVVLEATAGFERPVAAALAASGVALFVVNPRQARDFAKATGQLAKTDALDAFVLARFAEAIRPTPRAIPDAEAREFGEILARRRQIVRMLTAEKNRLGASTSKAVRGGIQAHIRWLEKELARTDRDLDEIIENSPTFKANEALLRSVPGVGPVLCRTLLAELPELGSLSPRELSALVGVAPLNRDSGTLRGRRTVWGGRARVREALYMGALIASRFNPAIREFYERLVAAGKPKKVALVACMRKLLVILNALMRERTPWRCPHALNS

SEQ ID NO: 156419 - protein, 375 aa, unidentified
MNAITKCVGLDVSKKKIAVAVADQDASPRFCGVIPNTREAIRKQLRRLGESHELRVCYEAGVTGYGLSRFLQTLGIECVVAAPSKIERVPGPRVKTDRKDALMLAEKLRKGDLVSVWVPDEGDEALRDLVRARKARMEDRTQARQRVSMFLMRHGIVKPDTMTPWGNPYRTWLRSLTFVNRASQMAFQEYIIAVEETEMAIRRLEQEIHEIATHSSYAPMMQALQALRGFKEIAAATVVAEIGDFTRFAHPQQLMSYAGLVPRESSSGNKVWRGAITKTGNPCLRWILTESAWSYRYRPSVSASMAKRMEGLSPHVQAIAWKAQNRLHRKYMRLLSRGKSRPVALMAVARELLGFIWAIAQQVSHESNGSAGLVA

SEQ ID NO: 156420 - protein, 419 aa, unidentified
MSIKTKKGRRVNERALIATVDVSKVMNTGYYRCPDGRDVKPFLFSNSGEGFKKFWERIAQAKERYGLEEIVVGIESTGSYGEPLLHYLKKRGATLVQVNPMHTKKLKELEDNSPQKSDEKDPKVIADIIEYGHALTVVIPEGAAAELRRLSQARERNMVRRIALLNQLQGLVGIIFPEFLEVMKGVNSVSSRYLLKKYPRPEDILGAGLPGLTAVLKKMSRGKLKAERAEALYEAAQTSIGIKEGQGSIVMEIGEAISLIETHERFTDSLEKKMSEYLGQIPSSRFILSMKGIGIVTTAGIIGEIGDFSKFRTIAEIMKLAGLNLCEVSSGRHTGQRHISKRGRSFLRKLLYFAALNTVRKGGVMHEIYQQHVEKGMPKGKAIIAIARKILGIIYALVRNESLYLSDYVKAQDRMKEAA

SEQ ID NO: 156421 - protein, 422 aa, unidentified
MSYRIAGIDVHKRMLAVVVSDVEVVGDFPFERRQFGSTPAQLRELAEWLVAQQVEEVVMESTAQYWKPVWATLERAWKPLAQQRDGAARRAGTLHLAQAQSNRARRGRKRDFADAERLVKRLVAHELTLSFVPDPAQRLWRTLTRTKYQLRQNRVQLQNRLEALLEEAHIKLSSLVSDLLGVSARRMLHALAEGATDPVPLAALANVRLRATQEQLRDALGACQDLNPVYRRLVRMALDDLQLLERQIDQVDQELADLLGPYHDQVQRLAEVPGLGVDSAQQIMAEVGATAATFPSPGQLASWVGACPGDEESAGVSHTHRSPKGNRQMRRLLNQAANAAVKCTGSIFQVLYRRYVPRLGHNQTVSIIAHRLCRLIWKILHQGVRYEERGPAMNERSKRRRAKRMIRELRSLGYHIEFANAQ

SEQ ID NO: 156422 - protein, 350 aa, unidentified
MPCKTVAIAHTIGIDTGKNTLHMIGLDKKGTIVVREKISRTRIAARLVNVPQCLIGIEAGMASHHVARELLALGHEVKQVPPAYAKPFRQGHKNDFRDAHAIAEAVQRPSTRCVPVKTADQLDLQTLHRVRSRLIGNRTAVINQLRGFLLEHGIPVRQGLRFLRQQLPQILAMRTDVLSPRMIRIIEELIGDWEHLDERIERVTDEIETLARADENCRRLMTVPGIGPIIASAMVAAIGNGAAFAKGRDFAAWLGLVPKQMSTGDRTILGRITKRGNRYLRMLFIQGARAILFRPAGWAKHSFGPWLAAAARRLHRNVLATAFANKLARIALTVLVEGRSYAARVEPRAA

SEQ ID NO: 156423 - protein, 347 aa, unidentified
MFAESVDVVIGVDTHRDSHALALLDAGLGALIAQERVDANREGYRRALKLASGCGRRRLWAVEGTGSYGAGLARYLQRQGERVLELERPVRGGSRGRAKSDALDALRAARAALTGEPLAELRSGGKREALRVLLVSREASVAVRRRGLNQLRALVLTAPAELRERLQGQPKRALVKRCVALRPRPGQQPQLRGTLLALRSCGRQVELASREAAVLERELAALVEQLAPQLLSHYGVGPITAAQLLVSWSHPGRLRSEAAFARLAGAAPIPCSSGKTIRHRLDRGGDRQLNRALHTIVLARRRGDQRTIAYIHRRIKEGKTEREAIRSLKRYIARNLYRLLEHTHQTA

SEQ ID NO: 156424 - protein, 359 aa, unidentified
MISHRCFHAPGIIVGVDTHRDEHVAVAIDKLGARIGQRNLPTTSMGYVSLECWAKGLGEIDAFGIEGTGSYGAGLARFLRGRGHIVIEVNRPDRSARRRLGKSDPTDAELAARAVLAGVAKDRPKSGIDKVEMIRMIKSTKDSAMKGRTQSINQMKAIVVTAPVELRSVLRDLTTSQLIACCARWRHGQPLTPTSAAKYTLSSLARRHIHLAREIEALDAHLARLTAAFAPALVESFGIGPDTAAALLVTAGSNPERLKSEAAFAALCGVSPIPASSGKTNRHRLNRGGDRRANAAIHRIVIVRLRYDERTRAYLKRRTEEGKTKTEVIRCLKRYVAREVFAILHSLRKPNIAQYAGHL

SEQ ID NO: 156425 - protein, 419 aa, unidentified
MGKQRSKVCGIDVHKRFLVATISDKTGYKKTEKFSNEIEPLLQLREWILEEHCEAVAFESTGEYWYSLYDVLQGYVEIIVANAYHIKWIPGKKTDIIDSEWIAELALNDLISPSRILPKEQREIRSLTRLREKLVKERTDHKNRVHKVLDSACIRLSAILSDIFGKSGLMVLKYIISGATIDEIIKKLPRRYQSRTDEIKEAIQSQLSDRQMMQLQTSLIMIEHLNTKIKELEQVILNELRKNRRELQILMSVPGIGYIGATTLLAEVGDIRDFQSPDKLAKWAGITPRVYQSADKLHTGSITKQGSKHLRWILIEIAHACVRSKNSKIRSFFDRIFARSGYKKAIVAVARKILKLVWHLLSNDELFENEAPLGHKTPRLLSQKESPSFTLSEAIELIVKAGFHVVNSDNSLNKRGLGT

SEQ ID NO: 156426 - protein, 343 aa, unidentified
MGEVSTIGLDIAKSIFQIHGVDADGAVVIRKRISRAKLLEFFTTLTPCLVGIEACPSAHYWSRRLQALGHTVKLMPPSYVKAYLKRSKNDANDAAAICEAVTRPSMRFVATKSEQQQCGLMLHRSRQLLVCQRTMLSNAIRGHMAELGIISAKGRNGTAELLKIVADEHDDRIPAAARFSLDVLARQYAIVRAEIVSIEKRIHTWHRSSEESRRLEEIPGVGPIVATALVAEVGDWKEFTSGRSLAAWIGLVPRQHSTGGKERLGRISKQGNRHLRWLLVAGAMAVIRYARQHGTKRPWLARLMDRRPIKVAAVALANKIARMAWAMMVRGEHFMEPKLLPTT

SEQ ID NO: 156427 - protein, 314 aa, unidentified
MNAGVDVAKDGLDACWGTEARRFAYDAEGIKQLAAALQQAEVDLVVMEASGGYEVTAAAALQAEGFAVAVLNPRQARDFAKSMGVLAKTDRVDARVLRDFANVVAAHPQRHRYLKPLPDGQREHLAALVMRRRQLVEMRGAEANRLATAHKSARKSVAAILKALDRQLASVDADIDGCLRKDFKDTMAWLDTVKGVGPVTMSTLVALLPELGQLSGRSISALVGVAPMARESGTWRGRRHICGGRYEVRSVVYMATLSAVRHNPVFRAFHQRLITAGKPPKVALVACMRKLVVILNAMARDRAAWRHPEASYAA

SEQ ID NO: 156428 - protein, 304 aa, unidentified
MNGIGIDVSKRQLDIGTTDGETLQVGNNRSGFSELDVWLKKRPTRQIVLEATGGYEQPVLDFLHKAGHPVARANASRARKLAQGLGQIAKTDRLDAYALAQMAALVKLPPYQPLQSWQQKMREFVRARRQAMDALTIARQQQEMVLDRELRRLLQGNITRLQTLVERLGKQIVEQVGQQPQLKMLKSMKGVGPVLQAVLASYLPELGRITGKRIASLVGVAPMSHDSGTMRGKRSIHGGRAEIRQVLYMAAMSAMRHEPRLRDFYQSLRARGKEGKVAIVAVMRKMLVILNARVRDAESGLVPA

SEQ ID NO: 156429 - protein, 367 aa, unidentified
MKNTIVHHEGAASLEVVATKLKPKAAVIKIGLDVHIRLYVAVAQYDHLLPKAARRLRPNEFVPWVEALLGRGHSVHVVYEACGFGFTLYRQLIALGAHCYVIAPRKLDDECTRVKTDPRDATTLCQRLSRYLEGNTRELAVIRVPSEAEEQARYVSRQREQLVHHRQKLEAQGRSLLINHALPAPAHWWKEQTWNRLGKHLPEWMRLRLQVARPALLSLQQQIDALTSELETAAPLNIPRGLGKLTTVVLTREICDWKRFNNRRAISSYTGLCPGERSSGSKRIPGSVTKRGNPRVRAALVECAWRMVRFQPQYPPVQKRLAVLAKGSRALGAVRKKAIVAVARRLAVDLWRIHTSRKTAAQLGLTI

SEQ ID NO: 156430 - protein, 345 aa, unidentified
MEIHTIGIDLGKTVFHLVGLDARGEVVVRKKCSRDQILRFTANLQVSLIGMEACGGAHFLARALREQGHDARLIPAKYVKPYVKTNKNDYIDAEAIAEAVGRARMRFVPIKTDDQLDLQSLHRVRERWVSARTAVINQIRGLLLERGITVRKGRSHIEESLPGILEDADNKLTGALRALLSQLRLEMQYLQRQIDECNKSILRISDELEDCRRILAVPGIGPMTATATIAAIGNGSAFKKGRGFAAWLGVVPGEHSTGGKQTLTGTGRRGNRYLRKLFIQGAHAVLQQRMKQSNGLNTWLAQLTSRKRIQVAAVAMANKMARMVWAVLSKGEAYRPPLLAGTVEA

SEQ ID NO: 156431 - protein, 341 aa, unidentified
MITIGSDTHLKSSTMTVLDSNGCFIERKRLKHTKKDLLEFIKKFPGPKQFSIETCYTWPAIYELLKDEVSEFHLLQASRLKSVTESQSKCDPHDADEIARLTHAGYIPIAHKANAHTRSFRSLLRTRVDCSLARVQVKNRIQAILNTNILYGERPESFKNLFSKKGIEYLTDLELSDGHKFIIEQCLQQLNEYDSLIERYEEKIKSIEFHHDDLSLLRSVPGMNGKVLCYVVLAEIDGIQRFKNSDKLVSYAGLIPKNFSSGGKTRSGRLKTACNQWLKWAMLQSVNGALKKDPGLKQYYDDIKAKTNSSVARVSTARRLLKNIYHVLKEQRKYYPFHNRR

SEQ ID NO: 156432 - protein, 363 aa, unidentified
MHYVGLDVHARRSSLCILDSCGKVVKRLEVKGSWPKLMERVAAEVPRPFSVCFEASCGYGHLHERLSALAERVAVAHPGKLRLIFRAKRKNDRVDAEKQAKLLYLGQVPLVHVPGADVRAWRGLIELRRKLVGRRTAVKSQLRALLRGAGCCDAPAGKALWSKRGLKWLAAAALGEADALRRDLLLEELAQADERVGRVTRELDRRADAHPGVALLRTIPGVGPRTAEAFVAYVDDVRRFARTRQVGCYLGLVPCQDSSAGRDRLGHITGDGPPTARMLLCEAAWQAVRRSPSVKAFFERVMHGEPGRKKIALVAVAHKLARSMAAMLRAGEAWREEVQGQDRGQERDRGQGQDRGQGQEPGA

SEQ ID NO: 156433 - protein, 376 aa, unidentified
MMTFTPSSVVVGVDVHKFSHTAVAMDPWGQEKGRLEFTNDRLAEYAEWLQSFGKKEDILVALEDVNCYGVHLVSALTKEGFAIRYVPAILTERERKQSTKRHKSDVVDATRVGKVMLTKYEQTLPAKESIAGEKELATAHALELMLTERRDLVKGQTILKNQLHALLHQHYGDHYGDEFRKPFHPSSVGQYVERLTAELTMTELSTEKSIMAATIIRRLTRLTLLTEQIKEITKKMTAVAKDSLDVLALSAHIHGCGMVTAATIMAEVATIKRFATEDKFAMYAGVAPTEHSSGSRNRLHTNPFGNRQLNRALHTIALGQIACKGDKQGKEYYAKKLKEGKTKLWALRCLKRQVANNVFRILKTSAAAKLASEAAR

SEQ ID NO: 156434 - protein, 391 aa, unidentified
MYFVGIDIAKRNHEACMIDSTGQSQGKTLRFPNTQAGGQKLIQWMQNVDHDLSSTEVAMEATGHYWLALHSFLRKHGIRVRVINPIQSDAFRNMYIRQTKNDTKDAFIIAEVLRFGRYSTTELGSDEIVALRQLSRFRFSLVDSISDLKRQVISVLDMLFPEYERLFSDLFGKTSSELLMEYTTPEEILAVDTEELAAFIAKHSRNRLGLDKAEELKSAAAASFGIDTALDAYRLQLRLLLQQIRFTEEQLDSLNSEIKKRLEAVDTNLVTIPGIGPVLAAAILGEIGDIARFPTGVKLVAFAGIDPTVRHSGEFTGTRNRMSKRGSPYLRRAIWLAASVAKVHSPILRDFYEQKRAQGKHHLAATGAVARKLTYIIHAVLRDKKPYEPIA

SEQ ID NO: 156435 - protein, 340 aa, unidentified
MDGHVQHKTEFSSQVVPLGIDVSKAKLDCTLLLDSTRLRSRSKSLPNSAAGFVQLIEWVQRQAQVSTAEVVAAMEPTGKYHEALALALHEAGMTVVVVNPAQLRQFAQGLAVRTKTDAKDSLMLARYALQPERIVWQPAPLEVRQLQALMGRLETVEMELRRELNRREAAELGHDPQLVQASIAEAIAFWTREQNKLQQAIDQHIDRHPGLKVERERLLSIPAVGPKTANRMLCILRARRFDYASQAAAFIGLTPVERQSGSNIRGRAHLSKCGNPNLRAALYMAAVTATRHNPDVRALYQRLLQRGKAKLSALCAAMRKLVHICFGVFKNQQNYRPQCA

SEQ ID NO: 156436 - protein, 435 aa, unidentified
MSNIIFKNLFISVGIDVGADFSWMSIALPNQTFVGKPFKILHSNIDSLELAVSKIKEAEELYSLESHIFLESTGIYHYPLFCYLRDKGFNCSVINPIITKSSTNINIRKVHNDRFDSKKAALIGLKPDLKVSLMPSELALDLRNLSRAYYDLIDNRSAYVNKLQGELRMVFPQYLKIFSKITTNTSLTLLENYTSPDAFLTASKDEIIDSIRSTARFGLTYASNKCNSIIQAATDAQVFGHAVSTNFKRIRLYIRFIRQYDEEINSILADMHELVDANEGTDFVKQIHLIESYKGAGFLSAVSLMGEIGDFSAFRKPKQLFAYFGLDPAVKQSGKFEGTKISMSKRGSRIARRVIHTMALISIGKNKDGSAKNPVLHDYYLKKCDNKPKMVAMGAVMHKVCNIVFAILRDGKEFQIITPEEHHRNYLKAKCDFAA

SEQ ID NO: 156437 - protein, 437 aa, unidentified
MTSPCRFYLNKIQEVILLSFKIFRFNCCGLDVHKTWIYACIGITDSNGRTDYKQARFSSFSKGLKELCDWLAKYNCSEVCMESTGKYWIPVFNVLEKANNSVILAHPKYTKTQKGNKTDRKDAKWICDLFMCEMIKPSFIPPADIRHLRDLVRYRFKLTCMITGEKNRAQNCLTVSNLKLDDVFSDVFGKSSRSITEYMLAHPGEIFDVAPFVDSRCKTPMEEIQAAVDGAISPEQAIKLRQCLNHIDELEKHLEEIEREILRLSDKYQAALDLIRTVPAFDKNPMTAIQILSEIGGDMSVFPSAKHLVSWAGCCPRNDQSNKRIKSTRISRAGNYIKPILVQVANGLLRSKKHPEITGRYKRIKSHRGHKKAIIAICRMLLTAIWHMLSDLKPYTAEGFLESRPVNKAKVLTTSQALNLLKQRGYTIKDDIVPAMN

SEQ ID NO: 156438 - protein, 430 aa, unidentified
MFTILLEDGTLFATYTVPVTREALTAFAERQLTGEDRLAMEATTNTWAVAGVLRPLVKEIVIGNPLKVRAIAEAKIKTDKVDSRVLAELLRCDYLPRVWQPDAETQRLRRLTHRRAALVSDRTRLKNRLHSILHHCLIPLPECDLFSKRGMAWLRETPLAEEEAQARDSDLRLLEQTELEIVQLDERLVREAWQDEKVRLVMSIPGIDYTVAQTCLAAIGDVSRFANGKKLAAYLGLNPSTRQSGGHCYHGKITKQGNAHARWLLVQAAQHLGQYRGPLGQTMRRIIQRKNRSVAVVACARKLAVLLWHVLSSGEPFRYAQPKSLQAKYARLRVRATGRRRRGGVAKGTPRSAQYGHGRTRAVPSLPQVLAENGLREIAPLAKGERVMLERKRMDGFYRELQSSSRIEANTTKPQTEETEEDFKSELTQS

SEQ ID NO: 156439 - protein, 326 aa, unidentified
MNGWVGIDVAKATLEVVLRREQDEQATTLPNTKAGFHSLHHFLQKRCRDGAHICLEATGLYGDAVAEFLHQRGYRVSVVNPARIKAYGDSRMIRNKTDRSDARLIAQFCRTQQPERWTPPAPAAKELRALLRHLDDLQAMRQQEHNRAHSGETSPTVLTQLEAHLAFLDSQIAALKQLIDDHFDQHPDLKQQRDLLTSIPGIGDLTAGKLLAEIRDIRAFGSARQLAAFVGVTPRQHQSGTSIRRPSRISKQGSATLRAALYLPAVVAKRHNPLVRDLAERLQARGHSQMSIIVAAMRKLLHLAYGVLKSGQPFDPHYLDKRVAIA

SEQ ID NO: 156440 - protein, 318 aa, unidentified
MSEPVVVGLDVAKATVDVAVRPSGECWSVPNTDAGAAELVTRLRPLSPALVVCEATGGFERATIAALATAGFPVVVANPRQVRDFARATGQLAKTDRLDAGILALFAERVRPTPRPLPDGAAQLLDAVLTRRRQLLEMLTAEKNRLGFAPKPLHRGIQAHIRWLERQLDDVTKELAGLIEASPVWRAKDDLLQSVPGVGPIVSSTLLGELPELGTLSHKQAAALAGVAPLARDSGTLRGKRMVWGGRASVRTALFMAVLCGRRWNPVLKVFYERLIAAGKPKKVALIAFARKLLTILNAMVRNNNRWMNPNAKLQYSC

SEQ ID NO: 156441 - protein, 322 aa, unidentified
MAKHTTICAGIDTGKRKLDVAIEGRRELLQVDNTAEGHKVLLAWLRQRRVKRVGIEASGGYEQPVVAELRRKRFVVVVFQPAQVRAYAKFHLQRAKNDKIDAALIAACTAAVRKIHAAPDPRLLPFAEQLTMIDQINEDIARLKNRIESCRNARIKKLWQEDIARLEMREKAELKALVASIRKRPDLAKRLELINSVDGIGLPTAVAILVRLPEIGRITREQAVALAGLAPYDDDSGEQVGVRHIEGGRKRLRRALYTASLAASFRWNRQLIQLYQRLTAAGKEHKRALVACARKMLIFANTVVARGTPWCDEPPVGSLSVS

SEQ ID NO: 156442 - protein, 408 aa, unidentified
MQRYYLGVDWADKSHQLYVAAEGGRKIKEREVQQTADELAELGRWLDESRSQGIELWAAIEKPHGRMVDFLLDHGVVVYPVNPKALDRARDRFRVSQSKSDSFDAYVLAEFLRTDHAHLRALEPDSAQAQELKMLTRDYDRLGRQKARLLNQIRITLKEYYPRPLEVFEDLETKMALDFLKAYPTPQGLCDLSRGGWNRFAKRDHHQSEAHTNDLWDKLNKPQIPVPAHVVRAKAKLLLALVVQLEASIKAVNSYSREIEDFFGAMPAAEIAKTLPGAKTGITVPTLWAELGDAKNRWQSSMHLQAEAGTVPVTKSSGKSRIVQFRYACKKQLRHAMYWFAFNSLKRCEWANKYYRDQRAKGHSNHQALRALGAKWLKIIFVMWRDHKGYDENYHLANMARQRIRQAV

SEQ ID NO: 156443 - protein, 363 aa, unidentified
MEAEERRYVGIDLGKREYTTAIIGRNGKMSIHQGKTSEHGRQTLYRLLEKTDKVALEAGNLAFIMAREIQERVGCDVRVLNSAKLPFIWDAPTKTDKEDAMKLAHLVEERRDEKLPVVPLPSEKEIERRKTLSSYGREMRNRTRHINTLHAIFVHQGHTTIARKNLATAEKRKEAIQVLTGLEREEAEWLLKYLDLHEQRIKELKGKIQGEAKKDEDMKNLQTIPGVGPIVAYAFAAHVGDGSRFSTGSQVSNYIGFVPRLDYSGTIQREGPITKHGNGYLRGLLVQAAWSMVRSKKGGSLKERYISLTAFDGKSKKKTIVSIGRRLAELMYSVLRDKSNYEARIWAGRREYLAKLKGLKQGA

SEQ ID NO: 156444 - protein, 342 aa, unidentified
MAIVGAFDVHRRQVTFDVLDTVSGQVRRVQMRPACRATLRQFLGRFAGQGEVSFAVEGCTGWRFIVEELERAGFEAHVADPAAVADARGSKRRAKTDRIDSRQLRQQLVEGRLPESWIPPVLVREVRAKLECYHDLREEHTAWVQRVHATLFHHGVPVIEGALSTIDGRARLAAGEGLSPAARQSVGVAVRVADALQTELDERGKELGRFARRQPGCRALAAQYGVGPITAVAIWAFLGDTRRFSSSAQAVRHTGLDVTVYSSDGKRSPGHLARQGPPVLRWALYEAACSAARRTSPDLDYYHDTKERIDHKRAAISVARKIARRSHHILRNLGDTAWQDAA

SEQ ID NO: 156445 - protein, 389 aa, unidentified
MFYIGIDVGKFNHCACVISSEGEVLIEPFFFTNNLDGFDSFIKAVKKFKSPRHIVGLEATGHYGDNLINFLITHDYEVALINPLTTDAKRKSKIRKTKNDKKDTFLICSVLFDRDCTRVTQRKLDMKQARELTRYHASIAEDINQKKNQLQKCIDIVIPEFNTWFKTKYSKAYMAVLKEFGSSYNLASANLAHLKKVLKPKSSGSRVNIDASSLRSSAKKSIGENNEAVTLEIKMLIENIELLASQLKTVDKKIEELAVKLDSPIFSIPGIGIYTGMSILSEIGDIHNFSSAVKVMGFAGVDPGTYQSGEYSAPRTALSKRGSRYLRKSLYQCILTVCKYNLTFNKYYKLKRLQGKSHRCAQGHSVRKLIRVIYKLLSENIQFDEKLLI

SEQ ID NO: 156446 - protein, 377 aa, unidentified
MKKHTQDLIAEVPRGCSQVGITIGIDLGDVWSHYCTLNEDGEVVDRGRFRTNPSSVDKWFTDLPRVRIAMEAGTHSIWISEQLQELGHEVIVANVRELRAISHSDRKSDQVDAEKLARFARLDPKILRPIAHRTVAQQEALTLIRARNLIVRLRTAAVNAVRGLAKPCGYRLPSSSTLCFAKRCLAALPPGLARALAPVLHQIADMTAKIKEYDRAIKQLIETEYRETQALLKVYGVGHLTALTYVLTLGSKERFQRSRDVGCYLGLRPKRSQSGERDPQFGITKAGNVYLRSLLVECANHVLGRHGKDSTLRQWGLSLVHHAEASDPAIVPSLLWRENLPCCCIVSGSRSSHTFRFMQRPLKEKIMFNRCDDPVFR

SEQ ID NO: 156447 - protein, 349 aa, unidentified
MEKQQRTFGTTTRELVSLREWLLSQGCGHVAMESTGVYWKPVYAILEGAFQIVVANAQQVKKVPGRKTDVKDAEWIADLLCHGLLRSSFVPPQPIRELRDLTRYRRKLVESQAAERNRLLKLLESANIKLASVATDVFGVSGRLMLKALVEGKASLAEMAELAKGKLRSKIPQLQLALEGKLEEHHRFLLQLQQDRLDAAERDLGTLEQRIQQKLEPYAAQIALLQEIPGVDWTLAAVIIAELGIDMSVFQSVSQLASWAGVCPGNNESAGKRKTTHIPKGNVYLKTALVEPPTLRLVPRELIYETSSTASRRVAGTNGPPWPSPIRFWFLSTTCFLNKFLTTTWEIFI

SEQ ID NO: 156448 - protein, 399 aa, unidentified
MLTVPPSLDPMKERGPPLPVSVPGAMLGLLIYPRQREARCVARVRRGRWSLLLGQFREAQRLHDVGIDLHRRRSVIVRMDEAGETLSTVSIENDPVALALEVAKAGPDPEVVLEASSTYGWYWAADVLEAAGATVHLAHPLGVAMFTHQRVKNDRRDATNLAQLLRMGQLPEAWIAPPELRELPELVRYRAKLVALRSGLKAQVHAVLAKEGVRVPMTDLFGVGGNRLLDSLALAPAFDARVRSLRDLIEVYDTQVKVFEQACTQRLAGHQGYRAIQAIRGVGRVFGALFVAEIGDVHRFPGPRQLCSWAGLTPRHHESDTTVRRGSITKQGSRLVRWAAVEAITQHRGATKIQTDQRRIAERRGTGVAKVAAARKLLTLVYYGLRDGEIRCLTRPKAA

SEQ ID NO: 156449 - protein, 392 aa, unidentified
MPNNNYERVVIGIDPHKASWTAAAVNSALQPVATIRVPVSRAGYRTLRKFAAQWPTATWAIEGVSGLGAPLNTWLASDQVVAVDVPAKLAARVRILSTGHGRKSDDADTTSVGIAALTAVGLRTAGVDEAITVLRALIEHRDDVIKTRTQTVNRLHVLLTRLLPGGAPRDLDADTAAQLLRPIRPRGTGLRTLRQLAVELVAEIRHLDRRITGVNTKITEAVQQSGSTLTDLVGVGTLTAGKILARVGDVHRFRTPAAFASYTGTAPIEASSGDVVRHRLSRAGDRQLNCCLHIAAITQIRLDGPGRTYYQRKRADGKSHKEALRCLKRRLSDIVYRQLLKDAGNRQTADLGGHQGATTTSSAAGTTPTPTLRTSHFPGPPMPTLQPLTPAT

SEQ ID NO: 156450 - protein, 372 aa, unidentified
MSQSSTLYVGMDVHKETIAVAYVAKDHDAEVVSLGTFGTRQCDIDNLIRKLQSKAKHLVFVYEAGPCGYWLYRYLTKKDYVCWVVAPSLIPKRAGDRVKTDRRDAMQLARLMRSGDLTPVYVPAVDDEAIRDLSRAREDTLRDLKAAKLRLKAFLLRHDIRYTGRANWSPAHLRWLSEVICPTPAQQIVFQEYVQTVTEQTERLGRLELELHEQVQTWRLHPVVEALQALRGVQFTVAVTTVAELGDLTRFDNPRQLMHYLGLTPSEYSSGARRQQGSITKTGNTHARRALVEGAWAYRYPAKVSRHLQLRLEKLPAAIQAISWKAQVRLCKRYRHLMAKGKNANQVVVAIARELSAFMWAIAKQVAGSPKA

SEQ ID NO: 156451 - protein, 384 aa, unidentified
MFDAKLVEFELTLSDPMGWTPLRRHRCAKVVVFWTTKRGEASMENVSIIGLDLAKNVFQAHGARGDGSTVFRRKISRTKLLSFFASVHACTVAMEACASAHYWARQIGALGHEVRLIAPIYVKPFVKRNKNDAADAEAIAEAASRPTMRFVAVKSAEKQASGMAFKTRDLLVRQRTQTINALRGHMAEYGVVAPQGPVHVERLAEALQDPSGGLPAPVISLCQLLLANVAGLTEQIGLLEQELRARARSDQTAKRLMTIPGVGVICAVAIEALAPPLEGFAKGRDFAAWLGLTPQQNSSGGKTRLGGTSKMGQRDLRRLLVSGAMAVVRWASRKGAPEGSWLGRMLKKKPRLVVAVALANRTARIAWALMTKGGVYQAPDAVRA

SEQ ID NO: 156452 - protein, 402 aa, unidentified
MAYDFVIGVDVGKYFHHACVLDPQGRQVLSKRINQHKGSLRKLFGQFLADNTSVLVIVDQPNNIGRLTVAVAQDMGADVRYLPGLAMRQLSRIHVGNSKTDVRDAYVIAHAGLNLPDSLRSVDRVEEVFTQPKVLNGIDEDLARAYTRLINQMRSALVGTYPAFEHVLRGQMIHRKWILHLLAKYGGPTKIRRIGRTRLTAFARKHRARNPEPVIDAMLAAIHGQTVSIAGAEYAELGVAMSAKDALAKLAHRKEIEAQVLKLIQDIPQTEILLSMPGIGPRSAEQILMTVGDMSDFPDAAHLASYAGLSPRTNQSGTSIMSNSPNRAGNKKLKNALWQSSFASIRFHERSRQFYERKRKEGKRHNAAVVALARRRLNALFSMMRNGEHYRDISTAQEAAAA

SEQ ID NO: 156453 - protein, 354 aa, unidentified
MLKYSVGLDVSSADIHACFSVIDSQQKVKVISSKVINNNSKGFEILTAWIEKSRKLKMLPLVIGMEATGIYHEECAYYLHDKSYAVSVVLPNYAKKFLQASGLKSKNDKIDAKGLAQMFAERSFRLWAPLGKFYYHLRGLTRQQESLQEIKIGVKNQLEAAKRGAFKNKDVIKQLDETIKFLEKQTADIEKKILAHLKSNKDIKEQVENVLTIKGIGITTLAILLAETNGFLLFSSSRQLVSFSGYDIVENQSGRHRGKTKISKKGNGHIRRALFFPAFTAVSNKCKPLLDLYNRTFENHKIKMKSYVAVQKKLLVLVYTLWKKNVAFTENYLTENTKEREQVSTSLGSLAQAE

SEQ ID NO: 156454 - protein, 432 aa, unidentified
MAKVKPMDVTLPIACGVDVHKRFIVAVVCDASDPLHPAYFKKRFSTFTNDLIRFDHWLLEHDCRHVCMESTGKYWIPVFNVLESDMEEVRIVNPKWVKAVRDEKDDDKDAMWIVNKYRQGETKKSFIPDWTIRKLRELTRLRSKYVQQCTQEKNRLINSLTCRNYKLDMVFSSVFSKSAQKIINLLIGEDPYTKEDILCCVDSRCRASQEDILEACNGFEFDAVEKKIIAHTRQHLQFLEEQIRTLDEEIDMLAAQYKKEIDLLMSVPGIGRTSAIKIIAEIGNNMDPFYTADKLARWAGLVPGRNESAGKKNSRHITKGGKYLKPVLVECAWAAIKTQNPYYRSKFNGIAGRQGKKRAIIAIARKILVSIWSMLKDGAEWHPKDMDDNGRPRELSLRKAKRNFKTVIRDLLDLGKTKEEIAIDLVTIINQS

SEQ ID NO: 156455 - protein, 412 aa, unidentified
MDTVMERCAGLDVHKDTVAACVRFPGPSGERAQEVHTFGTTTTELLALRDWLVAHGVTLAGMESTGIYWRPVYYVLEDAFECWVLNARHLRNVPGRKTDVRDAEWICQLVEHGLVRPSFVPPREIRELRNLTRYRKAQIEERTREAQRLDKVLQDAGIKLSSVATDILGASGRDMLAALVAGTRDPEILSELARGVLRKKIPQLKQALAGRFGPHHALIVGTILSHLEFLDEAIGNLSAEIEQVIAPFGLAVEMLRSIPGVQQRTAELMIAEIGVDMGRFGSSARLASWAGMCPGNNESAGKHRSGKTRKGSKWLRSALTESARAAARSKGTYLSAQYHRLKGRRGANKATVAVGHSILVAAFHILDRGEPYADLGADYFVHRHNPERHANRLVRQLRALGYDVTSEPVAAA

SEQ ID NO: 156456 - protein, 371 aa, unidentified
MKKYSMFIGMDVHKNSIEIAIAQRGRNAEVRHYGRIDGTLEALDKFVRKLVSKGGPLHFVYEAGPCGYEIYRHLTAKGHDCAVVAPSRIPRKSGDRIKNDRRDACMLARLDRAGELTPVYVPLAEDEAIRDLTRAREDAKADEKRCKQRLKSFLLRSGLRYAGKSSWSQAHMRWLSDIKMPHPSQQIVLQEYINAITECSQRVQRLTEHLRQMLPKWRMFPVVEALQALRGVSLIVSATTVAEIGDLKRFENPSELMSFLGLVPSEHSTGEKTRRGSITKSGNGHVRRVLVEAAWAYRLPARVSRALLKRQEGLPQKVCDISWKAQTRLCTRYRKLWAKGKPKQVVVTAIARELCGFMWAIANEIEIPAAA

SEQ ID NO: 156457 - protein, 349 aa, unidentified
MRRVYVGIDIGSKQCSAAAINSRGKLISAETFRTSEMGLISFVEGQQGGVKVLIEEGELAGWVMRTLLPHAERVEVSDPKRNAWIAKGANKSDRVDAAKLAELLRLGSYSVVYHPEEVELAAFGIVVKQFDEASRRLAKVKCQIKAGLRRQGIMASGTAVYGKTGRQRMLQKIADPHVARAIERDYDLLDYLTRDKADARRQVSLMSKRFPVIERLMRMPGVGLVLASRFVAIVGNPHRFNKRTLASFSRLGIVKRSSDGSPLGPEHIDKSGNGRMKDISRKAFERALGTRRPNGIKDFYLRSLSRTANKTSARLNTQRKILAIMLAVWRDGTEYSDELVTGKRAFARA

SEQ ID NO: 156458 - protein, 407 aa, unidentified
MEVVYRCCCGIDVHKKLIVACLNKGGKRELREFGATTGEIKQLGNWLIEEGCQMIAMESTGVYWKPLYNLFEMMDLDAIIVNASHMKTLPGRKTDIKDAEWIADLLRHGLLKASYIPDREQRELRELARYRKSLIEERVRELNRLQKVLEGANIKLDSVVSDINSQSARRLLDKIAQNAVLNATEVSELIHSSMRPKLDAIMRSIEGITTPLQRMLIAKIVDHIDDMTRRIEDLDGMMKEYTEKYEEAIAAIDELPGIARRSAEIIIAEIGMDMGRFPSAAHLCSWAGISPGNNKSAGKRKHGKTTKGNKALKTILTQCAKSAKNCKGSYFSAQYQRVAARRGRNRATIAVAHSMLIAIYHVLNEHVAFRDLGADYYDNFNREHKIKSYLKRLNSLGWTPDVALAMA

SEQ ID NO: 156459 - protein, 358 aa, unidentified
MQTKVTKLDYHGHNIYVGLDTHLRSWKVTIRVDQEYYKTFSQDPSPEILYKYLVRNFPNGTYFSAYEASFSGFTAHRALNKLGIKNIVVNPADIPTTDKERKQKDDARDSRKIAEQLAGSNLKGIYVPSIEIESDRALLRYRRTQVKEISRNKNRIKSFLYFHGITIPEQFAEKSYWSKRFTKWLLEVELPSKSMRATLTEIVETVEFIRNSQYGLLRKIRLLSQTEKYKANTSFLISVPGIGLKTVMSFLTEIDDITRFKNLDQLCSFIGLVPMTNSSGEKESIGNITKRQNKVLRSTIIESSWIAIRNDPALMLAYQKLTKRMKPTKAIIRIAKKLINRMRYVLKNQTFYETAVVQ

SEQ ID NO: 156460 - protein, 344 aa, unidentified
MEHFAGLDVSVKDTSVCIVDDTGKIVREVKVASEPAALLAVLKNPAYHFKRIGLEAGPLSQWLFSALAEVGLPVICVETRHMRAALKAQINKTDRNDARGIAQMMRVGLYRPVHVKTLRSQKLRMLLTHRKLLQSKAIAIDNDLRGTLRNFGLKVGMVGTVRFEARIRELVENLPDLAALVEPLLIVRRTLREQFCILHRRLLAIVRDDEVCRRLMTTPGVGPVVSLTYRATVDVPARFRKSKSVGAVFGLTCAKYQSGEVDWDGRISRCGDEMMRTMLYEAAQAMMRSKKWSWLKAWAMQIARRRGMKKAIVALARRLAVIMHRIWVDGTEFRWTREQATATA

SEQ ID NO: 156461 - protein, 366 aa, unidentified
MDSMTRADGPVHLGMDVAKNMIVVGILPPGVETPAVDRIANDEPSIRRLVDRFEDRSRLRACYEAGPTGFGLYRLLRSMGVACDVVAPSLIPKAPGDRVKTDKRDARRLARLHRAGELVAIAIPTPEQEAVRDLCRARAALVADQARARQRLDKFLLRHDQVYRDGSKWTVRHEQWLGAQRFDDAALRSTYGHYRAVVSARDAEVGAIEAALTPWFDRGPFAAATHRLAAYRGIAYLGGLTLASEVFDWRRFGSAMQFMGFTGLVPSEYSTGESVRRGHITKTGNGHVRTQLIESAWSYQHRATVGVVLRRRQAHADPDTIARSWAAQQRLCARFRRLLARKASKNVVVTAIARELAGFVWAEMTA

SEQ ID NO: 156462 - protein, 352 aa, unidentified
MEKNNKLDFGGQHIYVGMDVHKKSWSVSIHTEQFEHKTFTQPPEVEKLTYYLERTFPGATYHTVYEAGFSGFWLHDKLREKGIDCMVVNPADVPTKDKERAGKTDRVDCRKLARGLRNGEIKGIYVPPRVKVEDRTLVRTRQSMVRKQTRCKNQITSILFFYGIVIPEEGRWSRRFINWIESIRMERASGDFALKAHLEELKHLRQIIANLNKAILSLSRAEEYMADVLLLKSVPGISTLTAMILLTELADLSRFSSLDKLASYAGVVPDIRSSGETEYVAGITFRRNAALRALLIESSWIAVRKDPALIMVFNKLSVRMKKTKAIVHIARKLLNRIRFVLKNRQEYVPAIV

SEQ ID NO: 156463 - protein, 402 aa, unidentified
MNCVGIDVSKGKSMIAVMRPFGEVVVSPFEVRHTANELSELAGLLKSLDGETRVVMESTGNYHAPVAWLLHDAGLYVSVVNAMLVHDYGNNSLRRAKTDKKDAVKLANYGLDHWLTLPRYVPEEDARLMLKTCYRQYQQYSKVQTMLKNNLISLLDTAFPDANRLFTSPPRTDGSEKWVDFVATFWHCECVCGLSKKAFTAKYQKWCRKHGYNFSEDKALDIYASACRHFGVIPKTDTAKLLVEQAISQLQTTSSALAALKQEMQSLAASLPEYPVVMGMFGVGPTLGPQLIAEIGDVRRFHSKKALVAFAGIDAPPYQSGQIDVRSRSISKRGSASLRRTLFLVMGVLLQCAPMDEPVYQFMNKKRSEGKPYRVYMMASANKFLRIYYASVKAYLDSLEHN

SEQ ID NO: 156464 - protein, 359 aa, unidentified
MMSIAHVGMDVHKQQTRVVLLPEHMADPLDECTLPTTPAALCGYLHRWAQRFQLRCYYEAGPLGYQPYRWLSGLGVECQVIAPSKTPRACGDRVKTDRRDARVLARQGRAGALVRVHVPSAQQERGRGLVRYREGRLRDVLAAKHRLLKFLGTRGLFFSEGRHWTQRHFCWLGSLRFEDLDDWTAQQYLADLQYRGDRLAEADREVAALAEREAYREAVGRLCCFRGLDVLSAMVVVSETIDFTRFPSASQYMSYWGLTCREESSGSSRRQGGITKCGSGRARRVWVEAAWHYRHKPAVRGRLRKRQQGQPLAIIAHAWKAQQRLHKKFWRIALRKDSRTAAVAVARELAGFVWGAMTM

SEQ ID NO: 156465 - protein, 529 aa, unidentified
MLITECGRLVLAAHAISAQLLAGVAGLAGMAVSRARSVERSRQAWLSYPLPARCWAWLPNDVPACRGLAVAWLKRGARALVLSLESGVPATVVIPGYRKEMPVMAVVMIGVDPHKTSHTAVAISPAEEPLGQLRVRAPAVQAERLLGWAQAWPERAWAVEGAGGLGHLLAQQLLSAGERVLDVPPKLAARVRLLATGNVNKNDPDDARSVAVAALRSAQVREARRDDHATVLKVWPKRCQDLGRARTQVACRAHQVLCELVPGGVPGEITAGQAGQVLASITPAEAVQAARCELAAELTEDLRGVDIRIRETRKKLTEAVRAAGTCLTGLFGVGPVIAAAVIGDVRTVSRFASRDRFASYNGTAPIEVSSGGRKACRLSRRGNRRHGHAIYMAAVTQIRYRHTKGRACYDKKLAEGKTPKEALRALKRQISDAIFACLQEDARRAAAAAGKSPGGQPGNHSASRAAGSHPDHRLFGQATPGPASHPTTAAPFPAPLPSRASEGPGQGPGAARPRSGARRASSTRPPASR

SEQ ID NO: 156466 - protein, 349 aa, unidentified
MGMVGGLDLHRRQITFDVVELESGEEWRGRVWQPDRDRFRRWLRDDVARRANGGSVALAVEGCTGWRYVVEEIEAAGFEAHLAEPADTQAARGRKRRAKTDRSDARLLRDLLVAGELPASWIPPELVLEWRERVRLYVSLVNQRTVWCQRIHAELYHHGVAVPEGAIRTVKTRAMLADTGLRLSPAARERIDAGYRMIDATDLEAQPLKRELQRFGARQPACRALVDAQYGIGGLIAVAVWSELGDCRRFCRSEQVVRHTGLDVTVDSSDRRRAGGFLSRQGPETLRWALYEAAKNSSHHRSPDHHYYAQVKQRHDGKIAAISVARQFARRCYHVLRNLDPDIVYAMPN

SEQ ID NO: 156467 - protein, 342 aa, unidentified
MKSTTIAVDVAKEVLEVAVSVRPGQVSEQKRLSRAAFMKFCTDQPPATVLLEACGSAHYWGRRLQSIGHRVVLLPPHTTRPYVFRNKTDRTDTRGLLEAFRNEDIHPVPVKSVSQQALTALHRLRSTWLATRTARINTVRGLLREFGCTIPVGAHHVLTRTWDLLADADSGLPDALRPALAAACTEIRDVEGRIRIVEDQLQALADQTPAVARLRSIPGVGLLTATALVAFVGDVQRFPSGRHFASYLGLTPRERSSGLVRRLGAISKRGDVYLRMLLIHGARAVLWAAKKRPTPDRLRVWALHLEKLRGHNKAAVALANKLARIIWAVWKHDVDFREVTAA

SEQ ID NO: 156468 - protein, 343 aa, unidentified
MEQYVALDVSLQKVAICVLNASGHVVLEAEVASDPGALITFIQAKAPYAVRIGLESGPTSPWLWHSLKSAGLPVVCMDARHAHAALSVRPTKSDRNDARGLAEMVRMGWYKEVQVKSLAAHERMALLGVRRRLVDMRVEIDGQIRGILKTFGLVVGCGNSNAFAQRARILAQDHPVLSALIDKLIEVREVAVAKVAILDKEIRCFVRADPTLRRFMTVPGVGPVTALAFRSTVDEPDRFRRARSVGPYLGLTPRRYQSGETDRQGKISKCGDRFTRTCLYEAANVLLTKVQRWSPLKAWGTRLAKRIGSKKARVAIARKIAVILQCIWSDGTEFWWTKEAVKA

SEQ ID NO: 156469 - protein, 355 aa, unidentified
MDSVKYIGMDVHKEAISIAVLNSSGKLVMECVIETKAITILQFVQGLRGSLHITLEEGTWAAWLYDLLKPHVTKIVVCNPRRNALLKEGSKSDRIDARKLAELLRSNLLRPVYHGEHGVRTLKELARSYLTISKDLGRVMSRLKAIYRSWGIPCTGKQVYAPRYRAEWLAKITEAGVHRRAEFYYQQLDALRPLRQQVRQELLAEARKHSAWKLLRGIPSIGPIRAALIIAILQTPHRFRTKRQLWTYSGFGIETHSSAEHRYIKGELQRSKKQISIRGLNRNHNHDLKNLFKSAATIAAAKPGPFREFYDALVAKGIKPEMARLTLARKIAAITLVVWKRGVSFDAEHLKPQTV

SEQ ID NO: 156470 - protein, 326 aa, unidentified
MHTHFLGIDIAKSKFDCALLRPDGKVRNKVLPNNALGFTQLLTWLHAHGVSSSELHQLHVCMEATGIYWEALAEFLCDQGIAVSVINPAQIKSYGASRLMRSKTDKIDANLIANFAKERSPAPWTAPAAHERVLRSLVLRLEALQNMLTQESNRHQVANPAVQPQIQSHIDWLNAEIKALAKLIKDHIDKHPDLRQKRDLLDTIPGIGERTLAIMLAYFGSTEQFDNARKAVAFVGLDPRQHESGSSVKGKPRMSKVGHAFVRKALYMPAMAALYKTDWGKRFRQRLANAGKPPKLIIGAMMRKLIHVAFGVLKSNKPFNSALHCA

SEQ ID NO: 156471 - protein, 384 aa, unidentified
MRQVCGLDVHKDTIFACIMDNSGVVFQEKFGTLTSELERLASDLEAHDVSLVGMESTSVYWRPVWKRLASVCEQKLVNPYFIKQLPGKKSDVKDAEWIATCLGKNLIRGSYVPEERIQQLRLYDRRVHDLNHEIVTKLNRLDAALQRCNIRISNYVSSIDGKAYKEIVDLIAQGKTSPEVLAKKVHGRTLNKHGRDVIIDSLTGTLSLVDIDVIAMYKAELDLARKHKDLCLKQMEKICTTHFKEQYDNLTTIPGIKGPSACAIIAELGVDMSAFPSSAHLISWAGLKPRNDESAGKIKSRRITHGNKYLRKTLIECAWAAGRTRDCHFSKFSYHQTVVRKKSKMKVQVAIARKLLTAIWFVLSTGKPYKDYQEKEVKQEDGNS

SEQ ID NO: 156472 - protein, 320 aa, unidentified
MSALSVTVGIDVAKAHVDVCVLGTHSDVQRFANDVDGHCALAAALQSMDVGLVVMEATGGYEAALACALQAVGLHVAVVNPRHARDFARSMGRLAKTDAVDARMLAELAAVLMRRDDLARFLRPVADERQQWLAALVTRRRQLLTMLNSERQRLQITPRKLHPSIEAIVAAIKAQLDDLERQMVGHVREHFGELDGLLQSTNGIGPVASATLIAQLPELGRLNRREIAALAGVAPVANDSGNRRGRRRVQGGRFEIRRVLYMATLTAARYNPVIRAFYERLRAAGKLPKVALVACMRKLLTTLNAMVRTGKPWDPSLHRA

SEQ ID NO: 156473 - protein, 352 aa, unidentified
MEYYIGCDAHKKYSVFAGISDGGEVIPAQRVEHNRESYRSFLKSLPPASRIAIESVGNWYWMVDEMENAGHVPTLTHPAKAKLMMGQVNKTDKLDARGLAVLARNGTLPAVWIPPGELRDRRELPRMRMALSQVRTKFKNRIHSAFAKYGITFDEVSDLFSGKGRKLLEKSLDELPPETRLSVQEQLWLLDQVEQSVKKAEKRIGQVIKMDDTMQLLQTLPGVGPILAIVIALEIGSIDRFATAEKLASYTGKVPRVNSSGGKTYYGKVRPDVNRYLKWAFTEAANVIVLQQKRRPDRHVVRLYQRVRKHKGHAKAVTAVGRHLAEATYWMLRNNETYREPGGKRLVSSTQG

SEQ ID NO: 156474 - protein, 397 aa, unidentified
MIAVGIDISKAKSTVAVIDSDGTVLASPFTMAHTQPEMEAFVTYLKGLGEPTTILMEYTGHYHYPVLKKLQDEGFPVCIVNPYQMKKYGDVEIHKAKTDKKDALRIAAYALEKSYKLVPYSSMEQKYEDLKFLSRQYSQRITYVAKLKVQLIALLDQTMPGITRILPLNSRNPEKCALLLFIKRFKSFDEIQRIGKARFLASYDVLAKKASERSASSKGLSIYELAVDSITTRGEDPYIWLSQNQCVDLLSATQNAADEIISQMRNIAETIPEYKVLRAMCGVGDRLGPIILAEIGDIRRFHSGKALNSYAGNDAPPYQSGQFESRNRHISKRGSSTLRKACYEVMQALKLTKPQDDPVYLFMLKKEQEGKPFNVAKMAGVNKFLRIYYARAMELYK

SEQ ID NO: 156475 - protein, 346 aa, unidentified
MVLIGCDFHPSWQQVSWMNRETGEAGDQKLVHEPGAVEKFYRQFPAGTRIGMEATGNCQWFVELVTGLGHKVLVGDAAKIRASDSRQQKHDKRDARLLVQLLAEDRFPEIWVPSREQKDLRQLLIHRYKLVRIRAQVKNGLQHLAMNQGVMKKQKLWSKAGEKVLRELPLAPWASRRREDLFKVREMLNGQIDLLDQAVVEAAEKNEKARLLMTQPGVGPITSMAFVLTIGDVKRFQRGKQVASYLGLIPREYSSGGHQRLGSISKQGNTFLRMLLVEAAQGAVRCDPGFRNEYLHRCHSKPKGVAKVAAARKLAIRLYWMLRTNTGYPEVVRVESSSRVPLVGAS

SEQ ID NO: 156476 - protein, 361 aa, unidentified
MSESMALVGLDVHQAQSVAAVLDPVSGELRVERLRGAPAVVVPGFLERLGRPVRAIYEAGPTGFGLARAATERGLDVRVIAPGSIPKAPGDRVKTDRRDAKRLVRLFAAGELSFAFVPSEQDERFRDLVRCIDDARKDLMRSRHRLSKFLLRRGLRFPGRAWTQPHQRWLGKLCFDDALSQAVFVDYLCAVDALVGRRRTLIGVLGDAVAASSHAETVARLRCFRGINTLTAAGLCAEVGSFERFAKPSLLAGFLGIVPSEYTSDQKRVQGQITKAGPTHARRLLVEAAHHYRRRPRVIAELAARHAGQDPRVVQIAWRAQRRLHARWAHLGTQRGKPTGTVAVACARELAAFCWEAATLN

SEQ ID NO: 156477 - protein, 404 aa, unidentified
MTGDGQPLISLGVDIGKTAHYAVAVDREGHTVYSKPVANEESALRLLVLWARAHGAVVIVDQPGGTAALLLKLCWDATINIGYVPGLAMARARDFYSGDAKTDPKDAFVLADVARAHPGRVVWLQETSADRAQLELLNGYDANLREDANRLTNRIRALLATFWPALERALDDRLDTIGGTVLLKHYPSAPQLRRAGTRRVVKLLRASHRVHAPDAWVEQLLVAAKAQTIVVAGADTAADLVAELADQLYRVLDRRQRLEKEIERAFFNLPEASILKSLPGIGPRLGARILIEIGDIRQFRTSAQLAAYAGLGPTPHQSGTSIRGNRPTRFGNHRLKNAFFLAALSSLQHPPSRVYYDRKREQGKRHTQALLCLARRRVDVLHAMLTTNTHYQAPTLQPDLESAA

SEQ ID NO: 156478 - protein, 420 aa, unidentified
MSEVMIGIDPHKGSHTAVAIGAGEEPLGELRVDACPSQAGTLLGWAAAWPQRTWAVEGAAGLGHLLAQQLVAAGEQVLDVPPKLAARVRLLQAGDTNKNDPNDAFSVAVAALRSPARRPVLAEDHAAVLKIWAKRHRDLARARNQAACRLHAVLCELVPGGHPTEISAAQAARLLEQVRPSDAVAEARCELAAEFLTDIRRLDAQRRECGKKLAAAVRASGTSLTGIFGVGPVIAGTVIGDVRQVFRFPDRGHFAACNGTAPVEVSSGGRKVYRLSLRGNRRLNHAIHMAAITQIRHKHSQGRAYYERKLTEGKTHKEALRCLKRRISDAIYAALVADARQAAAATRPQEGPGGQPGNLSVSRAAGSHPAHRLFGQATPGPAATIRPGTTAGRAPAQPNRALRRRAAQSPAASKKPRTTT

SEQ ID NO: 156479 - protein, 386 aa, unidentified
MRAVCGLDVHKDSVFLCILCETGKIFEKVYGVLTHELQSMCREMKHRGVTEVSMESTSVYWIPIWRVLEPHFQLKLVNPYFIKQLPGRKSDVKDAQWIAECTLKDLIRGSFVPPERIQQLRQYDRRIFDLDAEIVRKLSKLDAVMQRCNIRLSNYVSNTDTKSYKEVVRKLCEGVTAPEELIEVIFGRIINRHGRETILAALTGVVSEAEKDAMRQLRDELDLAEKHKQECQDRMLHICKTYYPDELKRLMTIPGIKERAATSLIAEIGVDMTKFQTAAHLASWSGLKPRNDESNKKIKSRRITHGNVFLRKTIIECAWGASRTKDCFFSRFSFHQTQVRKKNKMKVLVAVARKLLVAVWHVLHDQTDYKDFGASDCDTSAVESNG

SEQ ID NO: 156480 - protein, 393 aa, unidentified
MRVAVGIDVATTAHWVTAIDDAGTVLIDRSVANEPDAIEELIAELRSLEGEVTIGLDVVGGIAGLAEAMLAAASFRLVHVPGLAVNRARQGTTGGEAKSDPRDARVIADQVRTRHDLRPVETGTEINLELRLLVGRRRDLVDEQTRRLSRLHGLLVSIHPGLDRVLDLTTKGGLWLLTRYVTPAEIRRAGHGRLVSHLKRTGGLPSVAQLADAALASAQAQRIAVPGERMAATIVRELAAEALAARKRLAELNRALEARLTRHPDAALIRSLPGMGAVLTAEFIAEAGTIRRFASADALAAAAGLAPVLRQSGKVRFLRRPTGGNKALKRVFYQAAFCSLHSPDSRAFYARKRREGKRHHQALIALARRRINVLWAMLQRRQPYVAAAQSAAA

SEQ ID NO: 156481 - protein, 393 aa, unidentified
MPRKRILVKSIDTSISYQVIGIDLAKHLVSACLITGAGEIFGIDRLTYDDLLKSAERMSPTLFCMEPCPEVHYLAEKLQGYGHHTKVIDGAAVKEYIKTHFGGQKTDLNDAQAIAFLSLDTNLPEITPKNTSISVLSSIQAVREQFRKEYIQSFVSLKGICQRWGLPISKGVMNKNKVEELVSESKKIPQEVKDWLLELLQSCRELQKRLNKISKYLKEYADNDEICQKIMSVPGIGPITATRLKATIGDIQRFEKPKSIVAYYGLVPKSKATGHNEKKGGITRRGDRVARSLLIEGAGVVLNLAAKGFLRSKPLNKWIEKKRKLKMPWGKLCCALAAKMLRIVRAILIQGTSFNAKIAGVARCSLPKESRNNVMGNNKLSEIPSPNGSVYIH

SEQ ID NO: 156482 - protein, 319 aa, unidentified
MYKYIGIDISKQTFDAYSISSKQKENLLKEDNNKKGFKKLIKTYGSEGVYVMEATGPYYLQLATFVKVSVVNPLVIKRFSQMRLLRAKTDKKDAQTICKYAMNNSIELWKPSPVEIMEMQQILTALELLNKQHSAVSNQLSSFISSGNIDRQVKETLSTTLSYIKLEKKKLNQRLNQIVDENYQGTRKLLESIPGIGPKAAATLIAITDNFTKFVHYKQLIAYVGLSPRTYTSGTSVKGKGHICKMGKSQVRKQMYISSWSAKFHNKACTEFYDRLIKKGKPERVVKVAIANKLLKQAFAIVTNKTMYNENFKSQLRYA

SEQ ID NO: 156483 - protein, 338 aa, unidentified
MKIFAALDVGDKATHICVLDDEGDVVWRGVCATDPEVIAKTLARHAPGLVRVVLETGPLSAFLYHGLVEREVPVVCICARHAKGALSVRVNKSDVHDAEGLAQLARTGWFKAVHIKGSATHLDRAQLKVREQLIRARLAMANQLRGLFKLFGLRMGKVTTPGKRAERLEALLVQKPELRPILAPLVAGLEALDAQIAASTRSIKARAAADPVVALLMTTPGTGPITALTFKSSIEDPTRFERGEDVGAFAGLAPRRSQSGERDVHGRISKAGDPMLRSALYEAANNLLCRVKRPCHLQTWGKALVATKGVKRARVAVARKLAILLHRLWISGNSFQWA

SEQ ID NO: 156484 - protein, 318 aa, unidentified
MNEPKVKGCFVGIDVSKNALDVFVRPSGECWTQSNGDYSQLCEKLKRLNPTLIVLEPTGGYEIGLLNALIKEGLRVSRQHAYRIHHHAKGSGQMAKTDRLDASMIAHYAECYSEKIEPMTVFLEDQALLQQLSARRRQLVDMRAAEKNRLGLPGLSKRLRISYEKIIRVLSEEIEEIEEQIQGIIEGDEQWRKKQALLETVVGVGTRVSRVLLANLPELGRVNRKRIAALVGVAPYQHESGKFKGQQRIKGGRSEVRSVLYMAVLSAKEHNPEIRAFYERLLEKGKKKKVALVACIHKLLRILNAILSKWACYQSSTG

SEQ ID NO: 156485 - protein, 400 aa, unidentified
MSLAVGIDVGAYKCAVAVCRQGEREAERKVLNITTQRGGFTSLDTWIVQQGAPIDVVVMESSGHYWFNLASHLRRQGYPVAVVNPLQAKYFAKSRLQRSKSDPADARTLAALGTHDQPRISEPLVGAELKEAARFAMRLVREQAQVCQRIQRLVDIGFPELREVWDDPTCVSALAVLRHAPTAAAVARMHQDRLARLKRPGVGGRVIGPLKAAQLKQLAQTSVAAPELEQQVGFEMRLLIAQHDLLDTQIAGADARVASLLDGEVSQRLLSIPGVGPSTAATLMAEIGDIWRFTDVDQLLAYAGVHPKEQSSGKKGTNPETSWTMAKTGNAYLRAAAYRMAVVGVQHNPIIRAHYARKRAAGKSAMNALGHCMSKALAIVWGVWRGGKDFDPAHGSAASR

SEQ ID NO: 156486 - protein, 341 aa, unidentified
MSESALIGIDLGKHTFHLHGQDKSGREVFRKKCSRAQMMQFFGNLPNCVVAMEACAGSHFVARQLMAMGHTAKLISPQFVRPFVKGNKNDFVDAEAICEAASRPSMRFVTPKTEAQQTLSVLHRMRESLVRDRTKTANQMHGFLLEFGISLPKGLAVMKRLASILAEHELPVRLTVLLQRLHDHFVYLDEQIKALDKELACQLADDDLGNRLLSMPCVGPITASLLAVEMGDGKQYRCSRDFAAPVGLVPRQYSTGGRANLLGIGKRGDKHLRQLLVQCSRVYMQRLDHQKGALADWVRSLLSRRHSNVVACALANKLARIAWAIAAHHAQYEAGPDALNA

SEQ ID NO: 156487 - protein, 351 aa, unidentified
MDIWSLKTVLEQGSLHRLPSNPNGCRGIEARILQDRVLEDVMETKVFVGVDVSKDSLDVAISAEEQILTFANDQKGVDALVKKLSRIDVELTVFESTGGYELLAASSLAEAGLPVVIVNPRQVRNFAKATGILAKTDAIDARVIAHFAQAVKPDVRPLKDRATSELTALVTRRRQIVEMIVAESNRLKLANKRNKKDIKDHIRWLEKRLDKIETDIGQTIQNSPIWHCKDNILRSVPGIGPITSATLICDLPELGVLSPKKIAMLAGLAPLNCDSGKFKGRRRIWGGRAAVRSGLYMATLAAIRCNPAIKGFYQRLIAAGKCHKVAATACMRKLLIIANAMLRDQTLWQQN

SEQ ID NO: 156488 - protein, 343 aa, unidentified
MDYFAGLDVSVKETSVCIVDDTGKIVREVKVASEPDALLAVLTNPAYRFKRIGLEAGPLSQWLFSALAEAGLPAICVETRHMRAALKAQINKTDRNDARGIAQMMRAGLYRPVHVKTLRSQKLRMLLTHRKLLQSKAIAIENDLRATLRNFGLKVGGVGTVKFEARIKELVEKAPDLMMLVEPLLVVRRALREQIGILHRRLLAIVRDDDVCRRLMTVPGVGPVVALTYRATVDVPVRFRNSKAVGAVFGLTPSKYQSGEINRTGAISKCGDEMMRAMLYEAAHILLVRSAKWSWLKVWAMQIARRRGLKKAIVALARRLAVIMHRIWVDGTEFRWTREAAAA

SEQ ID NO: 156489 - protein, 397 aa, unidentified
MIAVGIDVSKAKSTVAVLNSDGSIRAKPFTMHHTLSDMDAMVKYLNDLDESFTILMEYTGHYHYPVLKKLQEEGFPVCLVNPYQMKKYGDVEIHKAKTDKKDALRIAKYALEKSYMLTPYTSLEQKYEDLKFLSRQYNQRISMVSYTKTQLTNLLDETMPGITSLLKLKSRKPNECALLLFIKKYGSFDRVKAMGKSRFLSSYATLMKKSHDRYAPQKSLSIYELACDSITTRGDNDYIIAAQNQLVDLLATVQNAADEEIAQMQNIAETIPEYRILRAMNGVGDRLGPIILAEIGDIRRFHSAKALNSYAGNDAPPYQSGQFERRNRHISKRGSSALRKACFEVMQALKLTKPQDDPVYLFILKKEQEGKPYNVAKMAGVNKFLRIYYARAMELYK

SEQ ID NO: 156490 - protein, 355 aa, unidentified
MKQFIGCDSHRRYSVFVAMDEAGKASRPVRVEHEANELVGFLSSLPAEASVAVEATGSWYWIVDAMEAAGLETHLAQPFAAKRMLGGGKKTDAVDAKALATLLRNGTLPEVWIPDAQLRDLRNLVRCRLALRQYQTGFKCRVVAAVNRYGLREADEDADLFHGKGRVRLSVYIGRLPPHTREAATREWQIIDEMEQHIEDLQQEIRKRIGSLGWTRRLKTMPGVGEVLGATIFMEIGAVKRFPSAQHLASYAGLVPVVHASGGKTFHGPTSPRSNRFLRWAFVEAANSIVRYQKKYPERHTVKLYQRLKAAKGHNKAVVAVARHLAESAWWILTKAQDYRPPQPAAGAVASSNNG

SEQ ID NO: 156491 - protein, 341 aa, unidentified
MNAIYYIGLDIHKKTIAYCIKRIDGTLVRQGVVPAERKALHQWQSELPGPWFGAMEATIFTGWVYDFLKPYAVDLKVAHPAMLKAITVAKKKNDRDDAEKIADLLRVNLLPECHVIPEELRELRRVLRYRSMIVRTAVKMKNKMSGLLMEVGAQYNKKRLYGKKYFNALLERVEDVPDSVKALLKLSRSGFEMFDDIQKKLVDALRNNKLIQERVLRLMSIPGIGEVTALTWVLEIGEPSRFSSSRQAISYCGLCSAQHESAGKEQRGPISKQRNKHLQTTLIEAAKLAPRWNEQLAILHEKELNRGNRNRATLAVARKLVEFMLAVDRRKTNFELLKEAA

SEQ ID NO: 156492 - protein, 438 aa, unidentified
MSNKVIFNLDELFISVGIDVGADFSWMSIALPNQQFVGKPYKILHNSIDSLTTAVSKIKEAEELYSLESRIFLESTGIYHYPLFCYLRDKGFNCSVINPIITKNSTNINIRKVHNDRFDSKKAALVGLKPDLKVSLMPSDLALNCRNLCREYYDLMDNRSAYVNKLQGELRMAFPQYLGIFSKVTINTSLTLLETYTSPSAFLEADKQEIIDIIKSTARFGLTYAQNKYNAIIQAATDANQFGYIIESNIKRIRLYISFIRKYDEEINDILESLHKLVDSNEDTKFVKQVHLIETFKGAGFLSAATIMGEIGDFSAFSKPKQLFAYFGLDPAVKQSGKFEGTKVQMSKRGSSIARRVIHTLSLQSISISRNGKAKNPVLREYYLQKCDSKPKLVAMGAVSHKVCNMIFAILRDNKPFKIIAPQEHIKQYNSAKCDIAA

SEQ ID NO: 156493 - protein, 342 aa, unidentified
MNEVTTIGLDLAKNVFQVHGVDASGEVVVRKQLRRRQVILFFRKLSPCLVGVEACATCHHWARELSSLGHEVRIMPAHYVKPYVKRNKNDAADAEAICEAVTRPTMRFVAIKGPEQQSLMMVHRSRALLVRQRTMVVNAIRAHLAEFGIVAPVGLRGIKALLAVIAETGDERLPSVARECLTSLATALASIEREAGLCERRIHAWHRSSEASRNLETIPGVGPIIATALVASVADPSIFKSGREMAAWIGLVPKQNSTGGRDRMGRISKQGDPYLRWLLVAGAMSVIRHGRKTGFRGNPWLADLMGRKPAMVVAVALANKNARTAWALLARGGAYRPPAAQA

SEQ ID NO: 156494 - protein, 365 aa, unidentified
MEVADVRYVGVDLAKRTFSVQLQDADGRDLGSHRLNREAIKPFFASLPPSVVAMEACAGASYWCEVLASLGHTPLALHARAVARLRLGHKNDKNDAALILLAARLPDARPAVLKSRDQLAALSLHRMRELVVRQEIACANQMLGFLLEMGCVRWNSGTELRRATNEEIDAEVQSMPPEMRFSIRSSWLRLHATHAENIAIKKALNRWHASHPRSLTLETVPGIGCVAATALAASIPDPPPWASGRAFSSFLGLVPVQQSSGDITRLGRIGRGGDQYLRRTLFLASRSAVMSCYRRSEGPACLVSLLNRKHFFVAISAHAARLARTSCQMLIDGTKFEETPAWRSVPFRKKADTRRGRGGEAPNSD

SEQ ID NO: 156495 - protein, 369 aa, unidentified
MPHVTSIGLDVHARSVAAAAFNPFTGEVVHRDFGTDAAEIAEWALGFEEPRACYESGPTGFHMARELRALGLDCAVAAVSKMQRPAADARRKNDRRDAEFIARMLATHNIVEVPLPDAAVEAARDLDRALDDATVEYRRARQRLNMFLIRLGHVWDERNADGTRRGSWTRAHWRWISGIRLEGPQRDVLEYYVTAARCAESDRRQLEKKVLALARTDRWRPAVEALSCIKGIDTLTAFRLAAEAGSFTRFRTAPAFASWCGLVPSERSSGETERRGGITKTGNRLARTALVESAWHYLTCTPRPKAPAPGADVPAAIRARADDCTARLCRRREALAAAGKSSCKANAAVARELACWVWEIGRRAEGTLG

SEQ ID NO: 156496 - protein, 304 aa, unidentified
MNGIGIDVSKRRLDVGTSDGQTLQVSNDPSGFAELDLWLRERPSNQIVLEATGGYEQPVLDFLHKAGHPVVRANALRARKLAQGLGQRAKTDRLDAYALAQMATLVKLPAYQPLEAWQQKLREFVRARRQMIQALAVARQQQEMVGDRELRRLLQANITHLKTLVKRLGKQIAEQLAQQPQLTVLKSMKGVGPVVQAVLASYLPELGHISGKAIASLVGVAPMSHDSGTMRGKRSIHGGRAEIRQVLYMAGMSALQHEPRIRDFYRSLRARGKEAKVAIVAVMRKMLVILNARVRDAHSGPIPA

SEQ ID NO: 156497 - protein, 402 aa, unidentified
MLAVVVAHPGQEREWDWERRKFGTSVQELGDLRAWLAQQRVGVAVMESTAQYWKPVWIALEGHFELQLAQARSNKAPRGRKSDFADARRLVKRWRAEDLTLSYVPEAEQRRWRSLTHFQVKAICQRGRLQNQIEALLEEGQIKLSCVVSDLLGTSARRILRALAEGETEVQKLVALRDPRMAASEAEWVAALQGQLHPLHRRLLGMYLEQVELIDQHLEMVGKELGEALKAHQEAVERLCEMPGLGVDSAQQVIAQIGPRAEAFASPEQLASWVGVCPGRQESAGVSASQRSPKGNRPMRRLLVQLAWAAVRTKGSQMQLLFQRWVPRLGVNAAIWAVAHRLLRLVWKVLHQEVRYQERGPLGLNAITIQRRKRRLVRQLRELGYTVKLEAVKPPQPAAATA

SEQ ID NO: 156498 - protein, 319 aa, unidentified
METITQAAIIGIDVSRDWLDIHCLPEGKRARFPNKVEGHDQVAQLALKLGALVCFEATGGQEWRLWSALDAKGVATRQLPPAQIKAFAASRGTRAKTDRIDAELIAQFMVFRSDAGRSLPHEKIRLLRALASKRGQLVETRKRLLPQIKAHEKLGSADMFDTMDAKLTELLDHQIAELETRIEQTMASDKELAARVGILRSVPGIGPVASTMLIAEMPELGQLSGQQAAALVGLAPIAHDSGAMRGKRAIAGGRRLLRHAMFQAALVASHHNPVLKTFADRLRAAGKPHKVVITAVARKLVTIVNALCKTQQTWTVKPL

SEQ ID NO: 156499 - protein, 477 aa, unidentified
MKSTAKQLSDLQAIPLLKQESLYIGIDIGKVRHVAGFVSLTLLERHQRFEACPALAFENSRDGFHALAERIRTLAPFEHCFTLLEKTGHYHNALVQYLQELDIPVYVMHVQERPKAMMKTDKRDALGLANTLYNQLALGIQVSDKTQLVRRDVPPTPAAAQLKGFIRHRYELVHEATQRKNKLIAICDEMFPEFTRILHDPNGPTALALRERFPTPAACATASLSALQEVRGKARCISDARLLELQRLATESIGTKDIVRQRGLVLEQTQLTRELRLLQEHIAQLESEITTIVSQARAGRILQSLGIGPIQTATVIAAIGSIENFPNAGCLKSYFGWSPTVIQSGSSIDYTGQTRGGTRTMKQMMFLIVSNLINRDTEWAKLYDRLVKTKCPYDERTGQRKGKLRVIGRVAGQLIETMYALLKTDAEVLSKVLPQTTPPEPILYDPEKHRQHREGHYQPLKVAARRPVLTLLPHSSE

SEQ ID NO: 156500 - protein, 343 aa, unidentified
MQISTIGLDLAKHWFQVHGVDAKGRVVVRRRLWRSGVIPYFRSLEPCLVGMEACATAHYWARELMALGHTVKLMSPAYVKAYVKRNKNDAADAEAICEAVTRPSMRFVPVKDTEQQSVLMLHRARSLLVRQRTMLVNALRAHLAEFGIVAPQGLRHVEMLTKTIAHQQGRLPELACSILQTIVDQLNGTMARIREIESRLVRLHRHSRISQLLATVPGVGIMGASAIAATVADPTLFRSGREFAAWLGMTPRQNSSGGKERLGRTSKRGDKYIRSLLTAGAVAVLRHARNRPTRDGEWVRALLARKPTKVAAVALANKTARIVWAVMMRGEGYQAKEVFGQPA

SEQ ID NO: 156501 - protein, 329 aa, unidentified
MYYVGIDISKRFIDVCLLVDGIKGKRKTKVLPNDLNSAQALAQWLILQKCDPSQAHIIMEATGVYHEHLADGLHQSDILVSVINPHRVREFAKGMGILTKTDKVDAYVLACYGCLKQPENWLPPSQEIRKLKALLQHRDSLLNDKQRIENRLSTLKSTTAPEEVLTSLESIEQNLKDELARIECLIAEHIDKHPRLKNDLKLLKSIDGVGEQIGWNMLAIIRGNNFRSAEQVAAYLGVIPIERRSGTSVCGRARLSRIGPPGIRAKLYMGAIAAISWNSHVRALYERLRLKGKAKMVAIGAAMRKLVHLCYGVLHTQQPYDKNHGVVAG

SEQ ID NO: 156502 - protein, 316 aa, unidentified
MESQRPFVGIDVSAQRLDVDTLPASQRFSEPNAEDGIATLVPRLKALNPKIVLLEATGGYEIPVAYALYEAGLPVVIMNPKVLRHFAKAIGRLAKTDKLDAQVLALYAQRVQPPVRPLKDQEQLELANLMTRRRQLQGMIVMEENRRRTCTPKVRGNIDQSLAHLRQLLKDLDREIHDSIRRTPLWHENSEILQSFKGIGPKVSASLIADMPELGTLPGTKASALAGLAPMNRDSGQYRGKRKIQGGRPAVRRALYMAALVASQHNPVIREFYQRLRLAGKPAKVALTACMRKLLVILNAMLKNRTYWNPQLPLVA

SEQ ID NO: 156503 - protein, 355 aa, unidentified
MSNEKYIGLDVHQATISVAVMDSQGKVVMESILETKASTLLEFFGGLRGSLFVTFEEGTWAAWLYDLLKPHVTEVLVCNPRKIPLLKQGNKSDQIDARKLAERLRLHDLKPVYHGETGIRMLRELARSYLTVVKDLSRVMNRLKALYRSWAIPCAGRDVYYRRHRSAWLDKIPEAGTRRRAEQLDQQLDLLQPLRQQARRELLAESRKHAITAKLRKIPSQGPIRSALAVALIQTRHRFRSQRQLWTYSGLGLETRDSGEYHFIQGQPRRRKKQATIRGLHKDYNHDRKGLFKVAATRASVKPGPFQEFYQRSLAKGIKPTMVRLTLARKMAAITLTRWKKGEDFDINKLNSQAA

SEQ ID NO: 156504 - protein, 402 aa, unidentified
MNAVGIDVSKSKSVVAIMRPFGEIVSTPFEIKHTASDIHSLIELINSVEGESRIVMEHTGRYYEVLAHQLLEANLFVSAINPKLIKDFDNDSLRKVKSDKADAVKIARYALDKWQNLKQYNVMDELRNQLKTMNRQFGFYMKHKTAMKNNLIGILDQTYPGVNTYFDSPARSDGSQKWVDFASTYWHVDCVRKMSLNAFIDHYQNWCKRKKYNFSQSKAEEIYGKAKVLVPVLPKDAITKLIIKQAVDQLNSASTTVESLRTLMNETASKLPEYPVVMAMKGVGTSLGPQLMAEIGNVSRFTHKSAITAFAGVDPGVNESGTYEQKSVPTSKRGSADLRKTLFQVMDVLIKTHPQDDPVYQFLDKKRAQGKPYYVYMTAGANKFLRIYYGRVKEYLASLPES

SEQ ID NO: 156505 - protein, 354 aa, unidentified
MNAVGIDVSKGKSMVAIMRPFGEIVSTPFEIKHTSSDINSLVKLIKSIEGESRIVMEHTGRYYEVLAHQLSEANLFVSAINPKLIKDFDNDSLRKVKTDKADSVKIARYALDKWQNLKQYSVMDELRNQLKTMNRQFGFYMKHKTAMKNNLIGILDQTYPGVNTYFDSPARSDGSQKWVDFVPVLPKDDITKLIIKQAVDQLNSASITVESLRTLMNETASKLPEYPVVMAMKGVGTSLGPQLMAEIGDVSRFTHKGAITAFAGVDPGVNESGSYEQKSVPTSKRGSSDLRKTLFQVMDVLIKTHPQDDPVYQFLDKKRAQKKPYYVYMTAGANKFLRIYYGRVKEYLASLPES

SEQ ID NO: 156506 - protein, 334 aa, unidentified
MNSVAYTRQVTVTGVICGVDIASKSLEARIGQQGAAGSFSNNPEGIAALGAFCHTHQIELVAMEATGGYEQQAFAQLSEQGMAVAILNPRAVRQFAQSMGALEKTDRIDAGMIAWYAEVKKPQPVCPAPQNQQHLRALVTRLRQLTDIRTAQLNQQRLVTDCAVQASFKKLLALLAHQIRALEQSIAALIETDPLWRELNQNFRGIKGVADRTVARLMAEMPEIGQLSNKTISKLAGVAPLANDSGNHQGKRTVRGGRASIREILFIVASVVARYEPDFIAFQQRLRAAGKPPKVVRIAVAHKLLVRLNAKAREVRQYIKATDLRTEALEKVVI

SEQ ID NO: 156507 - protein, 355 aa, unidentified
MESVKYLGFDVHQSTISVAVVNADGKLVMQSVIATHAATILDFIHGLRGTLYLTFEEGTHSAWLYDLLARRVARVVVCNPRQNALLKAGNKSDTSDARKLAELLRAGLLAPVYHGEGSTRTLQELVRSYAALTEDTTRVMGRVKALYRSQAIACAGKKPYGRRHRREWLSKLSEAGLHRRAERLYEELDALQGLRRAAKRELVLESRKHAAAKLLRTVPLLGAIRAALLIGRVQTPHRFRSKRQFWAYCGLALETRSSADYRFEDGQLVRAKKPVFIRGLNRNHNHDLKNLFKSAATTASVIHGPFREFYEGLLAKGLQPAMARLTLARKIAAITLSVWKKGESFDAEQLKPQAA

SEQ ID NO: 156508 - protein, 298 aa, unidentified
MSSWVGIDVSKNTLAVWVRPSGVNFIVCNSSEGHQALLLNLAEIQVERVLLEATGGYERAVMGCLAQAGHSVVRINPRRARAFAQAMGKLVKTDPVDAGVLAHLAQVIEPSACQTVSLARDELQELVRRREQVVKLRDDERRRLTLARSGVVQESLQTNISQLNEQIARLNSAIEAAAQRTDNQLVKQLGAIAGIGPVTVASLLAYLPELGQLNRRQIAALAGLAPYNNDSGRHSGKRCIKGGRASIRRVLYMATWSVIRCHSSFAARYVALVACMRVLLIRLNAMVRDHSSWRAEAV

SEQ ID NO: 156509 - protein, 413 aa, unidentified
MSIAPNPTGLRVTAGVDWATDDHAICVVDDQGQAIDRFTVTHDAAGLKQMAARLLRAGAEQVGIERGDGPVVETLMQVGLTVFVIPPGQVKNLRSRYGSAGNKDDRFDAYVLADVVRTDIRRLRPMVYDSEQTTALRGSVRARRDLVGHRVAAANQLRAHLHIVFPAAATLFADIDSAITLSFLKRFTTQEAADWLSPKRLATWLDSVSYSGRTNPAVLHARLKAAPRGATGTHAAVHAGTTQALVAILTALNTQIQALTTSIDHQLDTHPDAAIFTSLPRSGRVRAARLLAEIGDARGRFPTRDSLTCLAGVAPSTRQSGKVKAVTFRWGADKQLRDALCDFAGDSRRASPWAADLYTKAIARGCDHPHAVRILARAWAHIIWRCWQDSLPYNPAAHHGLQTILNQHQPTAA

SEQ ID NO: 156510 - protein, 353 aa, unidentified
MKCDKYIGCDLHQATTVVAVLDAEGKVVLETIIATEAAAVIRFLKSLSGPLHITFEETTQARWMYDVVRGYVSEAIVCDPRRNKLLAEGSKADKPDARKLAELLRAGLLRPVYHGHEATRQLKELVRGYETLSADTQRMMVRIKSIYRAHGIRTPGSAVYQQKQREQWLQRLTEPGTRQRVSWLYEELDHLRQLRKQARMAMVAEGRKHQAFNLLRRIPQLGPIRCAMLVATVDTPYRFRTKHQLWAYSGLAIVTYMSSEYEIKSGRVVRSRKPLATRGLNRNCNRRLKELFISAAVAGSRSEPYRSYVECLQQKGMRTEMARLTLARKIAAVALTVWKKGEAFDPKKLNSTT

SEQ ID NO: 156511 - protein, 407 aa, unidentified
MGRYYLGIDWGDRVHQVHVRDEGGSRVAEMRVEESVEGMAEFGRWLDERRAGGIELWAAIEKPEGRIVDFLLDHGVEVFPINPKALDRARDRFRQSGSKSDPFDAWVLCEFLRTDHMHLRPLKPNSEQAQELKILTRDHQRLVRHKTRVLNQLEVTLKEYYVRPVEVFGALDTPMALDFLKQYPTPQALHELSFRRWKHFAREHRLTEKHSAELWERLSQAQLRVPDHVIRAKVQLVEVLVEELEVLVRAVQKYGQKVERFFASMPAAKLTKKLPGGRSGTVIPTVWAQLGDVKGRWESFRHLQAHAGTVPVTKRSGKSQVVHFRYACNKEMRHAVYLLAFISLRQSEWAAAYYRRQRERGHSHHQALRALGAKWLKILFVVWRGQVLYDENYHLANIARQHLRQAA

SEQ ID NO: 156512 - protein, 379 aa, unidentified
MDHAITGTLAKTVLHGALELSKNGWLLALQFSDRVQPSLYPIRGGDTEGLMTKLMAARDRWAKVSGKAPSIVLCYEAGYDAFWLARFLKARGIECLVVDAASVQVNRRARRAKTDRLDVRMLLRALIAWDHGERHVWSVVRVPSVDEEDLRRSHRERDRLVRERTAHINRIKGLLFGQGIRGINVKSKYKTLQIDKLVTGEGRPLPPRLASEITREIARLALIQEQIVALERERDQAPTPCKVTEKKRVQLMCLTGIGPAIAAVMTREVYYRQFDNRRQVAGFLGLATSPHDSGDVERSQGISRAGRGQVRGAIIQAAWLWLKHQPKSAITRWFVQRTAGHSGRIRRIMIVAVARKLAIALWRFLEQGLVPQGAMLANR

SEQ ID NO: 156513 - protein, 389 aa, unidentified
MGERKGAAYIGFDVGKSAHRACAVDARGEVLFNRTVPNRPADIDRAIADAGRGAGVVVDQKRNIGALVVARARAAGNRVHYLPGTAMKRARDMYPVTAKTDEIDAEVIARTAAGMPWTLREVAEEPPAVAALRMLAAQRDFAVASRTRAVNRLRAVLLEADPAFEAAVDPSSRWQLAVLSELGGPFGMRAAGLRRFRSVAERAGCAKRASSDGLWAAACASASSGRPELAAESELVRSLAARAAADGAEVARLDGLISDSLAGDGTYEALLTVPGVGPKTAAALVTLVDISLFRSHDELAAYAGLAPCNRQSGTSLNSSAPSRGGNRALKNLLIYSCTSLVGTGNRFGRYYDACRARGMRHNKALKAVARKRLKVIYAVMRDGAPYREG

SEQ ID NO: 156514 - protein, 337 aa, unidentified
MKYSGIDLHSNNSVVVVSDEADRVLVRRRLANDAAAILALLAAHRDDLVGVVVESTYNWYWLVDALQAAGYRVHLANTAAIKRYEGLKHSDDEDDAAYLAQLLRLEILPSGYICPPAARAVRDLARKRMQLVRSRTAQVLSVENMLSRQTGAGMRSYAVQRLTAQAVASLGFHPDVGRALCANVAVIQTLNREIDKLEQRLHQCVGVRPEFRLLTSVPGIGQTLATLIMLEVGTIERFAAVGNFASYARCVDSVRLSNGKKKGQGNVKNGNAYLAWAFIEAANFARRYCVEAQRFYERKKARTNGVVATKALAHKLARACYHMLKENRPFDVKRCFA

SEQ ID NO: 156515 - protein, 420 aa, unidentified
MTRKNHNKIISVVHAICCGLDVHKKMVSACIIITEPDGEQTIVVKEFSTFTDDLYRLKSWLSSHTCPVVAMESTSVYWRPVHNVLEEAFKVILVNAKHVKNVPGRKTDISDSMWLASLLRIGVLKGSFIPEKRIRQIRELVTLRKSYTRSLADYKRRVHKLFTTANIKIDSVVSDLFGKTGRNLIDTLSDIETELKVEHVEQCAQGSLKRKVVELFRAIQGFFEAHHRFQLKMIMRTIRHLENEIELITQRLDQLLAPNQALIEQLDQVHGIDKKTAQSIVGYIGDTLTAFRSEKALASWAGLCPGNNESAGKRKSGKSPVRKHPFKELMIEIAWAAVRTKGSYYKDKYHRLKSRRGPKRAAVAIAHRITKAIYHIIKHGRSFVDLGEKYLLSKSREKSVKILKMKAKYLGFNLVPLEAN

SEQ ID NO: 156516 - protein, 337 aa, unidentified
MIVIGVDVHKHSLTAVAVDEVGRTLAEVTAGDERAVLAWSASLPSERLWALEDCRQLTRALERELLGAGEELVRVPPKLMAPERRAGRLRGKSDPIDALAVARAALREPRLSRPRPDEQPFRELKLLVDHRDDLVDERRRAQQRLRWHLHQLDPTLVVPLRRLDRPAHLDRVSRWLARRPAEVQARVARELVVRCRSLTCAISELDRELEQRTAQTAPALLELPGCGVLTAAKLLAEIGPIGRFQTDAQLARHSGVAPLEASSGRVQRHHLDRGGNRQLNCALYRIAITQARYHPAARAYLERKQAEGKSRREAIRCLKRQLVRVVFNTLKASPALT

SEQ ID NO: 156517 - protein, 408 aa, unidentified
MKRYYMGVDWGDRLHQVYVGDEDGKKVREMKLQESPPGLAEIGRWLDEKRAEGFELWAAIEKPQGRIVDFLLDHGVEVYPVNPKAVDRVRDRYRMSGSKSDAFDAYVLAEFLRTDQAHLRALRPSSEKAQELKMLSRDQRRVVRHKTRFLNQLTTTLKEYYARPLEVFEDLETEIALDFLQRYPTPAHLSALTRKQFNRFATKQHHLSKQRCEELWEKLNKPQLAVPEHVVRAKAQLVEVLIEKLRAAIKAVKIYNHRVESFFASSPAAQFAKTLPGGKSGTLVAAVWAELGDAQGRWESSRHLQAEAGAVPVTKASGKSRVVHFRFACNKHLRYTMYWFSFVSLNHSEWAKLYYRGQRDNGHSHHQALRALGAKWLKIIFVMWRDHKPYDENYHLANIARQMMRQAA

SEQ ID NO: 156518 - protein, 400 aa, unidentified
MECVFGIDVSKENANVAVLVDNVVIKQFKIGLDRLGFSLLSDELNSFNAPLIIYEATAMYSRRLRAFLQRDGWKYTELNPLAAKKVMEEFRHTKTDALDAVGLARAMIKNHFRPTYQESPVYTELHDLERTYQQFNNDIVTNKNRLHRALQLTFPEIEHFMSSTDGVLYWHIVQRFPHPAIVLSHEENELTEIILTETSKKIGLKRAMKLANRLLALAQNSAPAKEPQSHAVRAVIALAKEVERINQLKAQIIVEMTTLGENLSEVPLLVSIPGIGIKTALCLIAELGDVRRFHSANAINAYIGIDLIRYESGQYEAKMHIRKRGNPYARKILYRAILNIISVSQYQPTLISANYKRKKQSAQSHGTKKIAIAAMSQFNRLMHHLILNNELYDSTTFMPE

SEQ ID NO: 156519 - protein, 334 aa, unidentified
MSKKVIGIDVGKKDLYLAHKYFTTTGKVKVKRKKFSNNLKGYKALIEWSKNIAKKEGSKSLHFIMEATGVYYEGIAYFLFEKGFAVSVINPSYIKSFANSSGVRTKTDQKDALVLVEYGEAMKPELWSPPAEEYRVLLNLCRAISSLKNRRDAVANRIESLKSSRVIAQAVLEEEERLFNEINKSIKRLEKQIREHVNKYPSLKKETKLLMSINGVGWNTAVLMVAIMEGGRRFKSAKEAAAYLGLSVQEYTSGTSVKKRSKLSKKGAKDIRKALYFPAITAVRCNADVKALYDRLLKRGKLKMVAIGAAMRKLVHICFGVLKNKTAFQPQTIG

SEQ ID NO: 156520 - protein, 453 aa, unidentified
MTKRKTDDHPELKMVNPNAAAVDIGSTMHMAAVNPDMDAMPVRAFGTFTQNLHDLADWFRSCGVTSVAMESTGVYWIPAFEILEANGFEVILVNARYAKNVPGRKTDVSDAGWLRQLHSYGLLRGSFRPEAEIATLRAYMRQRERLTEYAAAHIQHMQKALMEMNLQLHHVVSDITGATGMRIIRAIIGGERDPEVLAAFRDIRCKSSMDTIKAALVGNDREEHVFALKQSLELYDFYKAQIEACDRRLEAAVTALTVRADNDLAPLPKARIKGKQHNAPSFDVRAALYGVLGTDLTQIHGLGPSLALKLVAECGTDLRAWKSAKHFTSWLCLAPGNKISGGKLLSSRTRRSSSRAAALLRLAAVTIGKSDTALGAFYRRLSSRIGKQKAVTATARKIAVLFYNAIRHGMTYQDQGATAYDERHRQRVLSNLQRRARILGFALAPIPETAAVS

SEQ ID NO: 156521 - protein, 427 aa, unidentified
MSGIKTGGQEPEFAAFVGIDWADQKHVWCLQGQDSTKREGGELEHTPEAVEAWVAQLCQRFGNRPIAVALEQSRGSLVFMLAKYEPLHLFPVPSTMSASMRKALYPSRSKDDPRDADVLLDLLLQHRNKLRRLSPDTEATRRIQNLVEERRKLVDEKTEHTNRLASHLKIYFPQMLNWFEHLDTELVCALLERWPTLEELQKVPPSKLRKFFGKHHCRNQELIEWRILAIRQSIPAIRDRAVIEAKSAAVKVIVQLIRILLEGIADLDERIEEAAAAHPDFFIFKSLPGAGPALAPRLLAAFGSQRERYRNAGEVQTYSGIAPVMEKSGKKQWIHFRWACPKFLRQSFHEWAGHSIGYSVWARAYYRQQRGKGVDHHGAVRALAFKWIRIVFRCWKERVAYDESKYLAALTRRGSPLVAVVAIAKAL

SEQ ID NO: 156522 - protein, 342 aa, unidentified
MERELYIGVDVSKNWLDLAYYDGVVVDWKQGHIRVDNKESGYIQIDRWLKKLGVNREYVLFCMEYTGLYCQDFRLWLERKGYVYGMVQPRKMHRFEPDLGENERALDRIKTDEMDSFRIAIYCEKHCRKIKASPSRLPGEAYFRLKRLMAERKQYTRQSVLYKQHLHDISVYDTEGSRERKKAGLGLLTEQIRQTDAEIRRIIESDPALSRNYELLCSIKGVGLVVAVETIVLTENFTSITNPRKYACYIGIAPAKKESGISVRGGEHVSRKGFTQAKADLSLICLVAIRHDPGIRAYWQRKKAEGKHSGIVLNAVKFKLVLRMFAVIKRQKPYVEIDAYKR

SEQ ID NO: 156523 - protein, 425 aa, unidentified
MNQDNQSFAAFIGLDKSDKKINVTLQRCSTARSERSIIQGSAEALHAWVAALCARFPHQQVAICVEQPAAGLIHALMGYDFVVLFPINPVTLARYREAFTPSRAKDDPTDADLLCELVAQHREQLKVWQPDDICTRKLRHLTQARRSSVNMRTRLSNQLKALLKGYFPQALELCGDDLTTPLACAFLQKWSSLQQLKKARPETIRRFYYAQNARRGDVIEKRLALIAQAVALTNDPALIESSIITVQALTLGLRAAHTAIARFDREIARTFTQHPDASLFAALPGSGTVYSARLLAAFGSRRECFESAEALLNFSGIAPVVKRSGQATKIHRRYARPIFLHQSFIEYANESIRHSLWARAFYQMHKAAQQSHWVIIRALAYKWIRILFRCWQERTPYDELRYLKSLQKSRSPLLQYLAQPNTQTV

SEQ ID NO: 156524 - protein, 370 aa, unidentified
MKKLNKYVGLDVHKDTTVIAVAEAGREGEVRLYGTISSDLHALENALRKLGGEGVRLHVVYEAGPTGYVLYRRLQQLKIACIVVAPSKTPQAPGPRQKTDRRDAEQLARLHRAGELTAIHVPDAVDESVRDLTRARADAVHDLTRAKQRLKSFLLRQGYRYSGKSNWSAPHQRYLRELVLPLPALKSVLEEYLLAIDQAVQRVARLDELIAAQVPAWRMYPAVQALMCLRGFQLNAAAVLVAELGDVRRFTHPRQVMAFLGLVPHEHTTGTSRKLGGITKAGNAHARWILTEVVQHAFLVPKVSSHLSVRQQGQPAAYRELSWKVQTRLYKRSRHLLGRGVMKAKVTVALARELSGFVWDLLRQVPAPQA

SEQ ID NO: 156525 - protein, 446 aa, unidentified
MTVAGSTESSTRNRLFSFSVAPLRFRMGDTTMAKVMEAMFRCCAGLDVHSKTVAACVRRIDDQGKIHAEVRTFGTMTRDLMALLEWLKAEGVSHVAMESTGVFWKPVYNIVEEHLQVLLVNARHIKNVPGRKTDVKDCEWIAQLLQYGLLRGSFIPPRPQRELRDLTRMRTQLTREMSSVANRIHKLLEDTNIKLGVVATDILGVSGRKMIQALIDGETDTVKMADMARGRLRDKIPLLEQALVGKVTEHHQFMLSRLMEHLIYLESQIEQFNQRIEKAARPFEKAIATLIPTPGYERASAQSVIAEIGPDMNPFPTDSHLCSWAKLCPGNNESAGKRKSGATGHGNRWLRAILVQVAWAASHKKESYFQAQYRRLAGRRGKKRAIVAVAHSILTVTYYMLKFERSYKDLGGDHFDRIARDRIRRYHIKRLESLGYEVKLTEKKAA

SEQ ID NO: 156526 - protein, 342 aa, unidentified
MKLYAAIDLHSNNSVLALIDEQDRVVYQKRLPNELAVILMELPVYRCEVEGIVVESTYNWYWLVDGLMAEGYKVHLANTAAIQQYDGLKYTDDHSDARWLAHLLRLGILAEGHIYPRAERPVRDLLRKRSQLVRQRTTNLLSIQNLMTRNTGSSLSAKEVKGLDVQQIEELLPNSDLALAVKANLAVMMSADEQVKRLEQTVLQRVQLRPQFRFLKTAPGIGELLALTIMLETGEIGRFPTVGNYASYCRCVGSQKISNDKKKGKGNTKNGNKYLAWAYVEAAHFAIQHHSRIKSFYQRKQAKSKSIVALKAIAHKLCRACYYIMRDQVAFDISKAFGPKKV

SEQ ID NO: 156527 - protein, 354 aa, unidentified
MKRSTKHVALDVHQATTLASVREDSGRVIARSILPTDAPALVEFFRGMRGTIHVAFEEGTQAQWLHELLTPLVDQVVVCDRRGEARQGNKGDQVDADELSEQLRRGGLRPVYHGDAHRATLKELTRSYLNLVEDATRVMLRLKALFRARGLKAPGKRVYHPTGRAQWLAQLADRGARMRAAALYAELDILRTLRPPAKAARVVEARRDPAWAVLPSIPFLGPVRGAQLLATMQTPWRFRTKRNLWAYAGLAVVTRSSADYVLVAGQPVRRRRAPLTRGLNRNHNRMLKDVFKGAATAATARPGPLQDFYHGLLARGMREELARVTLTRKLAAVTLRLWKTGERYDPTKLTIQAR

SEQ ID NO: 156528 - protein, 321 aa, unidentified
MAMSTFPIEAGVDVAKNELMIQSSLDTKPFPIPNTPKSIKAWLKTVPQGSALAIEATSTYHMELAEQAYASGLTVYVIDGFRLSKYRESVAVRAKTDAHDAVLLARYLNKERSSLKAWTPPPAGHRQIQVLLRRRAKLVEIRGMLRMSWSGDKLFASELMQIEQMLKRIEGSLEKQLRNTIREAGFLDHLRRVQQLPGIGFLTAVGLVMSFMRGEFANSDAFVAYLGMDVTVAQSGRWAGRGRLSKRGDSEVRRLLYNASMSGSRTETWKQFYAHHLGRGKKTTQALVILARRLARLAFGLMKHQADWSPQIYAGGGKLPN

SEQ ID NO: 156529 - protein, 361 aa, unidentified
MRIIGCDLHARQQSLAMLETTTGEMVNLTLRHEGNQVREFYSQLPRPVLVGIEATGSMHWFLNLMDELGVECRVGHPATIRAAAPRKQKNDRLDAELLLKLVVENRFPAIWLPTKELLDLRALVLHRHQWVRIRTRIQNALQAIALANGLRRGSGLWSYDGQAKIALLPLLPHTAYRRSTLQAMYKNMEAEIEKLTLQVAEQAGQRSGARRLMTHPGVGPVTALATDVFLGDPKRFADGKALASYVGLIPREYSSGERQRLGGVTKQGSPLLRFLWCEAGAHAVRRDPELQRFYRRKLVQKGLGKARVAVARKLGIRLWIMLRDEIDYQEFCRRGQKQQSGAACAGMPEMAYGAKNHRAIG

SEQ ID NO: 156530 - protein, 340 aa, unidentified
MEKRYIGIDLHRNRFTCCIRLENGRTYVSEWALEDLGRFVKKLRASDEVAVEITSNTRLFYDAVAPHVSRVVVVDTNQFRVISHSVKKTDPNDARLLSLYLAKGLLPEVRMKDKQLGQLASLTQTRDTLVKQRSALKNKVNNILSARGLNLPKEALSSEKKLAEVLELPFDEIVRIELRVIVEQIRSLNKSIAELEKTIGEEGSKLEGHKGLSSIKGIGKITGAILLSVIGDVNDFPDEGRLASYFGIVPRVSNSNETERNGRIHKRGTKLGRTALVQSALIAANYSPYLKRFYERVKARRGAGKAIIALARKFLGIIYRTLKNKWVFEDFPNFVLVEES

SEQ ID NO: 156531 - protein, 341 aa, unidentified
MQITTIGFDIAKNVFQVHGIDAAERVVVRKQIRRGQLMKFFEALPPCLVGLEACATAHYWARELTKLGHEVRLMPAKDVKAYVKRNKNDAADAEAICEAVRRPSMRFVPVKSAEQQGQLMQHRTRDLLMRQRTQVINALRAHLAELGITAAQGREGIRDLLAIIADDGDARLPIDARASLIVLAAQLQAIQTLIGSMEKRIIARHRSSEASKRLQTIPGIGILGASTIATMVTDPKAFRSGRDFAAWVGLVPRQDSTGGKRKLGPISKQGDRYLRRILVVGAHAVLKRARLHPKNIPGLHSCWHGVRSRSSRSRWPIKWHASLGHCWRKVRPTGWPRLAAA

SEQ ID NO: 156532 - protein, 310 aa, unidentified
MDAIYVGIDVSKDRLDVHMRPSGEAFAVGRDGKGLEDLVARLVACPPTLIGVEATGGFETVVAAALTGAQLPLVVINPAQIRHFAQAVGQRAKSDPIDAAVIARFVEAVKPALRPVPDEQARLLAELVARRRQIIEMIVAERQREKRAENVRVRKSLARHIKVLEKELPEIDNDIDTLVRGSPTWRDKEDLLITFPGVGNTLARTFLAEVPELGALNRRQIASLAGLAPFVRQSGRWKGRSKIGGGRTALRAALYMAALSAIRCHTQLKLFYRHLVSAGKPKMVALIAVARKLITILNAMLRDRKPWQPA

SEQ ID NO: 156533 - protein, 338 aa, unidentified
MTGKQHVDLLQALSAGPDLPRTGRRLLDFARQQVPGRRCWALEGIGSYGAGLAIFLDQAGEQVVEVCRPKRAANRGGRKTDMLDAIRAAKEALVTEHLIQPRLRGEREALRVLLATRSGAVLASTAAINQLKALIVSAPDELRAELRKLKRPAQIAYYAQFRDRPAQDLEHRMTVRAMRSTAQRIQALQTEAKELENEILALVRQQALELLGLLGVGPITAAQILVSWSHQGRFRSEAAFASFAGVSPISASSGLTNRHRLNRSGDRQLNRAMHTITLVRMRLDPSTKTYVARKIAEGKSSRDAQRCLKRVICRQIFKILERAGRNRLGNLEELAQAA

SEQ ID NO: 156534 - protein, 409 aa, unidentified
MIYVGVDIAKSDHCLGAIDAQGVVAQKPVRFTQDATGWAALAAILMRLGGPGAVTIGFEATGHYWVLLAEELVRLGYQPQVFNPILSSDAGRTSVRGRKTDEDDSLAIAKVVRDGGFTAVRLPDAQMGMLKRLTRHRQGAVERCANLKKRLITLLDQVFPEFERHFSDPHGPTARAVLAKAPSARLMATHTAKAFTALVRTASHGRLGLERVQELLMAAKASIAVHRQDPATELAIRMTLQEIALLEQQIGVYDHEIAAIPVAGKEFITSIPGIGDILGAVILAEIGDISIFRGPPNARSKADAVHRLLAFAGLDPRIRQSGQWTGRIRMSKRGSRALRTAIWRAAFIACKHPAFADTYQKHRVTMKQHQKIALSHVARKIVQAIYGVLRYQKPFDIEAFRHGVTAAAA

SEQ ID NO: 156535 - protein, 388 aa, unidentified
MFKTVERPDAPAAIRMDIGAIFVSLELSRSTWLLTSVSPGAGEKMSQHATPAGDLRQLFECLAELKRKAMARTGKTYPIIVIQEAGLDGFWIHRALEREGIESHVVDAASIAVPRRRRRAKTDRIDGKTLLRTLMAFKRGEPRVCAMAKPPSVEEEDRRRLGRERKTLIAERVEHVNRIKGLLFTQGAIDYQPLRRDRRARLEALRTGIGDPLPARLKGLISRELDRLELLLAQIKAVEAERDALLAEQSRQAPAAAAMLLAFKGIGPEFATVLWLEGLFRSFANRRQVAAYAGLAPTPWRSGSIACEQGASKAGNPRLRATLIELAWLWRRHQPKSALTLWFEDRVKANGGRIKKTLLVALARKLLVALWKYVTTGLVIEGAVMKTA

SEQ ID NO: 156536 - protein, 350 aa, unidentified
MIVLGADMHKGSHSLAAVAAGSGELLGDKVVKVGQPGFAAALAWARELEAERVWALEDCRHVSGSFERFLLVNGERVVRVATRLMAGERRSSRERGKSDLIDAIAVARAALREGVERLPVAQLAGVELDIRLLVDHRERLVRMRTALNNDLLWHLHDLWPEQTLPGGALLSQKWTARLGRRLARAEQTARVRIARDELRQLRELSRSIDALEREISGLVAEVAPQLLTEPGFGPLTAAKLIGEIAGAQRFATDAKLARAGGVAPIPVSSGKTNRHRLDRGGNRQINTAIHRVAITRLRCHSETKAYVARKRAEGKTSTEAIRCLKRHPTRRIWHLLQPPHPEALNINLLT

SEQ ID NO: 156537 - protein, 341 aa, unidentified
MHSRKQQVAVLDTTTGEVLEHELHDGDAVEHFYRALRPPVTIGIETTGYTQWFHGLMHRLGHTVLVGEAAKIRAMVVRKTKTDRRDARHLLDLLKHGRFPTVWMPDPDTRDLRALVAHRVRLVRMRTMVKNGLQAIALNQRLAVGSKLWSQRGLSQLRALDLAPHTRRRRDDSLELLTWITSRIDQLDDQIADVVAHDARARLLLTHPGVGPLTALTTVLVLGPLARFPDAKHVVSYIGLAPSSRASADKQHLGKITKQGNALLRWVLGQAAPLAARADDDLRCRYFAVLHRRGRPKARVALARKLLVRLYVMLRDHVDYDEFRRRGRAAAHAPHVAMPNR

SEQ ID NO: 156538 - protein, 356 aa, unidentified
MQTQVTKKIDFKDKDLFIGLDVHKKSWSVTILVEGMEHRTFTQPPDPVILYNYLQKMFPGGSYHSAYEAGFCGYGIHRELNTLGIKNIVLNAADIPSSQKDKLEKRDPVDSRKIARGLEKGLLRAIHIFDRNQEELRSLNRTRFYLMRDLRRSKNRIKSFLYYYGISIPPDYDNNLWTLKYIGWLKQIEMKTLSGLEALENLISSYEYNRAQILTLSRQIRVRIKEYDNELYTLLKTIPGIGPLTSSALITELGDINRFPHIDQLSSFVGLIPSVKQSGESSYTGGITFRCNSYLRTLLIESSWQAIRQDPALMQYYHEHLINNKGQKVIIKVARKLLNRIRYVMKNRQPYVTGVA

SEQ ID NO: 156539 - protein, 325 aa, unidentified
MRQPQSQAKLQTQVGLDVSSQTLDAHIRVDGKAFSVPNTDAGFDQLCEILSAYSVSMILMEATGGYEDNVACYLQLQGFDVVVINPRFARRFAQSMGRLAKTDRIDAAILAQMAFMIDSGPDRDRYIKPVTDEQRKQLSRLSSRRRQVVDLITIEKQRLTHADDYARESINGVISLLNVELKRIESDILRYVKKNFSELANRLLSIPGVGEQAMIVLIADLAELGHVNRRRISALLGVAPFNHDSGKFKGQRRIRDGRQTVRNVLYMGVISATRFNPVIKTFYDSLLLRGKPRKVAIIACMHKLIRIINAMMRTGKSFDMSLHGV

SEQ ID NO: 156540 - protein, 345 aa, unidentified
MELHTIGIDLGKTVFHLVGLNLCGEVVVRKKFSRAQLLRFTANRHVGLIGMEACGGAHFLGRALREQGHEVRLMPAQYVKPFVKTNKSDYIDAEAIAEAVTRPRMRFVPIKTDDQLDMQSLHRVRERWVMRRTAIVNQIRGLLLERGITLPKGRSHVDTVLPRILEDADLKLSGALRTLLAQLKLELDQMAVRIDEADTVLSRTTHQNPACQRLVAIPGVGPVIATALIAAIGNGAAFRKGREFAAWMGIVPGEYSTGGKQKLLGISKRGNTYLRTLFIHGARAVLQQRAKQTSGLKAWLAQLSARTHPNVAVVALANKLARIAWAVLANNEVYRPLVLIGSATA

SEQ ID NO: 156541 - protein, 313 aa, unidentified
MSEPLVYVGMDVAKATLDLCGPLAPQAKSRQFANTSTGHRALVRWLQGLGLVHVVCEATGGYERAAVGVLQAVGLIVSVVNARQVRDFARATGRLAKTDRLDAAVLAAYGVCVRPPPTVAPTAAQSQLAELVTRRQQVLALRVAEHNRLEHLTHPAVRRQIQRHLSQLDRHLEQLTVWINERVQTAPPLAQKVARLCSVVGVGRLTAVVLLALVPELGTLNRRQVAALVGVAPFNRDSGPHRGRRQISGGRAAARRALYMAALVAAFRNPRLRPFYQHLLAAGKAPKVALVAVMRKLIILLNRLLQEPSFQPT

SEQ ID NO: 156542 - protein, 411 aa, unidentified
MIKENYVYVGIDLHKETHTAVMIDCYNQKLGEITFPNRPADFPKLVTKVKKCNTDGKEVVYGLENAYGYGRALAVWLIDKGYLVKDVNTAISHRQAKHRGAMYRKSDSDDAKAIALATLNMLDKLPDACPNDAYWSLGHLVHRRDNIMKQRTRLVNQLHEQLCIAYPSYKSFFNDISRPTALYFWEHYPFRKYLRGKSVEDLRKELVPVSHNKCSTKTCEKILDAVASDKVKNIDYQDARDMVTLSIVSDLQHYDSQLAEVDKMLEQMYKMLGCTLTTIPGVNVITAVKILAEIGDIKRFSNANKLAQFAGIAPLHLSSSGKGKDVATKQGNRRLQAAIYFLAIQMVQLSSKGTPRNPVVRAYYEKRKAEGKTSQQTLICISRRLISIIYGMLKNGTEYRMPVVENAGEKL

SEQ ID NO: 156543 - protein, 347 aa, unidentified
MAITMIGLDTAKSVFQVHGVDSAGKVQLKRKLRRDELLPFFEKQEKCIVVIEACGAGHHWARVLTGPGHDVKLIAPEAVRPFVKKGKKNDPADAAALCEAARRPDIKFVPIKTTDQQAVLALHSARSLLVKQETMLANAMRGLAAEFGVTVPKGMRKLGDLITIVDADTAIPESGRQAIEELHSHCGVATARIAKLEAQIVDHARHDETARRLATVPGIGPITASLISATVGDNIGAFKSARQFAAWLGLVPRQHSTGGKTRLGRITKAGNKEIRKLLVLGATSMVHRAAQWNSAAGIWIRGILERRPVRLATVALANKMARIAWALMTRKEVYRAKGRVAAAEAAA

SEQ ID NO: 156544 - protein, 371 aa, unidentified
MNNIRFVGLDVHKQSISVAVADGGRSGSVEYLGEVDNDPGAIGKLCERLRRPGKALIFCYEAGPCGYGILRQIKGLGHRCDVVAPSLIPRKPGDRVKTDRRDATMLARLLRAGELTAVWAPDADHEAMRDLIRLRGVVRQVVTRARQNLQGFLLRHGRKHGRGTAWRMAYRRWLSTLAFEHPAQQIAFQDYVDAVTDGERRLKGVEEQILKLLPAWNLCPVVDALQAIRGIALVTAVVLVAEVGDFTRFANPRQLMAYFGLVPGERSSGETTRRGGITKTGNSHARRALVEGALAYRMKPRVGRHKVDRIEALPKAVRDIAWKAQVRLCARYRQLAARGKTANVVTVAIAREMVGFVWSIACMVQSTPKAA

SEQ ID NO: 156545 - protein, 354 aa, unidentified
MTSDPGQPAQTFASIGIDIGKDVFHIVGFDAQGKIVLRKKFKRLALESELAKLPPSIVGLEACLSAHFVSRTLRRLGHTPRIIPAIYVRPFAKGQKNDYNDAEAIAEAALRPNLRVVQEKTQDQLDLQALHRVRARLVSRRTATINQIRAFLIEHGIAVRTGANSLRRSLFAILENRADELSPRMSDLIVGLYEDWLWLDERIETLTDEIEQISHREANCRRLMSIPGVGPIISTAVVAAIGTGEAFERGRDFGAWLGLVPRQYSTGGKSILGRISKRGSRYLRTLFIQAANVILMRPQTWERFSFGAWLKAAQPRLHRNKLATALANKLARIAWSVLRNNIAFDAHRVEVVAI

SEQ ID NO: 156546 - protein, 373 aa, unidentified
MKNKTTTTLHDEIEFNNSKASSKEAKGRVWKVGLDVDLRAIAVAIQCERGTIGAARKFSREQLVAWVKEKIAAGQAVHTVYECCGFGYTLHEQLTQAGAHSLITTPMRLNLERRRKNDRMDARELCVRLSRYLDGHKDELRTIRIPSRPEQQRRELGRQREFWKKQVRRLENHGRALRIEHEHETLSAGWAGPRKWKQIAPQCSEFVRAQLEPLVMHIRATKAQLDRLTQEIEALVAEEKIPVGLGALTVSLIDGEVCNWTRFIRRKAVGSYTGCCPSEHSSGGIQRFGPIDRHGNKHLRVLLVEAVWRLLRWQPNWHARQKYLQKLRHGASLKKKIAVALARQLAIDIWRWRTGRASAAELGWSLSTSQVQP

SEQ ID NO: 156547 - protein, 353 aa, unidentified
MRKMQEYIIKGNKIFIGLEDSKKTWKLCVRCDRLVVQETSMPAKYDVLISYLNNKYPECDISVIYEAGFQGFWLHDLLTDDGIHCIVTPANKVTQAKDNRVKTDKRDARRLAINLENGDYVSCHVPDRERREDRQISRTMNQVQKDIVATKNRIRRFLDNHGLNEGLKTGAWTDKDYRQLNNLALSHSMRVSLNAHLRILEELLMVKKELMAELRALCEKERYKVGVLAKKSSPGIGWLTAIRLTLEWGDMRRFPSGKHLASFAGLTSREYSTGETIRRGRITGQSAEFVRSWLIECAWRASRKDPVLLDKFRRVWRNSGSKKKAIVAVARKLSVRLWALETLGQTYSIGVVE

SEQ ID NO: 156548 - protein, 346 aa, unidentified
MHYIGMDVHSKVTMICVLDPYGKKVKESQCKGALRDLVAMMKALKKELGGPVKVCYEASGGCGWLHDQLVAAGMTVQVAHPGKLRLIFRSRHKNDRADAAKLAMMLLLDQVPLAHVPPAEVRDWRAFIEYRSKLVAQRGACKNRLRALLRAHAIVAPRGLWTKKGLAWLSQQELPHFQGVKRTMLLTELGSLHQQIRETEKALKTWADKTPQVALLMTIPGVGIRTAEAVVAYIDDAHRFRRNKSVGCYFGMTPSEDTSVKVRLGHITKEGPGLVRRLVTEAAWMAIRRDATVRTFFERVQRGDPHRKKIALIATAHHLLRVMHAMLRTGQPWRTTTATADATAVA

SEQ ID NO: 156549 - protein, 524 aa, unidentified
MARTLRSKKRRRSVLAHLIFKPGGIIHPRVQAVGPEHFGIVSVDCAKARSKWMLAEFYGNVLVPPTTVEHNRKDLDAMVQSVRQVIEQFDLQDVIVAIERTGRYHLPMKRTFAQAGFDTRSVHPLTSKQFRQPANPGNKTDDTDLNAIHRAAVNGFGMIEPSPDPVYVHLQLLARHRRDLVEKSTALRCQIHEHLQAIMPGYARCFDDIYECHTALVIAKRLGSADEILRVGLAGLTQEVEKASVRPHRPTLEKILAWARAAAAGATEASVHHRVMRELDDDRVAKLGAIKAIEGELAELLVQTPYVLLLGTPGINVVSAADFAGEMGPIQFYANARAITGRAGLFPSRYQSDEVDRPDGRLVRCANRRLRNAIMIIADNLIDCNDHFRLLAAQWRVEGKDPRAIRVRVAGRFCRIAYHMVAGRTPYRHPSCQQRDYVLSKLIRFCTEHITDISQIMKHLDAAVAQLPGAEHREEGEALAIELGRLQKKRGSGPRSLAEILPAVLAKLGVNLVTSTKSGEPDLT

SEQ ID NO: 156550 - protein, 355 aa, unidentified
MENSTPTPTDLARLNTLGIDVSKAKLDCALLRQSAPGKRLDKSVANTPAGIHALLAWLDSKGCPTQAIRAVLEPTGVYHETATWLLHEAGCTVVLVNPARLRSYAGAIGVVSKNDQIDAALLARYGATEPLEPWQRPSEASRTLTALLARRDTLCADIQRDGNRLEKARCAMNTPKVVISSINKTLKFLEKELIALDAQIKIHIDDDPTLKNNDALLQSIKGVGPRVAQRMNALLSSKSFKSAEAVAAFIGLNPVQHLSGTSVRGRSTLSKRGPSALRKLLYLPAVTATTCNPHVRAVYLRLLSRGACKMSALGAAMRKLAHLCFGVIHSGKPYDPTWHPGAKNHAPHAPAVGAT

SEQ ID NO: 156551 - protein, 423 aa, unidentified
MNRLHYELHVGIDLGQWLHQACVVDANGELLEERGFEHSVDGLGTTLAWLLSLAGKDAERIAVAIEKPHGAVVETLLESGVAVFAINPKQVDRFRDRHSMSGAKDDRRDAFVLADALRTDGHRFQRLQLPPPEMVALRELLRTRDQLVKNHVALSSQIRDLLARCWPHLVTLAPKDKALDAFFCELLQLFFDHHPTAELSLQNIQKLVHQHHIRRLQPEHILEVLRKTPLRVAPGTTQATSAHLNLLLHQLLLVRQHRRDSDQHLERWFKQLQPTSDQPYSDAAILASLPGVGAVVLASVLSYAHDPVRLRNLDAFRSLGGIAPVTKKSGKRGQQRPQILMRRARSLPLNNALHHWARIAVLTDPHFKDHYDRLRAKGHNYARALRGVMDRILAIAVAMLRDQTLYDPSKRANFNKGAKKVSS

SEQ ID NO: 156552 - protein, 351 aa, unidentified
MPRTSTVHAVTTIGMDMGKNTLHMIGLDSRGSIVLREKVSRGRITSRLANLPSCLIGIEAGMATHYVARELATLGHDVKQVPPTCAKPFRQGHKNDFRDAHAAAEAVQRPTTRFVPAKTDEQLDLQALHRVRSRLVSERTAVINQIRGFLLERGVIVRQGLRFLRQALPDILAKRTDVLSPRMVRVVADLASDWRQLDEQIEHVTDEIKTLAKNDDNCRRVMTVPGIGPIISTAMVAAIGSGAAFAKGRDFSAWIGLVPKQLSTGDRTILGRITKRGNGYLRTLFMQAARVILLRPASWPKHSFGDWLTRAARRLHPNVLAAALANKLARIAWTVLAQERSYEARITKAAV

SEQ ID NO: 156553 - protein, 422 aa, unidentified
MLAETQDSEEIIPRVAALDIGKAELVCCARVPDEDRPGRRLQEVQTYSTMTRSLLGMADRLRCLGVTRVVMEATSDYWKCAFYLLEAAGFEAWLVNAKDVKHLPGRPKTDKLDAVWLCKVAERQMIRPSFVPPPEFRRLRDVTRYRADLVAVRTAEKQRAEKLLEDAQIKLSVVASDIFGVSGRQMLAAMIAGERDPKVLAQMARAAMRGKITALQEAFTGFFTDHHAFLLQRMLARVDAIDADIAALDARIEEMTAPFTAAAGRLDEIPGINVTIASVILAEIGTDMGRFPTAGHLVSWAKFAPGVKESAGKKKGTNATGHGNSYLARVLGNAAVAAGRSDTFLGERYRRIARRRGRKKAVVAIGRSLLVIIWHLLADPDARYTDLGSDFYATRISPERRKRGHIRQLEALGYKVTLEPAA

SEQ ID NO: 156554 - protein, 350 aa, unidentified
MNVNHYIGFDVHKKTVSYCVKTADGKIVEEGKLRATHDALRQWAGKRQEPWRGAMEATLFSGWIYDTLQPFAAELQMGHPALMKAIAASKKKNDKLDARKIADMVRCDLLPVCYVAPAEIRELRRMLRYRNLVVGQATRLKNKMSGLLMEVGAEYNKERLHGKQYFTQLLDTVAEVPDSVKDLLRLSRGAMETFETTQQQLLARLRKDPRLARRVMLLESIRGVGEVTALTWALEVGDAHRFSSVAHAVSYCGLTSALVSSADKQQRGPLSKQRNAHLQTVLIEAAKLAPRWNPQLAALHARELARGNRNRATLAVARKLVAYLLAVDKSGQPFEARNPLVAETEAQEVA

SEQ ID NO: 156555 - protein, 339 aa, unidentified
MELYAGLDLHSRNTYIGILDKEFNRIFKKRVSNNLEMILDTLNPFQNRLKGLVVESTFNWYWLVDGLMDAGYQYVHLANPSAIKQYEGLKHGDDQHDAFFLAQLLILGILPQGYIYPKESRPVRDLTRKRLFLVRHKTSHVLSLQSLIARCCAQTVNANQIRNLTDADLQQLLKEQYLVLSAQSNLDTIRFLTQQIRRLEKAIKQKVKLSPAFQQLLTVPGIGNILAMTIMLEVGEISRFAQVGNFTSYCRCVPSQRLSDGKSKGHGNRKNGNRYLSWAFVEAAHLTRRYNERFRRYYNRKAALTNTSVATKALSNKLARICYDILRDHVPFREELSSH

SEQ ID NO: 156556 - protein, 345 aa, unidentified
MAIVGGFDIHRRQVTFDYLDTGTGQVRRGRIDPACRQRLRAWLERFAGRDDVTFAVEGCTGWRFVVEELQRAGITALLAEPAETAHQRGPKKRAKTDRADARHLRTLVAEGRVPVSWIPPGQARELRVLLQLYRDLREEHTAWTQRIHATLFHQGVPSLAGRLSDPRARALLEQDIGLSPAGAQAVAVALRRMDDLEAALAPVHARIAAFARRQIACKALAAELYGVGPLVAAIVWAFLGDARRFSSSAQAVRHTGLDVTVYSSDDKRAPGHLSHQGPPILRWALFEAGHQGSRASSPDHLYYTDVAARIDANRAALSVARKLARRSHHILRRLGDQAYAPLPGW

SEQ ID NO: 156557 - protein, 356 aa, unidentified
MTKVKTLSFEGETIYCGVDVHKKNWKVNIRNSNMELEHFSQNADPDCLASHVQKRYPGAKIKVAYEAGFSGFWACRKLQQAGIECIVINAADVPISDKQKKQKNDTVDARKIAKELSKDNLDAVYVPTIAEQNDRSLVRVREQLIEDQTRCKNRIRHLLHFNGLKVGDGIDKEKYWTLAFIKALEELDCEDNSLRITLNLLLAELKDIRKKVLEATTAVRKVAATKVYKEDIELLRSICGIGPINAMVIRTELGNISRFKCFDHLCSYVGFIPSTDDSGDNKATRGITHRCNNRLRTALIESSWMLISKDPAMLMKYSAYCKRMDKNKAIIRIGKHLLSRIKYVLTKREKYEPCMV

SEQ ID NO: 156558 - protein, 365 aa, unidentified
MKKLNRKVSRFKGFTVGLDVHKKFIEYCVLDNNGDDAEGGRIGSTHKDLEALIARLKKKSPRLQVSLEACGCFIWIFDVLAKELGRDAVHVAQPSRIRVIANSMEKNDANDAWWLAYLLYECRLPEAFVAEGSLRDLRVASRELRCWVNQRSDLLRRFKSHLAQAGLKVPKNWQASKLGRTKAKEVILQVPAERGRALMILLKQIGRLSRQMLYWHKRVEELSKDLPAVKTLIEEMPGFGPVISGAVVAELGEPKRFYNQKAYAKATGLTPGYRESGGHSSNTRITRQGSRLARWAFTRAVIGCMRCKSGAGLSIKQWVERHGKHKPKKKVIVAAARKLAEGVWRLFALGEAFNLARAFPVRSMA

SEQ ID NO: 156559 - protein, 356 aa, unidentified
MVSNSLLQTIRDCTKKSDKIKVGLEATGHYSYNILGFLLDNDLPVYVMNPLHTNLYRKSLSLRKTKTDRVDAKTIATMLLSDVDLKSYTDTAYHNEELKSLTRYRFDKVQERAKLKQSVSRLVTILFPELEQLVSSIHGTSIYALLREYPGAKQISEAHLTRLANILVKTSRGHYRKDKATHIRDAARTSIGSVMPAKSLELKHTIKLIQELTSEINEIEDAIRKIMDELKPPILSIPGMGFYSAAMILAEVGDFSNFNSPDKVLAYAGCSPSTYQSGKLTNCYAHMEKRGSRYLRYALYTATKYVCYWNPVFTEYLTKKQAEGKHYNVALSHATKKLVRLIYALQKSGKAYLAIT

SEQ ID NO: 156560 - protein, 357 aa, unidentified
MSNKATKLDFRGQVFHIGIDVHKRNWRVTVLNNGLELKTFSINPSPEGLSSYLQSNYPGGEYYTAYEAGFCGYWIHRKLESLGIKNLVVNPADIPVNFKETVRKTDTIDSRRLARALYSNLAHGNYIPSLEQQGFRSLCRLRKQLVKDQARVKNRIKSFLDFSGIKVLSQNEISHWSGLFLNYLSNLDLGNEHSNETLSRMLGQLMSLRNQIADLVKRLKTIVRQDEAILRVMNNLMTIPGVGFSCAIVLYSELMDINRFSSVDKLCSYVGLVPDFRSSGESEYTLGISKLQLQFLRAMLIECSWIAIRKDPALTAAFNTLSIRMKKQEAIIRIGKKLLTRIMYVWRNNEPYICSIV

SEQ ID NO: 156561 - protein, 424 aa, unidentified
MKVTYKTCCGVDVHKSFLVATIITTTGGIEPSYQKKRYSTFNNSILEFKQWLLDYDCHDLCMESTGKYWIPVFNLLEDEINVTIANPKWVKAVKGNKDDTKDSKWIGDLFRLGLVKGSYIPCKKIRILREFTRYRYKIVSCRSSEKNRYQNALTVCNVALDSVVSDIFGKSSTSIIDYLLEQSGNSINHEEIASKLLKSLKSKEDAVIESIEGYQMTDSQKYRMHLVRAHMDYITAEINDVDREIEKLISSDPDFENALQFLMTIPGVKRDSAITVISEIGIDMTQFSSSKRLCCWAGLTPGSNESGGKKKSVRVTRAGVYLKPALVQCAHAAVKSEKSPYYKKKYESLMKRRGKKRAIVAIARMILTAIYQMLSTGESWNPSDLYKIDIPEALLEKQKAKAIKQAMKLLQREGLYPPPEPIAS

SEQ ID NO: 156562 - protein, 403 aa, unidentified
MAEVFAGLDWASRLHAVCVIDEHGSVCRQWEVPHDGDGLRELMRALRALGVRRIAIERPSGLLVDALVDAGFEVVPIHPNAVKASRPRYRSHGGKSDASDAYLLADLLRTDGHRFKPLAAQSDDIRALRALVRGRDDLVATRVQMANQLRALLESYWAGAAEVFADVDSPIALAFIERYPTPDAANRLGPKRMAAFCAQHAYCGRRSAQDLLQRLRQAPAVACGELEMDAKGELACCLARTLSKIVDQIRLLSSRIEHHIAHSDDGRILMSFPRAGRICAAQILAELGSVRERFDSDEHLAAEAGVAPVTYASGKHKSVVFRWACNHRLRRALTTLADNSRHASTWAAAVYANARGRGCDHPHAIRILSRAWLRVIWRAWTDRKPYDPASHGALQTMLKATGG

SEQ ID NO: 156563 - protein, 319 aa, unidentified
MTTSSVVVGVDVAKDRLDVAMRPSGETWSAANDEAGITALVARLRPLGPALIVCEATGGFERAAIAALAAAGLPVVVANPRQVRDFARATGQLAKTDQLDAGILALFAERVRPTPRPLPDAAAQLLDAVLTRRRQLLEMLVAEKNRLGFAPKPLHRGIQAHVRWLERQLDDVTKELAGLIEASPVWRAKDDLLQSVPGVGPIVSSTLLGELPELGTLSHKQIAALVGVAPLARDSGTLRGKRLVWGGRASVRTALFMAALCGRRWNPALKRFYDRLKAAGKPTKVALIACARKLLTILNAMVRDNKRWAVPAPSVQYSC

SEQ ID NO: 156564 - protein, 404 aa, unidentified
MACVRIASGGEVSRAVRTFETTTARLIELAEWLEASGCTHVAMEATGVYWKPVWQVLAGSGFELVLANAAHVKNVPGRKTDVNDATWLAELLAHGLIRASFVPGPEIQELRGLLRTRKQLVREKASHVQRLQKTLEEANIKLESVLSDVMGRSGRAMIQALIAGETDPAKLAALAHPKVRAPQARLREALRGRVKRHHRFLLDLHLQQIEALDAGIAAIDREVDAGLASFRDAVKQLSTIPGVSELSAQVILSEIGTDMSRFATAAHLRSWAGLCPRNDESPTGQARGLKAHGKRRSTRLRMGAPWLKAMLVQCAWAAARTKATYLNAQFVRLRTRRGPKKAVCAVAASILTAAYHMLKDGTFYQDLGATHFDRRRPDAHARRLVKRLADLGFSVQLKPAAAVS

SEQ ID NO: 156565 - protein, 398 aa, unidentified
MTESSDYESVQVFIGVDVGKDTHHAVAINRSGKRLFDKALPNDENKLRSLISDLKQHGQILLVVDQPATIGALPVAVARSEGVLVGYLPGLAMRRIADLHAGEAKTDARDAAIIAEAARTLPHALRTLKLADEQIAELSMLCGFDDDLAAQTTQASNRIRGLLPQIHPALERVLGPRLEHPAVLALLQRYPSPEKLASLGEKKLAAQLCKLAPRLGKRLAADIAQALAEQTVVVPGTNAAAVVLPRLALQLITLRKQRDEVALEVEQRVLAHPLYPVLTSMPGVGVRTAARLLTEVACRAFASAAHLAAYAGLAPVTRRSGSSIRGEHPSRRGNKALKRALFLLAFAALRDPLSRAYYSRKMSQGKRHNQALIALARRRCDVLFAMMRDGTFYTPQGS

SEQ ID NO: 156566 - protein, 419 aa, unidentified
MKSIELYIGLDVHKDSTTIAIAEPGPKGEIRLFGTVSSDIDRLEKALRRIGKAHPDAQLQVAYEAGPCGFVVARRLKQLGLPCLVAAPSLIPKQPGSPFKTDQRDARTLARLLRAGELTGVYVPEPTDEAIRDLCRARTDAVDDMRRSRLRLKSFLLRHGYRYQGKANWSQPHMRYLRELVLPHPAMKAILEEYLQGIDAAHQRVQRIEASMLNLLDTWRLKPAVQALMAFRGFQLVAAMVTVSELGDIHRFEHPRQLMTYLGLVPTESSSGPRQRLGAISRCGNGHQRWILTECAEHYLLPPKISKELSRRQEGQPPAVRDLSWKAQNRLHLRFLRLLGRRLPRHKAKVAIARELCGFIWALLRTQSCYTQPVGKPPSPGLPLAPVPAPQIPAGTATALHLQRLNRMANERRLRRNER

SEQ ID NO: 156567 - protein, 411 aa, unidentified
MEIVHARCCGLDVHKKSVVACVLISQPDGLIERQVRTFKTMTGDLLELADWLHSLGVTHVALESTGVYWRPVFNILEDEERTLLLVNPQHMRAVPGKKTDVRDSEWLADLLRHGLLRASFIPPAPIRAIRELTRYRKTLVQERVDEANRLQKTLEGANIKLAAVASDVLGVSGRAMLAAVLDGERDPDVLAELARGALRAKLPQLRQALNGRVQPHHLVLISQLLAHIDFLEQAIAQVQVEIERCMPSFEEALEVLQTIPGIKAVAAAAILAELGPDMSRFPTAGHLVSWAGLCPSNKESAGKRMKGPVNRGNVWLRGIMGEVAWASVKKRATYFYAQFNRVARRRGRNKAVVAVAHSLLVVVYHVLKTGKPYVELGVDYFNQLDATRIEHHHVRRLEQLGYNVTLTPLTA

SEQ ID NO: 156568 - protein, 355 aa, unidentified
MEDYDGRQVVGMDLHRRRSVLVRMTEDGRRLGTARITNSPQELLREIARAGKSPKVVLEATYGWYWAADTLAAAGAEVHLAHPLGVKAFTYRRVKNDERDSADLADLLRMGRLPEAWIAPHEVRELRELTRYRIKLVRLRTSCKDQVHGVLAKLGITVTCTDIFGTAGSAWLDALRLPQPYAGKVTSLRHLAGELTTEITMLSEVIASLLAGDRGYQVIQQLPGIGPVLAAVITAEIGEVTRFKNAGQLCSWAGLTPRHRESDTKVARGHVTKQGSRLLRWALIEAIQRIPKDCVIGGVKDAIIARRGKEAKNIAKVAAARRLLTLVFYGMRDGQIRCLAKPPAGPAATQPARAA

SEQ ID NO: 156569 - protein, 309 aa, unidentified
MDVKNYGVDVSKNKLDVACDGRVVQIDNEKKAIKSFVKGMEIGSLVVMEATNTYHLEMADICHARGMRTFVVNPRITSHYRKANGFRGHNDRMDALALSRYIEREHDGQREYVPKSADQRRLKTLVRRRWKLVGTRTQLQESLGSMKELSREVEALLAGIDALIAKLEMLIDKQLEGNDDRARLETIKGVGPIVSAVLISDLACCEFARADAFVAFYGLDLMPDDSGKRKGRRKLSKQGDRLARAMLYNAAMSAVKSKVWKPMYDRCQARGLTKVQALVAVARKIARTAWSIYTHKTTFNPGRLFQDLT

SEQ ID NO: 156570 - protein, 350 aa, unidentified
MIIIGCDYHPSFQQIAFMDSETGELQERRLQHREEAEKFYRELAAQGMKVRVGMEASGHARWFEGLLAELQVELWIGDATVIRAKRGRKPKTDRQDAEHILKLMLKDDFPKIWVPSGENRDLRQLLWHRHRMVQARTRLMNQLQAVALNEGLRCKKKLWREKGRKQLEAIRLAPWASRRREDLLQLLDGLNPTIAKLTLAIDLEVEKCPEARRLQTHPGVGPLTALAFVLIIGRVERFQCGKQIAAYLGLVPLEDSSGERRRLGHITKQGNSLLRFLLVEAAQVTARSLPEWRSKYAHLTMRRGRKIAKVAMARKLAVRLYWMMRKEWDYERLRKFGSHAGKPGPGDGVK

SEQ ID NO: 156571 - protein, 317 aa, unidentified
MVRSAVVGIDVSKAFLDVAWWVPDHAARYANSPQGLAELTRALTQQAPELVVLEATGGYEIAAVDALQAAKIAVAVVNPRQVRDFARASGKLAKTDALDAKVLAWFGATMRPAPLPPIDPSHSAIANLVARRRQVIEMLIAERNRLEHAGAAVRRWIEEHILTLKTQLAQLDAAVALAVEASPSLHRRNEILTSVIGIGRLTAAVLIAELPELGSIGNKQVAALVGVAPFNQDSGNRRGERHIAGGRYSVRCALYMATLVAVRFNPALQSFYRRLRDAGKPAKVALVAAMRKLIIILNALVRDDILWQPNHALQDGC

SEQ ID NO: 156572 - protein, 436 aa, unidentified
MIHPAAAGIDIGSSEIYVAVSDDRSDNPVRRFDTFTEDLHEAAQWLKECGIESIAMESTGVYWIPVFQILECYGFDVILVNARHVKNVPGRKTDVQDCQWLQYLHAVGLLNGSFRPDQDICAVRSLLRHRDNLVKSASSEVQRMQKSLTQMNLQIHNVISDITGVTGTKIIDSILAGERDPYKLAELRDPRIKADKETIAKSLTGDYRREHLFTLKQTVASYRHHLELIKGCDAEIESYLKEFEPRVEIDEPSSPSKKSKRKSKGNAPDFDLKTYMHRLLGTDLTEIDGVSDLTTHVFFTEVGPDLSKFKTVSHFCSWLGLCPNNKVSGGKILSSHTRPGSNRLAQALRLSANSLWNSKSSLGDYFRRMRARHGSPKAITATAHKLARIIYHLVKEQKAFDETVFAEQEQAHEARLRKRLAKQANSLGLQLIPVEA

SEQ ID NO: 156573 - protein, 400 aa, unidentified
MDPVISLDIAKGESQVQAFLERKKTYKQSFKFKHDRQGLHAFYRFYQKVEQVAGQPPAIIFESTGHYHEPVLQFLEEHGITYYLINPVISYEARKTSLRKVKTDKIDAFHLGELYYKEDLEVFQKKTEQFLNLRQLTRQHSALTDSYVEIKLQFQAALDQIFPEYHGVFSDLYGSLSLKTLRQYPTSLDIQNASQEALAMEMRQFGARRSHAWFLHKASQLKDAAERNPFQTPVCQGQLISLQLYIQMLFQYQKHLSKLKEEIDALAKTFKEYELIHSIPGIGSKIAATITSEMGNSNQFNHPKKLVAFAGIDPSVFESGKFQATINRITKRGSSRLRQALYTAVQCGLAKNRNKRLIAFYNRKRNEGKPHKVAVIACANKLVHWIYAMLKRQEVFVDQT

SEQ ID NO: 156574 - protein, 322 aa, unidentified
MNKYKETFGVDISKDVFDVYGTLSGHNQYKNDESGFVKFLKELPDTALVVMEATGYYHYRLAQFLYKNKIVVSVVNPLSIKRFIQMKLAKVKTDKSDAKSICDYALINAVPIYNALTDVQSECLQLFRLLDVYLKHRTATKNKLHGEETLGIPSRYVYRSLKRNKKHLDKEISAIELKLLSLIKQEQQEQLTLLRTVPGIGQKTALFLIVITDGFSKFEHAAQLCSYVGITPTIRESGSSVKGRSRISKVGNRKLRNLLFLCSFNACKHNKACRELYERIVNKGKSKKVALIAVANKLIKQCFAIAKSGTAYDETYVSVLLK

SEQ ID NO: 156575 - protein, 369 aa, unidentified
MPHVTSIGLDVHARSVAAAAFNPFTGEVVHRDFGTDAAEIAEWALGFEEPRACYESGPTGFHMARELRALGLDCAVAAVSKMQRPAADARRKNDRRDAEFIARMLATHNIVEVPLPDAAVEAARDLDRALDDATAEYRRARQRLNMFLIRLGHVWDERNADGARKGSWTRAHWRWISGIRLEGPQRDVLEYYVTAARCAESDRRQLEKKVLALARTDRWRPAVEALSCIKGIDALTAFRLAAEAGSFTRFRTAPAFASWCGLVPSERSSGETERRGGITKTGNRLARTALVESAWHYLTCTPRPKPPAPGADVPAAIRARADACTARLCRRREALAAAGKSSCKANAAVARELACWVWEIGRRAEGTLG

SEQ ID NO: 156576 - protein, 425 aa, unidentified
MNYKQNEKINQVKESTLVVGIDIGSTTQYARAFDWRGIELGKVFTFSNSREGFESFKAWMQHLQDKYKKSDAIVGIEPTGHYWFDLGAYLEDEGILLVMVNPYAVKQTKELDDNSQSKNDRKDPKVIAKLVTEGRYSAPYTPDGVYADLRIMVANRKRLIREMTQIKNRFARWFAIYFPEYTDVFGDYEAQSSMLLLKKVCTPEAIVELGAEKINQIWRDAKLRAVGMKRATTLCETVKRSIGLKKGSSAARYEMKLLLEDYEYKKEQLDAVMEEIEKLCRKIPESEQMLAIKGIGVITVAGFLAEVGDVRRFESPRQIQKLAGLSLRENSSGKHKGQTTISKRGRSKLRAVLFNAAIPLIAKNPEFKSLHEYYTTRVNNPLKKKQSVIAISCKLIRVFYAVLAKGVAYDPQKMLSDIHRQPQAA

SEQ ID NO: 156577 - protein, 371 aa, unidentified
MKRESTTKFVGLDVHSKTISVAVADEGRQGEVRHYGTIENTTEAIDKVIISLTSTGAELKFIYEAGPTGFGLYRYLAGNGFKCIVTAPAMIPRRSSVRIKNDRRDALTLARLYRAGELTGIYVPEPEDEAIRDLARARDDARVAERKAKQRLNSFLLRNNLIFPGKTKWTKTYFNWLGLVVIKYPAQKIALQEYIEAVHECTGRRARLSEQIRLAVEEWRMAPTVKAIQALRGVSLISATITIAELGDLSRFRKPNELMAYLGLVPSEHSSGESIKRGGITKTGNNHARRVLVESAWTYKHHARITRCLIKRQQGLPRSIIQISWKAQLRLCARFRRMVAKKKPNNVVVIAIARELAAFMWAIAQEVRATA

SEQ ID NO: 156578 - protein, 344 aa, unidentified
MRIAVLGVDLGKNVCSIVGLDASGAVVLRRRVRRDTLIELVAKLPACIVGMEACCGAHHIGGVFAAQGHDVRLMSPEYVRPYVKAQKNDDRDAEGIAEAATRPTMRFVEMKTVDQLDMQTLHRSRDRLVGERTALINQLRAVLLERGIVVPQGKHKFEQYLIIMMDEHEGEGLSARMRMLVTDVRAQWRDLDRRIGAFDAEFARWAKENEDARRLGTIPGVGVTISTALIAAVGNASTFEHGRDLAAWLGLVPRQSTTGGKPRLMGISKRGNKYLRKLLIHGARAALPHVAEKDTALGRWAKNLLSRVHHNVAVVAFANKLARICWAVLRSGQKFAANGAPSAV

SEQ ID NO: 156579 - protein, 475 aa, unidentified
MNIKGSKKKNQVLSVNIFEQQEIIAKADAIKAGLKASTWHELETKGKFDKNDKLSFVSDDMLILGCDIGSETHYVRAIDTRGRELSKSVFGFSNTAEGFESMLDWSTKLAAANDKKQIVLGLEPTGHYWFCLTTWLVAKGISVVQVNPYAVKQTKEVEDNSQLKDDKKDPKLIANLVKDGNFGMPYLPEKLYADIRRLSMFRDQLNEDRSRNLNRLHREMKIYFPEYKDAFGKIDGAFSLELLKEAPFPDGLAALGTEGMKQIWHEAKLRGRGYANASAILEYARKSVGIKDGADAGRQAVKWFVSRIIELDEQLSDIENQLNQRCNEIPYAKNILAISGIGENILSGILAEMGDISRFDDVKEIQKLSGLGLVACSSGKHTGETKISHRGRKRLRYWLFQAAKSAVAHSEEFKELHVYYTTRKQNPLKKMQSLIVIACKILRVIFTILTKGTTYDPKKLLGDIVRPDQSIPQAA

SEQ ID NO: 156580 - protein, 312 aa, unidentified
MNTIICGVDISKAWLDAKVGPAGASGRFGNDPAGIAKLEAFCRHHGVELVVMEASGGYERLAFMMLWEKRQPCALVNARNVRRFAEAMGFLEKTDDIDAGVIAHYGEVKRVSPTQPPSAAQQRLKALVSRLSQVTGDLTINKQRRSAATDAETVASLDEVIVLLKRQQRRLEGEIASLIDDDPLWDRLDKAFRQIKGVASRTVARLMAEVPEIGILSNKAIAKLVGLAPIANDSGKRQGRRPVRGGRAGPRSILFLIARGAARYDPNLAAFYQRLQLAGKPKMVARIALARKLLVILNAKARDARIEFANAT

SEQ ID NO: 156581 - protein, 328 aa, unidentified
MSDFKYIVGIDIAKDTLAISVYTDKRHHFSEIAYTSSKINKNLIKPFKEYKEDILFVCENTGVYHLRLVMQLHNQGFHVSVINPFIIKKYAEMKLKRAKTDAVDAKLIAEYGAYEEKLKLFKPKGEVVTAIDNLLKIIDDLKIQKTVSSNQLHAIKHQVHASKSVIRSYLRHIVFMEKEIDKLQNELEDLLESNFTQEYRLLKTIPGIGLVSSGVIIGIYNAFNTFDNAKQACAFAGICPSPYESGTSVKGSGRISKRGNTLARKTLYMAALSAVQYNPFAKQQYERLVNNGKSKKQALIAAANKILRQAFAILKSKKPFERNYMLLR

SEQ ID NO: 156582 - protein, 375 aa, unidentified
MRLFVGDDWAEDHHDVEVMSEAGKVLARRRLPEGVAGIAQLHALIGGFLGEEADAEVVVGIETDRGPWVTALIAAGYLVYPVNPLQASRYRERHGVSRAKSDSGDAHMLADMVRTDSHQLRPAAGDSPEAEAVKVLARTHKTLIWERTRAVQRLRHQLREYFPAALEAFEDLDAPDTLELLGKAPEPARAARLTRAQVSAALKRARPLIAVITTLNEQVKILQGQVGEHFGRHPDAEIILSQPGMGAILGARVLAEFGDDPHRYRDGKARRNYAATSPVTRASGKKKVVAARFIHNDRLVDALRAQAFTALSASPGARAFYDELRARGIEHNDALRRLASRLVGILHGCLKTRTLYDEATAWGHRENLPQSSVAA

SEQ ID NO: 156583 - protein, 412 aa, unidentified
MEQIHDRIAGLDVHRDQVTACVRIPGPRGGVRTEKGRFGTTTGGLAALAEWLSGHAVTLAAMEATGVYWKPVYYALEGRFQVWLCNAHHVKNVPGRKTDMSDAEWLADVAAHGMVRPSFVPPPAIRELRELTRYRKTQVDARAAEIARVEKVLQDAGVKLTSVASKVLTQSGRAMIEALIAGERDPAALAGLAKGKLRPKIPQLTEALDGHFGAHHAIVAARILTHLDSLDDAIAVLDGQIAARVARRYQSAARLLAEVPGLERRSIEVIIAETGADMTCFPSPAHLASWAGLCPGNHESAGKRRRVATTPGNQWLRRTLIESARAAARTKDSYFGAQYRQIARRRGPNKAAVAVAHSMLDVIWHMLTTGEVFSDLGADYFTNRQDKEHQTQRLVKQLEKLGYTVQLAAATA

SEQ ID NO: 156584 - protein, 365 aa, unidentified
MPSVAHLGPTHLGLDVHKDTISVAVLAPDRDGPDVERIPHDEASVRRLVGRFPDPRWLRACYEAGPTGYELARLLHRMGVRCEVIAPSLIPKAPGDKVKTDRRDCRRLARLHRAGELVAIRVPTIQEEAVRDLCRARADMVEDRTRARHRLSKFLLRHGRPWRGGNAWTLTHERWLLAQRFDQPALAATYAHYRAVLQGRDAQLEAIQADLAVWYDAPPFADAVHRLAAYRGVTRLGALTLASEVCDWRRFPRAAAFAGFCGLVPSEYSSGTSTWRGHITKCGNAHLRGQLVESAWAYQHRPAVGVDLHSRQQGLDPQVVARAWAAQLRLCGRFRRLAARKDSKNVVATAIARELAGFLWAEMAA

SEQ ID NO: 156585 - protein, 347 aa, unidentified
MKETYMAIDAHARRCVLGVMDESGRYLGDWQFPTTESELVRHVAAVRAPHKRLAIEEGPLAYWIAQTVRAYVEEVVICDPRENALIGLSAHKSDQVDTPKLCRLLRLGELKRVYHPAEDHRAVFKAAVQAYLDLVQEQARLKQKIKAKYRAWGVAVHDTTKVYHPKRRAAYLAQVALAPIRAQLERLYAVLEAARQAKREALRQVVDLGRRYPEIAEFAKMPGVGVVGAHVFDAYVQTPERFAGKRQLWRYAQLGLCERSSDGQPLGRKRLDRAGNSALKAMSYHVWLGALRCRDDNEIKRFFEASQERTHDKTHARLNTQRKVLASLWGLWKRKEAYDPQKFLGTA

SEQ ID NO: 156586 - protein, 352 aa, unidentified
MITIGVDAHKRVHAAVALDDAGGELAQWRGPNSAEGWRQVAAWAAALGPDCRWGIEGAWNYGRGLAQFLVEAGVVVYEVNPRWTAQRRRTARARGKSDRLDARAVALLVRGEASTLPAVAADDATATLELLVTERDDAVAEATRLRNQVHQVLFHLDPEYAAHLPKLRTKAGLRALERYETDDRRPLQQQRAGTVRRLAQRLRLAQEHARFLAAQIRELAAPRFAPLAQICGIDLLTAGTLAGILGPGRRFATDAQLAAYAGAAPLEASSAERVRYRLNRGGNRRLNAILYRIVLTQSRHAPQAQAYLARRMTEGKTRREAVRALKRFVVRAIWQRWQECLALQAAPAPLAA

SEQ ID NO: 156587 - protein, 370 aa, unidentified
MNSIVYVGMDVHTTNYTLSCYTIENNQDFATVKMEPDYRNVLKYLEKVQENYGDSCEFRCGYEAGCLGFTLYHQLTEHNVKCVILAPSTMPSKKGEIKTDKRDAMKIARCLAYNTYSAVHIPTKEDSDVKEYIRMRDAHKMALKRVKQQILAFCKLHDLRFDGGKNYWTLKHLAWLKNMPLDDMLREILDEYLVTFNWFTDKIEHMDKRIAELAAGPKYAEKVKKLSCMIGIRTHTALALIVETGDFSRFAKAGQYAAFLGLVPGEHSSSDDRNQLGITKAGNTHLRRLLTEAAQCYGRGRIGYKSKQLKERQAGNSPKVIAYADKANERLRRKFYRMVLKNNKRHNVAVAAIARELACFVWGMMTGRIA

SEQ ID NO: 156588 - protein, 385 aa, unidentified
MTFTTTVSSIIPGQFDIFAGLDVDKKSMATTFIDHGTLFKSLRLPYSSTQLLNYVDKHFPGKRIAFVYEAGPTGFGLHDDLVAQKRTCLVVASSMVATAPGNRVKTNRLDSKKLSVQLRGGELRGIHVPGRSYRELRHLVQLRDTQTRQLRATKCRIKALLLYEGIEFPDPQGNWNAAAIAQLRQLPCPSEVRFKLDHLIGTLYFHFNSAALVQKRIRQFCQNDAELRQSISLLASLPGVGWITAAHAVARFGDWREIKNIRQLGGFLGLVSSEHSTGEKANRGPITRVGDSRLRNKIIQCAWVAIKKDPELRAFYRSVFARQPKKLAARKAIVAVARKLTMRMYVVLKEQRPYIIRPEITTAPLTAEETVSPRERLDASQNEQL

SEQ ID NO: 156589 - protein, 355 aa, unidentified
MEKAYDGRQVVGMDLHRRRSVLVRITEDGRRLGMARITNSPEELRAQIARAGESPKVVLEATYGWYWAADALAAAGAEVHLAHPLGVKAFSYRRVKNDERDAADLADLLRMGRLPEAWIAPPRVRELRELTRYRHKLVGLRTSCKTQVHAVLGKLGIPVGCSDVFGKAGSAWLDELTLPQPYAGKVTSLRQLAGQLATEIAMLSRVIADLLADHRGYQVIQQLPGIGPVLAAVIIAEIGEVTRFKNAGQLCSWAGLTPRHRESDTKVARGHVTKQGSRLLRWALIEAIQRIPADSVIGSVKAAIVARRGKEARNIAKVAAARRLLTLVYYGMRDGQIRCLTAGQPPVTQPPARAA

SEQ ID NO: 156590 - protein, 386 aa, unidentified
MRIALGLDLADKKCAAYAVPVGKAKKAQREFLDGFNKDFRRVPTTKEDLQRMVDVLKDESDGIHVLIENSTITHKVYWLLVGMGCEVLVAQSADLLRITESVTKNDDNDAMELAAYMRRRLNGEDEFRTVVMTPPEIMAKKMFIRAIYVDKTYLSECKKRLRFRLKVMGADLRREYKDISCERSLTQLRETGDPYLCYEVAVIRATKSRIQDGERYISTLFKDDPYFDLLMTIPGFGLEISAYISTIIIDIDRFDDKKQLEAYSGLVPRQRSSADSDPNCRTTHHGDEWAREFLGYAVKAHVMWAKDSVVTIMYNRLRARGMPYKKVITACSRKMVDVVWSVLKNGRSFTSDQNVLRQARGAAAEIERVDSELSEQELDAKYAEAA

SEQ ID NO: 156591 - protein, 367 aa, unidentified
MSSVASQAGLIHLGMDTSKNTIVVATLLPGEDSPATDRIANEEAAIRRLVGRFAGRWVLRAWYEAGPGGYELWRLLASMGVACQVVAPSLIPKGSSDKVKTDKRDSRRLARLGRAGELTPVRVPSPAEEAVRDLARARDAMLADRKRAQQRLTAVLMRHGRIWRGATYWTAAHRAWIAAQRFGEPALAAAIGYYRATLAVREAELAALEAELMPWAAREPLAGPVARLGCYRGIAELGALTLAAEVVDWRRFPAARAFMSYTGLVPAEYSSGERTRRGHITKAGSEPVRTALTEAAWSYRHAPAIGAGLRRRQAGAAPDTLARSWTAQRRLHDRYVHLVHHGGKAAPEAAVAVARELAGFVWAEMTA

SEQ ID NO: 156592 - protein, 375 aa, unidentified
MSQSSTLVIGIDVHKNSMAVADVAQEHGAEVTYRGTMGTHQGDLDQLIRQMPSKATHLICVYEAGPGGYWLYRDLTQKGDACWVVTPSLMPKKPGDRVTTDRRDAMPRARLARSSALTAVDVPKVEDAASRDLTRAREDTIRALQSAKFRLKAFWLRHDIRYTGRATWDPAHLRWLSAVVCPTPTPPIVFQAYVRAVHEPTARLQRLEQALQDQLKSWRLHPVVEALQALRGVQFTVAVTMVAEISDLTRVDPPRELMKCLGLIPADYASGEPRRQGSLTKAGHAQAQRALVEGAWAYRYPTTVSRHRQLRRETPPKVIHDIRGKAQVRRYQRSRRLVSRGQHPTVVTVAMARELAGCMWAMAKQVPVTPYSQDA

SEQ ID NO: 156593 - protein, 355 aa, unidentified
MSQEKYIGMDVHQATISVAVMDSKGKLIMECILETKAATILEFIQGVRGTLAVTFEEGTCAAWLHDLLKPHVSRLVVCDPRKNALLKDGSKSDRIDARKLAELLRGNQLSSVYHGDHGLRTLKELGRSYLTITTDLTRVMSRIKALYRSWAIPCSGTTVYAARHRSEWLAKISEPGVRLRAERFYQQLDMLRALHQEARRDFVAESHKHPAVKLLRQIPSIGPIRAALLVALLQTPHRFRTKRQLWAYSGFAVETHDSGEYRVVRGKVRRNRERISVRGLSDNYNRDLKNLFKSTAISASIRPGPLRDFYLTLLAKGMRPTMARLTLARKIAAITLTIWKKGVDFDAKQLDQQAA

SEQ ID NO: 156594 - protein, 403 aa, unidentified
MNMNAVGIDVSKGKSMVAILRSYGEIISKPFEVKHTVSGIRSLIEQIQSIDGESRIVMEHTGRYYEPLVRELSKADLFVSAINPKLIKDFGDNSLRKVKSDKADAVKIARYTLDSWTELRQYSLMDEIRNQLKTMNRQFDFYMKHKTAMKNNLISILDQTYPGANTYFDSPAREDGSQKWVDFSATYWHVDCVRKLSLNAFIDHYQKWCKRRKYNFSRSKAVEIYEASKELVSILPKDDLTKLIIKQAVEQLNTASQTVEQLRTMMNETASKLPEYPVVMAMKGVGKSLGPQLMAEIGDVSRFTHKGAITAFAGVDPGVNESGSYEQKSVPASKRGSSTLRKTLFQVMDVLIKTKPQDDPVYLFMDKKRAQGKPYYVYMTAGANKFLRIYYGRVKEYLSSLPE

SEQ ID NO: 156595 - protein, 482 aa, unidentified
MKSHSSEKSKNITDRPMQRRWNEMNRQQRRETMRKIQSHDLRLEVVHPDASGIDIGNESHYVAVPPDRNGQPVRRFGCTTGELREMAQWLKQCRIQTVAMQSTGVYWIAVFDILEEAGFEVYLVNAKDTKNLPGRKSDVQESQWLMKLHSFGLLRNSFRPTQEIRRMRTYWRQRNDLVQSAARHIQRMQKALTQMNIQLANVLSDVSGVTGQAIIHAILAGERDPHKLAALRDPRVKASEAQIARYLEGHWQEDLLFVLQQEQQGYEFCHRQIAECDRELEQYLQQCEDRSAGAPLPEEARRGRLQKRNGHKPQFDLRAELFRMSGTDVTKIDGIDVMTATTILSETGWDMSKWADEDHFVSWLRLCPDNRISGNKVIGKGRLPTNNRASIALRLAASTLRLSNTYLGAQFRRLRTKLGAPIAIKAMAAKLARLVYRMLRYGMKYMDRGATFYEAQHRARQVSHLKWKAHLFGFRLVEAPTP

SEQ ID NO: 156596 - protein, 330 aa, unidentified
MKKWEFTLGVDVSKNTLDISCSELNEHVKIKNGTEGFTVFLKWCKHFKIDLKQSFLVMEFTGGYEYKLIQFCESRGILYTRIPGLAIKNSLGITRGKNDKVDSSRIAQYGEEKHKSLTPSRPLNPAIVSLKELLSFRKRLVRENAGYQATIKERIHMYGENKKDIIVKKLEQKLKGNIKNIAAIEAEMLNIVAQDEKISINYSLITSIKGIGKINGLMTIAFTENFTSFTNPRSYAVYVGVVPFDHSSGISIKGRKRVSHIANKELKQELNQAARSAMEWDKEMRSYGEEKLKTKCYKIVLNNIKFKLILRMFAVVKRGEIYVENYRNVA

SEQ ID NO: 156597 - protein, 300 aa, unidentified
MTIVMGLDQHRGQITAEWVDTETGEIERARVAPAHREPVARFLHRFDGAELEVALEATTGWRFVVEEVRAVGGRAHLAEPAETAARRGPKKRAKSDRADARHLRELLMVARLPESWIPPDHLLDLRARVRLRHTLCDQRGEWQQRIQAVLYHHGLPARRDLLTRENRAWVERAALPAAAREQVTVALAIIDALDVQIAPLDRALRAYARRQAGCRALMGHYGIGCLTAVTILAELGDCRRFSSSRHAVRYAGLDITVHQSDQRRAPGHLSRQGPPALRWALFEAAQVARRPGSPSSESVW

SEQ ID NO: 156598 - protein, 375 aa, unidentified
MSVAVTRMDQDTRTLYVAFELGEKEWKLAMSPSLAVRPKLRALRSRATARLLEILERERQRVGAAQVVSCYEAGRDGFWLDRFLRAHGIENRIVDSASIEVRRRARRVKTDRLDAQKLLTMLHREALGEENLWSVVHVPAVADEDARSLQREYRTLVKERSRSSNRIKGLLASQGIVAPRIDGQFLPWLAAARLWDGSAIPSGMRARIEREFARWRFTRDQVLVLEKERRDRTKDETDRSLEKVRALFALKGIGLGAAWTWGLEFFTWRDFRNGKEVGALSGLAPTPYQSGDSSHELGISRAGNRWVRGLAIEIAWGWLRHQPDSALTRWYNERFARGGPRARKVGIVALARKLLVALWRYVETGALPEGAVLKA

SEQ ID NO: 156599 - protein, 436 aa, unidentified
MRGCRCSMIMGFTKPIEHFNLQRKKVITMNTLYVGIDVSSKSNVVYLMLPNGDKHSNFSVANSHEGSTLLVKKIYSALTSHSLDTVLIGLEATSVYGDNLVYFLREDATLAPFNRKIHVLNPKQVKKFHDTYNDLPKNDYVDSFVIADCLRFGRINKEVYMGEYRYKALQNLTRARFFAVQNLVKEKQRFMNVLFKKYSTMTQEKVFSDAFSTTALAVYDEFESAEALANMDLHELTDFIIEKGKNRFPDPDAVAKAIQKAARSSYRLPRTVNDSVNQVLSISITSMKALESQIKEFDKAIKALMELLPNVLISIPGIGPVYSSGIMSEIGDINRFDNQASLAKYAGLAWKQHQSGGFEAEVTRLIPLGNRFLKYYLCEAAFSLVRCDKEYSDFYHLKYKEVNRCQHKRALALTARKFVRLVFRLLKDNRLYCPAK

SEQ ID NO: 156600 - protein, 321 aa, unidentified
MKGKKKEGQWIGIDVSKRKLDIYIRPTGKLFQVGNNVIDIISLLTQLKAYRVELVIVESTGGMERLVHTILAKAGLPIVVINPKRVRDFAKATGKLAKTDKLDAQTLAHFAEAIRPDVRAMATDETQDLQELVTRRQQLVEMLSAERNRRSSARSDKSRDDIDSHIEWLKERIKSLDSDIQSHMEQSQSWQQQVKLLESVPGIGTVTASILIALLPELGQLDRKQIAALVGVAPMNFDSGQMQGKRLITGGRAAVRSALYVATLVATRHNPVIKAFYERLVGTGKAKKVALIACLRKLLVILNAMIKHQQDWQPPATSVTT

SEQ ID NO: 156601 - protein, 323 aa, unidentified
MSATTTTATKVYAGVDVSKGHLEVFVLPTGERFSVPNDDSGVEELLARLDEPSSPALVVLEATGGFERPVAAALAVSGLAVAVVNPRQARDFARATGKLAKTDRIDAESLARFAEAVCPAPRPILDEEARALGEILARRRQLVGMLTAEKNRLLTATTRRVKKRIEAHIRWLEKELTRANGDLQEAIEESPVWRENEALLRGVPGVGPVLARTLLAELPELGELKNKQLAALVGVAPLNRDSGILRGRRTIWGGRGVVRAALYMGALVATRCNPAVKVFYERLLAAGKPKKVALVACMRKLLVILNAILRNRTPWSPSHALAP

SEQ ID NO: 156602 - protein, 426 aa, unidentified
MNYKQNFKIMQITDKTLVVGVDIAKKVHFARAFDWRGIEVDKTISFKANSRGFGEFMEWARKTAEKNRKNKIVVGIEPTGHYWFTFAQAVIEESVMLVQVNPFHVKNTKELDDNTPSKSDRKDPKTIAMLVKDGRYQIPYLPKGNYAELRKANNLREEWLKKMWTIKNKVKRWLDTYFPELLDVFSAWEGKTAVMTLERMALPTKITGLTAEEILTMWREEVKRGVGIKKAQQLLEAAENSVGIKEGLGIADYEIRLLMKEYKEIRQIMDELEGKLEAIVMTIPGVENFLEIKGIGIKTVGGFFAEVGEIRRFTHPKQIIKLAGLNIRENSSGEHKGKTTITKRGRSRLRALLFRAILPMTAKNKEFNELHKYYTTRKDNALKKMQSLVVLCCKLIKVVYKLVTEDVKYDPEKMLKDIHRDEAPAA

SEQ ID NO: 156603 - protein, 368 aa, unidentified
MDSMTQVEGPIHLGLDVAKNAIVVGVLLPGRESVDVDRIAHDEASVRRLVDRFADNRSALRSCYEAGPTGFGLYRLLRSMGVACDVVAPSLIPRSPGDRVKTDKRDARRLARLHRAGELVAIAVPTAEQEAVRDLCRARSALVRDRRRARQRLDKFLLRHDRVYRAGTAWTARYELWLGGQRFDDPALRATYGHYRGVVQARDAELTAIEAALAPWLDRGPFAAATHRLACYRGIAYLGGLTLAAEVFDWRRFGSAVQFMGFTGLVPGEYSSGESVRRGHITKAGNGYVRTQLIESAWSYQHHAAVGVDLKRRQRHADPSTIARSWTSQQRLCGRFRRLAVRKTDKKTVVTAIARELAGFVWAEMTAG

SEQ ID NO: 156604 - protein, 341 aa, unidentified
MEEYIGLDVSMKETSVSIRQAGERIWRGKCASDPRVIAELIRKRAPTVKRVVFETGPLSIWFYHSLRTEGLPAICIDARHAKAALDMAANKTDANDADGLAQLAEVGFFREVRVKGFDSMLTRTLVAARTRLVRITTELSNQIRGVMKTFGLLVPAGKGSTFEKNVRSLLADQDGLASIVLPMLEAWRGIRIRAAELGRQLVRDARQSQACRILMSIPGIGAITATAFTTAIERPDNFKKSRSVGAWIGLTTRRYQSGEVDYDGHISRRGDRHLRGLLYEAAAVILTRSSTDSTLRTWGLKLRERIGFKRAAVALARKLAVIMHTMLKTGELFNPNAGAAA

SEQ ID NO: 156605 - protein, 401 aa, unidentified
MVSDFRKGRYNLMKIYVGIDIAKLNHFAAAISSDGEIILEPFKFTNDADGFQLLVSKLESFDKNSIIIGLESTAHYGDNLVRYLVAEFYQVCVLNPIKTCQMRKNNIRKTKTDKVDTFVIAKTLMMQDDLRFVSFYDLDMMDLKALGRFRQKTIKQRTRLKIQLTTYVDQVFPEIQYFFKSGLHQHAVYALLKEAPSPKEIASMHMTHLANLLKVNSHGHFTKEQAKELRVLAQKSVGANDSSISIQITQTIQQIELLDSQLEKIEAEMTDIMRFNDSVIMTIPGIGYINGGMILGEIGDIHRFSNPNKLLAFAGLDPSVYQSGNFQAKTTRMSKRGSRVLRYALVNAAWNVVRNNATFKAYYDAKRAEGRSHYNALGHCAGKLVRVIWKMLTDEVEFNLE

SEQ ID NO: 156606 - protein, 360 aa, unidentified
MTIVAHAYPFIIGVDTHARTHTLAVLVAATGELVATEQFPTTDAGLDRAVLWAARRTGGELSALWVIEGVASYGARLASTVNRAGFEVVEAARMDTRAHRGAGKSDPLDARRIAAAVLSLEPEQLRRPRSDDGIRAALRVLVTAREHMTTERTATVNALTALLRVAALGIDARKSLTTKQISDIARWRSRVEDVATIAARAEAARLAKRVVALNEELTANHAQMIDLIHASKAAVLLDKTGIGPVTVAVVYTAWSHAGRVRSEAAFAALAGVNPIPASSGNTIRHRLNRGGDRRLNRALHMAVITRMTHDPDTRAYVERRRAEGRSTKEIRRCLKRYLARHLYRTLQRLHAEPASIPQAA

SEQ ID NO: 156607 - protein, 344 aa, unidentified
MEVLIGIDPHKAANSLAVMDGRGEVVEQARFATNRAGLRSLDRFGRKFPKRRWAVESANGLGRPIAQRLVAQGESVVDVPAKLSARIRLLSTGNERKNDNLDATYTALAANGGDSLTEVLEEGHAAVLRMLSDRRDDLVKERTRTLNRLHVLLRDLVPGGAKRNLSAGNAAKQLRSVKPSGSAACARRQLACDLITDVRRLDRQIAELERRVRAAVKEARTTLTKLFGVGPIMAAKIIGQVGTIARFPTKAHFASYTGTAPIEASSGDVVRHRLSRIGNRKLNHALHMIAIVQIRHDTDGQAYYRRKVGEGKSDKEALRCLKRRISDAVFKALSADLESTSVFT

SEQ ID NO: 156608 - protein, 364 aa, unidentified
MLIIGCDYHPGFQQIAFVDTDTGELSERRLEHREQAEQFYRELKQQNPAVRVGMESSGHSRWFERVLHELEFELWIGDPAEIRTKRVRKQKTDRQDAQLILQLLLENRFPRIWVPDAENRDLRQLLWHRHRMVQMRTRVMNQLHVVPLNEGLRRKKALWRPAGRKELESIALAPWASRRRQDLLDLLDQLTPKIQELTRALEEEVEKRPVARLLMTHPGVGPLTALAYELVIGTPERFHCGKQLASYIGLVPTEESSGNRRRLGHISKQGNVLLRFLLVEAAQVTVRSQQEWRSKFFHLAMRRGRKIAKVAMARKLAVHLYWMWRQGSDYGQTQKLGSHAGEPGHPDGVQSITDVMIGHPAPSK

SEQ ID NO: 156609 - protein, 392 aa, unidentified
MFFVGIDIGKNNHVASMMDETGKVVFKAFSFPNTSDGGNSLSSKLASYSSATADFEIGMEATGHYWLSVYSFLFEKKFLLHVINPIQTDGWRRGTEIRRRKNDIIDSVLIADLIRYGRFVETRLADEDLFSLRTLTRFRTYLVESISDLKRKVVCVLDQVFPEYQSIFSDIFGKTSKEILLQFSSPIDFESVSSETLAELLAQLSRQKVGTAKAEQLKAAASSSFGVTFAKNSFTFQLKTLIEQISFIEKQVKETEAEISGIMEKLESPITTIAGIGTVTGAAILSEIGDISKFDSPRKLVAFAGLDATVTQSGEFEAAHNVMSKRGSPYLRKAIFQAALIASFKDPVLSVYYQKKKAEGKHHLTCVGAVARKMCNIIYAVLKNNRPYVPKV

SEQ ID NO: 156610 - protein, 360 aa, unidentified
MISERTSVGLDVHARSVVAAALDGVTGEVHRRRLTPDPGEIASWVSSLPNPVRVTYEAGPTGFGLFRFLTAAGVECLVAAPSKLQRPSGDRVKTDARDALHLARLLRLGEIVEVTVPSVAQESARDLVRAREDTRADLMRARHRLSKLLLRQGIVYSGGQPWTVRHDRWLRSQAFPERGLQLAFESAYETMIFTLARRDRLDAAITEMASDSEFTDVVHRLCCLRGISTLTGFGLATEIGDWHRFTGSTIGAYLGLVPTEHSSGASRSQGSITKTGNTHARRLLVEAAWHHRRTYRTPGVTMRTRWEQAPPAARARGHEGNRRLHHRWQVFNERKKKPVIANVAIARELAGWCWSLATLE

SEQ ID NO: 156611 - protein, 355 aa, unidentified
MSSNIKYIGLDVHKEAIVIAVLDGTGKQVMESIIETKAATLVQFLQGLRGELHVTLEEGAWAAWLYDVLKPHVHELVVCNPRRNALLKEGSKSDKVDARKLAELLRSGMLRPVYHGENGLRTLRELARSYQTISKDLQRVMNRLKALYRSWGIPCGGTKVYAPRYREEWLNKIAHAGVRRRAELFYQHLDGLQVLRRQVRNEFLAESRKHKAVKILRGIPCIGPIRAALLLALMQTPHRFRSKRQLWTYSGLGVETHDSAQHRYVEGRLQRSKKPQQVRGLNQNHNHEMKEIFKSTATSASRGGPFGDFYAGLLAKGMKPEMARLTLARKIAAITLTLWKKGGRFDAEHLKAQAA

SEQ ID NO: 156612 - protein, 399 aa, unidentified
MHKKLIVACFKKGNTQEIREFGATTRELLEMADWLKDGGCEMVAMESTASYWKPLYNIFESSDLNAIVVNARHMKAVPGRKTDVKDAEWIADLLTHGLLQASYIPDKDQRELRELVRYRKSLVGERNRELNRLQKMLEGANIKISGTITDINGKSARNILEHILSGKQIDSAEYDILYEKKVIAHNLKASKEQIIDDLNGVMSDIQRKMMRLLLKHLDELNAIIKELDDDIDSFMKPQEKQAAKVIQDIPGIANTSAQAIISVLGTDMERFPSDRHLASWAGLCPGDNESAKKRKSGKTRKGNALLRETLVICAHSAVRNKKSYFYAQFMRISAHRGKKRAYVAIAHTILIAIYHILKEGVTFKDLGADYYNQFNKERKINAYLKKLKALGWEAPVVAA

SEQ ID NO: 156613 - protein, 364 aa, unidentified
MAVSRLSPMEPTKEAPIIMLHVGLDLSRRRLDFDLLCEDGSRLERGAVPPDADGLRGLARRVEVFDEPVCAALESMNGARFVHDRLEELGWQVEIADAQKVKGLAPLACKTDRIDAWVLAELSRRELVPAIWLPDPAVRAERERARFRLHLVRHRTALKNRIHATLLAFGVPCPVSDLFGVAGRELLDRLEVPEPWRGTIDASLQLIEDLDGQVRSCERELRALGADHEYAPLLMSAPGIAWVLGYTIAAEIGDINRFESPSKLCGYTGLCPRVHQSGERDHRGSLAKNGPKYLRWALIEAAVHAACSPVYRDRYQRTAKRLGRQRGKKVARVDIARKLAEAIWYMLTRNQPFAPAGATTPLAA

SEQ ID NO: 156614 - protein, 471 aa, unidentified
MAIRVGIDVACRTAHRAACADASGQLLWRNVRFQTNAEDLELLWRRLPEGEKDITVVMEPTRNAWVPLAAWFRRHGATVIMVPPEQSADLRAYYNKHAKTDRLDAELLARLPALHPEGLHAEEGLGCAEPLRRAVKIRSNLVRRRVTCTQRLDALLELLGPEWIAALGTVMTATVLLFLSRWSDPHQVLRLGQRRLTDWLIRQSRGHWREAKAENILNAAKATLSLWGDDGMDFAALGADIATEAELALDLDRQIKALDQRIARHYDQADPQLIALSAPGVGPVLAAQIIGRLGDPQRFTSLAAVRSYSGLVPRQNSSGVVNAVAGPTKQGDACLREALFLAADQARRTDPTLAARYHRLMVENGKHHTSAVCSVAAVLLTRMAACLRKGEPYALHDVDGTPITAQQGRALVKARWCVPEEVRKARRSVQRSSPRGQLKAPKGGKRRGGSTESGVDTRSKMSTTPTPSCTN

SEQ ID NO: 156615 - protein, 358 aa, unidentified
MQLQRKELSFKNEKIYVGFDVHAKSWKVTILTEHLLHKTFVMPPSPEKLHEYLTKHFPEAHYYSAYEAGFCGLWIHHRLTALGINNIVVNPADIPTTQKEIAQKEDLRDSRKIAKSLRNGSLTGIYIPQESTLSERSIVRMRSQIVKDLNRCRCRLKSYLYFFGIEYPEQFAKVQSHWSRAFIAWIETLQISDESGKIVLNLLLSEVKKLRKLLLEVNTHIRNLSRSEKYCQPGNILLSIPGVGITTAMNILTELEDINRFKNFDSFCSFVGLIPSTCSSGEKETVRGITFRGHRLRRIIVESAWIAARRDPALSHSFSLYSRRMESNKAIIRIARKLLSRIYSTLKNKQLYQTGRVA

SEQ ID NO: 156616 - protein, 339 aa, unidentified
MKYIPVGVDIAKHLIQVHFINEHTGEVVDKQLRSRDFLTFFSNREPCLIGMEACGGSQYWARELEKLGHKVRLMQGRFVKAFVMGNKNDVMDARAIWMAVQQPGKEIAVKTEEQQSVLVLHRSRRQLVKFRTAQINALHGTLLEFGETIHKGRAAMDRELPAALERMRVKLPPYLIALLEDQYNRLSELDSLIDGIEKQLISVAKQNETCKRLMEIPGVGPLIATAAVATMGEASAFKSGREFAAYVGLVPKQTGSGGKVRLLGISKRGDTYLRTLFIHGARAAALLTKESGPWITELKKRRPTSVAIVAMANKLARTVWAIAAHDRKYDKNHVSIRPY

SEQ ID NO: 156617 - protein, 352 aa, unidentified
MLIIGCDFHPGFQQVAIFDNLTGEIQEKRLQHRAEAEEFYRSLAGQEVRVGMEACGHYPWFERLLEELGMELWFGDAARVRASVVRRQKTDRRDAEHLLELLRENRFPRIWVPSLEVRDVRQLLVHRHKQVQARTRTKNQLQAMALSHGVQKKRKLWTKTGRAELEQLPLLPYAAQRRQGLLEALDGLEAEIVGLDRRVEQEARERPEAVRLMTHPGVGPVTALAMVLTLGPAERFGSAKQVGSYFGLIPSEESSGGKQRLGRISKQGSSFLRFLLVEAGQTAARLDPHLKRFYRRLAMRKNRSVAKVAVARKLATRLYLMLREGWTYAQLCQAVMQVSPSHSVAGESEPSA

SEQ ID NO: 156618 - protein, 334 aa, unidentified
MKKRYFMGIDVAKATFDFCLFSSNGSRLWKGHFGNSSTGIEQYLSQLQARPFKLKQIHFGLEASGVYGKALVGALHQAGLALSVLNPAQVKFFALSVLRRTKNDTVDAEIIARFCLERKPPATRPLRPIEEQLKVLVHERDSRVAEQSRERNRAKKDPFQLELPELVSRQRQKRLAQLKKEISQLNSAIFELIEADPSLSRQSQLLCSIPGIAQLTAAKLLAELAGKEFASARQLAAYAGLTPAERRSGGTFYGQTHLSKIGNAFLRKALYMPAAVARRWCRALKPWVAILEQRKLHDLAIRGAIMRKLLHIAFGVLSHQQPFNPALVFIPKTV

SEQ ID NO: 156619 - protein, 389 aa, unidentified
MIYVGIDVAKDKHDCCILGSEADKLYPVFTISNNKAGFDELYEKIFSVTDDKTEIKVGLEATGHYSFNLLGSLIDKGLATCVINPLHTNLYRKGLSLRKTKTDKVDASSIAMMLMTDKTLKPYSDTSYHSEELKSLTRYRFDKVQERAKLKSSVARLVNILFPELEKLVPDLHMASVYALLSEFPGASYIAESHLTHLRNVLETASKGHYRRDMAVTIRDAAKDSIGSVMPAKSMELKHTIHLIEVMTEEIDEIEASIKSIMDTCNSPIMTIPGISYRMGAMILAEVGDFSRFSNADQILAFAGLSPSTYQSGQLDSSYSHMEKRGSRYLRYALFNTTKYVCRWDKTFGAYLSKKISEGKHYNVAVGHATKKLIRTIYRMELTGEAYRK

SEQ ID NO: 156620 - protein, 363 aa, unidentified
MPSSTRPTFLGLDVHKNTISAAILRPGDDVADVEKISSDDDAVRRLIARLGSPRQLRACYEAGPTGYELARLLKALGVATEVIAPALIPTAPGDRVKTDTRDCRRLARLYRAGEPVAIRVPTVAEEAVRDLCRARADMVIDRTRARHRLGKFLLRHGRVWRGGANWTLKHQAWITAQHFDDLALEATYSHYRATLSAREAAVSAIDADLAIWYKRPPFDDTVGRLAAYRGITHLGALSLASEVCDWRRFGTAGTFMAFTGLTPSEYSSGERVRRGHITHAGNVHLRTQLVESAWAYRSRPGVGIELRRRHEGLERATVARAWDAQVRLCGRFRRLDERKTNRNVVVTAIARELAGFVWAEMTA

SEQ ID NO: 156621 - protein, 351 aa, unidentified
MIVGIDVHKHSHTAALLDDRGGELGMLRFANRPDGWQTLLRWLGEHGARDVVVGVENAAGYGRPLVGALVAAGHEVVNVPAWRTHRDRHTSGPGKSDPGDALAIAHVVLRKRAQLGPALEPQLIRAVALLETLRRQSVGDRTQAIQRLRAIWTQVDPAAEARVVHPHRHKQLRRLKRIAFGDGLAGQAAARCVRALALEIEQLNTRIAALEAELGALLEQHGNPVADLDGAGPAVAVALIAHGGDVRRFRGDAAFARFCGAAPILCGSGQTGDRHRLHRGGNRQLNAALHRIAAVQARVNPDAKAFLARKRAEGKTAREARRALKRHLANVVYRRLHAWAQTALPDPPLLT

SEQ ID NO: 156622 - protein, 385 aa, unidentified
MPQFSESTQPALDYNSTIIGALELSEKKWVLAVQLPGVSRHSRHVLGAGGDELAAFIERLKARCAAAGRKIARVILTHEAGRDGFWLARFLGRRGIEVQVIQPSSLPVDRRARRAKTDIIDVEMLLRTLMAWLRGEPRVCSMVPIPREADEEARRAHREREDLTGERRSIVNKIDGILATLGVKGYKALRRDRREQLTSLRQPDGDPVPPMARARIERLLDRLDLVLKLIERVEAARDAVLTKEAPANDAEKMIRSLTKLRSIGPDFATLLVREAFVRQFRNRRALGGYAGLGGTPFSSGGSEREQGIGKDGNRRLRAAMVELAWMWLRWQPDSALSTWFRARVGKIGGRIKKIMIVALARKLLVALWRYVTDGVIPDGAKMKVA

SEQ ID NO: 156623 - protein, 348 aa, unidentified
MKYFIGLDAHSSTSTFAVLNEIGECVLRKTVDTSEKNLWHVLESINGERILTLEESTISQWLYLILREKVDRLLVCNPTFVAKKPGAKTDFRDAIHLANELRCGHLREVFHDDSHWAQLRTSVSGYLDIVQEIVRFKNRLKSVFRANGLKTDENSFYKNKERCSEFKNDSARFVSENLFHQIEFLENEKIKYLDWFKNNQKKYRPIRNLMTIPGISIVRANIITAIVCQPERFKNKHQFWGYCMLVRHIQESGGKIYGNKRVHGRRELRDIFIGAAENAMRSDSVLRDYYDSLRAKGTSHKDAKVALARKVASLTLSLLKNNDTYNDNYEEYLKERKRLRLLVGQKKH

SEQ ID NO: 156624 - protein, 413 aa, unidentified
MRLFAGDDWAEDHHDVELMDSGGRRLAKARLPEGVAGMARLHAMIGEQLGEDAEEDDAGQVAIGIETDRGPWVAALIAAGYTVFAINPLQASRYRERHGVSGAKSDAADAHVLADMVRTDSHQLRPAAGDTAQAAAVKVVTRTHKTLIWERARCTQRLRHALRDYFPAALEAFEDLDAADTLELLARAPEPALAAKLTTAQISAALKRARRRGIAAKAEQIQAVLRAAHLGQPDVVAAACAVSVRALIAVLITLNEQVKTLQGQVEAYFGQHPDAEIIASQPGLGSVLGARVLAESGDDPARYASAKARKNYAGTSPITRASGKKRTVLARHVHNDRLIDALMSQAFTALRVSPGARAYYDLQRARGSGHNPALRQLANRLTGILHGCLKTRTLYDEATAWPQHAAATDKTAA

SEQ ID NO: 156625 - protein, 308 aa, unidentified
MIAQNYVGCDISKQWLDFFDETSGRLRRIDNQVDAIAAYVAGLEPSRDFVVMEATGVHDRLLRHALAKAGVPFSRHNPAHTHHYAKSTRRRAKTDPLDARMLSDYGRRYQPEAEPAPSEDVEQLQSLARHRDHLVEMRATAKKHLAEAFNEIVIADLEETIAGLDTRIKAFEGRIAEVIRQNQDTARDHALMVSVPGISKVGALSLLALLPELGKRSPKAIAALVGLAPFDNKSGKLNRRSQIQGGRSRVRRALYMAALTAIRTCDRFKTFYTALAARSASKKLAIIAVARKLLVVLNAIMRDKTAFA

SEQ ID NO: 156626 - protein, 466 aa, unidentified
MKRNRWAKGHKPRQHISLLERINPDVAGIDCGSAEHFVAVPVGRDPDPIQAFQTFTADLHRLADWLAACGVRSVAMEATGVYWIPLFEILEARGFAVILTNAHHVKNVAGRKSDVVDCEWLRELHSVGLLRGSFRPAEAITALRGYVRHRDTLVESMSSTIQRMQKALVQMNVQLPQVITDITGTTGLAILHDIVDGRTDPKQLVLHRDPRCHASPEQFVAALTGNYRPEHVFALRQNLALFEHYQGMLAECDAAVERHLRTLTAQTEPPSTPLPPRRTKAKPRTKEPQFDVRSYLHHLTGTDLSQIDGIGPYQALRLISEIGTDMTRWPSERHFTAWLTLAPQNKISGGRLLSSRTPASANRAAAILRMVAMSLVRTQTALGAFYRRLAGRIGKAKAITATARKVAVLVYRMLKGEIQYQDPGPDAYDARQRQRLLRKLHKRAQALGFTLVAIDTGELLPAEGVS

SEQ ID NO: 156627 - protein, 337 aa, unidentified
MKYSGIDLHSNNSVVTITDEEDRVMAEKRLPNDLTKILDFLKPWKEELAGVVVESTFNWYWLVDGLQEAGYKVHLANTTAIKKYDGLKHSGDETDARHLAHLLRLGILPTGTILPPEQRTVRDLSRKRMQLVRSRTAHILAVENITARQLGARISSNQVKQLTVEAVDQMPLPSDVALAIKANVAVITTLSAQIDLLEKRLQESVRARAEYGFLTSAPGIGQVLATTILLETGPIERFAAAGNFASYARCVDSVHTSNGKKKGEGNTKNGNKYLAWAFVEAANFALRYCPEAKRFYERKKAKTNNVVAIKALAHKLARASFHMLKEKKPFDVKRCFT

SEQ ID NO: 156628 - protein, 370 aa, unidentified
MKNIVYIGMDVHKETFNLCALNGATGEILGEARCASDVKLVKRFIDKIAKKYEEEVQFKAGYEAGCLGYSLHNLLEQHGINCDILAPTTMYSSSKNKVVKNDRLDAKMIALNLANNTYKAVYVPDDEDVSVKEYIRMMDDFKTSLKKIKQQIKAFLLRHGLKYEGKSSWTIAHINWLKNLELTGLLKETLEEYLLQYDVLTDKIERFRQRIEELSHQERYEEPVAQLRCLKGIDTTAAMTIHVEISDFTRFPNAKAFTAYLGLTPSEKSSGEKVNRSGITKQGNSTVRSTLVECANALVKGTIGIKAKRVKARQKGQESKVIAYADQAIERLQRKYHRMIYQGKPRNVAITAIARELACFIWGMETQKMI

SEQ ID NO: 156629 - protein, 405 aa, unidentified
MARVFVGHDWAEAHHDVFVEDEVGKRLAGARLPEGIEGVRRFHELVAEHADEPSEVTVATETDRGLFVGALVAVGYRVLAVNPLSTSRYRERLGTSGAKSDPGDARVLAELARLDAHNHRPIAGDSDLAEAIKALARAHQTMIWARQRQTNQLRSTLREFYPGALEAFDDLDSADALALLAVAPTPALGRALSRSKIASALRRGGRQRRIEERAIEIQTVLRAPQLEAPPIVAQAMGASTGALVAVLGELVTQIAALEIELADRFDQHPDAKIIRSLPGLGMILGARALAEFGDDPNRFDGAKSRKNYASTSPITKASGKHRVVLARYARNRRLADVCYRWAFSAISASPGARVFYDQRRTAGDTHNRALRALANRLVGILHGCLRHGTPYDEHTAWGHRSAAAA

SEQ ID NO: 156630 - protein, 351 aa, unidentified
MIIIGVDYHPSFQQIAFLIEETGELEELRLNHSEGEAEKFYRDLQRRGIGVRVGMEATGYARWFERLLAELGFELWIGDPAEIKAKRVRKPKTDREDARLLLKLLLEDRFPKIWVPSPENRDLRQLLWHRHRLVQMRTRIMNQLQALGMNENKCGKGKLWSAAGRAALEQLPLAFWASRRRQELLELLDRMNPAIEELTAAVEKEAGKRPEALRLMTHPGVGALTALAYVLIIGTPERFAGGKQISNYMGLIPSEDSSGGRQRLGHITKQGNSLLRFLLVEAAQAAARCNPDWRRRYRHLAMRRRKNIAKVAMGRRLGVRLYWMWRNSSEYSPSFEFSSHAGKLETGNGRQ

SEQ ID NO: 156631 - protein, 417 aa, unidentified
MDTLFVNVSGLDVHLKTIQCAVRCRQDSGKLLKEVRSFGTMTRDLRALADYLQGLGVTHVAMEATGVLWKPIWNVLEGRFTLLLVNPRHLKKVPGRKTDVSDAEWIAQLLQCGLLRGSFVPARALRNMRDLTRHRAQLAGEHTRVANRIHKLLEDANIKLGAVASDVLGKSGRKMLRALLSGETDVEKLADMAIGVLRKKIPQLKLALEGNCTEHHRYVLKQLLGHLGYLESQITEFSLRIAQHLDAMLSAEARQRLDDIPGVNRTTIENVIAEIGVDMSIFPDEHHLASWCGMCPGNEESGGRRLRSRTRKGNRWLRRALAEAAWAASKVKDSYLRAQFRRVSAKRGKKRALVAVGHSLLVIIYHVLKKGVKYQDLGPDYFDKLEPERLRRYLVKRLQSLGYDVALTSKNRDAKAM

SEQ ID NO: 156632 - protein, 442 aa, unidentified
MQTLPLLDPRAAGIDVGSETLHVSIAGDTPKVFGTTTGQLHALRDWLQANGVASVAMEATGVYWLCAYEVLDRAGLRVLVVNGRHVKHLPGRKTDLKDCQWIATLHAHGLLRSGFVPPAHIRRLQDYLRLRADHVTLAASHVQHLQKALERMNVKLHDVISSVMGVSGRKVIRASLEGQRDPAVLLGLCDAQIQKHKAAAVQEALRGTWQAEHLFALKQALALWEVYQEKIAECDREIEQVLRELAGPEPTAGTPKAGKPGGPNTPQIAHLHAMLVRLCGDKDVTVLPGLADHTLLSLVGEVGTDLKRWPTEKHFTAWCGLPPGSKQSGKRRGHTARQRNRAGRLFCLMARSVGRTVDKALGGFYRRLKARRGGLVANQALARKLAALFWRLLVRGTSYVEEGLKKYDRRVVETETRWLRKLARKHGLTLTPNPATQPQVHG

SEQ ID NO: 156633 - protein, 358 aa, unidentified
MNNVKSSRIDFTGQPIYIGLDVHKKSWSVSIFSKYGEYKTFNQPPEVDKLLHYLRHHFPGGDYRSVYEAGYCGFWIHDQLREKGIQCLVVNPADIPTKNKERRTKRDPIDCRKLARSLRNGEIEGIYVPCRPKLEDRSLIRTRQSMVRKQTRCKNQIKGMLLFYGVGMPEEREMGHWSRRFIQWIEGIRMERASGDIALKAHLEELSHLRQLIASLNRAILRLARTQEYWPLVRLLKTVPGISTLTAMILLTELGEILRFPSLDELSCYVGLVPDTQESGEKEYVGSLTQRRHSQLRWLLIEASWVAVRKDPTLLMAFEEYCRRMRKTKAIVKVARKLLNRIRYVLKNQAEYVPCVIQ

SEQ ID NO: 156634 - protein, 372 aa, unidentified
MEEISALYIGLDVSKLKISVALADDGRNGEVRFFGDIDARPATIAAVAAKLAKRGSRLHFCYEAGPTGYDLYRQIVALGHDCVVVAPSLIPQRPGDRVKTNRRDALSLAKLHRAGELTPVWVPDAGHEAVRDLVRARECAMESLRRARQQLLSFLLRHGRVYTGRTPWSKAHSSWLCRQTFEHLAHQIVLAEYRHAIEEAEVRLKRLTEQVTETAASWSMAPVVKAYQAMRGVAFMIAVTFVAEIGDVRRFDNPRQLMAYLGLVPSESSTGERVRRSEITKAGNGRVRRVLIEGAWTYRFPARISRRIEERQDDLPKAVREIAWKGQVRLCGRYRKLIAAGKLKAVTVTAIAREMAAFLWAIGQEVVPVLQA

SEQ ID NO: 156635 - protein, 359 aa, unidentified
MKIVGCDFHPAWQQVAIFDPETGEISELKLLNGDGEAERFYRELEAPALIGIEACGNSQWFIELAERLGHAVWIGDAAQIRASYVRRQKTDRRDAGHILKLLMESRFPRLWTPSAEQRDLRQLLIHRHKLVEIRTRIKNGLQHLALNRGMQKGSRLWSARGRADMEKLPLAGWTARRREDLLRLLGELDRHVDELDQAVKCAAAEHPQARLLMTQPGVGPITSLAFVLTIGDASRFRHSNQVASYLGLIPREHSSGGKQRLGAITKQGNRFMRQLLVEAAQSVTRLDEGFRKQYQARCHHKAKGVAKVAAARKLAVRLYWMLRQNIGYPEIARIESSPRVALRGESHLATVNGRSRIQQ

SEQ ID NO: 156636 - protein, 403 aa, unidentified
MKSKRYTHFCGIDVAKNKHVACILDRDGEFVARSQSFYNNAEGYQHILKRLQDTCPSDRPLIGMEATGYYWYALRDFLVAHGYEVAVVNPIQTHQQAKKGIRKRKTDKIDARHIATLIKNGEHRPALVPDDFAMSCRQLTRLRYRTVGNISRLKLLLWSRLGPLWPEYETLFGDTFCKTSRRLLLTAPTPDDVLAMGREALVELIDKTSRGRYRPVLADRIRESAAHTIGSRRGIEGARIGIRSLISQIGALLPIRQQLDADIESLADRLPAYYFTLPGVTRFLAVSLFGETDPITAFGTSSQLVAFAGLDTTVFQTGQYTGERLRRKITKRGSPYLRHTLWRMAHRACHQEGDLRTYWLRRKGEGLHHLAAVTAAALKLCHVTWRILTDERDYLPERPTRKP

SEQ ID NO: 156637 - protein, 405 aa, unidentified
MPYFCGLDWGSVGHAVCVVDETGAVLLHFEVAHDAAGLAELRKKLDRLAPAGDIPIAIERPSGLIVDALVEAGHTVVPIHPNVVKACRPRYRAAGGKSDPGDAFMLADILRTDGHRFRPLAPCSDEIKALRALVRGRDELVAERIALANRLRSLLDSFWPGAAAIFADVDSPIALAFLQRYPTPESATRLGEKRVKAFLASNAYCGRRSPAELLARLRAAPTGLAAEAEAEAKGEMVGALAAVLERLVGEIAKLTSRIQNTVAELPDGQIVMSFPRTGRICAAQILAELGDVRQRFPSADYLAAEAGVCPVTHASGKSRGVVFRWACNHRLRRAVTCFADNSRHASPWAADIYKRARSRGCDHPHAIRILARAWIRVLWRAWNDGTLYDQKLHNAAVSHNQALAA

SEQ ID NO: 156638 - protein, 317 aa, unidentified
MEVSSIFIGIDVSKARLDVAVHPSGESESAANDKTGIKAVVKRLAKIQPTLIVLEATGGLERQVTQALASAELPVVVVNPRQVRDFAKATGQLAKTDSIDAHVLARFAEAVRPALRPLPDAVTLELRALTARRRQIIEMIVAEKNRRATASKAVGKRIDAHIGWLEEELERADKDLDRSIRQSPIWQENEDLLRSVPSIGPVTSRTLLAELPELGKLKGKQISALVGIAPFNRDSGTLKGRRVIWGGRAAVRSALYMATLVATRRNSVIRDFYKRLKAKGKASKVALVACMRKLLTILNSMIKHKTRWSETFSLHTT

SEQ ID NO: 156639 - protein, 351 aa, unidentified
MQYIAMDAHKKYTLVSVEPIQGGRPQETRIDHEPGMLRGFLERMDTGSPVAVETVGNWYWIVDEIEAAGMVPRLVHARKAKVMMGMVNKTDKLDAQGLNRLQRTGTLPTVWIPPAELRDKRDLARTRMALVAQRTKLKNRLHATLAKYELSVEVSDLFGKKGLEWMGQILSKLPPETQFASRRTLETLGALAEQIEALEGRMKAVFEETDEARLLKTLPGVGFILSVVMTGEIGEIGRFSCADRLASYSGTTPRVAASGGKTRYGGMRTESNQYLKWAFIEAANCVSLNRKKHPERTLSRLYERIRSRKGHGKAIGAVARNLAEAAFWVLKKKEPYRDPAVGSLAVLPTKV

SEQ ID NO: 156640 - protein, 289 aa, unidentified
MKKVTQFHESGKPNPSELLLAIDVSSRSLDIYGRYMQQAEEYEFSDSISNDLRSIAGMLDHYDRHAGVLGYTGLAIVLEPSGRHEQKLTRLAHDRGHSICMVNPERMYKAGVIHHDDDGKSDAQDGKVLFMMARMGKVSRFEPLEESWQQAESSCLHDPGFRMHELLCEQLDHLWESWGHHAHRSEMLGRQMIHLVEKLAEEHRIPPIISGFTELMRAKILAEIGPLERFVHWRQLLAYSGLKIRMRQSGKYQGKDRITKKGRVLLRKLLGQAAFSLTRSDRILGEYYS

SEQ ID NO: 156641 - protein, 345 aa, unidentified
MSNNIHFSCICGIDIAKKVMQVFKVTSDGVVTNTSVSRKDFLEHFRNIPPALIGMEACATSQHWGRELQGLGHTVKLLSPKAVKPYVKGLKNDRNDAEGIYRALIMGVREVSIKSTAVRDLSLLQTMRAKRQRDKVATINHIRGILAEYGLVMGKSVRAFLLNAGTLIARLKESETTSQLVISELEKLLKEVKEIVSRIEELESSIKKIASENKNYDLFRSAPGVGPITAAMMVVLLCNPTVFKNGRDFAAYLGLAPMSFGSGGRNQVTGIPSKYRCHNEARSLLVQCAHSITRLKYKSDWVASILSRKPKKVAIIAIANKLARQLWVMAKKGDKFEKRLVLAAV

SEQ ID NO: 156642 - protein, 340 aa, unidentified
MPLYVGLDVSQKETEICVVDEEGRRIWRGRCRSRPESITEALQRHAPDPARVGMETGPLAIWLWHGLRALGVPVDCLHARHVAAALALQVNKTDANDAHGIAQVVRTGWYRPVVVKSLHSCRVRAVLSARSQLVAMRTSLYNQIRGLLKTFGVVLAPGKGATFEAEVLSGCPTDPLVQDAIAALLAAWRVAGERKRALELQLVRLARGSDTCRRMVTVPGVGAITALTFVTAIDNPERFRRSSDVGAFLGLTPRRYQSGEVDLAGRISKAGDRPARSLLFEAANALMTRVRHESSLRTWGLKLSAKIGSRRAKTAVARKLAVVLHRIWLDGTEFDPAPAA

SEQ ID NO: 156643 - protein, 352 aa, unidentified
MSQKFESAISVIGIDIGKNSFHVVGHDERGAIVLRQKWSRGQVEARFANMPPCLIGMEACVGAHHLSRKLGALGHDARLMPAKYVRPYSKGQKNDFRDAEAIAEAVQRPTMKFVATKTADQLDLQALHRVRERLVSQRTGIINQIRAFLLERGIAMRQGQRYLRAELPRFLATPPDVLSPRIIRIIEDLAGDWRRLDERVESLSNEIEAIARQDAGCERLMSVPGIGPIISSAMVAAIGAGDVFTKGRDFAAWLGLVPKQISTGDRTILGKISRRGNRYLRVLFVQAAWVVLVKVKPTRWGNGLERWIEAAKKRLHHNVLAIALANKLARIAWSVLARGRAFEARKMDQAAN

SEQ ID NO: 156644 - protein, 350 aa, unidentified
MAIISFDSHKRYTLSLVEDAQGRVIAEQRINHERGAIWQYLQRFTPGSPVAVETIGNWYWIVEEIEQAGMEPLLVHARKAKVMVGNVNKTDRLDVRGLNRLQRTGTLPTVWIPPGELRDKRDVVRTRMFLVAQRTQLKNRVHATMAKYALEVKEVTDIFGVRGRQLLEERCKLLPPHTRFALEQQLEQVDGLEAAIDALEKRMREVFAETEEVKLLRTMPGVGFLLAVVIALEIGEVGRFGRAEQLASYAGTTPRVHASGGKIRYGSLRTDVNHYLKWAYVEAANAICLNRSRWPQRHVSRLYERLRAKKGHAVAIGAVARHLAEATYWVLTKKEQYRDPQSSQRSSTEA

SEQ ID NO: 156645 - protein, 342 aa, unidentified
MEQVTIVGLDLAKRVFQVHGVTADGGISIRKKLSRGQVLAFFADLPPCVVAMEACATAHYWAREIGALGHNVRLVPPAYVKPFVKRQKNDAADAEAIAEAASRPTMRFVEPKSPQQQARAMVFRTRDLFVRQRTQTINALRAHLAEHGLIAPQGMSNLANIRRLIDEAAAEVEPLVVETAHIYLEQIDDLSSRILKLEATLKQEAARTDASSRMMTMPGVGPITAMAIEAFAPSLCVFRRSRDFAAWLGLVPRQHSTGGKQILGRTSKMGQRDIRRLLIIGAMSVIRWATRKGTTPGSWLHSILQRKPRKVAAIALANKMARTLWAMETRKEDYRDPRLTAA

SEQ ID NO: 156646 - protein, 352 aa, unidentified
MLIIGCDFHPKFQQIAYVDRETGEYGERRLSHPEEATRFYRSVAEKKVRIGLEATGNFRWFRRLLEELGIEMLLGDATAIHASIPRRQQTDKRDARHILSLLVEDRFPKVWQPPVENEETRQLLLHRCRLVRLRTRVKNQLDAMAKNEGLLRAQGWSKKRRQEIEALPLSGWYAERRKDLLALHDEFDKRIAPLDEAVRKAAENNVDARRLMTHPGVGPIVSLAYVLIIGDWQRFPRGKYVASYLGLIPEEASSSDKRRLGHISKQGNELLRWLLVEAATLAQRHDPNWHRQYLRLSMNKHHGVAKVAIAHKLAIRLYWMLRSGQDYEQVKERGSHAGQSVSSSGCGSRPSN

SEQ ID NO: 156647 - protein, 355 aa, unidentified
MTQHSYRLKDYETFIGLDVDKNSFAYTVGDKFQLNNSKKMPSNPEHLYNYINKHFDPTKVVCAYEAGPTGFHLYDYLSRKDILCLITSPASVPTARNEKVKNNRIDSVKITNYLMSGKLKPIRVPLGSYRELRDLVKIYENYARDRKVARQRIKALILYHNLHTALKDPDAGWSLNYIKELKNIECPFGVRHRLDMLIEDLEYARKKLLSVHRTLKSFCCENDEINQYIQYLQSIPGIGFTIATMLLGKIGDPKYLQNPRELAAFIGLNPGEKSTGDSENRGSITHLGDKTLRFFLVQAAWVAIRKDTQLDQFYNRIKSKNNPRIASKIAITAVARKLTQIIYRVLKDERNYIQH

SEQ ID NO: 156648 - protein, 374 aa, unidentified
MEKGIKYAGLDVHKKDIRVAMVGAHGSEPVEWTVTNDLRAVRRLARKLNRDTGGSVQCAYEAGPCGYALKRQLGSEGIVCQVVAPSLIPVKPGERIKTDRRDARKLAEMLRAGLLTEVRCPTPQEEAVRDLCRCREDAKQDQLRARHRLGKYLLRRGLVFTAGRNWTQRHRVWLRSLRFEQEAERVVFEDYLLAVELVEERLRGLEQKLEEISRGEIWAERVGWLRCFRGIDTLTAITILAELHDFRRFRSPRQLMAYLGLVPSEHSSGEAVRRGGITKAGNAHARRVLGEAAWHYRHRPAVGVSLRKRRKGQPAEIIALADRAQRRLHRRYWRLVMKGKPTPKAITAVARELAGFLWAALYLYPQLRDAGQLS

SEQ ID NO: 156649 - protein, 364 aa, unidentified
MTNPATNVIGGVDTHKHVHHAAIVTATGELVATAEFRADRGGYRELLAWMKSYGSIQSIGVEGTGSYGAALTQFLVNAGHRVVEVNRPNPSARRADGKSDRLDAEQAARAVLGKTATAVPKDKTGPVEVIRILRVTRSSAVKARSQAFNTLHGITIGAPSPLRDELIELTKRTLVNRCLGLRPETAQLIGLTSDPDRLLVAATKTTLRDLARRWKALDNEIKQLSRQIKDLVELVSPELVELFGVGTELAGQFLVTAGDNPGRIRNEAAFAKLCGVAPQPASSGRTNGRHRLSRSGDRAANSALYTVTIVRMRHHAPTIEYVQRRTAEGLTKREIIRCLKRYIAREVFKALPRTDSEQSLPKAA

SEQ ID NO: 156650 - protein, 347 aa, unidentified
MKITVIGIDLAKNVFQIHGVDERGKTVLKKKLKRDQLAAFFVNLPACLIGMEACGGAHHWARKLQSFGHEVKLMAPQFVKPYVKSNKNDAADAEAICEAVARPNMRFVAVKSIEQQSLLALHRVRQSLVRARTAHSNQIRGLLAEFGLIIPQGIHNVPKLVPELIEDAFYELTGAFRILIDDLLNHVKNLSQRLDDLDGQVLTGHRANEHSCKLDEVQGVGPITASAFVATLGDAKAFKNGREVSAWLGIVPRQHSSGGKEKLLGISKRGDKYLRTLLIHGARSVIQANERKRGTPAEDLWISSLVNRRNKNVAAVAVANKNVRIMWALLAHDRDYRKDYKRDVAPV

SEQ ID NO: 156651 - protein, 434 aa, unidentified
MNDEEQIVAWIGVDWADEDHKVWEYNVGTGGKDNYAVPHSAESLQEWVRQLRTRYGGRRVAVVLEQARGGLVYALMGTDFIVIYPVNPQSLAQYRKALYPSGAKSDPADAELLGEMVRQNPGRFRTWVPGDAQTRTLQLLTEGRRKLVEDMTARTNQLTSVLKTYYPQALEWAGDLGSEQSCAFLEKWPTLAELQKSRPFRIREFYGKYGRPSREVLNERVAQIQKAQPLTLDGAVVTAAAMMVQALVAQIRPLRGAIEKYDHEIERLFRQHPDRVVFESFPGAGKVLAPRLLAAFGADRDRFQTALEVQELSGIAPVTERSGKMIWVHRRLACPKFMLQTFHEFANCAWRFCAWSKLYYQQQRARGNDHHAAIRALAYKWIRIMFRCWKDHTPYDDSLYVKSLTKRRSHLAEGLNQGPDSIVEISSAACEARA

SEQ ID NO: 156652 - protein, 348 aa, unidentified
MDKIIRIGIDTSKSVFVLHGVNAADEPVLRKKLRRRQVLDFFRIMEPTRIGLEACGAAHYWARELMALGHAVVLLPPQYVKPYVQRGKNDAADASAICEAMSRPRMRFVPGKTAEQQAALMLMGVREQFIARRTQLANMIRGYAAEFGITAARGLDKIEPLLARIATAPEVPELAKELFATLAEQYGELKPKLRRIDAQLLAWHRHNELSRRLVQVPAIGPIGAVLLAMKVPDPRAFRTGRDFAAWLGLTPKDHSTAGKQRLGVITRAGDEALRSTLVSGATAVIQQVSKARGNPSPWLIALIKRKPPKLAAVALANKTARIAWKLMVSGEPYDRNHGAAAHTVGIAA

SEQ ID NO: 156653 - protein, 354 aa, unidentified
MKRTTKYVALDVHQATTVASVREESGRVIARSVLPTEGGALTEFIRGMRGARHVTFEEGTQAQWLYDLLVPLVDRVVVCDRRGEPQSGNKGDQGDADQLSEQLRRGNLRAVYHGSAARTTLKELTRSYTNLVEDTTRVMLRLKALFRARGLQTRGQRVYHPRERAEWLAQLAERGARVRAEVLYAELDVLRQLRPPAKAVMVAEARRDPAWAVLGTIPFFGPVRVALLLATMQTPWRFRTKRNLWAYAGLAVVTRSSADYVIRAGQPVRRRRAPLTRGLNRNHNRVLKDVFKGAATAATARPGPLQDWYQERLAGGMRAELARVTLTRKLAALTLRLWKKGERFDPTQLTQQAR

SEQ ID NO: 156654 - protein, 346 aa, unidentified
MLHVGLDLSRKQVEVCLISDQGELVDGFAAIPDREGLHGLARRVAVYGQPVRGVVESMNGARFVHDELTAHGWEVLVADAQKVKGLAPLACKTDKIDARVLAELSFRDLVPAIWLPTLELRREREVSRWRLHLVKHRSTLKNRVHSTLITFGHQRHMSDLFGVSGRKLLKELDMPEPWRSHVDASLVLIDDLEVRITQIAKELRRSGADHRYIPILMTAPGFGWITSFTVACEIGDISRFASPVKLTGYTGLCPRVKQSGQMDQRGPLSKHGPKYLRWGLMEAAIAASSHPLFRERYQRTRRRLGRQRGPKVAQIDLGRQLAEAIWYMLTRNQPFAPAGATFRLAA

SEQ ID NO: 156655 - protein, 346 aa, unidentified
MIIVGCDFHPTWQQVAWVDTETGETAERKLEHSSGEARVFYASLSAPALIGVEATGNCQWFLDLMVELGHQVWVGDAAQIRASYVRKQKTDKRDAAHVLKLLLEDRFPRIWVPNRDERDLRQLLLHRSKLVEMRTRVKNELQHLALNQGVQRKRRLWSQAGQQLLRSLVLQPWASRRREDLFSLLALLDRHIGMLDEAVEKASQLDKMAQLLKTQPGVGPITSLAFVLTIGDVSRFQNGKHIASYLGLIPREHSSAGKQRLGGITKQGNRMMRMLLVEAAQHAVRYDPGFRKQYLHRCHSKPKAVAKVAAARKLAVRLYWMLRTQTPYPEIVRIESSPRVPLVSAS

SEQ ID NO: 156656 - protein, 330 aa, unidentified
MKRFFVGIDISKDWLDVAICDETTLEITLSWKCDNTVEGIEKMIKKCLKQISGSQIWYCFEHTGNYGLLLSSLLEAKGAIYSAVPALEIKRSIGMTRGKSDQVDAARIASYAAMHKLKLKASKLPGKQLLRVKYLLTHRSLLLKSCVQLQNSRKSILIASKIVELKDIITDLEKRITDLKVQITTIEQTIKTEIEADDNLSNTFKKITSVKGVGLMIAATMIVCTNNFSAFESPRAFNCYAGLAPFAFSSGSSIQGKTKTSTLRNRTMKVLLFNGANSAVLSDFELKNYYNRKIKEGKHRMVVINAVACKMVYRIFAVLKREEPYVNLVR

SEQ ID NO: 156657 - protein, 473 aa, unidentified
MSKGSGMTRGDRRRNARRERLRELLPRDGAVIGIDLAEDKQALAVADHDGRVLARKTVKVKAFRLGAALDWAVAQARVKGFERVAVACEPTGPRWLQVQRLCGERGLPLVCIQPLVSHIAREQQDYTPHKTDESDCVLIGRLAAELHCYIPEELDETWAQLRHLGRRRAQLITAGTASVQRIRDFLSVAWPVVTEACVHPFDSMTWLAAMGVVTSRCGGDPGRLAALGAEEFTALVRAAVAGWGGQRPAAVICRRVFAALSDTEGVVASCRRGLLRRTADELGDLARTRAQLRAVEADMVVVLGELGLSRLGEVPGLTAVGAAAILAEAGDPRRYDSSSSLVKHAGMSPAGNASGAFEGQAHISRRGRPGLRLAVWRAVWPLLRHNPVLAAKYAALTGAAAAADAAAAAGAGPQQGRAAQAAARARRAKARVACAASLLRWIYSMTVHGTSWDAVIAAGGAGQHAPRRPAQAA

SEQ ID NO: 156658 - protein, 409 aa, unidentified
MLFAGIDWSEKLLDFHLRTAEGKVLAQGQIKPSVEGMADLFAEMESHGPVSEIGIAIETAHGAWVQALLDRGYQVYPLNPKTVECFREALSANGVKTDKIDSKVLAMFLITFHQENKPLRPDAPEIIQLRILCQDRLRLVEERSAKVNELGAILKCYYPAFMGLFGDLDSGIALDFLRQYPTQKQFQKLSERRLLNWLSRHRYSYPKRIDAMISLLKQPALPVAEHLQQAKKNLICYLARSIKTLNSEMAQRDKQINDHLDSLAESDWIRSLPRAGKVLAPALLACLGRDPERFSSVGEARALMGTAPVTKASGKSRVVVFRRGCWKFARRTLQLFADQSRHQCHWAQAFYEKQRNSGHKHHEALRALAHRWLKILLAMRQSGSLYDEGIFLNSQRRYQLKTPILKTFK

SEQ ID NO: 156659 - protein, 346 aa, unidentified
MMIIGCDYHPSWQQICWVDTVTGETGEKKLEHAPGEAEKFYRGLPGAALIGMESTGNCQWFVEMTAAAGHDLWIGDAAKIRACEVRAQKHDRRDAALILKLLLEGRFPRIWTPSGEEKDLRQLLIHRYKLVRIRAQVKTELQHLAMNQGITRKRRLWSKAGEKVLRELPLAPWTSRRREDLFKVREMLSAQIDLLDQAVVEVAEKNEKARLLMTQPGVGPITSMAFVLTMGDVSRFQRGKQVASYLGLIPREYSSGGHQRFGSISKQGNWFMRMLLVEAAQNAVRYDPGFRNEYLHRCHNKAKGVAKVAAARKLAIRLYWMLRTNTGYPGVVRVESSSRVPLVSAS

SEQ ID NO: 156660 - protein, 338 aa, unidentified
MNEITTVGLDLAKDVFHVVGCDVHGKVVRKKMLRRSQVLAYFAKLPPCLVGMEACASAHHWARELAALGHQVKLIPPQYVKPYVRGNKNDYNDAQAIAEAVTRPEMRFVSVKTTEQQDIQAVHRLREKRLQDRTALCNQLRGLLAEYGLIVPQGVNVLRRRLPELLEDGENGLSDLFRRLLAEGYQQLQELDCHIETYTAELKRQSQQDDACRRLQTIPGYGPIVASVFLSVVGNGEAFRRGRDVSASVGLVPRQHSSGGKETLLRISKRGDRYLRSLLVHGARSVVIQAVKKDDKLSRWINKVRAERGFNKAVVALANKLARIGWAVLVNKTVYQSA

SEQ ID NO: 156661 - protein, 470 aa, unidentified
MAGRAPAPCHTDGLGGVATRRVRVGLTSNRNMLSGLIRKVVDGDLTHESSGFHNRQTKGEKQPMGDQPAATDVDVFVGVDMAKEDHYAHAIGPDSNELFARTVRNDQADIEAAIDTASEAGKPVLVIDMTASSAHLLLATAAARGMPVAYVTGLQMRRAADLYAGSAKTDPRDAFILADYARRHVDRLTWLDIDDELLVRLRVLNGRDVDLAGDATRTINRCRDALVAISPALERVVGPKLTHSGVQDLMGRWATPTALRTAGKTRVRTLIAKRSPRLADKLTDQIWDALDAQTLTLPAEDTWGEVIADLAGDLTKISSRRDALKGDIEEAFLAHPLGKVLVTLCGFGPRTGARTLAEIGDPHRFATGGHLASYAALAPVNRQSGRTLDTATRQRRGNHRLKNALFLAAFVATQHDPDARAYYQRKRTEGKKHNAAVICVARRRCDLILAMLKNQEPYRQPQPQNLPQAA

SEQ ID NO: 156662 - protein, 374 aa, unidentified
MADYNEVFVGIDTSKLRNAVAIAEGGRNGEVRYLGEIETTEAATSKLVKKLAAQHRRLTFCYEAGPTGYGLHRLIKTLGHECVVVAPSLIPKKPGDRVKTNRRDALNLAKLLRAGELTAVWVPDARHEAMRDLVRTREAAVDDLKSKRQQVLSLLLRLGQHFMGKRTWTRAHMNWLVSQKLAHREQRIAFEEMLLAVRQADERVIRLERAIAAAVPDWSLAKVVTALMAVRGLDLISATIFLAEIGDLSRFASPRQLMAYLGLVPGEESTGDRVWRGGITKAGNHRARRILVECSWSYRHPPRVGKKKLAKVEAAPAAVQEIAWKAQARLTARYRALARRGKRPTLVVTAIARELSGFIWAVNRAVGAPATAAV

SEQ ID NO: 156663 - protein, 385 aa, unidentified
MTNQLQDTTFIPRDYEIFGGLDVDKKSMAVTFRDHGIMRKSLRLPYSASDLLNYTRKHFPGQRVAFVYEAGPTGFGLHDELTAASHPCLVVSPSMVPTVQRKRVKTNRLDSLKLAEGLRGGQLRGIHVPPPSYRELRHLVQLRDTQVAQLRATKCRIKSLLLYEGIPFPTANGKWSGPALRELEALPCNATVRFKLDQLIDALQFHFQSAAKVQKQIRYFCQNDPELRGCISFLVSLPGVGTITATHALARLGDWRQIKDVRQIAGFLGLVSSEHSTGDKENRGEITRIGDSRLRNKLIQCAWTAIRKDPELRAFYRRIYERQPKKVAARKAIVAVARKLTTRMYAVLKEQRPFVIRADSSIAPLTAEETGGPRERLDAAQNEQP

SEQ ID NO: 156664 - protein, 459 aa, unidentified
MGNRKEKQEAPKIDWKALDVVHRDAAGIDIGGKEHWVAISPERDKQPVRCFDCFTSDLEQMADWLAARGVRSVAMQSTGVYWMPVFEILQQRGMEVYLVNARHTKNLPGRKSDIAECQWLLKLHTFGLLNNSFQPTDAVRAMRTLWRHRGGLVAQASSAIQRMQKALVEMNIQLRNVLSDLSGASGMAILQAILAGERDPRKLAALADPQVKASKEAITKSLQGNWRPELLFVLGQEMEIYRGCQDKMAACDRQLQKQLRDMESKVDLRKQPISPRPKRKRGGRGNSPKFDLRTELYRLTGVDWSQVDGIDVQVAQSVIAEVGVNMQAFPSEKHFANWLGLCPTNETSGGKVLKRRTPKVVNRAKVAFRQAASTLIRSQSYLGAQYRRLRTRLGAPKAITAMARKLACLFYRLLTKGQQYVDRGAAYYEDRHREQQIRSVLKRAQQLGLQVIQSERQAA

SEQ ID NO: 156665 - protein, 386 aa, unidentified
MYFVGIDISKYKHDCYITTINDCVIQENFCFENNKEGFQKLLDLFKSFDNQEIRIGLEATGHYGMNLKLFLEENNFSFMEFNPSLVKKFIESQTLRKTKTDKADARWINKYLLSMDYKPHPKQFYHKYALKSLSRRRTTIVRQRSQYMLEITNILDLIFPEIKSFFDGKFSATFLYVLNKYKTANKIANMKDYDSLRKVSRGKFSYARFLKLKELAKDTVGTDNEIFTFQLETFLILYSNIDKQIDIVENKIAQIIKELNPKTLSIKGIGIVSCSAIISEFGDISRFKSADAMVAFAGIDCKIEQSGTSLHYGKMVKRGSSHLRYHLINAAGYVFMHEPIFTVYYYKKQAEGKKHNVILTHIAKKLIRIIYKLETENIEFDSSKLR

SEQ ID NO: 156666 - protein, 347 aa, unidentified
MKDVSTIGLDLAKHVFQVHGADIAGSPLFNRKLRRGEVLRFFEKLPSCLVGMEACGGAHYWAREIANLGHDVRLIPPAYVKPFVKRGKTDAADAEAISEAVIRKTMRFVPIKTAEQQADAMVLKTRALLVQQRTQSVNALRAHLAELGIIAARGLPSVAALMTIVREGEDTRLPAAARFALMAVADQIDTLADQIFKLERAIVTEAKRDEDMRRLTTIPGVGAITAATIKALVPDPGGFKSARHFAAWVGLTPRPHSSGGKERLGGISKMGNPELRVLLVLGATAVLRIARNDDRARPWLKALLARRPFKVAAVALANKMARIIWALLNKGGIYHRPEPLSIAAVAR

SEQ ID NO: 156667 - protein, 426 aa, unidentified
MKFNTQNKKIAAITEKTLVVGIDIGSEVHFARAFDWRGYEYSSKPFQFSNSEEGFEAFRVWIEDMKAKGGKETVMPGMEPTGHYWFNLGIYLQDRGMKPLHVNPHHVKKSKEMDDNSQAKNDRKDPKVIAGLVNAGRYMYPYIPNGVYAEIRTLNSLRVFAQEEAIRLKNRIARWFSIYFPNYKDVYGNVNAISGLMILRKAPLPEDIVKLGVEGVNHIWREAKVRSVGLKKAKELVTAASHSVGVQNSQDAARIELQFLLSDYEMQVKREAELMAMIEAKIKKIPYVENLLAIKGIGMKTAIGFVAEVGDIRRFRDPKEIQKLAGYAIVNDESCKHVGESHISYRGRKRLRYVLYEAAVSVLAHSSEFRLIHHYYTTREHNPLKKMQSLVAIACKLIRVVYRILTSGVIYDSEKMLGDIQRPQAA

SEQ ID NO: 156668 - protein, 342 aa, unidentified
MQITTIGLDIAKNVFQIHGIDAAEKVVVRKQLRRGQVLAFFKALAPCLVGMEACATAHYWARELTKLGHQVRLMPAKDVKAYVKRNKNDAADAEAICEAVRRPTMRFVQVKSAEQQSQLMLHRTRDLLIRQRTQVINALRAHLGELGITAAQGQAGLRELLAIIAGSADERLPAEAHASLIVLAAELQAMQTLIASIEKRIIAHHRLDEASKRLRSIPGIGLVGATAIAATVTDPRAFRSGRDLAAWIGLVPRQDSTGGKQKLGPISKQGDRYLRRILVVGAHAVLKLARQKPEKYPWLTQLLARKPFKIVAVALANKMARIAWALLVKGGPYRARALAAAA

SEQ ID NO: 156669 - protein, 425 aa, unidentified
MITAVIERCAGIDVGKKSISVCVMTGPADGEARSEVRVFGTNVADLKQVRDWIVAEGCTDVVMESTGSYWKPVFNILEDRVKVALANPHEVKARRGHKTDNKDAWWLAHLLRHAMITPSFIPPRPQRELRDLTRRRRKLIHSAAGEKNRVDKILQDANVKLSNALSDVFGVSGQLMLEALLEGKAKPGEIAQLARKSARRKIPEIQAALEEHLMNDHHRMMIRFSLNHLKFLEEQLEELDRQIMNKIEQAGYLAQYELLRTVPAVQQTAAVILAEMGPDPRQFPSEKHLSSWSGLCPGNNRSAGRNLGSHTTTGNRWIRAALAESAWAASRLKDGHLRDKFWRVAAKSKPKAVIAIAHDLIKLCYFVLQRGTPYESTKGSPIPEAQRQKLIRHHVRRLGGLGVNIRAGLAPLPASRPKTHTHAAR

SEQ ID NO: 156670 - protein, 376 aa, unidentified
MEVVYREVAAIDIGKRQSVVHVQTPRLKETRSFGMMTTELLELADWLHECEVQQVVMESTGVYWKPLYNLLEGDDFDLWLVNARDFRAVPGRKTDVQDSHWLCDLMRHGLLRRSFVPPKAQRELRELMRYRRSLIEERAREFNRLEKVLEGANIKLGAVASKLTGKSVRLMLGAMVNGEDDPETLANLAKGRLRNKHDELVQALQGLMGAHQRFLLQEQLGHLAALDARILRLDLEIGERLRPLEDDLKRLQTIPGVGPRGAQELLAEIGWDMSRFPSAQHLASWAKLCPGNNTSAGKRKHGRTGHGNRYLRTTLTEAAHAAGRKKDTYLQSQYQRLAARRGKKTRRHCRRSLHSHHRLSPPLPQNGVSRPRGQLL

SEQ ID NO: 156671 - protein, 415 aa, unidentified
MNKHNYRAKKVNDINWPQLRQQFAGQALVFAVDVAKEQQFALLSNTELSESVLIQWNHLEQTAELINELKQLNTLITVVMESTSTYGDAMRYQFRQAGFTIHQASAKRVHDAKEIYDGVPSLHDAKAAWLIAQLYQDGLTKPWHELGDKERELNAYRREYELHQSQHERNQNRLEAFLSRHWPEVLPLLALDSVTLESLLIDYGSPEQITAGAEQAAKDMRRWGKHCLSTEKIESVIHSAATTLGQPCIEAERRYLQALAEELRHSRTQAKNAKQALEAVVKAEPGLKEMGLTIGMVTTAILIGLHLDPRHFGCARSYLKALGLNLKEKSSGQDHGKLKLTKRGSALARKYLYFAALRLINSDPVVSAWYQNKVDPRAKLKTVITLMRKLAKALWHVARGQRFDARKLVMTTIVN

SEQ ID NO: 156672 - protein, 348 aa, unidentified
MVTIGVDPHKRTHTAVGVDELGRQLSARTELAERDGFGALWLWAREMPDRERVWVIEDCRHVSGPFERFLLDHGETVVRLPPRLMADARHSVRERGKSDPIDALAVARAALREGLGTLPTARLSGLELEVRLLSVHRERLVQARTRLINELRWQLHDLWPGWRIPKRALVHAGWQRKVARRLNAAELSARVTVARDEIRRIRDLTKTIDELYQQLDHLVAQLAPQLLAERGIGVLIAAKLIGEIAGINRFATEAKLARIAACAPIPVASGNSSRHRLDPGGNRQLNHAIHMLAITKIIHDPETAVYIAKQRSRGKTSREAIRCLKRHLIRRVYKLLTAPGEIPGAFHC

SEQ ID NO: 156673 - protein, 312 aa, unidentified
MTDITIGADISKDHIDLHMLPDGQILKVTNDRKGFAAIVRWIGTKSVERIVYEPTGPYHKTFERFMMVQGLALSKVNPRLARRFAEATGRLAKTDRIDAALLARYGELLEPRLLEADRQIHNDLKELHVARLALIKDRTAAKNRAKHVSSSLLKKHNGDRLRQIERQIKAVDDAIMSLIAEDAALKARFDILVSIPGVSQVTAFTLLIEMPELGALEEKAAAALCGLAPMSRQSGRWTGRAFIAGGRAIVRQALYMPALVACRFNPDLKTKYEQLKATGKPPKVAITAIMRKLIVLANALLRKNRKWTPKMA

SEQ ID NO: 156674 - protein, 457 aa, unidentified
MSQKKKSRAARHWSPVHPDAAAIDIGATMHVAAVGPDRDEQPVRTFRTFTDDLERLADWFARCGIKTIAMESTGVYWIPVFEILQQRGFEVIVVNARDAKHVPGRKTDVSDAQWLQRLHEYGLLRASFRPQAEIAGLRAYLRQRERLLDYAASHIQHMQKALMQMNLQLHHVVTDITGMTGMAIIRAIVAGERDPAVLASHRDRRCHATVETVCQALVGNYREEHIFALTQALELYDVYQTKVAACDKQIEDILKRLRQTATPPATKLLPAKQRTRQPNAPAFDVRGALHAILGVDLTEIDGLGPSLALKLVAECGTSLAAWPTAKHFTSWLALAPHNKISGGKVLSSRTRRTGNRAASLLRLAASTVGRTDTALGAFYRRLSARIGKAKAITATARKIAVLFYNTLRHGMAYSDPGATYYEDRYRQRVLHNLQRRAKSLGFGLQPLEPDAAQGGVS

SEQ ID NO: 156675 - protein, 398 aa, unidentified
MPQQLWAGIDAGKSEHHCVVVDGDGARVLSRRVANDEATLGELINAVTTLADGGDLTWAIDLAGGGAALLITLLLDASQRLLYIPGRSVYYASGSYRGDAKSDAKDAAIIADQARMRRDLQPLRPGDEITVELRILTARRADLVADRTRAINRLRAQLLEYFPALERAFDYSNSKAALILLTGYQTPDALRRAGAARLVAWLQKRKARNADAVAAAAIEAAHAQHTVLPGQDLAADMVARVAQEVINLDTEIASTEMMIEERFRRHRHAEIILSMPGFGFILGAEFLAATGGDMSAFDSADRLAGICGLAPVPRDSGRISGNLKRPRRYHRRLLRTCYLAAQSAARTDPASRAYYDRKRAEGKHHRQAILALARRRLNVLWAMLRDHMPYETSTATAA

SEQ ID NO: 156676 - protein, 347 aa, unidentified
MNFYTQQHKQYCGIDLHARAMYVCILDQSGTILVHKNLPTTPEAFLRVIAPYREDLVVGVECIFTWYWLADLCAKEGIAFVLGHALYMKAIHGGKAKNDKIDAHKIAVLLRGGMLPQAYVYPAEMRATRDLLRRRCHLVQKRAELLAHIQNTNSQYNLPEIGKKLAYKANREGVEAHFPDPSVRKTIEVDVSLIDHYDKLLGEVELYITRTAKAHDVQTFTRLQSVPGIGKILALVILYEIQDISRFPRVQDFVSYCRLVKCAKESGGKRLGTSGKKIGNVHLRWAFAEAAVLFLRQNQPGKEYFAKLERKHGKGKALTVLAHKLARAVYYMLSRKQAFDLHRFVTA

SEQ ID NO: 156677 - protein, 410 aa, unidentified
MELLHRRCCGLDVHKETVVACLRLVSDGKVTTEVRTFQTTTADLLRLSVWLAENDCTHVAMEATGVYWKPVWHILDDGEFVLVLANAAHVKNVPGRKTDVNDAMWLAELLAHGLLRASFVPDTQTQEMRSLMRTRKQLVREQTSHVLRVQKTLEDANIKLDSVLSDLMGKSGRAMLEALIAGETDPAKLASLASRRVKASPEELREALRGRVTKHHRFLLRLHLNQIDALDAAMATLDAQVEADLGPFRTAVELITSIPGVKNLGAHVIVSEVGIDMHRFPSAAHLISWTGICPRNDESAGKRRSNRLRKGAPWLKTMLVQCAWAAVRTKDSYLQAQFYRIKARRGPKKAIVAVAASILTAIYHMLKDGTMYKDLGRDHFDRRSTDRQKRRLVKRLADLGYSVVIKPLAA

SEQ ID NO: 156678 - protein, 405 aa, unidentified
MPQRLTCFCGIDIGKRRHVACLLDAQGQPLIKKLAFANEVEGFARLRQCLQEVAASDTVLVGMEATGHYWYALHDQLRRWGYVQQVLNPLQSAQQIKNAIRKHKSDPSDAGHIATLIKNGEGKPALIPNDLAMTCRQLTRLWYALGKQRARVKQLIHARLECVWPEFETYLSKPFGATGRAILRAAPTPEDLLAMNHETLVELIRKASRNRLGATKAASIRDSAQTSIGMRRGLEGMRVSIRTLLDQLNATTPVREQLETQITELCQRLPSYLLTLPGSSPIRAVSLFGETDPISTFKTPDQLVAFAGLDVTVYQTGQFEASRRHISKRGSPYLRHTLWMMAFVAVHAKGPLRRHYLKRRKRGLHHLAAVTATSLKLARIVWRICTDQRDYKPKPPEPKTASSFS

SEQ ID NO: 156679 - protein, 409 aa, unidentified
MMNPLFVGIDVSSKNNVAYLMKPDGSKHSSFSVQNNLGGAKLLSEKIVSALDSMRLNDVVIGLEATSIYGDSLVYALREDGSLGRFQRKIHVLNPKQVRKFKEAYPDLPKNDWVDAFVIADHLRFGRIAKEVYMDDYRYQALRTLTRARFDVIQNLTREKQRFANYLFLKCSGIAQNKDIQNTSATTIALMEHFETVDDMANADLNELTAFISEAGRGRFADPDATAKAVQAAARGSYRLPRTVNDTVNQAMAVSIASMRTLKEQVKILDKAIEQQFEIIPNTLTSIPGIGKVYSAGIIAEIGDVHRFSSQASVAKFAGLVWHKNQSGDFEAEHSQMIKSGNRYLRYYLLEAANSVRRCDSEFRRYYDLKFKEVNKYQHKRTLALTARKLVRLVFRLLKDNRLYIPPES

SEQ ID NO: 156680 - protein, 325 aa, unidentified
MDEPVGIDVSSKKLRIASDHEEFEVGNATKDHQQISKRLRRRGRTVHVCLESTGVYGLDLALVLFWTPGIQVMVVPPRAARHFAEALMRRSKDDPIDAKVLREYARRMEFKPWQPPPEEMLHLRTLARRMSALTDMRTEEKNRLHAAEATQTLACIRNDIVTNIEFLTERITFLKKQAGAHIDRHPRLQCAIARLISVKGIALVSAIRIYAELCVLPAEMTARQWVAHAGLDPRHFESGTFQGMTRISKAGNKYLRAALYWPALTAIRSQPNVKAFYGKLLGNGKKKMVGTVAVMRKLLHSIWGMFKHEANFDGEKFYALTAERG

SEQ ID NO: 156681 - protein, 371 aa, unidentified
MKDMKKEAFIGFDVSKNSHAVAIAEGGRDGEVRGFGTIMTTNAAVEKLLKKLATRFEHLHICYEAGPTGYGLYRQVKALGFDCSVIAPSLTPVRPGDHVKTDRRDAERLARLLRAGELTPIWVPDETHEAIRDLVRAREAAVRDKRQKRQMISSFLLRHGRIYQSPSTWTMRYRRWLQSQSFDHPAQQTALQEMVLAERHAGERVDRLTTSIEAVVADWSLGPAVEALQALRGVALIGAVTFMAEIGDVRRFDHPRKLMAYLGLVPSEHSTGLTTRRGGITKAGNSRVRRTLVEGAWTYRYPAKIGEKKLYILQKLSPEIQDIAWKAQSRLTARYRKLNQRGKKRTVITTAIARELSAFMWDIARKTMAAA

SEQ ID NO: 156682 - protein, 478 aa, unidentified
MNGKGKNKKRQANVSNFETNVIDSHQFIEKVEQIRKNLKASTWHELETQGKFSKNEKLSFISDDMLILGCDIGSETHYIRGIDSRGRELSKKAFEFANDEHGFAEALDWSLDLAAKNDKDQIVLGLEPTGHYWFCLATWMISKGISVVQVNPYAVKQTKEIEDNSQLKDDRKDPKIIANLVKDGNYGIPYLPEDIYADMRRLTMFRDQLMEDRIRCINRLHREMKIYFPEYMDAFGKLDGTFALTLIRKAPFPEDILKLGNDGIRDIWHQEKLRGRGYSRADKVIEYAKMSVGIKEGISASKNAVRWFATQAMELENELNDIENQLCQKVHEIPNAVNVLDIKGIGDNTLAGILAEMGDVERFDDVKEIQKLSGLNLVACSSGKHNGETKISHRGRKRLRYWLFQAAKSAVAHAEEFAELHLYYTTRKDNPLKKMQSLIVIACKLLRVIYTLLKTGQKYDPQKLLKDIKRPVSVVAAA

SEQ ID NO: 156683 - protein, 397 aa, unidentified
MYIVGIDIAKRKHEAAVIDGEGAVIIKPFSFTNNCSGYNRLLAMLAKAKLPLDEVSFAMEATGHYWLALFTRLQKEGFRVQVINPVQTNSIRSFYIRQAKTDPRDALLIAEVIRFGHFSESTLHPENIYELRELCRGRHAIVSMQADVKRKVVALLDQVFPEYETAFTNMFSDTSMAILQTCPTPKELSEMPLEELCHLIEVSSHKRFRMAKAQELQALARNSFGFAMAGDVFSTMIRLYAKHLDFLKQQVREMDRKIAEIMDTLDTPITTITGIGPTLGAYILSEIGDISRFSSAAKLAAYAGIDPTMRQSGEYNGVRNRMSKRGSPYLRHAIWLAASSAVLHDPALKLYFQKKRDEGKPYMASVGHACRKMVSIIYAVMRDNKAYVPCIPSEISA

SEQ ID NO: 156684 - protein, 404 aa, unidentified
MRSIGMDVHRSFAQIAVVEDGLCRDEGRIGVKPEDLREWATTLEPDDEIALEATTNSDAIATMLRPLVAKVVVSNPRKTRAIAEAKVKTDKVDARILAQLLAADFLPETWVADDRTRTRRRLVARRTHLVKQRTRLKNQVHGILSRNLVPTCPHADLFSGVGRKWLFAQDLPADEWRSVEALLRQLDFHGDELADVERDIAIDAIDDPVVARLMTIPGVDVTVAVSVVAAVGDFSRFASPDRLVSYLGLNPKVRQSGDRPAIHGRITKAGRSQARGMLVEAAFSASRAPGPLRAFYKRIKDRRGFQVATVATARKLTVMCWHLVTKDENYAFARPSLNAHKRRKLELAAGATSRRGPTAGPSHNYHLKQLRDAEKVIVEQQERAYEVMVAHWQPQNPKKYAAKR

SEQ ID NO: 156685 - protein, 428 aa, unidentified
MTQGTNDWSERTTFVGFDWASDHSFAAQDKHDVVVVDARGVMVEDFRFDDTAEGWQRLVKTLSGYPNPAVAIETSSGATVERLLGAGYAVYPVNPKAAKRYRERKAPSGTKTDRLDAWSLADALRLDGHTWRVLKADDPLTVELRLLCRDEIALIEQRTALICQLRAALGEYYPIVLEAFDNWTLRSAWAFVESFPTPEALHRAGRRKWEKFLHTHKLYRPETYEQRLSLFAQAKTFCGSEATTHAKSLLALALAAQLRVLQNHLDKFRERIQELFAKHPDHDLFGSLPGAGEKLAPRLLAELGDDRERFDSPEALQCHAGTAPVSYQSGRMKKVCFRRACQKVLRHTVHLWANLSREKCPWAETYYRQKRDEGQSHACALRCLGQRWLKILWKMWQTHTQYDAELHQRNQLKHGSWVLGLMTPKAAG

SEQ ID NO: 156686 - protein, 340 aa, unidentified
MKQVIAIDLAKRVFQIHIPTSDNRPALNKVLTRNKLLAFIANQPESIIVMEACGTANYWCNQFAQFGHEVRQISPQYVARFRIGNKNDRNDAIAISEAFSRPDMRFVPIKKIEQQDRQCLHRVRQRLVKNRTAIINQIHGLAAEYGMALSEGKHKMLSEILDELEDGSNGLSPIFRELLQELYLEFKDIDLKVKKLSSQITHLNSISETAQKLLTIPGVGPLSASVLGIELGDGTCFKNGRHFSSYLGLVPNERSSGGKVRLLGITKRGDSYLRGLLIHGARAVVYRVSKLPLEQCDRLQSWLKKLITQNGVNKAIVALANKNARMAWAIVKTGEAYKIV

SEQ ID NO: 156687 - protein, 407 aa, unidentified
MAAVMIGVDPHKGSHTAVVIGAAEEPLGQLRVRACATQAERLLAWAAAWPQRTWAVEGAGGLGHLLAQQLVAAGERVLDVPPKLAARIRLLGSGSTDKNDPNDARSVAIAALRSAACTPVRADDHAAVLKVWAKRHRDLSRARNQVVCRMHAVLCQLVPGGVSKHITAGQAARILEAAEPRGAAGAARWQLAEQFLTDLRRIDIQRRDIQHRLAVAVRASGTTVTEIFGVGPAVAAAVLGDVGDISRFATQDSFAAYNGTAPVEVSSGNRVIHRLSLRGNRRMNHAIHMAAVTQIRYRHTKGRAYYDKKIAEGKTSKEALRALKRQVSDALYQRMKADARRAAAAGITGPGGHPGNGSAASAAGLHPADRLFGQATPGPSPTLRPRPGHSKATHPGSPRRTRRPAPA

SEQ ID NO: 156688 - protein, 561 aa, unidentified
MKAKATSLVGLDVHARQTHAAVLDLRSGELAVRRLVGVPEEVAAFLDRLPGPIVAVYEAGPTGFGLAREAHRRGIDVRVIAPGSIPKGSGDRVKTDRRDAIRLVRLFAAGELRFVFVPTVEDEAFRDLVRCIEDVRGDLMRARHRLSKFLLRRAQRYTEGSSWSVKHLRWLHALGFDDACSQVAFADYLASVDLLSGRRATLLGALEQQAVECSHAPVIARLRCFRGIETLSAAGVCAEVGSFARFPRPTLLSGFLGIVPTERTSDLKRRQGSITKAVPGTPAGCWSRPPTTTATVPRSVRHSLAAKQARTRGSSRSPGARSAACTSAGSGCTPSDTSPPAWSRSLSPASSPRFFGRPQHLTDTTPIIAPGTLPGRARATRRPTTVAQDSRPDYGQPATHRSRPTLDSEPRRIPGLEVAALEYQSDPAVDRLDLQHAPPRQPPGNADTNPTHRRPTHKVIHKTPYQSGGCELRPTVLAELLSQPVGDLHKSWRPCITGPGPVEPAPEPVPTAGPNAASAFPVPVPAMPSFAAQQVDHLLPSARPDPWLVNPPGRCRATRLG

SEQ ID NO: 156689 - protein, 321 aa, unidentified
MKDAPKSIRVGIDVAKRGFEACFGVGGEVVSFTNDDAGFEALLLRLKGLEVGMVVMEATGGYEAQLACAVQAAGYAVAVVNPRQARDFAKSMGYLAKTDRIDAAALSEFAQALDGHPQRERFLKPLSDPDRQSLAALVTRRRQLLEMLTAERNRLSLGHRAARKSIEAVIKALQRQLDDIELQMVVHVNQHHRVLADLLRSAKGVGQNTVAVLIAELPELGRLSGREIGKLVGVAPLNRDSGMHRGKRTTFGGRAAVRSALYMPTWVAIRHNPVIRAFYQRLVAAGKAKKVALVACMRKLLVILNAMVRSGKQWDYSLEIT

SEQ ID NO: 156690 - protein, 362 aa, unidentified
MPEGMRWVGLDVHAAQTACAVFDSETGEVFTRRIMGRPHEVMSWLAELPAPVRAVYEAGPTGYGLARRGRAAGIDVRVCAPGMIARSATERIKTDKRDAIKLARLHAAGQLVMVHVPTLELEQLRDLARCREDARQDLMRAKHRVGKFLLRREVYYPGRGRAWTREHRAWLASLRFADAASEATFADYLHAHDTLAARRDGLDRAIDELARDCCWATTIARLRCLHGIDTLGAFGLCAEIGDWGRFTRPAALSAYFGLVPCENTSGDKRRLGSITKAGSTLARRLLVEASYHYRRPPRIGGGLLRRQDGAEAWVVDLSWRCQRRLHGRWQRLRAQRNKHNGIVAIAVARELAHFCWELATTE

SEQ ID NO: 156691 - protein, 398 aa, unidentified
MENKSVFYLGVDIGKYHHQATLIDERRNQIGESLRFDNSLTGFELLTQTIKKRLPKNATVEIGMEATGHYYWHLKNYIADIGFGSLQIFNPIETQKLSKTRIRKVKNDKVDSLIIAQLVSQKTNNHPAIKENFELRQLKDLTRFCEKLKAQKRFYQQELSVLMERLCPEFSAYFSNIFLATPLMIIKKHFLGNIKSEQLVEAIMKTSRGRTSKAKAREIINMLENSIGKEYRCSNAKLQLKMLLESLDLSCKQIAKIKKQVEKASQQFEEIKYLNSIKGVSNYLASVILCEIGNINRFSNKGQLTAFAGLDASVKESGEYRRKQGNHISKRGSKHLRRQLYYAAKTAIMFDPELTAYYQKKKEQGKHYNVIMIAVARKILMRCYAVLKQKRLYELRNL

SEQ ID NO: 156692 - protein, 327 aa, unidentified
MEEVVGLDMHLKKTQGTIMSMNGDIVRQERFDTDKEHVMKFLKKLPKGTRVTLESVGFCWPWIDFIEGLGYRPLLANPVKVKSRAEDIKTDKVDSELLANLTRMDWLPTCYVPSKELRWLRSMLRHRAFRRRMTTAIKNRTYSEFRKRGIDVEDLGTHTGREGMMSSNSYEVNQNIEILNAVENQIKLIETRLKRQYQDVKPIRLLQKIKGIGFLTAITLYAEICDIERFSNPEKLAKYAGLVPRVRQSGEVTRMGREMKGNKWLKWILIEAAWSHIKFCRGGRLSKVYENAYQRKKDKKKAIKIVARKLVNIIWAVWKYEREFHAY

SEQ ID NO: 156693 - protein, 414 aa, unidentified
MDVIVERCAGLDVHKKTVMACVRKPADGERVSVKREFSTFTYGLHQLRDWLASEGVTQVAMEATGVYWRPVWYVQEEMAGVELLLANAQHVKNLPGRKTDAKDAEWLGQLLECGLLQGSFVPTPVMQRLRNLTRYRNKLTQDRGREVQRIQKVLEDAGIKLDSVISDVLGKSSRQMLEALIAGERDPEALAELSKTRMRAKIPDLRLALVGRFGEHHALMARMHLDHIDHLDEMIDRLDQEVAREMAPFAEAAGRVVSVPGLGQRTTEGILAEIGTDMSRFPTAAHLASWAGMCPGNHESAGKSRSGRHRKGNAALQALLCEAAWAASHTKNTYLAAQYQRFLRRFGKKGKNKAIFALAHTILVIVWNILSKGGTYEELDYDYFERRIDTEEKKRRLIRQLESLGLLVTVEPAA

SEQ ID NO: 156694 - protein, 403 aa, unidentified
MSAKVVLGLDAAQAGVAFHLQDLTGRLLARGVAKKSTAGWSELQQQLATHQVTPSECLVAIEATGDHHLPWCEAFTHAGATVLALNPLVAKRTTPVRNAIRDHKADPIDAEGLAQTALREGEALSRFTYRSTPALLGLRKLLAAQAAVRLTLTNLKKHTGALQELCFPEADQLTLSPLRQRRLLQAAPTPARIAALPAEQLRALVGDQLPAVVAAATTSFAPAVLAEAAAPALQALLGIIDQLATALRALDHQVERCAPAAVPAERLALARSLPGFGAKCTPVIVACVPAELWTRPQPRKRKVARLQALFGIDPRLRESGRWHGQVKLSKRGIRAARTAMYQISLCSVVHDPQMRAYYRRLTQVKKKPHKVALFDLARKHLRRLVAVLESGQPFQPAPLPAAA

SEQ ID NO: 156695 - protein, 347 aa, unidentified
MTYYIGCDVHKEYSVFVGVDENGRRTPPQRVEHDREGYRQYLASLPAGSPIAVETTGNWYWVVDEMERAGHYPQLAHAAKSELMMGQINKTDKLDASGLATLLRNGTLPSVWIPAAELRDQRELPRMRLVLVQTRTALKNRIQATFAKYAIQFAGESDLFGNQGRQAMVKRLVELPPETRRSVEQELKLLDDLARQIDLAEQRIHQVVAVTPQMELLDSLPGVGAVLAITIALEVGDVERFPDCQHLASYAGTVPRVSSSGGKTRFGRTRPDVNHYLKRAFVEAANVIVLNQKRWPRRHVVRQYQRVMARQGHARAVVAVARHLAESAYWVLRKQEPYREPVSTEQG

SEQ ID NO: 156696 - protein, 317 aa, unidentified
MAMPARELDFGVDVAKASVQIDGEGLSLELSNTTRDLRTWLKRLPSRACFALEATSTFHLTFANLAHELGHAVYLIDGFRLSRYREGIGGRAKTDVLDAQLLRRYLSHEKQALRLWTPPPAGYSEMLKLLNLRERCVSARVMIEQSMAGVGVCKRELSETVRKMRALEALLGQRIEACARRYWAEQVTRCRQIEGVGPITSAALAAIYQRGSFRSSDAFIAFIGLDVQARDSGTQRGRRKLSKRGNAELRRLLYTAAMTACRSGTWKPYYQKLLARGLKKIQALVALSRKLARVAFTLMKNECDYQPEIRSGGCLAT

SEQ ID NO: 156697 - protein, 349 aa, unidentified
MKITTIGIDLAKNVFQVHGVDEHGKAVFNKPLKREQMAAFFVNLPPCLIGMEACGSAHHWARKLQGMGHTVRLMAPQFVKPYVKTNKNDAADAAAICEAVTRPSMRFVPIKNVEQQGVLALHRVRQGFVKARTAQANQIRGLLAEFGVIVPQGIGHITQRVPMLIEDAANELPGVFRLLIQRLLEHLKELDCQVQELEAQIVAWHRQSDLSRKLGQIPGIGPITACALVASLGDAKNFKDGRQVAAWLGLVPRQHSSGGKQNLLGISKRGDTYLRTLLIHGARSVIYHAQKKDQHQGQGSAQCGWLNGVVQRRNKNVAAVALANKNARIVWALLAHDRSYEPGYVRESV

SEQ ID NO: 156698 - protein, 424 aa, unidentified
MNNTQNQKIAQVTDKTLIVGVDIGSENHFARAILARGYEVSKKPFPFTNTEGGFESFVTWSYNLAATHKLTKIMVAMEPTGHYWFTFVAFLKKYDVQVVLVAPQHVKHSKEMDDNTQEKDDRKDPIVIARLVPEGRYLIPYIPEDVFAELRVAFNRRCELVEEQVRIANRMIRWFDIYFPEYRKIYGRIDAKTGIMILKRAPLPADILDIGVDGICQIWKDAKLRGYGPKKAKQIYYAAEHSVGMKGGASVRWKLWQLLEEYELIERQLHDILQLIEGLLYQIPGADKLLKIPGAGLVTVAGFLSEVGDIKRFSDPKQIQKLAGLAVVENSSGKRKGLPGISKRGRSRLRWVLFQLARSMVMFNPEMKAYHQYYTTRKENPLKKLQSLVAISARIARIFYGILKNGTEYDPTMVMKDFNKAVAA

SEQ ID NO: 156699 - protein, 368 aa, unidentified
MSDSDGFVFFVGMDWGSQAHQVCVLNAQGQQLGQRQVLHTAAALEELFGWFEKLTGGARSSLAVALEVPRGPLVEMLLERGFTVFSVNPKQLDRFRDRYFPAGAKDDRRDAFVLGSALRTDRHCFRLVRREDPLIIRLRDLSRLDEELGRNFRRYACQLREQLQRYYPQLLALCPQADEPWLWSLLEAAPDAANARRWSEARIEKLLRAHRVRRLRAAEVAAQLRAPGFALVPGTVEAASEHALLLVPHLRLLLQQRAALAKRIEALLEELAGEKTTDGEKPQHRDVTILRSLPGAGRVVAATMLAEAAQALAERDYHALRAYAGVAPLDPAERQASQRADALLLQCAAAQRHLSLGAGECAARSRQP

SEQ ID NO: 156700 - protein, 341 aa, unidentified
MSIQTLGIDLGKTSMHVVGLDASGKPVHRKKLTRTALIRFLSNLAPCRVAMESCAGSHDIARKADAMGHDAVLLPAQFVRPYTKGQKNDNSDAEAIAEAATRPTMPTVSIKDATQQEIQFLHRTRQGWIKQRTETANRVRAMLLEFGITVPQRILNLRRALPGILEDAENDLPDGVRQLVADHWQQLQDLDDRIADITQRIERLPVRDARAARLMSIPGIGPMIATAMVAAVGDGTQFTQGRGLSAWLGLVPQQFTTGGKPRLLGISKRGNRYLRTLLIHGARAVLQQAHRGDDALRRWIQQVNGRVHRNKAAVALANKLARVAWAVLTRGETFRASAAAA

SEQ ID NO: 156701 - protein, 350 aa, unidentified
MLIIGCDYHPSVQQIAFVDTDTGELRERRLGHREEAEQFYRELKQQNLTVRTGMESSGHSRWFERLLQELGFELWIGDPAEIQSKRVRKQKTDRQDAQLLLRLMMEDRFPRIWIPDAVNRDLRQLLWHRHRLVQMRTRVMNQLHVVALNEGLRRKKALWRPAGRTELEAIALAPWATRRRQDLLDLLDQLTPKIQQLTQALEEEVEKRPVTRLLMTHPGVGPLTALTYELVIGTTERFHCGKQIASYVGLVPEEKSSGDRRRLGHISKQGNALLRFLLVEAAQVTVRSQPQWRSKFLHLAMRRGRKIAKVAMARKLAVHLYWMWRKSRDYGQLQKFGSHAGEPGNHDGVQ

SEQ ID NO: 156702 - protein, 328 aa, unidentified
MTQIKYFVGLDISSSTFTAAAGAMPWKVILKPQEFANKEAGFQVFVDWLTEHQLLMEATGVYGECLAYFLYVKGYCVCIEPPLKVKRAFKPNGPKTDAVDSLQIAEYAGRYLDQLTLWQPKNEILEQIKVLLATREQFVVQRTTHKNALQAIQRKPVKTPFAEQAHVQMIEQLKKQIRALEQEIRRLIDSDPTFKSMLLLLMSVPGVGFLLAAHLLLLSQVSLNPRQIASYLGVAPNEYSSGSSIYKHATSRHFGPQTIRKLLYLAACSVRTHRHEFRTYFQRKTAEGKSSRLVLNNIENKLLKIICAVLRANTPYDPNYASVALTQS

SEQ ID NO: 156703 - protein, 412 aa, unidentified
MNQDKLYVGIDVSSKNNVCYLMYSDGSKHSSFSVPNNRNGAKIIVDRVTSVLLLQDIPQVVIGMEATSVYGDNLMRFLRESGSLGRFERSLHMLNPKQVKKFRDAYSDLPKNDHVDSYVIADHLRFGRINKEVYMDDYKYQALKMYTRARHQLVQELTREKQRFLNTVFISFSGLTQEKIFSNKFGATSMALIEEFSSLDELAYMSTDDLVDYIRKKGKNHFENPEEIAEAVQRAAKNSYRPPQVIADAAKQMLAISMNTIRLLQKQIKEYDKAIEKMLEAFPQTLTSVKGIGNIYAAGIIAEIGDINRFPSQASLAKYAGLVWTQHQSSDFEAEDKRMIQGGNHHLKYYLCEAANALRRCDPEFKRFYALKYKEANKHNHKRALALTARKLVRLVYTLLKTNRLYIPPEEY

SEQ ID NO: 156704 - protein, 462 aa, unidentified
MRKKESPRTRPQNNRVLEQLNHNAAGADIGSDTIWICVGEHASEVPVRRFGTTTAQLRESAEWMVSVGVDKVAIEATGVYWVAAYEIYEEYGLHPILINSRAIRTFNGMKKSDFIDCQWIQLLLTFGILQPSVRVESLMIELRGHMRHRKNLTEQCSEQIQRMQKALTLMNLRLDQAVSDITGVTGMNILRAIIKGERNPVTLASMRNAGCAKSEAQIAEALTGHYRDEQLFCLDQSVQMWDFFRELMGQCDRKIEAVLQKLPAHQTGKTVKPTCQKARKNQVRFDGRTLLHERLGLDLTEIRGLEVLTVLTVISECGVDLSRFPSRKHFKSWLGLAPGTKKSGHRVLSSRSRRTTNRAATALRLAAQSLLRSDCELGAVGRSLRGRIGAEKAITAVAGKLADRIYLSLTTGRVFEDRGAQYHELKHRERTMASLQKRARRLGLQLIPIGEQTKTVPQSSVS

SEQ ID NO: 156705 - protein, 391 aa, unidentified
MQVTADRPAAPSAIRSDLGAIFVSLELSRSIWLITSLSPGGGEKMSKHSMPAGDIGALLARFSELKQKALARTGKSFPIIVIQEAGLDGFWIHRVLQKEGVESHVVDPASIATSRRRRRAKTDRIDGEALVRTLLAYKRCEPRVCAMVKAPTPEEEDRRRLCRERKVLIAERVEHVNRIKGLLFSQGVSGYEPLRRDRRQRLAELKTGDGRPLPEHLKAQIGRELARLEVLLEQIKLVEAERDALFAAAKVATAATPAPVTMLLEIKGIGPEFAAILWMEAFFRSFANRKQIAAYAGLAPTPWQSGAVDREQGVSKSGNPRLRTTLIQLAWLWLRHQPQSALAQWFGERVRRNGGRFKKTAIVALARKLLVALWKYVTAGVVIEGAVLKTA

SEQ ID NO: 156706 - protein, 345 aa, unidentified
MKHYAGLDVSVKETSICIVDETGKICRELKVPSHPENLVAVLKHRAWSFFRVGLEAGPLSQWLFSGLVEAGLPAICIETRHAKAFLKAQVNKTDRNDARGIAQMMRVNLFRPVHVKTLKSQQHRALLTARKLLQEKAIAIENDVRGLLRNFGLKVGVVGTAGFEARIFELIEDMPDLMEIIAPLLAARGKLREEFAHLHRKVLCVARDNDTCRRLMTIPGVGPVTSLAFTSTIDVPARFRNSRAVGPALGLTPALNQSGESHRVGRVSLCGDGMMRALLYEAAQVLLSRVKKWSWLKAWAMNIAKRRGRQKAIVALARRLAVVMHRMWSDGTPFRWTKEIAPLPA

SEQ ID NO: 156707 - protein, 427 aa, unidentified
MTKVHDTTDARVLVGIDISKHRHEVLIAVPGKTRRRRMTVLNTAADYQRLIEVLRGLELPATIGFEATGNYHRALMFALGEAGFDLKLVSSVALARTREALHNSWDKNDPKDAQVILHMLQIGAVQVFHDPLVAGTSDIQELSKTYEMVARAKTELWQRILTHYLPLYFPEADRFHRSSRGDWFLAFLEAFPSPHMITAMDKESFIKAAWPVIGRRVSKAALLADIYETSRTSVGLPVAPDSDAIRMFRLVLAQGRSLIQSRNAIEARAVELLGDDPDYQLLRSVPGIGPINALAVLAEAGDLRRFRHHRQFLKFCGMDLATVQSGLFRGRSKISKYGNARLRRTLWLASQAAVLKPANSFRDKFERYIAQDRHNPDLRRKAYTAIAAKMARTIHAVIKSGEPYRPFFEGTSPGGRTPLCRAVEAGS

SEQ ID NO: 156708 - protein, 391 aa, unidentified
MKKNTIKKLQVLAKGQKGQIRRMAVKQRLTVGLDLGDRTSRYCVLAEAGEKASEDKLPTTKTGLDSLFAKMAPSRIALEVGTHSPWVSRHLAGMGHEVIVANPRKVRLITQSVKKNDRMDAEQLARLARVDPKLLSPIRHRGPEAQGDLAVIRARAELVNARTALINCARGMAKPMGERLKKCDADQVKESMAEGLGEALQTVIGPLLKSVEEISRQIGVYDERIEGIGKRYPEMQLLTQVWGVGTLIALTYILTIEDAQRFEHSRDVGPYLGLTRKQRDSGDSEPELGISKAGDELLRRLLVQGAHCILRKDAPDSDLKAWGMARLQNRDPKGGQKGQKGSKKTRKKTIIAIARRLAVLLHRLWVTGEVYDPHYNRKATEAAKRQAKPAA

SEQ ID NO: 156709 - protein, 330 aa, unidentified
MTTATAAAPTACYVGSDVAKAHLDLAVHGQGKPWRVANDADGITATVSQLQTLAPARVALEATGPYHLALAYALQQAGLPLVVTNPRQVRDFAKSQGRLAKTDRLDARVLAHCAASTAQAPRPLPTSATRNLRQLVARRSEVQTQLIAERLRRAEAEPAVRELIDAHLTWLREHLAAVDAALDAAVAAAPRWLDTTRLLRSVKGIGRVVAVTLVAELPELGTLSRQQIAALAGVAPFHRDSGQFRGQRHCWGGRARVRPALYMAALVAVQHNPVLRAFYQRLLAKGKLKKVALVAVMRKLLVIANAMVRDHQRWDAQRALPAGAQEVACG

SEQ ID NO: 156710 - protein, 349 aa, unidentified
MEAPQQTMYYIGLDVHKKTISYCVKDASGRIHQEGKIGATRRELDGWMKTLPQPWTVAMEATIFTGWIYDHVLPHATAVKVAHPVMLRAIAAAKKKNDRIDAGKIADCLRCDFLPECHMATTEVRDRRRTLRYRHLLVRQMVQMKNRISGLLMETGVTHNKQWLHKVKYFRELLSGSDEITESIRPLLQLSRDTIVRLQKTEYALVSSLQRDPVLAERVKRLRTVPGVGPIAALTWALEIGDVTRFRSVKQAISYCGLCGDEKSSADKAMRTPLSKQRNKHIQRALVEAAKLAPRYSHELALVREKELQKGNANRATLAVARKMVAYLLAVDREQRDFVPAEERGSAAA

SEQ ID NO: 156711 - protein, 404 aa, unidentified
MIIVGLDWARSKHDYLLMAPTGEILQRGKIPHNAAGLQELAVAIEHHAGPDRDIRVGIETNDGALQAWLIEKGYTVFGIQPKSSQRAREIYRPSGGKDDSVDTFVLAEMVRLSGDRLRPLRPNSPATEELQGLLRWRQELVHQRTAATQRLRAVLAEWSPRLSGLCDDLERNWQLDLLQEFPTEAIFCQTHGNRIRGFVRKHHLRHQTYSKIEDVRRAEPMPLPAGRVLPVVQRVQFLVQQIRQLGAEIDRIGRSLEERVAEHPDADIFRSLPIGGTVTVASLLAIFGENREQAPSWEELAARCGVAPVTKASGKTKTVRQRRACDHTFHQALIYFAFNTAFAEGCWAGEFYQRKRADGLRHYASLRCLAKRWMKILYRLWKDRVMYSEQLHRRNQKGHEQQAA

SEQ ID NO: 156712 - protein, 415 aa, unidentified
MEVLHPRCAGLDVHKDTVVAAVRLIEVDGTVRREVETFATTTPGLVALSDWLEGHACPCVAMEATGIYWRPVWQVLAAEGPGEGRMLVLANAAHVKNVPGRKTDVADAVWLSDLLAHGLIRPSFVPDAGTRAMRDLLRTRKQLVREQASHVQRIQKTLEDANLKLASVLTDVMGQSGWAVLAALAAGETDPERLMALIGPRIKASPEAIHAALTGRPSPHHRFLLGLHLGQIDALAGAIAAAVERDLGPFREAVGLLVTIPGVGDLTAEVILSEIGLDMSRFPTAGHLISWAGLCPRQDESAGKRRSNRLKKGAPWLKTALVQAAWAAVRKKHGYLQAQFQRLRGRRGARKAICAVAASILTAVYHMLNDGTAYADLGSDHFRRTEPISRARLLARQIERLGFTCSISATTPVSI

SEQ ID NO: 156713 - protein, 386 aa, unidentified
MKNINLNVACAGMDVHYKFSNVTFRDKAGHIVRRERLNHSQRAQLTERLNSWPKGIPIVLEASFGWGWFSDLLIEAGLEPQLSNCYKLEQMRKARGWVKTNKKDADMLSLLPFETTDWWQVWRAPVEVRNRREQMRFRDDLVGLQTVVKNRIHAIFHRQGIFHEFSDLFGGKGRKFLAELCLENPTELSSEALLALRGQVMLLDHLRQQLADVARILHKQLAKTPLTMRLKTIPGIGLILAHVLAAEIGRIERFRSHKALASYSLLAPRSDDTGQDDTGRSPLGRHLGTHGNRTLKWAFIEAAHGAVRPGGRWRAMFDRVTDGGKKDRNRGYIKVARELVKVVYVVWKKGVDYQPVAPARPGCRKKKKSRSGTGQLYHPMVHALTA

SEQ ID NO: 156714 - protein, 314 aa, unidentified
MTEKYIGMDISKAQLDVAKAGRKKTWAFNNNRQGIGELVKLMKRIKPVLIVVEASGGLEQAVVRALYLAKMPIAIVNPTRIRNFARATGQYAKTDQIDARIISQFAKAVRPQVRPLRSAEEEHLDALVTRRRQIVDVITAEKNRRSTTHPAMKSRLEKHIRWLEKERNSLEKAIEDFIQEKAEWKEKAAILRSVSGVGPVTTSTLLAELPELGTRNRKQIAALVGVAPMNKDSGPKKGKRRVFGGRASVRRVLYMATLVATRTNPVIRAFYERLLESGKERKVALTACMRKLLTIINAMIRSMRTWQPSLAFPR

SEQ ID NO: 156715 - protein, 414 aa, unidentified
MEVVYERCAGLDVHKKSVTACRITPVSGGGWQKESRRFGTMTDELLKLADWLRARQVTAVAMESTGVYWKPVFNILESEYEVYLVNARHIKYVPGRKSDISDAQWIGELLQHGLLKASYIPEAPQRDLRDLIRYRTSLIQERTRETNRVQKVLEDANVKLASVATNVMGVSGRQMLEAIIAGVEDPEALAELAKGRLRAKIPELERALSGRIRASHRLLLRLHLEHIDDLNSKIGNLNEEIDRLMLPFDEDEKRARLDVIPGVGLEVAQVILAELGVDMSRFPSAAHAASWAGLAPGKNESAGKNRSGKITPGNRHLKSALVQAAHAASRTKDNYLAAQFRRLAARRGKKRAAVAVAHSILVIAYHMLRNGTEYRELGGDYFDKRNTAKLQRNLVKRLEGLGLTVTLEPAAVAV

SEQ ID NO: 156716 - protein, 338 aa, unidentified
MEFKRISVDTSKSVFTLHGIDVQDRPILRRNLSRTQFEAFFSKLPATEVVLEACGGSHHWGRVLGAMGHSVRLIPPQYVKPFVKRGKNDRNDAEAINEAASRPSMRFVPVKSAEMQAQSMELSTRQLLLQQRTQLVNSLRGHAMEFGLVAGKGIEKVEALLEMIAHDPAMPSPAKQNLALLGAQIAHLDGQLKEIDRRLVAQHKASAVSSRLAEVPGIGPITALTLTLKIDPRQFESGRHFAAWLGLTPREKSTGGRQRMGGISRAGQERVRQLLVVGATAVIRHAKPGSKMATEWLLGLLERRPRKVAAVALANKMARIAWAMMTNETAYRRKPVAV

SEQ ID NO: 156717 - protein, 461 aa, unidentified
MSKHNKQSSMAGKSVTGPTFEPNAAGIDIGAREIFVAVPADRDPRPVRKFGTFTEDLRHMAEWLVQCGVRTVAMESTGVYWIPVYDMAEQHGVTPCLVNPRNMKNVPGKRTDFHECQWIQYLHSMGLLHSAFRPDGNVCAVRSLMRHRSDLVEMASQHVQHLQKALTQMNVQIHHVISDLTGLTGLAILDAIVAGERDVAVLARLRDPRIKASEETIRKSLEGNWRPEHLLALKQRLRLYRAHLEEISECDREIEKLVAAFEPFVDPDDKPLPPDRKQKQRRRKKKGANPDFNMRLEAYKLFGVDLTQIPGLMMLAMMLFSEVGRDMSRWPTAAHFVSWLGLCPDNDISGGKVLWRGVRRTKNRAGTLFRLAAHSLHHDQTPLGDYLRRMKAKLGPAAATTATAHKIAIIFYTMVKNQVEYDESLWAERDALRQQRIETRLHKQAAKHGYKLVPLEETQAA

SEQ ID NO: 156718 - protein, 455 aa, unidentified
MPRKSAKASFDLTRHIQGAAAIDIGSRMHMAAVSPEAAKDPIRSFGTFTSDLHALAEWFKECKVTSVAMESTGVYWIPVYEILEQHGFHVILVNARYAKNVPGRKTDVSDAGWLQQLHSYGLLRGSFRPQADIAALRAYLRQRERLLEYAAGHIQHMQKALMEMNLQLHHVVSDITGVTGMQIIRAIVGGERDPETLAAKRDVRCRSSAEVISAALMGNYRDEHVFALTQALELYDIYQERIMACDRRMEGLLLLLSHVSAKPAADLPKPRIKTKQVSAPSFDVRGILYRLLGVDLTQIHGIGVSLALKLVAECGTDLRAWPSAKHFTSWLCLAPGNKISGGKLLSSRTRRSSSRAAALLRLAATTLGRSDTALGAFYRRLSARVGKAKAVTATARKIAVLFYNTLRYGMVYADPGAGHYDEIHRKRVVSNLHRRAQSLGFVLHPIPVATEPAVS

SEQ ID NO: 156719 - protein, 405 aa, unidentified
MSVRQAAPVTSSTIVVAVDVGKCSAMVSVTDAARCRVLGPIGCAVGCSALSAVVHRIEEAVGPSAQVKVGVEAAGHYHRPVLDYAWPTGWEVLELNPAHVSEQRRIAGRRRVKTDAIDLEAITELVLAGRGRPVGAEQMVLGEIGAWAAHRTRRVAVRSATKNQLLGQLDRAFPGVTRALPDVLGTKIGRLIAAEFAEPTRLSALGVSRLIRFAAARDVQLRRPLAERLVAAAREALPTADAAVARRVLAADVALLADLDAQITATEAELAMLVPHSPFATLTTVPGWGVVRVGNYAAALGDPGRWPGPRQIYRAAGLSPMQYESAGKRRDGAISREGSVALRRALIDLGIGLWHTDPAAKAYAVALKARGKHGGIIACALAHRASRIAYALVRDHATYDRSRWS

SEQ ID NO: 156720 - protein, 483 aa, unidentified
MIDDVLDKLNVENGAEVMPLYDYGVGIDTHKNFIQVCVLVRQGGMIKRYESEHTTAWKSMVNAGEWARRVIKEKSVPTIEPDPLRYTIESTSTYHLPVLMAFQGKPSVVNPVLAGSSRRKTDRLDARLLSYQSLTGLWPESFVVSSAVQEFRLLVKQREYHLRECTAITNRINNYILRFGHTLGSYKSVRSIENRALLEDMCGEDYVCADGCLDTEAGRFVCPDGLPAEVKKIILKMYSEYDQHNEQANYYQKQAVGYAKKLLWETDGGYVKGDTLIKNLLTVPSVGEATALLWLSEIVTPLRFKTAPQLAAYCGCDPSLKISAGKVTSQTRRKGNAKLHNQLMIVAGACINRHTEPFGQWGYALSKKHVKGGYKKASGAVARRIAVSMYYVHKQNEPFSYDKYNFYKVDVPDIKLSDMALSKRVYNLLNDNGLTNSKTITEMYLVGKIYEIRGFGKKAAQEINSWIQSNKFHNNSNRRLIDG

SEQ ID NO: 156721 - protein, 347 aa, unidentified
MVVLGIDAHKRTHTVVAVDAAGRQLGVRVTKSTSTAADLELGRWAGQFGRERSRAVEDCRHLSRRLEADLLAAGEVIVRVPPKLMAGTRKSARTYGKSDPIDALAVARAALREPGLPAARLDGPERELRLLTDHREDLVADRTRMISRLRWHLHEPDPGWDPKPRSLTSRKNLDAVAARLAGTDGLVARLAADLAARIAALTADINGLEQEIIALARQLAPSLLAVQGVAGLTAAKIVAQTADVRRFKSKDAYARHNGTAPLPVWSGNQTRHRLSRTGNRQLNCAIHRIAITQIRCHPESQACLSKRMAAGDTKTEALRALKRRLSDTVYRALLADATTSVPASRAA

SEQ ID NO: 156722 - protein, 388 aa, unidentified
MQIITDRPHAPTAIRTDLGAIFVSLELSRSTWLITSLSPGGGEKISKHTVRSGDVAGLWARFSQLKDKVQVRTGQVAPIIVIQEAGLDGFWIHRLLQDEGVESHVVDPASIATSRRRRRAKTDKIDGEALVRALLAYKRGEPRVCAMVRAPTPQEEDRRRICRERKTLTAERVEHVNRIKGLLFAQGITDYEPLSRKRRERLEELRTGDGRPLPEHLKAQIGRELDRLELTLQQIKSVETERDAMLSPSDEGTRAPGAMLQNLKGIGAEFAGVLWSEGLFRSFSNRRQVAAYAGLAPTPWRSGSVAHEQGVSKAGNPRLRTTMIQLAWLWVRHQPRSILTLWFHQRVALNGGRARKVLIVALARKLLIAFWKYVTTGVVLEGAETTAS

SEQ ID NO: 156723 - protein, 432 aa, unidentified
MISVSPPVPPENSVFAAFVGLDWADQKHDLVLYDQRGGRPEHRELIQTPEAIDEWACGLRQRFGGRPIAVCFEQSRGGIAYALLKYDFLVLFPLPPARLASYRESFSNSGAKDDPTDAALLVDYLLRHRDQLRVWQPDTPVTRELQLLAEARRDAVDQRTRLSNQLTAVLKRYFPQAVVLVGHDVDCPMACDFLNKWPTLAAVQAAAPATLRKFYYAHHSRNEERIAERLELVKSAIALTTDQALIQAGVLQGQCLIGQLRALAKAIEKYEARLNELMDQHPDAALFRTLPGAGPALAPRLLVAFGSDRERFQSAAELQSFSGVAPVTKRSGKKCHVHRRWACPKFLLQTFHEFAHCSCKRSAWAKAFYLQQRSVGKGHHAALRTLAFKWIRILFRCWKTKTPYSEDRYLDSLHRRKAPLLAFLPATETATA

SEQ ID NO: 156724 - protein, 387 aa, unidentified
MSVIIGMDPHKSSATIEVVDEAGKIQAVGRYGTDKAGYAEMLKAGRKFDGRIWAIEGCNGIGKHIAHRLVHNGETVVDVPPKLSAQVRVFATGNGRKTDPVDAHSIAMVALRSPNLVRVEVDPDLVVLGMLVDRRDELGRARTQTINRLHRLLLELFPGGAKRFLSSHQARELIATIKPRDIVGKTRRRLVVELIAELEGIDKKIKAVKKELKELVIARGSTLQDLHGIGPSSAARLLADVGDIHRFVNRDRFASWNGTAPLDASSGEQNRHRLSRAGNRRINRALHIMAVVQLRNPTEGRTYFDRKKAAGKTPMEAMRALKRRLSNVVYAQMLADQKRREATGPGGHLGTTLQSGVTDLTPDIGSWDKPLPGPATTQPRTAVPALS

SEQ ID NO: 156725 - protein, 356 aa, unidentified
MRKHSSKKATRKAAEPQWSVGLDLGDRTSRYAIVDREGELIEEGECVNTPAGLTKAFAEMPRACIALETGSQSGWIARELEKLGHEALVANARELRGIWGGVRKNDRRDAVKLARYARLDPALLHPTRVRSEQTQLELSELRVREALVRARTLLVNAARGLSKTHGKRLPKTSTKSFALRAAAELTEQLAAVLEPLLSQIAALSERIKAADRSLAQAAETDPSAARLMQVPGVGPLTALTFVHTLEDAHRFRRSREVGAYLGLTPRQTQSGSSDPQLPISKAGDVRLRCLLVQCAHRILGPFGLDSSLRRWALQLASRGGPAGRKRAIVGLARKLAVVLHRLWAREEHWRPFPAEA

SEQ ID NO: 156726 - protein, 341 aa, unidentified
MEEHIGLDVSMKETAVSIRREGERIWRGKCASDPRIIAELVRKRAPAAKRVVFETGPLSVWFYHALRAEGLPAICIDARHAKAALDMAANKTDANDADGLARLAEAGFFREVRVKGFDSMLTRTLVAARTRLVRITVELSNQIRGIMKTFGLLVPAGKGTTFEKNVRSLLIDQSELAPVVLPMVEAWRSIRIRAAELGRQLVADARQSQACRILMSIPGIGAITATSFATAIEDPGNFKKSRSVAAWIGLTTRRYQSGEVDYDGHISRRGDRHLRRLLYEAAAVILTRSSIDSSLRTWGLKLRERVGFKRVAVAVARKLAVIMHSMLKTGEFFDRNAGATA

SEQ ID NO: 156727 - protein, 412 aa, unidentified
MPDNDYELYVGVDWATQTHQICALGPGGERVDERSVPHTGAGLAALGVHLRQHVSDPARIAVAIEVPHGAVVDALLAHGCHVFAINPKQLDRFRDRHTVAGAKDDRRDAFVAADALRTDRGAFRRLHAEDPHLIQLRELSRIHGELVEEHSRVTNRLREQLWRFYPQLLALSPAADEPWLWALLQQAPTPIQGRRLTLSALRALLARHRIRRLTAEALRAALQAPDLPVAAGIVEAASEHVGLLLPRLQLVHEQRTRCERRLEALLALLATPAAGDDQDEHRDVTILRSLPGVGRVVAATMLAEASRPLAARDYQTLRAHAGAAPVTRQSGKSRFVSMRRSCNSRLRAAVFHWARNSIRLDPHSRAHYQRLRQRHGHARALRGVADRLLDVLIALLSTRTLYDPERRQQNAA

SEQ ID NO: 156728 - protein, 347 aa, unidentified
MQFYTQQHKHYCGIDLHARQMYLCILDAAGTVLLSRDIAATPQAFLAMVKAFREDLVVAVECMFTWYWLADLCAKQGIAFVLGHALYMRAIHGGKAKNDRIDAHKIAALLRGGMIPMAYVYPHEMRATRDLMRRRNHLMRKRSELIAHIQNTASQYNLPPFEHRITKKHQRVGLLEHFPDVQVRNSVALDVSVIDHYDELLPKLERHIRACAKGHDAKAFTLLRSIHGCDLVIPLIILYEVHDIARFARVQDFLSYCRLVKPKRESAGKLYGHSGRKIGNAHLKWAFGELATTFLRANPRAQQLHERLKKKHGKGKALAILAAKLARAVYFMLSREKVFDPDKFYQV

SEQ ID NO: 156729 - protein, 345 aa, unidentified
MNKPVTIFSSTLYCGIDVSSRSLAVALIEPDHAVYQHEFANSASGHKALLVWLGKHNAPLRVSLEATGIYSLDLALALDAQAWIELAVLNPKLVNLFAQTLRRSKTDAADAMVLAEYSQRMPSTAWQRPGVNALRLRTISRYVQSLVVDLAEVKNRLHTAESTSTTPRAVLVDLKQAHAAFERRLAKMRREAMKLIQDDAVLRKRFALLVSIPGIAEVSALQILSELVLLPPGMTVRQWVAYSGLDPVHQVSGTSVHKPSHISRAGNRHLRHALYMPSLAAARFDPHMRAFYQALRARHKTGLQALMAVERKLLHAIYGIFKSGKPYDGKLLFPQIQLAVESVAG

SEQ ID NO: 156730 - protein, 428 aa, unidentified
MTTDRVPCRKFILGGAIMDKIYDSCCGIDVHKKLIVACLRKGNRQEVREFGATTRELLELADWLKTSDCKMVAMESTASYWKPLYNILESSDLNAMVVNARHMKAVPGRKTDVKDAEWIADLLQHGLLQPSYIPDKDQRELRELVRYRKSLVGERTRELNRLQKMLEGANIKLSGTVSDINGKSARSILEYLLTGECIDGAKYDEMYEQKVIAHNLKATKEQIIDDLNGVMTPLQRRMMKELLSHLDELNTHIKNLDDEIDNFMKPEEKQASQAIQDVTGIGNTSAQAIISVIGTDMERFSTDRHISSWAGLCPGDNESAQKRKSGKTRKGNSLLRTTLITCAHAAVKNKKSYFYAQFMRISAHRGKKRAYVAIAHSMLIAIYHILKDGVIFKDLGADYYNQFNKERKINAYLKKLKALGWEAPVVAA

SEQ ID NO: 156731 - protein, 368 aa, unidentified
MGASVLYVGLDVHKMSMDVAIAATGGEVRHYGRIGGDLEALDKVVRKLQSTGAGLRFAYEAGPCGYQVYRHLTGQGYPCLVAAPSLIPRRPGDRLKNDRRDAVTLARLFRAGELTAVKVPEPEDEAMRDLTRAREDAKSVERRAKQRTAAFLLRHGHRFSGKTTWGRGHWRWLQRLCLEHPAQQIVLQEYLDAVAEAAARVQRLTAQIRELIPQWRQAPFVRAYQALRGVSLIVAATMAAEIGDLGRFANPKELMAHLGLVPSEHSSGATVRQGRITKTGNGHARRVLVEAAWAYRLRARMTQALHRRQEGLSQTVREIAWKAQLRLCARYRRLFARGKNKPMIVTAIARELAAFLWAIGQAVQMATA

SEQ ID NO: 156732 - protein, 373 aa, unidentified
MPKYSTAFGMDVHLRSTTVCALDADTGEAVTRRFPGNPWGEIAGWMDGFPGPSLAAYESGYLGFAPQRELAGLGVECVVAAVSKIPRSAADSASKNDRNDAARMAKAILAHDISPAWVPSPEVEGIRDLAGAYGGATARLATAKQRLLAFLARRGFVYGGTTPAGNPRKYWTYDFLRWLDKVRPEDDGGVRTLAALRNEVEAAAEARADLLSEYRAAVDASPIAAEVAALQSIKGCAFALAAAFSAEVGDFTRFRSGRQVTAYFGLAPSQRSSGDSVRLGGISGAGNALVRKLAVEGSWCYAAARHQPKLMPRDTGVPLEIRMHGRKGSERLLRRREEMLARGVPAAKANAATAAELVRWLWALGMMCREGAE

SEQ ID NO: 156733 - protein, 412 aa, unidentified
MRRVIGMDIHRTFAEVVVWEDGRLRHAGRVDMTRTALEGFGKSLKATDEIVVEATGNTMALVRVLSPFVARVVIANPLQVKAIAHAHVKTDKIDAGVLASLHAARFLPEVWTPPAETERMRRLVARRNQVVRHRTRIKNEVHAILHAHLIPCCPHADMFSQIGRAWLKRQPFPDDEMMAIERHLRELDRLGEDLELLDREVAKNALDNPAVKRLLTITGVNVTVAAGLLAAIGDIRRFPSPQKLVSYVGLNPRVRQSGLGFAQHGRISKIGRSHARAMLVEAAWAAAKAPGPLHAFFVRIRARKGHQVAAVAVARKLAVLCWHLLTKDVDYLWARPALVAKKVRGMEIKSGQPVKKGNKPGRAHDYYVKTLRDREKTIAENAERAYEHFVRQWQPRRPEDAVRGRLKTARRE

SEQ ID NO: 156734 - protein, 368 aa, unidentified
MSERTRFVGLDVHKASIAVAVAGEYGEPEDHGQIANDASAVRRMLQRIGDGADRLVVAYEAGPTGYALHRQVSAMGISCIVVAPSLIPVRPGDRIKTDKRDAAKLARLLRSGDLVAAWVPDEAGEALRDLVRARDDAKTDQLRARHRLSKFLLRRGIHPSPGVRPWSRAHEAWLGKVAFAQAADQVVFEDYHAVAQAAAERVKRLEGALMRTAGEGPQAELVTALQAIRGIGFLSAVTIAAEAGDLRRFATARQFMAYVGLVPSEWSSGPARHRGRITKTGDRLIRHVLGQAAHNARYRPNVSSSLRARQRLVAPEIVAIDRRAQVRLHHRYRALVGRIGKNKTVIAVARELAGFVWAAGQHVAPRAA

SEQ ID NO: 156735 - protein, 389 aa, unidentified
MKIFVGIDIAKLNHFAAAISSDGEIILEPFKFTNDADGFQLLISKLESFDKNSIIIGLESTAHYGDNLVRYLVTELYQVCVLNPIKTCQMRKNNIRKTKTDKVDTYVIAKTLMMQDNLRFFSFYDLDMMDLKALGRFRQKTIKQRTRLKIQLTTYVDQVFPEIQYFFKSGLHQHAVYALLKEAPSPKEIASMHMTHLANLLKVNSHGHFTKEQAKELRVLAQKSVGANDSAISIQITQTIQQIELLDSQLEKIEAEMTEIMKFNDSVLMTIPGIGYINGGMILGEIGDIHRFSNPNKLLAFAGLDPSVYQSGNFQAKTTRMSKRGSRVLRYALVNAAWNVVRNNATFKAYYDAKRSEGRSHYNALGHCAGKLVRVIWKMLTDNVEFNLE

SEQ ID NO: 156736 - protein, 407 aa, unidentified
MIFVGVDWAEAHHDVFVQDEDGKQVAGGRLPEGVEGIARFHEMVGHHAEEPEEVVIGIETDRGLFVGALVAAGYQVFAVNPMSTSRYRDRHSTSGAKSDPGDAKVLADMVRTDRHNHRPVAGDSELAEAIKVLARAHQTMIWSRTRQTNFLRSTLREFYPAALVAFDDLTSGDALEVLKVAPTPTLGSGLSRSKIADALRRGGRQRRVDQRAEEIQQALRAPQLQGSALVATAMGSSVSATVAVIATMNAQVTELAQELEVHFEQHPDAEVVRSLPGLGTILSARVLGEFGDEPNRYATAKCRKNYAGTSPITRASGTKRIVLARYARNMRLADAIYQWAFASLTASPGARAFYDYRRAAGDTHHAALRHLGNRLVGILHGCLIHHNAYDENTAWGHRAEIELARAA

SEQ ID NO: 156737 - protein, 372 aa, unidentified
MGHHTEAFVGIDTSKLRNAVAIADGGRGGEVRYLGEFPATEAAIRKLVTKLAAKCCHLTFCYEAGPTGYSLYRLLKSLGHDCLVVAPSLVPKKAGDRVKTNRRDAMSLAKLLRAGELTAVWVPDERHEAMRDLSRARQAVKKDLQGKRQQISSLMLRLGRIYPGKTTWGPAHMRWLMEQKLEYREQRIAFEELLEGIRQESERMERLEDAIREVVPEWSLAEVVAALQAMRGIDLIAAVGVLAEIGDLSRFQNPRELMGYLGLVPTEDSTGDKVKRGGITKAGNGRARRILVEAAWSYRYPPRVSRDKQPKVEAAPRRAREIAWKAQTRLCGRFRSLERKGKRRTVIVTAIARELSAFIWAINRELMPPRQA

SEQ ID NO: 156738 - protein, 427 aa, unidentified
MQPLTRVSEGDSECTTSDGEAGARRADGLERARASTYDLDLRPSTSTLYLEVSPMNKTVAARQIVRPLVTKTVVEHGIVVRPCHSRARTVARAKSSHHARMGVGSDVHGEDSMDAVFVGIDVSKATLDVALRPSGKRWGVANDEAGIKHLTAELQQLKPTVIVLEATGGLQGPAVAALALAQLPVAVVNPRQVRDFAKATGRLAKTDALDAAVLAHFGEAVRPQPRPLRDEQTLALDALLVRRRQLVEMLTAETNRLGTAPRSVHKDIQQHIIWLRRRLRDVDTDIGTSIRNSPVWREKEQLLRSLPGIGRVTATTLLAQLPELGHLNRRQIALLVGVAPLNRDSGTLRGKRSTWGGRAHVRSALYMATLTAVKWNPSLRAHYARLLAAGKLKKVALIACLRKLLVISNALLRDRTTWNPDFAATAA

SEQ ID NO: 156739 - protein, 406 aa, unidentified
MEVLYERCCGLDVHKKRVTACAITPEGKETRTFGTMTDDLLALVDWIKEKGCTCVAMESTGVYWKPIYNLLELAGIETLVVNAQHIKAVPGRKTDVKDAEWIAELLRHGLLRGSYIPSREQRELRELVRYRRSLIEERAREVNRLQKVLEGANIKLSAVASDILGASGRAMLEALARGEENAEVLAGLAQGRLKEKEEELKQALRGLVGPHQRMLIAVQLEHINFLERQIALLSEEIARRMRPFEEELALLDTIPGVGRRNAEEILAETGTDMGRFPSAAHLSSWGGVAPGNNESAGKRKSGRTRKGNKALRATLTEAARSAARTKNTYLSASYHRIAARRGANRAAIAIGHAILVIAYHILKRRQPYVELGPNYLDERKKQAMVRRTVKKLQDLGYEVRIEPRAA

SEQ ID NO: 156740 - protein, 388 aa, unidentified
MRQVCGLDVHKDSVFVCILNENGVIFQEKFGVLTTEIEQMLGIMQQHDVSEVCMESTSIYWMPVWRVLEPYFELKLVNPFFIKQLPGKKSDVKDAEWIATCLHKGLIKGSYVPEDRIQQLRQYDRRIFDLDKDIVYKLTKLDAALQRCNIRISNYLSNTHSKGYKEVVNKLAKGTTDPEELIKSIHGKTINKVGREVILGALTGVVSKADVDMIRQLRDEVELAEKHKEECQSKMDALCRQWFPDEYALLQTIPGVKARSATSVLAELGNDVSAFPDASHLTSWCGLKPRNDESAGKIKSRKITHGNKYLRKTLIECSWAARRTQGSFYSRFSYHQTVVRKKNSMKVQVAVARKMLSAIWFILHDHVPYKDYTPPTPEETSSDIVPTE

SEQ ID NO: 156741 - protein, 417 aa, unidentified
MQVETDEPEIIERVAALDVSKAEVVCCARVPGPGRQRMQEVRTVSTMTAALLGLGDWLAGLGVTRVVMEATSDYWRAPFYLLEDRFETWLVNAHDVKHLPGRPKTDRLDAVWLCKVAERQMLRPSFVPPPAIRQLRDLTRYRVDLLAVRTAEKQRVEKLLEDALIKLSVVVSDPFGISGRAMMAALIAGERDPAVLAEMARGSMRSKTARLTESLTGRFTEHHAFLLTQMLQRVDAATADIATVQARIEARIGELGPAVARLDAIPGIGPVAAQMILAEIGTDMGRFPTPGHLTSWARFAPGVSESAGRPTGNSGTGKGNRYLARVVGEAAVSAARTDTFLGERYRRIARRRGKKRAIVAVGRSILVIVWALLSDDEAQFVDLGPDFYTARTNPERKVRQHIRELQALGYAVTLNPA

SEQ ID NO: 156742 - protein, 430 aa, unidentified
MNEPNDITSAPEFAAFIGIDWADQKHAFSLLPSGAKRKETGVLEQKPELIGAWVAKLRERFGGHNIAVAVEQSRGALIHALLDYDFLVIYPIHPTTVAKFREAFKFSGAKSDPLDTDQILEILVKHLDLLKPFKPDTQETRLLSRLVADRRNAVDHRTGFVQGLQASLKEYFPQALDILQHNVSSCLAADFLKKWPNFPAFQQAKPSTITRFFYGHNVRSPKAIKKVLEIAEKSQALTTDAAIVTSGAELSRMYSDLIQTLNARIEEYERAIEKVFHNHPESKWVGGLPGAGASLAPRLLVAFGTDRSRFETAENMQSFCGIAPVTRSSGNSRAVYMRRACPKFMKQTFHEFARLSATRSEWARNYVAYYTKKGKKFHAIIRALAFKWIRILFQCWKTQTPYDEKKYMEVLRKRGSQYAKILPEKSHETI

SEQ ID NO: 156743 - protein, 355 aa, unidentified
MNDAKYIGMDVHQATISVAVRDSRGNLGMEAILETKADTILEFIHGLRGSLWVTFEEGTWAAWLHDLLLPQVTRVVACDPRKNALLKVGNHNDRMDARKLSELLYLNKLSPVYHGEQGIRTLKELARSYITITRDLTRVMSRLKAIYRSWGIPCAGQQVYAPRYRAEWLAKISEAGVRRRAELYYQQFDALAALRQGTRRELLAEARKHPAMRLLRQIPAIGPIRAALLIALIQTPNRFRTKRQLWAYCGLALRTYTSGEYRFVAGQLKRSKKVLAVRGLNINHNHDLKNIFKSAATRAASTVGPCQDFYYACVARGVKPHLARLTLARKIAAITLLVWKKGVRFDAEHLKQQAA

SEQ ID NO: 156744 - protein, 363 aa, unidentified
MRISVGVDLHKTQFTVAARGAETLHGQYATTKEGYAAFLEQLGRLRKRGAEVRLAVESTGNARYFKRQMAQEGYPVVVINSLKFKVINEAVKKTDRHDAATIAEFLEKDMLPEAWLCDEQTEALRRLLKTRSVLVRARVTIQNQIHGMLVSIGMEDKKAGLQSKRGRQEMLDALKSAGYGLEVHALMETIDMLSERVKMLEQEIAKKVRGDRDVQLLRTIPGCGLLTASTIRAYTDDIRRFVSYKQYAAYAGLVPWVQRSNETVHYGRITKRGPEALRTAFVQLVLGMVRNRRKTGSYRLMHDYTAMKGSKSTGKAIIATARKLAKIVWSMLMEGKAFDPSSMRDRRIWEKADAMRTSIAQSA

SEQ ID NO: 156745 - protein, 428 aa, unidentified
MNDVDRNRLEEFRQLKQEIRHSEQYLIVGIDVAKDRHHAFFGTANGKTLLKNAVFDNTYEGFRRLLDQTETLRVRHGLSKVVYGMEPTANYHKPFGEGLIELGRNVVLVSGLMAKRNRESLDGRWDKHDRKDSANIADLIAQGKCLFYDYPVPELRGLRNLIALKRRLKKQEQSYAIRIRNQLIARYFPEMDRDYRGLGAEGLPIVRWCLPASEIAQFEVDAFVERVSSKRIRAEKRRRLEALWEKAAESIGCEPVPGLDHEAKLMVEGLKQIREMIQETEQKIQELCKSFSSYGYLLTLPGFGPDISAKVMAAVGDPERFVKGRQVLKLAGLDLGADRSGKNSDKAIPEISKRGKADLRQALYQAALVASRRNPEFMRYYRSKIRGREKEKGIHRKMLVKLSAKMLVIAWTLMKKQEAFNPAFIKVE

SEQ ID NO: 156746 - protein, 453 aa, unidentified
MPLEAKSSSRVRKAPSTGVLDPNGILGPGEEGLCPRMNKGGTEHRLRGSRVAPSGSRGKVNYAGIDIAAEVHFVAVVNEHGEVIQKATRFEENAAGYEALLKLLGEPAGLVVAMEATGHYWKNLFAVLVSRGYQVAVVNPLRTRRYAEGNLERSKTDAIDAVGIARFAQEKKLTATKAPDAQTEELKELVRLRDRLVDDMTNRVRELHRVVDLSFPEFTTVVKDLSSMHALALLTKYPTASAFRRARPKDISNLAYDRGHRIGLELADALRAAASKSVGQHDAAVYKTQATYFCADIRVLKERIKELDKNINTHVDNHPVAKLLTSIDGVGNGTAARLVATFGDIAAYEGGKALASYVGVVPATNHSGKKQPRRAGITPIGNADLRSALYMPTWTAVRKNPWLNAFYERLVKAGKPKKVALIAAMRKLLHAIYSVAKNKKPFVPRLELKETNS

SEQ ID NO: 156747 - protein, 398 aa, unidentified
MLYVGIDVAKHKHDLAVIDTEGMIFIRHLQIENNREGFTKLQMTLANLQKTTGENIQIALEDTGHYCFNILRFLRTQGYSTYSYNPYLIKEFAKNQSLRKTKTDKKDAMTIARKLRTDLDKQCFNTQPLMIELKYLTRYTTRLKEDCTRKKVSYTRILDILFPELAPSLGSSSAKHQSYVYAILKEYPSARKLGNAHLTKLTNLISTHSKGHFGKDQAIKLKTLAKSSIGQESPALEFELLQTIDTIQYLTAMRDKAEKEVARLMSEIDSPILTIPGIGFKLGSVILAEIRDIKNFRSPNQLLAYAGAEPSVSTSGMNQTETGRMVKRGSSQLRWALHESARLMSIWSPSMRLYFQKKLAEGKHYNVAISHVVRKLVRIIYQLLKDNKPYEEQKMIVN

SEQ ID NO: 156748 - protein, 338 aa, unidentified
MSIVRIGIDLSKNTFHVHAVDIEERVVIQRMMSRAQLRHFLAMTPPCSVATESCGSAFHWARYATQCGHLTKIVASQFVKPYVKSNKNDFNDAAAICEAASRPSMRFVPTKSIEQQDIQALHRVRTRRVAERTALGNQIRGLLLEYGVPIGLSLITLRQRLPAILDDEQNELTPRARSLFRELYDELLDLEGKIAYVERKINQIFKASEPCQRLAQIQGVGPLTSTALVAAVGDARVFKNGRHMAAWLGLVPRQHSTGGKARLLGISKRGDRYLRTLLIHGARSALRVMGRKSDRRSRWAIDVEKRRGANIATVALANKTARIAWAMLAHDENYRAAV

SEQ ID NO: 156749 - protein, 435 aa, unidentified
MNCVDDIRLEQFLQLKKEIRGSDKHLIVGIDAAKEKHNAFFGTARGKTLVKNLVFDNTLEGFQKLLAYVERIKVQYSLPKVVFGIEPTANYHKPLSEHLIKCGHLVVLVGGVAVKNNRPLLDGRWDKHDVKDAANVADLISQGKCLFYEYPLMTLRNVRILNALKRRLKKREHGISVCIRNNLLAQYFPELDRHYGPSETLAVVRECLDPSAIAGMEYDTFYRAVAPGRTTLAKDRRVRAIWRTAVDSIGCTMGEASSFEAQVMVDSLKQIRLTIKSVEDKLEDACLEFPEYTYLLSIPGFGPDVSSKVLGAIGNPHRFANGKQVLKMAGLDLCADRSGKKSNSAIPVISKQGKADLRYGLYQAALIASLKNKDFIAYYTNKLKGRAKEKGIGTKMRVKLAAKLLIIAWTLMKKKEFFDPKHLKQEDQDAQKKAA

SEQ ID NO: 156750 - protein, 344 aa, unidentified
MEHFAGLDVSVKETSVCIVDEAGRITREVKVASTPEALMQVLRAPAYHLKRVGLEAGPLSQWLFGALAEANVPVICVETRHMRAVLKAQINKTDRNDARGIAQMMRAGLYRPVHVKTLRSQKLRMLLTHRKLLQSKAIAIENDLRATLRNFGLKVGVVGTAKFEARIKELVGDDSDLVLMVEPMLIVRRVLREQLAILHRHLLALARDDGVCRRLMTVPGVGPVVALTFRATVDVPARFQNSRAVGAVFGLTPCKHQSGESDYTGGISKCGDEMMRMMLYEAAQILLIRATKWSWLKSWAMQIAKRRGVKKAIVALARRLAVIMHRIWIDGTEFCWIRQKAVAA

SEQ ID NO: 156751 - protein, 428 aa, unidentified
MQRQKTKRMKSWQDLTHYAGFDWAKDHHAVLILNHQGAIVADFEFEHSLEGWKSFVEKTSAWPSLALAIETSQGAAVDQLLQRGYTVYPVHPVAAQSYRERKAPSGTKTDHLDAWALADALRVDGHGWKTLQPMDPMTQQLRLLCRDEVVLIEQRTAMVNQLQQALLEYYPAALEAFDDWTDAFTWEFILAFPTPQALVEAGKRRWEKFLHTHKLWRPETAEKRLKLFAQADQFKASDPIVRAKSQLAVSLAKLLCTLGQQLKLYRKQIEALFRDHPDHDVFGSLPGAKKMLAPRLLASVGGDPGRYGSHEVLQCIAGTAPISYQSGKLNKVRVRWACDKFMRYTVHLWADCFRKASAWGQTYYQQKRQAGMTHACALRCLGQRLLKILFRMLVTRKPYDAEFHARSQQKHGSWVLKLVNNPVLEVGQ

SEQ ID NO: 156752 - protein, 357 aa, unidentified
MTANGPPVVGAILAIDLGKYTSVACEYRGASDGVRFHTVRTRREELCRLIERLRPGVVVIEACAMAGWVHDLCGERGVCCRVANTASEAWKFRHSKRKTDRDDARRLADLTALGQLPTVAIPAKAVRERRALIAVRQTLVGRRTTVRNRIRGILLGQGLPVPVGHRAWTELGRAGLAQLGRPLAACSAEDLWRGLLDLALTELGQVEALVAATEAKLNAQGRDDAATRLLQTVPGVGPRTAEAIVAHLDDPHRFRTGKQVSAYAGLVPRQYQSGESDRRGRITKRGSVVLRSLLVECAWALVRYNAWGRATYRHLTRGGPARRNVAIVALARRLLVRCWAMLRDGTAWRVGPATAVH

SEQ ID NO: 156753 - protein, 385 aa, unidentified
MQASSKDTPTVGHYGTIFVAIELSQRSWLVTMHCPDRDKISRHKLEGGNHAGLLALIARLRERAAGAQGVAPAVVSCYEAGYDGFWLHRLLMAAGITNYVFDPASIAVDQRARRVKTDRIDGEKMLRTLMAYLRGEPRVVRIVRVPAPEQEDARRDTRERDRLTKEQTAHTTRIKALLRLLGMAVGNPRRRDWLTWLAAQRDWQGQAVAPRMLSEIEREHARLMLVREQLDALTRTPAADLTPAAAQMAQRSELLRRLKCLGPAFATTLTNEVFYKDFRNRREVASYFGLTPSPWQSGGIDREQGISKAGNPRARCSAIELAWLWLRHQPDSALTQWFRSRTLNASKRNKRIAIVALARKLMVALWRYLTTGLVPEGAALKAVKA

SEQ ID NO: 156754 - protein, 359 aa, unidentified
MLNNSTFFIGLDLGDKHSYVAILDPEGELIEESRLPTNKTSFQRKFSSLQRCRVAMEVGTHSRWASQLLKELGYDVLVANARKLRAIYHNPRKGDRADAETLARLARLDPELLSPIHHRSPEAQADLAVLRSRDAIVRCRTLLINHTRDLVKSSGSRLPSCSADSFARKVAPDIPEPLRPALAPIIDTIASLTQQIQSYDQTNEELCSERYPETRLLRAISGVGPLTALAFILTLENPDRFRRSREVGPAIGLVPRRDQSGDQDPQLRITKTGDAYLRRLLVGSAQYILGPFGPDCDLRRWGLKLAERGGKNAKKRAVVGVARKLAIVLHHLWKTGEIYDPFYLARKYDQVSETMPAAA

SEQ ID NO: 156755 - protein, 337 aa, unidentified
MKYSGIDLHSNNSVVVVSDEVDRVLVRRRVPNDAAAILALLAGHREELVGVVVESTYNWYWLVDALQEDGYRVHLANTAAIKRYEGLKHSGDEDDAAYLAQLLRLKILPSGYICPPAARAVRDLARKRMQLVRSRTAQVLSVENMLSRETGAGMRSYAVQRLTAQDVESFGFHQDVGRAMCANVAIIQTLNREIAKLEQRLSQCVRLRPEFRLLTSVPGIGQTLATLIMLEVGTIERFAAVGNFASYARCVDSARLSNGKKKGQGNVKNGNAYLAWAFVEAANFTRRYCVEAQRFYDRKKARTNGVVATKALAHKLARACYHMLKEQKPFDVKRCFA

SEQ ID NO: 156756 - protein, 418 aa, unidentified
MYNEVTSAKCSVVPSSIKSIIMRSYAMIYVGIDVAKDKHDCFVVNSYGEVLFDVFEISNNIDGFNDLFKKIQIVSESFDEVKVGLEATGHYSYNLLGFLVNKGLTTFVINPLHTNLFRKSFSLRKTKTDKVDARTIAAMLASGVDLKSYTDTEYHNEELKSLTRYRFDKVRERAKLKQSVSRLVNILFPELEKLVPTIHIASVYALLREFPGASHIAASHLTRLKNLLCVASKGHYGDDTAVLFRNTARNSIGSCMPAKSLELQHTIRHIGELDLTINEIENRIKVIMDEMGSTILTIPGISYRMGAMILAEIGDISRFDSPDKILAYAGLSPSTYQSGQLTSSSYSRMEKRGSRYLRYALFNAAKFVCNWEPSFADYLAKKRAEGKHYNVAISHTVKKLVRLIFALERSRQPFIATT

SEQ ID NO: 156757 - protein, 466 aa, unidentified
MEPFYLGIDVSKGYADFMIINSKKQPVVQAFQLDDTFEGHQTFYNTLGRFLAKHDDATLFAGMESTGGYENNWYSSLIDFQGSLNIQTARLNPLGVMHNSKAELKKNTTDKISAQNIAEYLVAHPEKVVYQQQDSLAGLRKQWGFIRMLTKQCTQFLNQLNSLLYSTYPELLSYCQDGVPNWVLKLLVKYPSADNLKKARATTVVKIPYVSRKKAEDLIAKAKRSVASTTDLTTQQIVVATVQQILHLRKTIAGQTALMLQECSIPEIELLKSFPGISDLSAVGLIIEIQTIKRFASAKKLASFFGVHPVYKISGDGAGGFRMSKQGRIAPRQILYMNALSAIRCNPLIREIYEKHKKQGKHSRAAMGICMHKILRILYGMLKHNQPFNPHIDLANRLRSVPMQGNEAVDSTSRRLQGYDQTAPVSRRQRKKRLERERSHNVSDTMSGITTPAPLADIIADMFPQV

SEQ ID NO: 156758 - protein, 355 aa, unidentified
MNSIKYIGLDVHQSTISVAVLDSDGKLVMQCVLATHATAIVDFIHGLRGSLHVTFEEGTHSAWLYDLLGRRVSKLVVCNPRKNALLKAGNKSDTIDARKLAELLRAGLLSPVYHGENSAQTMKQLVRSYSALTEDTTRIMGRLKALYRGQAIGCAGQKPYGRRHREQWLEQLPEAGLRRRAERLYQQLDAVQELRRQARRDLIVQCRKHPEAKLLRRVPLLGPIRVAMLIGRVQTPHRFRTKRQFWAYCGLALETRSSADYQLVNGQLERRKKPVFIRGLNLNHNHDLKNLFKSAATSAAVRPGVLREFYENLLKKGMRAEMARLTLARKLAAVTLHVWKKGEAFDAQQLKSQAA

SEQ ID NO: 156759 - protein, 344 aa, unidentified
MNQISRIGMDTSKHIFQLYGVNAAEAPVLRKKLRRKEIAAFFEKLAPTVIAIEACGASHHWARLLQSFGHSVKLIAPQLVKPYVKRGKNDATDAEALCEAMSRPTMRFVPVKTAEQQAALMLVSVRDRLIRNRTQLANAIRGYAAEFGLTAAKGIAHLGPLLERIQADGSLPSLARELFAIQGKDLMQLQAQIGELDKKLMAWHRANECSRRLVKIPSVGPIGAVLLKMKTPDPQLFRSGRQFAAWIGLTPKDHSTAGKVKLGGITRAGDEGLRSVLVAGATAVIQHAQRGGKPSPWLAGVLKRKSPKVAAVALANKTARIAWKMMVTGETYTAKSAPTQAGAV

SEQ ID NO: 156760 - protein, 308 aa, unidentified
MALDQSGAVAFKARCTRATVLSTLLRLDVEAIAMEACAGAHDRARRLAEQGRCVRLLVAADVRAFVRGQKNDYNDAQAIAEAALPPTVRTVGVKTIEQQDIQMLHRMRSRLVQQRTALINQARATLLECGVAVGRGRKTMASKRPELPAREDLGLTQARRDMLGQCLRGWREAEQQAQHIDAQPAAVARADARCRRLLAVPGEGPLTATALVAAVGNASEFGCGRDLAAWLGLVPRQHSTGGLPRLLGISKRGNTDLRWLFCHGGRSVRAHLEREQHAGGQWITGPETRMHPNKATVAVAANGCACPG

SEQ ID NO: 156761 - protein, 348 aa, unidentified
MEMVGGLDLHRSQITFRTVDLRTGEVKRGKIYPGAREAVREWLERFEAGTEAHFALEGTTGWRFVAEEIERRGFVAHLADPAELSTLRGPKRRAKTDHADCELMVNLLLEGRLPESWIPPAHILELRALVRLRKTLLDQRTEWQQRLQAQLFHQGVVAGLRLRSPQDRRRLTGVEMSPAGRQTMGTGLVMLDDFDAQLEPLSAQLVALAKTQPGCRALEHELYGVGWLTAVAVVAELGDCRRFHSADQAVRSSGLDITVYESNGKRPGGHLARQGPQVLRWALFEAAQCAARKGSPDHAYYLKVRERIDHNRACLSVARKLCRRACRILRDLGDAAMAPPASQEPKAA

SEQ ID NO: 156762 - protein, 393 aa, unidentified
MFIVGIDIAKRSHEAIVLEDSGKVAHKAFSFKNDVSGFKRLLDILLSLSADPDHFVVGMESTGHYWLALYSALRKQGFSVCVLNPIQSNALRNLYIRQVKTDQRDCLIIADVLRFGRYQQGNVPPSELYELRELCRARSFLVDTTADLKHKVIALLDQAFPEYETLFTNIFGLTSSELLLNCSTPEEILAIDTDKLAKILETPSRKRFGRAKAEQIKETAANSFGVILEFGSAGFLIKQYMEHIRYTESQIAQLEEKIAELFSHFDTQLTTIPGIGPTLGATIFSEIGDISRFPSPAKLAAFAGIDPSVKQSGEFQSSHAHMSKRGSPYLRRAIWQASVIAAMHDPAIRAYFEKKRSQGKSYMVAIGHVTRKMSNIIFAVLRDNKPYYSSLDS

SEQ ID NO: 156763 - protein, 358 aa, unidentified
MAGKVTEAAVVGGVDTHKDLHVAAVVDQNNKVLGTQFFSTTRQGYRQMLAWMTSFGALKRIGVECTGTYGSGLLRYLQNAGLEVLEVTAPDRMERRKRGKSDTIDAECAAHAAFSGIRTVTPKTRNGMIESLRVLKTCRKTAISARRVALQIIHSNIISAPDELREQLRNMTRMQLIRTLGSWRPDASEYRNVTNVYRISLKSLARRYLELHDEIADLDVMIAAIVDELAPELIKRNAIGYESASQLLITAGDNPQRLRSESGFAALCGVSPVPVSSGKTNRYRLNRGGDRAANSALHIIAIGRLRTDDKTKEYVARRVAEGHTKMEAIRCLKRYISREVYTLLRNQNRQINIIPITA

SEQ ID NO: 156764 - protein, 373 aa, unidentified
MNKIQHLAIDVHDQQFHGCLLSGDGQCIEFSTPPDVGALAKKVESLRDREAELKICYEATYVGFRLQRDLAKRGYHCDVIAPSLTPRKPGERVKTDRLDSRKLAEYYQRGLLTLVHIPDESQEKVRGLIRSREFLVGQLKALKKHILSHCRCMGLDYRRSGTGGAQISHWTGLHRQWLLGRIREMHEDGLKLNLQMLLQMEHLERSVAGYDEDIKRIAEQAEYKKAVGAVCCYRGLDVLSAMTLICELGDIRRFDHPRRLTAYAGMSIVESSSGAHQRRFHISKMGNRFIRTTVIEACQTVGSLPRISRQLAKRREGAEKIWIEIADRAMARLHKKAMHLWHVNKPKNKIKVACARELLGFIWESLRAVASNA

SEQ ID NO: 156765 - protein, 481 aa, unidentified
MAKRKKSTFERLQNSSPNRQQRKKLQRQFDADSGELIVVHPNAAGVDVGNPSHFVSVPPERDQTPVREFGSWTADLRDMVAWLKSCGITTVVMQSTGVYWIAIYDLLEQAGLEVYLVNARGTKNLPGRKSDVQECQWLRKLHTYGLLRKSFRPPEQIREVRTLWRLRGRVLEDSSRAVQHIQKALTTMNVQLANAISDVSGVTGMAIVRAILQGQRDPHELAKLRDPRIQASEEEIAHSLEGNWQRDLLFELQQVVEAYDFHRQQLTTIDTELQKYMTALPTREPVGEASTDVSKLSAKLRKKLKANRKHKDNRPGFDLGAELARLMGVDLRLIDGIDVMTAQTIYSEVGADLSAWPSEDAFASWLELAPRNNITGGKVINKEKRPSNNRVTTALRNAAESLVRSDSYLGARYRHFTGRLVGLKGVKAMARYLACLVYRLLTKGPAWVDRGAAYYENKRRDRELVGLQRKAAAAGMRLVPV

SEQ ID NO: 156766 - protein, 423 aa, unidentified
MTSMTLDPPLPNSLSPAVELVAGVDTHKNTHHVAILDLVGRPVADREFRADGRGYAQAIAFLRAHGDVVRVGVEGTGSYGAGLSRALNAAGLTVVEVARQDRQARRRRGKSDPLDAHQAAVAVLAGTDTAIPKTGDGAVESMRILLAERRSAAKARAQVMNQIHALLITAPELVRQAFRALSGQRLVNTLAKTRPGTVASPDPEVVARQTLRRFAVRHLTMQAEIDLIEQQLDLLVRQVNPTLLSLSGVGTVTAATLLVAAGDNPERLGTRASFAALAGVAPIPASSGQRTRHRLSRGGNRHANAALHRIVLLRMRHREPRTMAYFERRRAEQLTDRDIMRCLKRHVANEVYAALLNPATDNPAGRELRARRQAIGIPISVLAATLGVPYQRLRRLEIGTRADPDLEARATAILKRITSPLTA

SEQ ID NO: 156767 - protein, 318 aa, unidentified
MIVKHFVGIDVSKGDFYACINDVEAPRKFNNTPAGVRGFLSFLNAQQYLPRTTRIGLESTGPYHYPLSFSCTRQGYTVNIINPLITHAYNKTTVRRTKTDKKDASLIRYVLTQGAGYPFVETTDTLILKNLARERAYLSNMKRDIQRKAKDVQYKEAIINTPITNVNQEVFALLSEKMKDIDRQLRQYKTQEQTLLQSIPGLGPTTAATLVAEITDIKRFKTPKHFTAFIGLDPRTHQSGTSIHGKGYITKRGNKILRTLFYNCASVAIQHPNIFQDFYQKKVSEGKPKMVALIATTHKLAKVAYAVWKTNTPFDPNH

SEQ ID NO: 156768 - protein, 349 aa, unidentified
MSCKLNSGIAVIGIDIGKNSFHVVGHDRRGTIMLRQKWSRGQVEARLANLPPCLIGMEACVGAHHLSRKLKTLGHDACLMPAKYVRPYSKGQKNDFRDAEAITEAVQRPTMKFVATKTGEQLDLQALHRVRERLVSQRTGIINQIRAFLLERGVAVRQGLRFLRAELPRILAAPCDALSPRMLRVIEDLAGDWRRLDERIEGLSSEIELLARRDHGCERLMSVPGIGPIISSAMVAAIGTGDAFTKGRDFAAWLGLVPKQISTGDRTILGKISKRGNRYLRVLFVQAAWAVLIKPKSWARHGLQPWLAAAKKRLHHNVLAIALANKLARIAWSVLAQGRTFEASKIQVA

SEQ ID NO: 156769 - protein, 402 aa, unidentified
MNCVGIDVSKGKSMIAVMRPFGEVVVSPFEVRHTANELSELAGLLKSLDGETRVVMESTGNYHAPVAWLLHDAGLYVSVVNAMLVHDYGNNSLRRAKTDKKDAVKLANYGLDHWLTLPRYIPEEDTRLMLKICYRQYQQYSKVQTMLKNNLISLLDTTFPDANRLFTSPPRADGSEKWVDFVATFWHCECVCGRSEKAFTTQYQKWCRKHGYNFSEDKALDIYASACRHFGVIPKTDTAKLLVEQAISQLRATSAALAALKQEMQSLAASLPEYPVVMEMFGVGPTLGPQLLAEIGDVRRFHSKKALVAFAGIDAPPYQSGQIDVRSRSISKRGSASLRRTLFLVMSVILQCAPIDEPVYQFMDKKRSEGKPYRVYMMASANKFLRIYYASVKAYLESLEHD

SEQ ID NO: 156770 - protein, 337 aa, unidentified
MTKVLQKAGFVGETIYGGIDVHMKSWNVSLYYGSQYLRSFHQSPHPDILVSFLQREFPGANYSCAYEVGFSGYWIKRALDNHGVSCIVVNPAGIPQTDKGNKSKTDRNDSKRIGSSLQAGMLCPIYIPSQETEADRQLVRTNEKLTRDLTRSKNRIKGMLYQVGIEIPERFGSENWSNIFINWLKDLPISFGTLRTALNHQIKMMENIRVEKNLALKDIRKLAVSEKYASIASRLKTVPGVGTITAITLITEIEDMNRFKCFEKLNAFVGFYPTEFSSGEHIRTGHIISRHHKRLWSLILEAAWIGIRRDPAITHYYNNTKLKVGGKRAIIKVSRKL

SEQ ID NO: 156771 - protein, 343 aa, unidentified
MDHFAGLDVSVKETSICIVDDTGRIVREVKVASEPEALLQVLGNPIYRFKRIGLEAGPLSQWLFSALAEAGLPVICVETRHMRAVLQAQINKTDRNDARGMAQMMRAGLYRPVHVKTLRSQKLRMLLTHRKLLQSKAIAIDNDLRGTLRNFGLKVGVVGTVKFEARIKELVENLPDLAVLVEPLLLVRRVLREQFSILHRRLLAIVRDDEVCRRLMTVPGVGPVVALTYRATVDVPARFRNSKAVGAVFGLTPSKYQSGEINRTGAISKCGDEMMRVMLYEAAQIMLVRLAKWSWLKAWAMKIARHRGMKKAIVALARRLAVIMHRIWVDGTEFRWTREAAVA

SEQ ID NO: 156772 - protein, 441 aa, unidentified
MARHKEKRVTKKLKKINRSAAGIDIGARCNFVAVDPSCAAKPVREFSAFTAGHLSLADWLSECKVTTVAMEATGVYWIPLFEILESRGFEVVLVNARHVKNVPGRKSDVIDCQWLQELHSYGLLQASFRPDQGICTLRSYVRQRGTLIRYASSHILHMQKALCQMNILLHQVVSDITGLTGLRIIRAIIDGERDPQKLAALRDGRCKRDETEIARALHGNYRPEHIWQLQLAFEAYEFYQQQIQTCDSLILAHLEILSYSEGDGLGQFDGSLRRSSVEEIMRKLTGADLTKIEGISTSTALTILSEIGTDMSRWKSAKHFSSWLGLCPGTKISGGKVMDNSSRKVVNRAATALRLAAFSLHQSKSAIGAFLRRLKSRIGAPKAITATAHKLARIIYNLLKYGAEYVATGQKIYENQYQARKLKVLTINAKSLGFKLVPISP

SEQ ID NO: 156773 - protein, 377 aa, unidentified
MQAPTAPAPIEGDIGTIYVAIELSQRSWLAVLHSPDQGRLSRYKLEAGDCAGLLALLAKVRSRVARWSGASPSVVSCYEAGYDGFWLHRRLEAEGIENVVIDPASLSVDRRARRVKTDRLDGEQMIRALLAWRRGEPRVMSVVGVPSAEQEDARRRTRERERLVKEQTGHLNRIKALLRTVGLAADKLGRPDWPTAWLAQQRDWQDQPLRPLLVAELTREHARLLLVREQLEAVGEQPMPQPLSTTSHQLMRLKGLGPVISATLTSELLWKDFKNRREVAAYTGLTPSAWRSGGVEHDQGISKAGNKRARYVAVELAWLWLKNQPQSALSRWFHDRVGEQRGRIRRIAIVALARKLVVALWRFVTTGLLPTDAVLKA

SEQ ID NO: 156774 - protein, 401 aa, unidentified
MTAERDRAWIGVDIGKTHHWVCAVDENGRKLLSLRVLNDEAQILEVITAVSGLAEGRMWAIDILGTPSALLVALLAQTGEQVRYASGRVVAAMSTAYTGEGKTDAKDAYVIAETARIRTDLAVVDADTDLVRALGVLTGHRADLVADRVRMINRLRDLLTSVFPALEREFDFASCKGALVLLSGYATPEAIRRMGEARLSRWLRQRRVRGYADVAARAVLAARSQQTVLAGQDVTASIIAVLASTILAQHERLKLLDQQIQDTFAQHPQAEIIESMPGFGPVLGASLLVAAGDLTAFPTAGHLAAAAGLVPVPNDSGRRAGNLHKPRRYSRPLRHALYLSAQTSMMRAGPNRDYYLKKREHGRTHSQAVIALARRRIDVLWALLRDNRTWTATPPARARAA

SEQ ID NO: 156775 - protein, 436 aa, unidentified
MSKLQQIHPNCAGADVGSTKIFIGLEDEPVRSFATYTNSLKQAVDYLNQHGITELAMEATGIYWISFYDMLCAAGIKVYIVNGRHVKHVPGRKSDVADCMWIQQVHSYGLLRNSFIPDDNIRQLRTYMRIRQDAIEMQTTHVHHMQKALTQMNIRLTEAISEVHGVSGLRMIQAILQGERDPEKLVALCDAQIIKRKKQVVVEALKGFYKPEHLFELDMAYKGYRFYEGQIVHCDKQINRWLQKNLADKQKQMVKNPTKKIRHHAPQVNKLHDKMVQLFTGKDVTGIPGITHYTWLQLTAETGLDLSAWPTAKHFVSWLGLSPDKYSSGKMNRNKKRKCSTKAGQIVKEASVSVLNSKNHFLGAFGRKIRSRRGPNVAIKALARKIATMYYNTLMKGIEYVEKGIQEYEKNYRQVQQKLLEKKAKQLNLQLIPIEN

SEQ ID NO: 156776 - protein, 354 aa, unidentified
MKHTTKYVALDVHQATTAASVREGSGRVIARTLLPTEEGAIVEFFRGMRGAIHVALEEGTQAHWLHGLLTPRVERVVVCDRRGERRQGNRNDELDADELSELLRRGALRAVYHGHARGAVLKDLTRNYQNLVEDSTRVMQRLKALFRARGIKAPGQRVYHPRERAHWLAKLPDRGARLRAETLYAELDVLRTLRPRAKAAMLAEARRDPAWSVLLTVPFLGPVRAAQLLATMQTPWRFRTKRNLWAYAGLAVVTHSSSDYTLLAGQPVRRRRAPLTRGLNRNHNRVLKDVFKGAAAAATARPGPLHDWYQGLLERGMREELARVTLARKFAAITLRLWKKGERFDPTKLTKPAR

SEQ ID NO: 156777 - protein, 350 aa, unidentified
MERYIGLDVHAASCSAGVIDARGKRIGGAHVLETNGQVLVEFFKLQPGSVHLCFEEGTQSTWLAEILTPHVAEIAVVHISESRGPKDDARDAFALAERLRIGAVEKTVFKQTGPYATLRQLSKTYATVVQDVVRVQNRLRAQFRSRGVRANKSLYSKRRRDAYIALLPPTSIAAVNILFAQYDALCAVRNQAHKDLVTESRRHPAAALLETVPGLGDIRVAQILSIVVTPERFRTRQQFWSYCGLGIVMRSSSDWVQAPNGKWNRAQVQSTRGLNWNHNHTLKEVFKGAATTVVMQYPDSPLHKDYERLVSAGTKPNLAKVTLARKIAALTLAMWKRKEEYAPAKYTKTS

SEQ ID NO: 156778 - protein, 360 aa, unidentified
MFTERTSVGLDVHARSIFAHAVDWQTGRHMSQRLVPTNDEVLAWLRRLPGPAAVAYEAGPTGFGLARALSAAGIRCVVVAPSKLERPPGDRVKTDKRDAARLARLLHIGELPAVRVPGEAEQAARDLVRAREDARADLMSARHRCSKLLLRHGIVYNGGSAWTAAHEQWLRGQRFDHAGLQVAFDEAFDAVVTTLARRDRLDTAIAELAATGPWASVVTRLACVRGIATLTAFGLAVEIGDWQRFTGSSIGAYLGLVPAEDSSGDRRAQGPITKAGNSHARRLLVEAAWHHRRPLRAPTKPVRTHRAAVSPAVRARAQAADRRLHHRWITLDGRGKRATVSVVAVARELAGWCWSLALME

SEQ ID NO: 156779 - protein, 346 aa, unidentified
MDLFVGLDVSLASTAICVVTAAGKVEKEASAASEPEALIEFLHQLSGRAAAVGLEAGPLSQWLHKHLTEAGFETVLMETRHVKGALKAMPIKTDRRDAEGIARLLQMGWFRPVHCKSVSAQEMRALLGARKSIHQAVINLELSIRGTLRNFGLKLGKTSKARFEARIRELTAGNPLLEVATDVVLKARAELRRDLAILERHLRDHAKSDPVCRLMMTMPGVGSIIALTVKSAIDDPDRFRRSRDIGPWAGLTPRREQSGQRDVIGQITRAGDVGLRTALYQAAIVMLNRGRRNWLTAWALRVSQRRGRKCATVALARRIGIVLHRMWRDDCEFRFTRAEATAVRAA

SEQ ID NO: 156780 - protein, 386 aa, unidentified
MHDGTNLPVPERTSIPGDCATLFVSLELSRSTWVATSLAPGSKKMSKHTLVGDDGRKLLDLLARLKTRAEQRIAAPVKVVAIHEVGLDGFWIHRLLEANGVESHVVDPASIAVPRRHRRAKTDAIDGETLLRTLMAWQRGEPRVCAMTVPPSPSEEDCRRVSRERATLLRERIQHTNRIRGLLFGQGITNYNPLHKNRRECLEELRTGDGRSLPTHVKAEILREIDRLELVLRQIGEVEAERDEILRPAEASSPAALLMRLKGIGAEFATVLYFEGLFRHFENRRQLAAYAGLAPSPWKSGSIDHEQGISKAGNPRLRTTMVELAWMWVRYQPDSALSGWFRQRVGSERGRTRRISIVALARKLLIALWRYVTHGEIPAGAVMKPV

SEQ ID NO: 156781 - protein, 376 aa, unidentified
MRKVALDLGARKISYCEIEGDRVIERTTVTAIDSLRPLLGPDRPPAKVAIEACREAWHVHDLLTSWNNEVVLVDTTRSKQLGIGQHGRKTDRIDAEVLVRALARGLIPAAHVLSPHRRQLRRQLGIRRALVETRTNLVTTMRGLAREQGTPIASCECSNFVGTSRKTVTGPLLTAFEPLLKTLELIEQQLVSVERELGALCNLEPVIAQLCTTPGVGAIVAAAFVSVVDDAKRFHTAHQVQSYIGLVPSEDSSGGRRRIGAITKKGNSYLRALLVQGAWAMLRSASKDDPLRCWAEAVTKRRGKRIGVVALARRLVGVLWALWRDGTVYEPASLGRKVARGLRKHSQDIAFRAESLERASRKSSCKVLFQEVCLPN

SEQ ID NO: 156782 - protein, 343 aa, unidentified
MDHFAGLDVSVKDTSVCIVDDAGRIIREVKVASEPDALLTVLTNRSYHFKRIGLEAGPLSQWLFSALAEAELPVICVETRHMRAVLKAQINKTDRNDARGIAQMMRVGLYRPVHVKTLRSQKLRMLLTHRKLLQSKAIAVDNDLRSTLRNFGLKVGVVGTAKFEARIRELVENLPDLAVLVEPLLVVRRVLREQIGILHRRLLAIVRDDEVCRRLMTVPGVGPVVALTYRTTVDVPARFRKSKSVGAVFGLTCARDQSGERDRPGAISRCGDEMMRAMLYEAAQSMLGRSSRWSWLKAWAMQIAKRRGMKRAIVALARRLAVIMHRIWVDGTEFCWTREAAAA

SEQ ID NO: 156783 - protein, 411 aa, unidentified
MRVHHNVCCGIDVHKKSVTACLMWGPADKEPQFEIRRFGTMTRDLQKLAEWLKQAGCEAATMESTGSYWKPVWNVLEGQLPKLILANAQHVRALPGEKTDRKDGKRLAELTRHGQIRPSYVPARAILELRDLTRYRNKLLSAGSSERNRVQKVLEDANIKLGSVLSDVFGVSGQKMLQALVKEDRVDTARVAQLAHWSLKPKLEAIQHALEGKLTDHHRFLIEASLQHMRFIEEQLMRLDQEIQRRLQPYQEEYALLQTIPGIKETGAARILAEIGADMSTFPDGDHLSSWGSVCPGNNESAGKKFQSKTRKGNRHLLAALTECAWAATKKKDCHFRNKYYRLKSRRGSQRAIVAIDHAMLKCIYVVLSQRKPYEEPKPASLTEAQKERKASSLCRQLRALGYDVKIQKAA

SEQ ID NO: 156784 - protein, 314 aa, unidentified
MKKCTLFIGLDDSKDTIEVAVAEGVPGGEVRDFGSVPNTPESLAKLVRRLGRPKDLFFAYEAGPCGYGTYRTLLGLGASCLVAAPSKTPRRPGERIKNDRRDARTLAKLHRASELTPIWVPDAPTEAMRDLTRAREDAKYAQTRARQRLFAFLLRHGRRYPGRTTWSAPHFRWLRTQSFDHPAQQICMEEYLLAIEEATNRVARLDQQIEQLVPQWTMRPVVRALTAHRGVNLLAASTLIAELGDLTRFDKPRTLMAFVGLVPSLTASGLERRTGRITKVNPYQCAHRPSHVGRPPMEFVHRTAVWLAAGHRTS

SEQ ID NO: 156785 - protein, 413 aa, unidentified
MDRRYEKYNSGSDKMISVGIDVSKGKSMVCIMKPYGEVIASPYEITHTEPEVTKLSQRLLALEGEVRVVVEATGAYHLPVLCSLQQAGIFVAVINPLVMKKYASAAIRKGKTDKLDSVKIANYGLDNWFHLEDYRAPAEIYADLKLLGRQYQHYIALSVMSLNSLTHLLDGVMPGIKTLLRPSKEGRKGSKLGDFVEEFWHFDSIKKMSEQRFVNTYCRWAKKKGYHSSERKAQAIYAIAQNGIPSLPATPLTKTLVLEAVRVLRELDKTLESILSQMQQLASSLPEYPVVMAMKGVGAALGPRLISEIGDVRRFHSGSALVAFAGIDAPPYESGSFVGTQRSISKRGSPVLRKTGYEIMKALKTTKPTEDAAVYEFMLKKEAEGKHKKAAKIAGLNKFLRIYYARVMEVYSE

SEQ ID NO: 156786 - protein, 369 aa, unidentified
MSKCIMVGCDLHEKSMLLKVAEGLGRSETRVFQNDTAGRKAMVAYLRKRSAASGAKIVFAYEASCQGFGLSDEVRDVGFECYVLAPTRIARSAKHRRSKTDEKDAEKILEIVRGHILAGNELPAVWVPDMKTREDREVVRARLDLSDKGITLKAQIKMLLKRNGLRKPSGMGKKWTKGYRAWLKSLTGSERVSNGARVGLKTLLRQLEFMESEIEILQKEVENLSQTERYFEYVQAMCEEKGVGILTAMVFLTEMGDLNRFTNRRQVGAYLGLIPSSDESGESADRKGHITHQGPHRVRKALCQAVWSRVRTDEEERIVYQRIAKKNPKHKKIAVVASMRRLAIRLWHIGVRIKKKGVCLPENEVSAVA

SEQ ID NO: 156787 - protein, 342 aa, unidentified
MIIIGVDYHPSVQQIAWVDSETGECGERRLTHSDGQAEEFYRELKKKGVSVRVGMEATGHARWFERLLAELDYQLWVGDPAQIRAKQVRKQKNDRRDAEHLLQLMLENNFPRIWVPTPENRDVRQLLLHRHRLVGMRGRVMNQLQAIAMNEGIRRKRGLWSEKGRAQLESLQLPPWTTRRRQELLELLDRFDPSIDELSEAIQQEAERVPEVQRLQTHPGVGPITALAFVLVIGTPNRFNCGKQVASYLGLIPCEDSSADSWRLGHISKQGNALLRFLLGQAALAVARCDEQWHRQYARLSIRRNHAIAKVAIARKLAVRLFWMWRRGWDYQQLKKFGSHVG

SEQ ID NO: 156788 - protein, 384 aa, unidentified
MAVRKREDEVFPNAAGIDVGAPSHWVAVPRHSTDEPVREFGAMTDDLNAMADWLLACGVDTVALESTGVYWIALYELLEQRGLKVWLVDARQMKYVPGRKSDVQDCQWLQKLMSLGLLRAAWRPDGEVCVVRAVARQREVLIAEQASWVQRMQKALVQMNIQLTEVLTDVMGITGQAIIRAIVAGERDPKVLSRHRNNRVKASAEEIARALTGNWRDEHLFVLGQALSMYDDIARHMAEFDAKLQALLAELGQAKVDLGKAPRTGGKLRAEFDVRQMLANWAGVDLTRINGLEVNTVMKVLTEIGPDLGRFANVKHFCSWLGLCPGTKISGGKVLVKLFGLVGGLVTFGCYYWLKPKFGTFGAVAVSGVIGVVVAIGLMAMIRN

SEQ ID NO: 156789 - protein, 345 aa, unidentified
MIIGCDFHPSWQQVSWVDTETGETGEAKLVHATGEAERFYRGMPVPSLIGVEATGNSQWFVELVEDLGHALWIGDAAQIRASYVRQQKTDKRDAAHIRMLMEEGRFPKLWMPDREQRDQRQLVIHRHKLVQIRSRVKNELQHLSLNKGMQKRSKLWSMAGQVALRALPLKPWAACRREDLLGLLAMLEQQIGKLDAAVKAAAERNPEAQLLMTQPGVGPVTSLAFVLTLGDVSRFQRGKQVASYLGLIPREHSSGGRQKLGAISKQGNRLVRSLLVEAAQTAVRCDPGMKKEYLHRCHRKAKGVAKVAAARKLAVRLYWMLRTKTGYPEIVRIESSPRVALVGAS

SEQ ID NO: 156790 - protein, 355 aa, unidentified
MDSVKYVGLDVHQATISAAVLDSEGHLVMQSVLATRAGAILDFLQGLRGTIHLTFEEGTHSAWLYDLLVRRVARVMVCNPRRNALLKSGNKSDSIDARKLAELLRGGFLRPVYHGENSTMTVRQLGRSYTTLTEDTTRVKGRLKAVYRGQAIASVGQKVYGARHRGEWLAQLGEAGLRRRAELLYQQLDALQALRREARRELIAESRKHEAVKQLRTVPFLGPIRAAVLLGKVQTPHRFRTKRQFWTYCGLGLETRTSADYRHVDGQLLRSKKPVFIRGLNWNYNHELKNLFKSAATTASAREGPFRSFYEGLLAKGLQPAMARLTLARKIAAITLSVWKKGEAFDAERLKPQAA

SEQ ID NO: 156791 - protein, 410 aa, unidentified
MELLYPHCAGLDLHKETVVACIRHMVNHTVTTLVKTFKTTTQELMALSDWLSEEGVTHIAMEATGVYWKPVWHILSDGNFSLVLANAAHVKNVPGRKTDVNDAAWLADLMAHGLIRASFVPEEPTQQMRDLLRTRKQFVRERSSHTQRIQKTLEDANIKLDSVISNVAGVSGRRMIEALIAGQTDPEALAALADGRIRATAAELEAALRGRVTAHHRFMLRLHLDHLDAVDAAIFRIDKEVEGNLEPFRVACEMLTTMPGVGALAAEVIVSEIGIDMSRFKTEGHLISWAGLCPRNDESAGKRRSNRMKKGAPWLKTTLIQCAWAATRVKGSYLQAQYLRIRARRGAKKAVGAVAASMLTAAYHMLKDGTLYQDLGTNHLDNREKGKQALRLVNRLQSLGFAVQITSMAA

SEQ ID NO: 156792 - protein, 386 aa, unidentified
MAASEKIRIEQDTLPQPTLFLAFELGQNTWKLGFTIGMAQQPRERTLPAGALEMLQQEIARAKQRFGLPEDARVVSCYEAGRDGFWLHRALVAHGVQNHVIDSASIEVNRRQRRAKTDRLDVRKLLTMLLRHSAGEKKVWSVVRVPSVEEEDRRQLHRELTTAKQDRTRVINRIKGLLAGHGVQLALQGDVDAQLDQVRQWDGSPLPSALRTRLKRAWQQVGFLTAHIQTLEAERRALLRRREDPVLAQVRQLFTLRGIGVNSAWLYVMEFFAWRDFQTPKQVGALAGLTPTPYQSGQSRRELGIAKAGNRHIRAMAIEIAWAWRRFQPDSALSQWYERRFGAGSARLRKLGIVALARKLLIALWRFVKTGVLPEGAVLKTAALGR

SEQ ID NO: 156793 - protein, 415 aa, unidentified
MEVVHPRCAGIDVSKRDAKVCIRIQGSSGRRTSSTVTTWGSMTNQILALRDHLAAQQVTVVIMESTSDYWRPFYYVLEADFEVMLVNAREVKNVPGRKSDVSDAAWLADLGAHGLLRASFVPPEPIRQLRDLTRARTHITAERTREVQRLEKLLESAGIKLSSVASDITGVSGRLMLQALIDSHGAADPAVLADLAKRRMRSKIPVLTEALNGYFTEHHAFMTRLFLDRIDAHTRDIELLSQRIDGLMTPFLPARALLESIPGFSQTVAEIFIAETGGDMTQFPTPEQLASWAGVSPGSNESAGRVKSTKTRPGNRYLKGALGVAALNQAKSKKTYFSAKFRHLAPTRGPMKAIVAVEHAMLIAAWHMLTNSEFYRDPGADYYTRRDPARTKTRAVKQLEALGYTVTLQPLPQAG

SEQ ID NO: 156794 - protein, 385 aa, unidentified
MMLIGIDPHKSTNTATAIAPDTNQEAASIRIDATLREYRRMLTWARQWPQRRWAVENAEGLGRHLTSWLLARGEDVVDVPTTATARVRQLSRGGGRKNDRIDAGAAACVAALQGDARPLEAESYVDAMAVLDERRVNLAQSRVRAVNQLHALLRALIAGGAPRDLSATTAAALLRTVRPNGAVEQARKAVAKDLVTEIRTLDTQLKANAQAIARLVAATGSTLTEVVGVGPIMAGRLISRTGRASRFLTASAFANYAGAAPVEIASAEKSRHRLSRHGDRQLNSALHTIAITQIRIPSSRGHRYYNSKIAEGKTPREAARCLKRRLADHLWRTMINDERRAVSPGGQLGTTLQSSVAGPTPTTNSSDKSLPGPATHDSTTAKPAA

SEQ ID NO: 156795 - protein, 354 aa, unidentified
MLAELVDHVIGVDPDRDWITVAALDAHTSGVVATDRFPASRDGYRDAIMWADAHSTASERAWVIEGTASYGRGLTMALQRDDELVVEFDRPVRKATKDGAKSDALDAIRAAREALGRDKLAQPRTHDGHREAIRVHQVARAAAVRARTAAVNELKAFVVTADDELRSELRGLRTPKLVDRCVRFRDSDRRDVDDRCTRMAMRALARRIAHLDAEIADHNRALKSLIDHVAPQLVAERGIGYVTAAAFYLAWSHPGRCRNEAAFARLGGVAPIEATSGQNQTRHRLCRGGDRQLNRALYLVATTRQRCCPTTRAYIDRRTSEGKTEREAIRCLKRYIARRVWRLLEHPELALDNT

SEQ ID NO: 156796 - protein, 382 aa, unidentified
MTGTEPHAWGTGLMDDIIFVGLDVHKATVCIAVAEGGRGGDVRQLGVFENRPEILNKVVSRLSKGGRRLSFCYEAGPCGYGLHRLLTGYGHECVVIAPSLIPMKAGDRVKTDRRDALMLAKLHRAGELTAIWIPDAAHEAMRDLVRARATAVRVLVKARQHLQGFLLRHDRIYRGARAWTLAYRRWLSTVRFEHPAQQIVLQDYIHAVQEAETRRDRLTQQIEELLPNWSMAPVVAALQSMRGVALIVAVTVVAEVGDFRRFANPRQLMAYLGLVPSEHSSGPSVRRGGITKAGNALARRVLIEGAWTYRMSARVSRKLYDRLEPLPAAVRDIAWKAQLRLCARYRRLAAIGKPKVVVTTAIAREMVGFIWAIARLAQPALV

SEQ ID NO: 156797 - protein, 414 aa, unidentified
MNTVSKTLFVGCDVSSKTNTVCLMDEEGNVIGYPIFPNTLPGAEALESRLLQLIQEKGFSTLKIATEATSFLDLHLVDFLASSQHLAAFHPSIYQFNPKLVRNFKRAYPDKEKTDKIDAFVITDRLRFGRLPEPYENHRPYLPLRRLTRYRFHLVKTISREKAYFITHLYLKFSAFSLEKPFASLFGATSLALITEFSPDQIVHLPLEDLTQFLIKHGKNRFKDPDKIVEVLQRAARESYRLRPALSSSIDLILATILQTLRALGEALKEVDKAVEKEFQAFPNTLQSIKGIGPVYSAGIFSEIGDIHRFPTEEALAKFAGLTWKRYQSGNFEAEETHMSKTGNEYLRYYLIEAANALRVHNSEYKAYYETKFQEVTKHQHKRALALTARKLVRLVYALLKKGQLYQANYQQEA

SEQ ID NO: 156798 - protein, 350 aa, unidentified
MNVNHYIGFDVHKKSVSYCVKLADGKIVEEGKLRATHDALRQWAGKRPEPWHGAMEATLFSGWIYDTLKPFAAELQMGHPALMKAIGASKKKNDKLDARKIADLVRCNLLPACYVAPAEIRELRRMLRYRNLVVAQATRMKNKVSGLLMEVGAEYHKQQLHGKQYFTELLDTLEEVPESVKDLLRLSRGALETFETTQEQLVVRLQKEPLLAQRVMLLKSIRGVGPVTSLTWILEVGDPQRFSSVAKAVSYCGLSSALDSSADKQQRGPISKQRNAHLQTVLIEAAKLAPRWNPQLAAVHAREVEPGNRNRATLAVARKLVAYLLAVDKSGKPFQISTPATVEQEVETAV

SEQ ID NO: 156799 - protein, 371 aa, unidentified
MKEHITTHVGLDVHKNSTAIAVAERDSAARFVGTVGPQLGELRKVLAELDLAERMQIVYEAGPCGYGLVRALRGDGYHCDVIAPAKVARRPGDRVKTDRRDALHLATQSRAGALTEVCVPEEADEAIRDLSRAREDAVRSRMKARQRLQAMLLRHGRRYSGKTRWTAAHERYLAQLSFPYPAQHLAYVEYRQAVRESHERVERLTTALQEQVRYWRMQPVVRALMTLRGIDFIAAATLIAELGDLRRFAHPRELMSFLGLVPSERTTGDHRRLGAITRTGNGYARRMLVEAAWNYRFPARISRALQARQEGQPTVVRDIAWQAQVRLSRRYRALKARQVIHNKICVAVARELAGFVWAIAQQVEPAVPSSA

SEQ ID NO: 156800 - protein, 408 aa, unidentified
MDLLHPRAAGIDISKRDAKVAIRVQSEGGKVSTQVTTWGSMTGQVLELADFLRSQGVTTVVMEATSDYWKPFYYPMEATGLPVMLVNARQARNIPGRKSDVSDAAWLADLGAHGLLRASFVPAPDIRRLRDLTRARQMLVHDRTRVKQRLEKSLESSGTKLSVVVADLNGVSARRMLDALVAGERDPRSLAALAHPRMRATQDELAAALTGRFTEHDAFMVGQHLTHYDLLTGQIDALTARIEEEIAPFRLARELLTTIPGIAEPTADVIIAETGGDMSIFPTAAHLASWAGVSPGMHESAGKRKSSTTRPGNRYLKEALGNAASSNAKKGSNTYLARRQRRISARRGKMRALVATEHAILNAVWNMLSRGEAFTDLTPPPANTERQKKSHLRALEHLGYKVTLAPAA

SEQ ID NO: 156801 - protein, 305 aa, unidentified
MENGKEIHIGVDVSKATLDISDGYRFERIDNDKKTVTAFLREYKHCQIRVSAESTGPYHKVLAEVCHKLEIPFFLCDGKQVAYAKKARGRYVKTDKADAEFLRTFAADYGIKPYVLSKELIEIRELANLQHLEINRLRSLKNHKDAISTTNAAKELERQIKQAEKTIDRFQEKINSLIQLVPELLEKKKLLCSVKGIGEKIATTLIVFLPELGSCNRRQIASLCGLAPFNNESGTYRGHRYIKGGRSRVRTALYMAALVSISHCGFYSSTYHKMVHEQNRPAKVALVMVARKLVCYLNSLMKRVG

SEQ ID NO: 156802 - protein, 344 aa, unidentified
MQITTIGLDLAKSVFQVHGIDAAGQVVVRKSVRRAQMLAFFSKLPPCLVGIEACGTSHYWARELIRLGHEVRLMPPAYVKPYVKRGKTDAADAEAVCEAVTRPTMRFVPVKSPEQQAALSMHRARDLLVKQRTQLINMLRGLLAEFGVDIPKGLERALLMARQVIEGNAPEVPIEAARIANTLSQQALDIHVRLRQIDRDLAIWLRGNDVARRLMTIPGIGTVGATALVASVTDPHQFRSGRQFAAWLGLTPLQKSSGGKERLGRISKMGDKYLRKLLIVGMTSLVRRAKYAPDKIDPRLADLLARKPTRVATVAMANKTARVIWAIMARGETYRTGHQPALAA

SEQ ID NO: 156803 - protein, 390 aa, unidentified
MEAVTFQPHTPTAIRTDLYAIFVSLELSKSTWLITSLSPGNGEKMSKHSVIGGDVTALLDRFAQLQEKVRSRTGNHAPIVSIQEAGLDGFWIDRVLKANGIESYVVDPASIATSRRRRRAKTDRLDGEALVRALLAFKRGEPRVCAMINAPSPEEEDRRRVCRERKVLIAERIKHVNRIKGLLFGQGVSGYEPLRKNRRKQLDELHTGDGRALPLHLKTQISRELDRLELLLTQITAVENERDALLAAQKDSVARTPTAAMLCSIKGIGLEFAAILWTEGLFRHFDNRRQVAAYAGLAPTPWQSGTIEHEQGVSKASNPRLRATMIQLSWLWLRHQPQSALSQWFTARVQSNGGRAKKSAIVALARKLLVALWKYVNAGVVIEGAVLKTA

SEQ ID NO: 156804 - protein, 400 aa, unidentified
MYKYFLGIDISKDSFDFSFTDETEKVLYKDYYQMDMTDFTKLSDYLTPFSKDEILIVMEATGIYHLNLLSHFLEQDFNVSVVNPLFIHAFTKSMTIRKTKTDAKDAHIISIFAKRNGATLKLSHPNDLESIKPVVREKEKLINSISALKTDIKSIVNQIFPEMLKNTNIFSKSSLNLLLQAPSKQIIRNLKEKKIAKLLSLDTTRGTKPKVGASEILSMAKNSIGINNQSLEKILISKIKQLEFLQLQLDEFNEIIEQFVDEHHNDDIELLTSISGTGKASAASFLIELGDINNFATHKQLTAFIGTDPTIYQSGTSVNVKGSISKRGNSHLRRTIWHMARAATVWNETLKAYYDKKRGEGKTFKQSVIAVANKLIRIIFSMLKNNTKFSTNYNSKRATA

SEQ ID NO: 156805 - protein, 477 aa, unidentified
MGNRKMSTFERLNRRQRRKLERQLGLPDPGLTIVHPNAGGIDVGNESHFVAVPADRDPNPVQEFGCWTADLVRMAKWLKSCRIDSVAVQATGVYWIAMYDVLTQHRIGVTLVNAQHTRNVPGRKSDVQESQWLMKLHTYGLLRDSFHLDEQVQKVRTIWRLRDRHVKEASEAVQHMQKALTKMNVQLANVISDISGVSGRAIIAAILKGERDPYQLADLKHERVQASREEVARSLEGNWREDVLFELQQAVEAYEFAHWQMGECDRKLELYLTSLPTRSPTGNEPVEPPAENKAKRKVKPKGNAPVFDLKTELRRIAGVDLTTIDGIDVMTAQTIVAEVGADLSAFRNEDHFASWLGLTPGKDVTGGKVIGRGRRKVKNRVGQALRMAASTLRKSQSYLGARYRHLRNRFDVKAAAVKAMARYLATLVYRLLTHGQTWVDAGAARFEQKQEQSELSRLTAKAAARGLRLVPIAAELN

SEQ ID NO: 156806 - protein, 396 aa, unidentified
MVTVGIDIGGRGHVVARCRDGQAKADREVLRISQSRSGFAALDGWLQRQAEPVGLVTMESSGHYWMALASHLRRSDVPVAVVNPLAAKYFAKSRLARTKSDPADARSLAEMGMRDQPIVRDPLADAELRQAARFAMTLVTEQAKVCQRLVRLVELGFPELGELFEDPTCRTAREVLRIAPTARAAVRRRTSTLADVNAGPGRRRLGRARAERLQAAAADSIAVPELDDEVAFEVGLLLDQYDLLERQIEAADRRVASLLDGELARRLQTIPGVGPSIVATLLAEIGDIERFDDFDQLLAYAGVHPAERSSGRKGSNPETAWRMSKAGNSHLRAAAYRIAVVGIMHNPIIAAHYRRKREAGKSKMNALGHCMRKALSLVWGVWRNGRDFDPDWGVEA

SEQ ID NO: 156807 - protein, 345 aa, unidentified
MKIVGCDLHTRYQQIAMLDAETGELVERRLEHESGEARAFYAALSSPVRVGIEATGHTRWFERMLAELGHELWIGDAAEIRASMVRKQKTDARDAAHLLELLLSERFPRIWRPTLAERDLRQLVWHRQKLVWMRNAVGNQLHALAMGEGVCRKKKLFTKKGRAELESLALGRWASHRRQELLEMLDQLDESLHELDQAVQEQAEQNPAAVLLMTHPGVGPVTSLAFVLTIGPVGRFERSKQVVSYLGLNPREHSSGGRQRLGAISKQGNPMMRSLLVEAGHTAARLDAELRQDYQRLKLRRGSGVAKVAMARKLAVRMYWMLRSQAGYAQLVRMQGSPWATLVKE

SEQ ID NO: 156808 - protein, 385 aa, unidentified
MCVVDDSGGVRARFEVPNTGKSFAGLVRRLVKLKVAGVGIERPDGPLVEALLEAGLVVYMVPPSMLKAVRVRYGAAGAKSDPGDAFVLADLLRTDHHRLAPLLADSSATKGLRALTRARKDLVEARVALTNQLLAQISVCFPGAVGLFGDLHSGVAASFLRRYPTAAKASSLTEARLGAFLRRIHYCGRTPVAELLRRVKEAPQAVLGPEEDQSRAVCVLALVEAIRTCEGRARELEAEVVERLEVHPDAHVFTSLPRAGRGVRAASLLAEIGDARERFPNPESLMALAGAAPVTRASGKHRVVAFRWACDKKLRAAVIDFADDSRRASPWARGIYQRSMAKGHTHPHAVRILARAWLRVIWRCWQDGAAYDVTKHRGAVMPIAA

SEQ ID NO: 156809 - protein, 387 aa, unidentified
MNRSNHRVVGLDVHPDSFAGAILEGSDPWQARVKSTSTRVALRLLEKWALRHTRESDCLVLESSANAFAVAERLGRLKRKVLILDSHRAGKVGQSYCATDRVDAIKIARIYLSALSPIVWQPDQKTRERREVFSAYQAVVKEGTRLKQQIKSMLNEHCVRLEKGFRLSHPTAIERLLQRRKWTEAQKMLLEQLHAGLVGARSRRQQLRRYMAREILAEKELLRLTRLCGINLITLYELIAAIGDINRFANSRKLVAYLGLNPSVCQSGEWEGATALKRHGRGAIRALLIQSAKKLLQVNNPLQKWGLAIALRRGRNKAAVAVARKLCVAVWHVMQGHVIGAIERLDTLHAKLHKLATDLGVPAIKALGYETKEAFVQKKLYLLQSYP

SEQ ID NO: 156810 - protein, 350 aa, unidentified
MKKNVKQVVGIDVAQKELVVCLGRMQDDLSNELYARKTFANTSKGFTSLLLWVKKLTDTATTVRFVMEATGVYHESLAYFLDEKGYELSIILPNKISSYFRTLDIKTITDKTASEAIAMFGLERKLQNWNRPKTIFKKMKQLTRERDQIVQERTIVKNQLHAEEVEAAPNKSTVVRIKQRIIFLNNQEKAIKEELAALIKSDKELKTDIELICSISGIGLLTAAIILAETNGFDLIRNKRQLASYAGFDVKEKQSGTSVKGKSRISKHGNKYLRKGMHLPALAAIRHDQRYKAIFVRLVSKHGIKMKAAVAVQRKLLEMTYTIFATKNKYEKNYLNKTEQGCQQEEMAMA

SEQ ID NO: 156811 - protein, 363 aa, unidentified
MPCAPDPLARCWRLGCRGDGALVTLVMGMDQHRAQISAEWIDTITGEISRARVAPADRAGVRKFLAQFKGVGLEVALEATTGWRFLVEELERVGADVHLAEVVQTSGLKGRGKRAKSDWADARHLRELLLIGRLPESWIAPAHLLDLRARVRCRHTLLHQRTEWQQRMQAVLYHHGAPHARGLLKLENRERVAALKLPDAAREQLTIALSMIDAIDLQLAPFDQALRACARKQPGCRTLIEEIYGIGELTSITILPELGDTRRFQNSRDAVRYAGLDVTVHQSDQRRAAGHLSRQGPPALRWALYEAAQAARRPGSPDRDYYEQLAARIGGNRACIAISRKLLKRSYHLLRALGDQALEPVTA

SEQ ID NO: 156812 - protein, 452 aa, unidentified
MGQGNNGLSRGDANRNARLAALRAVLPSDHAILGIDLAQSRQAAVLTNHDSRVLARWRPRCSPWQLDDLLERALRAALAAGFSGMTVACEPTGHRWMIVQQLAAGRGIPLVCVQPLVVARARESEDYTRGKNDDRDAVLIARQAAQLHCYLPERAGAVWARLRHLGVRRTQLIEESSACMQQVRDLLEVVWPAALSAAGEPLKSATWLACLAAALAGGDGDLAAVHAAGQHAFIDATRAGLGVWGTSRVCRRIAHAVYAVLLDRGGVLAQRPGALERVQAALRDWAIIRSELATVNTAMLSVLDQIGILDVADSGPGVSAISVAAILAETGDPARFSTARAMVKHAGLAPADNSSGNRGGEAKISRRGRPTLRLAAWRAVWGALRHNHVYAARHAQLTSRAIGKLTVQQANAAIAAALIRQIHAIVTRRVPWDADIAAGRRRPRQEVTAKAA

SEQ ID NO: 156813 - protein, 376 aa, unidentified
MSTTGYKRVAVGVLVCKCRAAEGDNDVMYIGVDTHKAAHVLVALDEQGRTLGTRDITNSPDGWGEALRWAQGWPGERMWGLENSGSWGKGLAQSLLAQGEAVVCEVSPQRTAQYRRRGRTQDKTDHADALAIARLLVAEGEQLPRVQADDASTELRLLSDHRDNLLGERTRLINQLHDQMVQLDPAYKVNSGPLKQRRGILYCRDWTLDHPSRVAGTRLLIVHQLATQILRLDDELAAITAELSARVQATQTPLLALRGVGEVTAARLIGELGSPPRIRSATALAALAGIAPVAVSSGGRTGYRLNRGGNRRLNRAIHIIALSQRRCEPRAQAYYAKKRAEGKTAREAMRCLKRRLVDVLYRTLCQDRGVPVASAA

SEQ ID NO: 156814 - protein, 412 aa, unidentified
MQVVYERCCGLDIHKQTVVACAVVPGAHGQPHKEIRTFRTMTADLLELADWLTAQGITHVALESTGVYWKPAWNVLEGSFTLLLVNARHIKQVPGRKTDVRDCEWIADLLRHGLLRASFIPDRAQRELRELTRYRTSLVRERTAERNRVQKTLEGASIKLGDVASDVFGASGRQMLEALVGGTSDPKALAELAKGQLRAKLPQLERALDGQMGGHQRFLLAQQLAHLDGLDELIDRLSQEIADRLRPVQDKIERLDAITGVGQRTVEVFLAEIGTDLTHFPSAAHLASWAGICPGNNESAGKRRSGKTGKGDVWLRAALLEAAQAASCTKDTYLASQYHRLAGRRGKKKAIIAVAHSILRIVYHLLTHDCEYVDLGSRYLDDREQDQIKRRLVRRLEGFGYTVKLEPTAAAA

SEQ ID NO: 156815 - protein, 384 aa, unidentified
MQKPNDLNQSRIVLKQDSTLIAVIEMSLRSWLVAGIVPGVERQPLKKLAVDESALLKLLNHWREEAEKAGRRIERIAVAFEAGRDGFWLARWLRARGIEAHVIHASSVAVSREHRRAKTDRLDTELLKRAFLGWLRGERDHCKMVAIPTTKDEDAKRPNRERQSLVGEQTRIVNRMKAALIRLGIRGFNPKLKKAAGRLEDLRTPEGEPIPPNTLAELHRDLERRRLISDQIRQIEEARLERIEQTPSDGPHAMVRLIARVIGVGIETADMLVHEVLSRNLRDRRAIARYAGLTGAPDESGSKRREKGLAKAGNARVRVGMIQLAWRFLLFQKNSALAQWYQTRTEGGRNRKTIIVALARKLLIALWRLVTTGEVPAGVVLRAA

SEQ ID NO: 156816 - protein, 413 aa, unidentified
MVAVEVLFDRVAGLDVGKASVVVCLRTPGPRRSRRSETRTFKTTTGSLRVMRDWLVEAGVTHAAIESTSTYWKPPFYALEEAMEVWLLNAAHMKAVPGRKTDVRDAEWIAQLLEHGLLKPSFVPPPQVRRLRLLTRYRVQLIGDRTREAVRLELMLEDASIKLSAVASSLTTVSARVILAAMIEGESDPLVLAQLAKGKMRAKIPDLAQALDGHFDAHHARLAGAILARLDAVEAALADLEEAIRAECAPWAHEIELLQTIPGVGEKVAQVIVAETGADMSRFPSAAHLAAWAGLAPAIHESAGRRTPSGSRHGNKWLKAMLTEAAGSVGRMREKNYLAVQHSRLVKRRGMGRANIAVGHSILVAAYHMLSRDEPYQDLGADWFDRHDEAARTRRLVAQLQRLGHTVVLDPVA

SEQ ID NO: 156817 - protein, 410 aa, unidentified
MDAIVERVCGVDVGQATVVATTLIGAAHERATKQTRTFRTVTKELMELREWLLANGVTHVALEGTGIYWKPVHAVLEDAFEVIVGNAHHIKNVPGRKTDVKDSEWLADLARHGLIAKSFVPPKPLRQLRDLLRYRRKLVEGRTAERNRLLKLLETANVKLASVMSDVFGVSGMLMLRALVDGTATPETMAQFAKGLLRKKTADLERALEGRLEDHHRFLLSLQLRRLELVDQDLALLDDRIDETMRPYQEQCRLLQQIPGVNRVLAAVLVAELGPDMRVFHSARHLAAWAGVCPGNNESAGKQKMAPARKGNVHLRTALVEAAMAASRKKGSYLKDKFHRLRARRGTKRAAIAIAHKILIAVYHMLSTGTGYADLGETYLDGLEKRRVTRNLIRRLERLGYEVKLETKAA

SEQ ID NO: 156818 - protein, 345 aa, unidentified
MTVYIGVDFHARAQTISYLTTEVGEIQRLQLDHGQPQAVRSFYQQFAGQQVIVGFESSGYAAWFEELLEELGCEIWIGHATAIRLFARRRQKNDRRDADLILDLLLRGDFPRIHRYSAASREVLQQLRYRQRLVKMRTMVINSLLFMASSRGLSLRTQLKSRRGLERLRQIDLPPALGEQRDELCQLLLELKTRVDKVEEWLAAKAGSDVRVKRLRTHYGIGPLTGLCLVHTLECPERFANSRKVTAYVGFDPVEDSSGQRRRIGSISKQGSRLLRFYLVEAGQIAIRKDQDLARVYQRVLVRRGHAKAKVAVGRRLLVRAFIMLRDEIDYAEFCRRGVAARSSR

SEQ ID NO: 156819 - protein, 409 aa, unidentified
MYYVGIDIAKSFHVVTIIDENEVKVTQKPIRVTNCIDGFSKFITKLETISSNTNDFIIGLEATGIYGENLWEFLNSHGFNVKLLNPFQTTRYREQHTMKKVKNDNIDSWIIALFLKDGKYSSGYVTDDEYQSLRTLYRNRVSIQSDMKEVKKRILTQVTVTFPELENFIDIFSITGLALLDKYPTAHHYKHSSVDRILKIFRHIQGNSFNNQKAIEVLELAKNSIYSGKAKDARAIAIKSSIRLLKIYQEELSILEEEILALLEKNGIKEEKDVPTNSLIENLKTIPGVSSKTIAAVISECGDLSRFKTPIKFIGYLGLFPTENSSGNSKSTGHLSKRGSSLAKHALYMASVSCLLHNKELKQYYDTKKSQGKSKQEGIIAVARKLATIIYSIFRYNTPYDPSRVFSKS

SEQ ID NO: 156820 - protein, 459 aa, unidentified
MRKKVQNHKRRKQKISVDQAWPLINPNAAGVDLGSREHWVAVPEDRDAQSVRCFGTFTSDLEELAGWLKKCGITSVAMEATGVYWIALFQLLERRGFEVLLVNARQIKNVSGRKSDVLDCQWIQRLHTYGLLGASFRPADPYCVVRSYLRYREELVAARSTQTQHMQKALQQMNVQLTQVLSDVTGQSGLAIIEAILQGERHPLKLAGMVDRRVKSTQHQIAKALIGDYRAEHLFQLKTAFELYHTYEEKISACDEQLARELGNLPDRVDIKVKPLPAKSHPKAIDENLRTGLYLKLGVDLTAIEGIGALVALTTLTEVGPDLSRFKTEKHFTSWLGLCPDNRISGGKVLSCRTRRVVNRLSDALRLAATTLERSQTALGAYYRRMKAKLGGAEGVTATAHKLARIIYRMLTHGDEYVRQGMEDYEKMHQARKLQALQKAAESIGLQLVEKQNLAQAVS

SEQ ID NO: 156821 - protein, 451 aa, unidentified
MTTMKPQVIDDQEHERVHERVAAVDVAKDTGMVCTRTPHPSRPGARRSTVWTVKARMGAVRALGGQLKHDGIEIVTLESTSDYWRIWFFVLEACGLAVQLVHAAQAKNLPGRPKTDKLDAQWLARLTEMGLLRASFVPPRAIRDLRDYTRARTRLVQERTRCWQRLEKLLEAALVKVSSVVSKLTTVSAQDMIKAMIAGQRDPHQLAALARGSMKAKHDDLVEALNGMFDDHHGELAQLLLDHIAFLDGRIAQLGTRATELAAAMPAAWGADADGTTGPGTGTGPDAPVLNAVARLAGIPGISEDLARAIIAETGLDMTRFPTAAHLVSWSGLCPSARQSGPRARAGKKGQGDTWLRGSLGQAAIGAARTATFLGERYARIARRRGKAKAQVAVARSILVIIWHLLADPAARYTDLGYGYYQARTDVDRKLRNHIRQIQALGFAVTLTRAA

SEQ ID NO: 156822 - protein, 341 aa, unidentified
MNSAAAAISVNEATLSRTGYQRVIGVDVAKDKLDLCDSHEKITGSINNDFDHIHKRLLDHVDPASRTLIICESTASYHLLMMDAAHDRSVDVAVVNARQVRDFAKGQGRLEKTDQIDAGVLCQFGEDVKVHLTAPRTAQQKNHTALVNRREALLKMRGQERMRLEHTHDVEAIKFLEEMLENIQKQLQSVEKRLQAILKELAKEDPKVNILLSHTGVGKVTTSVLLTRLPELGTLNRKQVAKLVGVSPIANQSGRKDGKRLIRGGRQEVRNAMYMAANSARRHDPATKAFYERLRGQGKPFKVAMVACMRKMLSTLNQMVRNGETFDATKYASMAEVQSCR

SEQ ID NO: 156823 - protein, 378 aa, unidentified
MIEHTAEALDAWLTELHQKVKGRIAIALELKKGPVVYALQKYPFITVFPVHALSLARYRQAFSPSGAKDDPQDAELALELMLRYPQKIKAIEPDNADIRLLQQLVEQRRQLVEDKRRFVNRIINTLKQYYPQPLEWFSHRGSLLLCELIIRWPSLQQLKRARRDTIRNFLNAKGGRAMALTEQRVASIDNAIPLTTDPSVIEANALMAAALATQIKVVSEIIKTYDERIETLFDTLPDAGLFKSLPGMGPCMGPRMLAALGDNRDRFNSAEEIQNYAGIAPVTERSGQKSWVHWRWQCAKFVRQTFVEWAAKTVNSSYWAKLYYQGLREKGKSHQSAIRALAFKWIRIIYRCWKARTCYDEAKYLLALEARHSPLLKP

SEQ ID NO: 156824 - protein, 337 aa, unidentified
MEYFAGLDVSMEATHICVVDRDGAIVHEAKATSAPDAIEAELARAPACRRVVFETGRMAPMLYHGLVAFGLPVVCIESRQAYQALKSLATHKTDRNDARGLAHLARTGFFKPTHVKSLPAHAIRSLIIARKKLVGQRVMMENQIRGLAVVFGVRLPRALNPAFIEQALRASEGIDGLSAAMRGLIAARGAVLSAITAIDADMKKLARSSEACRQLMTIPGVGHITALAFTAAVDDPERFRRSRDIGAYLGLVPRRYQSGEVDYTGSISKCGDRRVRTLLYEAANVMLTRYRGSLKLKEWALGIAKRSSMRKARVALARRLAIIMHAMLRHGTEFKPA

SEQ ID NO: 156825 - protein, 355 aa, unidentified
MNVSVNHYIGFDVHKKSISYCVKLADGRIVEEGKLAARRATLCQWASKRAEPWHGAMEATLFSGWIYDTLKPFAAKLEMGHPARMKAIGASKKKNDKLDARTICDLMRANLLPACWVAPSEMRELRRILRYRNLVLEQAVRMKNKISGLLMESGVEYNKKRLHGEKYFHELLENLAAEVPESVKDLLKLSRGWLESFQATQQQLLVKLQKHPILMERLKRLKSIRSVGEVTALTWALEIGDPHRFSSIGDAVSYCGLTSALVESADKQKRGPISKQRNAHLQTVLIEAAKLAPRWNPRLAELHQAEIDNGRHRNRATLEVARKLVAYLLAVDKSGKDFAVRTPSGKSEGEVKPAA

SEQ ID NO: 156826 - protein, 428 aa, unidentified
MTDHKKINPAGSLVAIDVAKEWNLVLTTNGSGDRRTFKVANRRADHDRLVSFLKSLPGPVRLGLEPTGDFHRPLAYRLLSEGFDVVSISSVALARFREARYGTWDKNGPKDAQVIIAMMAQDMVQTYHDPLFHGTHDLQELANTYFQITLARTRLQHGLLTHHIPLYFPEFGRYWIATRSAWFIRFLLRFPTPASVRALTPEAFSSEAWDLLGRKVEKRKKIAEMYAMAAESIGLPVALDSPAIEMFRLQLRRYQQLNEDRAHLDARAQELLADNPDFQRLLTLPGIGAVMGLTILAEVGNLRRFGHHRQFLKYCGLDLSKNQSGQSRGRETLSKRGNKRLRMVFWLAGLRAVHMRENAFRDKYERYLTDNPFDADRKRKALTAVAAKMARVVYAVIKKDADYERFFEQRLPSGSIPLSSAVEAISTS

SEQ ID NO: 156827 - protein, 354 aa, unidentified
MKSNTQNAKIEAITEKTLVLGIDVGSETHYARAFDYRGIEYSKKPFKFSNTEVGFATFKEWILDLKERHEKDKVVPGMEPTGHYWFNLGKFLQDNEMKPVLVNPHHVKKSKELDDNNPTKNDRKDPKVIAGLVREGRYMIPYLPDGVYADLRTASNIRFQLQAELTRIQNRISRWFNIYFPEYKTVYGKPDAKSGMLILKAAPLPEDILTLGIDGVNQIWRDAKLRAVGKARAKTLIEAAEHSIGSKEGTVSARMEIRMLLEDYESKNMRLQEVMVLIEELVKEIPMAEKLLEIKGVGIRTVSGFLAEVGDISRFNNPKELQKLAGLALVENSSGKHKGKTTISRRGRKRLRNI

SEQ ID NO: 156828 - protein, 345 aa, unidentified
MEQITRIGMDTSKHIFQLHGVTAAEQPALRKKLRRKEMVTFFEKLAPTVIAIEACGASHHWARLLQSFGHSVKLIAPQLVKPYVKRGKNDTADAEALCEATSRPTMRFVPVKTAEQQAALMLVGVRDRLIRNRTQLANAIGGYAAEFGLTAAKGKAHLDPLLERIQADESLPALARELFAAQAKEYAQLQAQIDEVDARLMSWHRADECSRRLAKIPGVGPIGAGLLKMKTPEPELFRSGRQFAAWIGLTPKDHSTAGKVRLGVITRAGDEGLRSVLVVGATAVIQHVRRGGRSSRWLTELLKRKSPKLAAVALANKMARIAWKLMVTGENYAAKSAPAALAGVA

SEQ ID NO: 156829 - protein, 408 aa, unidentified
MKTLHKRCAGLDVHKAEVVACVRLISKRKVEREVRRFPTTTQGLLALAEWLESAGCTDVAMEATGVYWKPVWHILEGRFALILANAAHVRNVPGRKSDVNDATWLADLLAHGLIRSSFVPPPAIQELRDLTRTRRQLTREIVQHVQRIQAVLEEANIKLCSVITDIMGASGRRMLKAMIAGETDAEKLAALGHERLGCTRAELVEVLTGRVREHHRFLLGQHLRTIEQLKDSVAAFDARIEAALSPFHDIVERLEEVPGLAAASTETVIAEIGTDMSLFPTAGHLLSWAGFAPRLDESAGKHRSTRIRKGAPWLKPVLVQAAWGAARKKNSYFQAQFLRLKARHGAKKAAIAVAASILTTVYHMLRDGTCYQDLGPEYFTRRNPAQAAARLANRIRNLGYHVEIRAAA

SEQ ID NO: 156830 - protein, 386 aa, unidentified
MQKPNDLNQSRIVLKQDSTLIAVIEMSLSSWLVAGIVPGVERQPLKKLAVDESALLKLLHRWREEAEKAGRRIKRIVVAFEAGRDGFWLARWLKACGIEAYVIHASSIAVSREHRRAKTDRLDTELLKRAVLGWLRGERDHCKMVAIPTIKDEDAKRPNRERDSLVGERSRIVNRMKAALVRLGIRGFNPKLKRAAERLDGLRTPEGEPIPPNTLAELRRDMERRRLVNNQIRQIEEARLERLEQTPSDGPHAMVRLLARVIGVGIETADMLVHEVLTRNMRDRRAVARYGGLTGSPDESGRRRREKGLARSGNARVRRGMIQLAWRFLLHQKNSALAQWYRARTENARGTRKPMIVALARKLLIALWRLVRQGVVPDGVVLRPAQ

SEQ ID NO: 156831 - protein, 270 aa, unidentified
MTFRPHALHLKAELFVKSSRAHVRDDGFTRCNFHLKFFIMVSRGIDISKSSFVAAYPSTNGNPTKTFPNTTAGMRELIGTLAVAEHHCVMEATSNYGCCCTCYIRTVLPSVLPPPKKKQIKHFSRMMMPVTKTDEKDAYMIAMYGEKMNPPIYKMPSQATIRILTTEGFTYFDNAKQLSRFIGICPTYQQSRTSVNIREHINRNDDERLRSLLYIAFWTALRYNSRECYIRLKANEKPFKVALIAVTNKLVRPVLTITTINSIYRWICPG

SEQ ID NO: 156832 - protein, 456 aa, unidentified
MAKHQRKKSPAEQQLPAQLHAVNLHAAGIDVGAEAHWVAVPVEADPQPVRAFPAHTASLHALAAWLTLCGITTVALESTGVYWIPLFEVLETQGFEVILVDPGTMPKNGRPKTDVHDCQWLQRLHTLGLLSAAFRPDDPVVVLRSYLRLRLTLLADAARHIQHMQKALTQMNIKLQHVVSDITGVTGLRIIKAILNGERDPRRLATLRDQRCKEDETTIAQALHGTWREEHLFALHQAVAAYEFCHQQIQEGDAKIAAQLQTFEDRSKGESLPPKPRKRHRNRLSFETRPLLYRMTGVDLTKIEGIDETTALIVLGEIGLDMSRWPSEKQFTSWLGLCPRVRVSGGRVLSSRTRPTANRAAAALRLAAASLHHAKSALGAFFRRMKARLGTPKAITATAHKLARLIYAMLKHGTAYVAGSMAEYEQKYRQRVVHNLSRKARALGYELHPVLGGPPA

SEQ ID NO: 156833 - protein, 336 aa, unidentified
MNIKRIGLDLAKQVFQLHAVDHCERVVLRKTLRRSQMLTFFTRLEPCLIGIEACGSSHYWARELTRLGHSVRIIPPQFVKPYLKGNKNDANDAEAICEADSRPGMRYVALKSEAQQSMQAEHRVRARLIRDRTALGNEIRGILSEFGLVLPVGLSALRRALPEILSQQEQWDNRFIRLLCELAEELQVLDERLNRYDRRLKQLAQEDVRIRRLQEINGIGPVTASALVAAVGDAGQFKNGREMAAWLGLVPRQHSSGGKNRLGHISKRGDSYLRTLLIHGARAVLNTCGHKEDRRSQWLQSVAERRNRNVATVAMANKNARIAWAVLSRKEEYRTL

SEQ ID NO: 156834 - protein, 331 aa, unidentified
MKFTETIGIDVSKLTLDACLHNQQKLIQVPNTKQGYLKLLSWVKKNSICPLENILFCFEHTGIYSFALSCFMSEIKLNYILVPGLEIKRSLGIQRGKNDKIDAKRIAQYAYRRRDEVTLYAAPDKYLNKIRQLLSLREKLVKQRSGFMATLKEQGKIIDKSENKLMFSIPHKLIKELNKQIEKLEQEMDLVLGESPEIMDNFKLITSITGIGRQTALLLIVVTNNFLWFNDAKRLASYAGVAPFPYTSGTSIKGKTKVSPLAHKKLKSLLSSCAISAIRNDPEMKIYFNRRTESGKHKMNTINAVRNKLLSRVFAVIKRRTPYVSLCKYAA

SEQ ID NO: 156835 - protein, 351 aa, unidentified
MLIVGCDYHPSVQQIAWLDTESGECGERRLLHSNGEAETFYRKLKEQGVSVRVGIEATGHARWFERLLAELEYELWVGDPAQIKAKRVRKQKYDQEDARLLLKLMMEDRFPRVWVPGVENRDLRQLLWHRHRLVQMRTRVMNQLQAVALNEGVRRKKALWSDAGRSQLESFRLGPWATRRRQDLLQLLDQLNSSIAPLTAAVEQQAGQHLEAQRLMTHPGVGALTALAYVLIIGSPQRFRCGKQIGSYLGLIPCEDSSAGRQRLGHISKQGNSLLRFLLVEAAQAAVRSNADWRREFLHLAMRRQRQIAKVAMARKLGVRLYWMWRKGWDYETFLQFGSHVGQPEVGYGVK

SEQ ID NO: 156836 - protein, 429 aa, unidentified
MKNNAARKLKQVPADYLIIGVDPHKKTHVAAAMTHDLVVHTRFKFSNSSDGFKNLVQRGQDLISKTGSAGLFFSIEAAGHYWRNLGYFLDSYGIQFRLINPFTLKRIRDGKDINRRKNDYHDAEMAAELLRNGDFVETILPKGIYAELRALYSAHRRLVTERARMKNLLKGLLDGIFPEFTQVFKNICGMTAFQVLSICPAPKTITSMKLEDFVAAIREGFKGRAPKVRKLYDVYSLARTSIGIETASDSVSLEINFLVQRLQLLSNQIQETENALITVLKAIPDSAYLMSIHGISYMSVAGMLAELGPLGAYHNAGQLIKMAGTNPTEWESAGKRGSRTPISKKGRPGLRWCLWTAARSLLRHNEDFRYWAKERLERPAHLHPLKVREVFGAVVNRLLRVAYALVKKQTYYRIPLPAATTEFALAAVI

SEQ ID NO: 156837 - protein, 408 aa, unidentified
MTIFVGDDWAEDHHDIYLMTTNGARLASRRLPEGLAGIRGFHELIASHAEEPGQVVVGIETDRGLWVEALIAAGYQVYAVNPLAVARYRDRHHVSGAKSDAGDAKLLADLVRTDRHNHRMVAGDSPDAEAIKVLARAHQNLIWARNRHTNALRSALREYYPAALEAFDDLADRDALAILGRAPTPVDAGRLSLSKIRAALKTAGRQRNLDTRAQHIHARLRTEQLAAPVAVTAAFGASTRAAVGIIAELNRQIADLETELATHFETHPDADIYLSQPGLGVVLGARVLGEFGDDPNRYTDTKSRKNYAGTSPLTVASGKKRAVLARHVRNRHLYDAIDRWAFCALNASPGARAFYDHRRAAGDLHHQALRALGNRLVGILHGCLRHHTNYDEHTAWAHRQTTPANQAA

SEQ ID NO: 156838 - protein, 440 aa, unidentified
MSKRAYRATRVNDVNWDQLAQGKDGLDIALGVDVGKYSLWAVCRWADGRFERPWRVQNPGEIPTLLTLLKRVSAGRKLVVAMESSGTYGDALRQALADNQLEVRRVGGKAAHDYAEVFDGVPSQHDGKDAAVVAELAALGKAMPWEYQPADPWEQELAYWVEWMVAHRQMLTIWQGRLEGLLARHWPEATQVLKLSSGTLLRVLKRYGTPQALAADGEAAKLLARWGGAFLAPEKIEQLLAGAGASVGVRLGEWQQRQIQNYAQQALAARQEANRAQRRLRSLAAGHAVLQAQGKVVGVPTACVLWVSTGDPRKYHAAGAYRKAMGLNLVERSSGTYQGRLRISKRGSPRTRQWLYFAVLRLVQKCGVRSWYEAKKAHDEADARRALVAVMRKLAVALYYVGVHNEEFQPRRLFGRIRRHRGSPGEQKSRTKRRSRAEQI

SEQ ID NO: 156839 - protein, 445 aa, unidentified
MMLEYQQTIDSHIYREDSITMNFNTNEKINQVSENTLVIGIDIAKYKHFACAIDDRGRVLQKSFPIAQSHMGFEAFYERLLALKAIHDKQEILVGFEPTGHYWMNLAAFLTNYGIPFVMVNPMHVNRSKELDDNLQTKNDQKDALVIARLMRDGRFSYPRILAGVEAELRNGATFRAKIQEDLNALQNRIIRWLDRFFPEFTQVFKSFGKMAYAVLEKTPLPSDINGKTPEELLFFYRQVEGMKSPQLPKAKQLVEVAESSIGVTEGLVMARFEIATLLSQIQLMQTQLEKLTAQLIELAKQMTDYDYLASVPGIGDITIVDLLSEVGSLTQYAHPRQLIKLAGLTLRENSSGQQKGQKRISKRGRRQLRALLFRVMMPLIKHNPAFRALHEYYTTRANNPLRKKQSIVVLCGKLVKILHALCKKKTMFDEHQMMKDFAHLQMTA

SEQ ID NO: 156840 - protein, 362 aa, unidentified
MPLLSHTAAGAGRSGRLLESQPEGGKEHCEPIPPAPLANHGKEPLRLALSKQVRSVAPPPLRTVRRPARPSLSTVKEAASMVVVGSDVHKKTHTFVGVDEAARELGHQTFPATTPGHQAAIKWARERFGTELRWTVEDCRHLSARLERDLLAAGQVVVRVPPKMMAEQRRIARTRGKSDPIDAAAVARAALREPGLPVASHDETSRQLRLLVDRREDLVKARTATINRLLWRVHELEPAWTPKSHSLGLAKHRRILHAHLESVSDDGVVGLLAELARAELAEVKTLATKINDLERRIAEATATAAPSLLKMPGVGPLTAAKIVGETAGIARFTSEAAFARYTGIAPIPVWSGNTAGRVRLAR

SEQ ID NO: 156841 - protein, 344 aa, unidentified
MQVRTIGIDLGKTSFHLIGMDERGNVVLRRRFSRTQLIGYASRLNACLIGMEACSGSNILGRTLRAQGHDVRLIPAQFVRPFVKSNKNDYNDAEAIAEAVQKPNMRFVPIKTEDQLDIQSIHRTRERFVTQRTRVINQIRSCLLERGIVLRTGRLYLQRQMASILEDAEQRLSGLARRLLDVLWREWRHLDLQIAELHRQIEMIAQQDETCRRLQEVPGIGPLAATLMVASVGNGSAFRRGRDFSAWLGIVPAQATTGGKPRLLGISKRGNKYLRQLFVHGARSCKTHMDRKRHPFGEWVTALEKRSHSNVVSVALANKIARIAWSVLAKGERYRAHVPLMHAN

SEQ ID NO: 156842 - protein, 460 aa, unidentified
MPRKQKNNQKKTSAPMLHSLNPNAAGVDIGATEIYIAVPADRDPRPVRRFSTFTEDLHAAAAWLKTCRIETVAMESTGVYWIPFFQILEAQGFQVLLVNARHVKNVPGRKSDVSDCQWLQYLHSVGLLNGSFRPAQAVCTVRSILRHRNDLVQMAASHVQHMQKALNQMNLQLHHVISDLTGLTGLTIIEAILAGERNPQLLAKLRDRRIKANEQTIAKSLIGDYRREHLFTLRQSLESFRHYQNLISACDTEIEQYLETFESKESKLNPPAGSTPVSPEKQKPQGSEPRFDLKSHLHRIFGVDLTTIPGISVLTAQTIFTEIGPDFSKFDCGGAFTSWLGVCPDNRVSGGKVLSAKTRQVNNRATTALHLAAQSLHHSQSYLGDFYRRMRAKLGAPKAITATAHKLARIIYYLVRTGKAYDETVCATDEAHNRRRLEAKLRRQARELGFELIDPKPAAL

SEQ ID NO: 156843 - protein, 356 aa, unidentified
MKIIGCDFHTRQQQIAMLDTVTGELVERQLQHQNGEARRFYEQLAKPVRVGIEATGYTRWFEQLMTELGHELWMGDAARIRASVVRKQKNDERDAAQILELLVQDRFPRIWMPTPEERDLRQLVLHRVKLVQMRTKVMNQLQAMAMGEGLCRRKKLWSKVGRAELEGLSLGPWASRRRKELLELLEQLEKPMAELQQAAREQAEAHPAAARLMTHPGVGPLTSLSFVLTIGPVERFARSRQVSSYLGLDPRLNCSAGRMKIGAISKQGNSTTRWLLVEAGQTAARKDEDLRRLYRRLKFRRGSQIAKVAVARRLAVRLYWMLRSRANYADLVARLVRMRGSSGSAVMEDGVHREAE

SEQ ID NO: 156844 - protein, 320 aa, unidentified
MKKEKTIAFGVDVGKKELVVCGRSSDGLTDQPACFPNDIIGFKKILVYLKDKDADDNIPVLLESTGPYHWKAAHFLAEHHFSAKVVNPIYTKQMFRFSVRKRKTDKVDAAHLAFMASCGAGYLFRETEEMARKKALVRHYWKLKETSVNHLRHERYLIEYRSISSFKISPLIRKKCEALKKEIVGQFSSGNDLRYLSSIPGVSSLLGATILAEIIPLDRFKHPDQLVAYAGLDPSIKQSGSKAHHSKLSKRGSAILREALFLCAFGAFSRNPFKKVYQHHKDKGLHHTACMCILARKILKTGWALLKKREDFNEQYILKT

SEQ ID NO: 156845 - protein, 355 aa, unidentified
MEKPEITIGLDLGDRFSHYCMLNEDGDAIESGRIQSTEEALRRHFEGEPTMRFALECGTHSPWISRLLEQLGHQVIVANTRKIRAITASESKNDKNDAEKLARFAFCDPRLLSPIRHRSPERQQDLNLIQARATLVRARTMIVNALRGLVKSAGGRLPACSPQGFEARVEASIPPSLTEAARPLLNQIVALNAGIQQMDRGIEQLGNRYPEIPTLRTVPGIGPLIAAAYVLTLDRPDAVQHSRQAGAFLGLRPRQSQSGDSDPQHRISKTGNVYLRSLLVQAAHYVLGRFGPDSELRRWGLKLAASGGKRGKKRAIVAVARKLAVILHRIWQTGNGWQAFPQSRNNTASKNTCMA

SEQ ID NO: 156846 - protein, 397 aa, unidentified
MYIVGIDIAKRKHEAAVIDGEGTVIIKPFSFTNNCSGYNRLLAMLAKAKLPLDEVSFAMEATGHYWLALFTRLQKESFRVQVINPVQTNSIRSFYIRQAKTDPRDALLIAEVIRFGHFSESTLHPENIYELRELCRGRHAIVSMQADVKRKVVALLDQVFPEYETAFTNMFGDTSMAILQTCPTPKELSEMPLEELCHLIEVSSHKRFRMAKAQELQALARNSFGFAMAGDVFSTMIRLYAKHLDFLKQQVREMDRKIAEIMETLDTPITTITGIGPTLGAYILSEIGDISRFSSAAKLAAYAGIDPTMRQSGEYNGVRNRMSKRGSPYLRHAIWLAASSAVLHDPALKLYFQKKRDEGKPYMASVGHACRKMVSIIYAVMRDNKAYTPYIPNEISA

SEQ ID NO: 156847 - protein, 412 aa, unidentified
MFAGIDIASERHVLARLDEAGAQIGKPITITEDRAGYDALLAALAPAPVLVVMEATGHYWKNLFAMLAAAGHDVVVLNPLIARRFQEASLERTKTDAIDANGLARLAFEKRPAPTHLHDDVAEALRELVRHRDRLRQDLVMRTACLWHDDRVRQLHRLVDLGFPEFTRYVRTLDSMLATCLLAEYPTAHAFARATPRRVAKLRYDGRHFVGAELAQSLVDAAKRSVGQHHGHAYKLQARHICQDLDLWRRRLAEIEHDIEDLLDTHVLGKLITSIDGIGPQTAARIIAAAGDPAHFKSPGAFAAYVGVVPGLRQSGKQTSTRAGIGPLGNARLRRALWMPVLSAIKCNAWLRAFYMRLRAAGKPAKLAMIAAMRKLLHAVYSVAKHRRPFVTNQQGSTAQAQHSASAPAGSV

SEQ ID NO: 156848 - protein, 345 aa, unidentified
MNITTVGIDLAKSVFQVHGVDARGKAVLRRQLRREQVAAFFVNLPPCLIGMEACASAHYWGRTLERFGHTVRLMAPQFVKPYVKTNKNDAADAEAICEAVSRPSMRFVPIKSIEQQAVLSVHRVRQGFVRARTAQANQIRGLLGEFGLVIPQGIHHIAERVPALLEDASNELPLEFRQLIDRLTGHLKELDQQVRELERQIVAWHRSSDLSRKLEKIPGIGPLTATALVASIADARSFKNGRQVSAWLGLVPRQNSSGGKSSLLGISKRGDVYLRTLLIHGARSAILAARRHGESKNLWLANLLNRRHANIAAVALANKNVRTVWALLAHGRDFQPGYVPVPTAA

SEQ ID NO: 156849 - protein, 320 aa, unidentified
MLSYCGIDVSKDRLDVAVLPDGECFSVRNDAAGWAELVERLCSFSIAAIGIEASGGYERGVMRHLLAAGMPVRQVNPFRLRQFAKASGVLAKNDPIDARMIASFVAIKPTRPAQRHAPALERLTEILAIRRQLSAEKVAAENASRLLENAMLRRLSRRRIARLTADIDSLDKYLLEIVVSDAALGHRYELLTSMPGVGPLLACTLIALLPELGTMSRKQVAALVGVAPYAFESGTLKGKRCIWGGRAPVRHMLYMAAMSASNWNPALRAFHARLKGAGKLPKVAIVAVMRKMIIALNAMVRDDVAWADRHRGRHPMPTAR

SEQ ID NO: 156850 - protein, 343 aa, unidentified
MSKISIVGLDLAKNVFQVHGVDASGGVVLRRQLRRGAVEKFFAQLPPCTVGVEACGSAHHWARVIGRYGHQVRLMPPAYVKPYVKRNKNDGRDAEAICEAVSRPTMRFVPVKSVEQQATMAVHTTRALLVRQRTMVANSLRAALGELGIVAAQGIEGLRELMAKLEAPHEEVPEIMRGALLLLAKHWQALDADERVLERQIAKAARSDREARRLMEVPGVGPIIASTVLAKVPDAKVFRSGRDFAAWIGLTGRDHGTGGKHRPGRISKQGDRMLRALLISGASAYLRHQKARGVSDPWLKDLLARRPYKVVMVALAAKTARILWAMLVKGEPYRDRASASAAA

SEQ ID NO: 156851 - protein, 368 aa, unidentified
MDELITGFVGLDAHAESTAIGFAEAGRAPPRFIGTVGAKRSELMKALGRLGEPGSLLVVYEAGPCGYGLARELGALGYRCEVVAPSKIPKKAGERIKTDRRDALKLASLPRAGELTSVTIPDERDEAIRDLTRARVDAVRARLKARQQLQALLLRHGRRYTGKTAWTAAHERQLASISFSHAAQSIAFTEYRQAVSECDTRVRRLSEALAHEVESWRMQPVVGAVMTLRGLDLVAATTVVAELGDLKRFARPRELMGYLGLVPSEHTTGAKRRLGAITKTGNGHVRRVLVEAAWNYRFPARVSRALQVRQEHQPKAIREIAWRAQLRLGHRYRRLKARGLPHNKVCVAIARELAGFIWDIGRHVGPNA

SEQ ID NO: 156852 - protein, 349 aa, unidentified
MRFYTQQHRFYCGIDLHARLLAICVLDQTGTIVLQKQIGADKQLLLETLAPFRPDVVIAVECLFAWYWVADLCAREGIPFVLGHALYMKAIHGGKSKDDDIDAEKIGRLLRGGNIPIAYVYPKGLRETRDLLRRRNYLVHKRAELVAHIQITNAQYNLPPFGKKLVYAKNRAELKVAEHFPDAHVRKNIELDLALIDHLDEQIADVELYLQRTVKVEDPHTYYLLQTIPGVGKILALVLLYEIHQIARFADAGDFLSYARLVRCVHRSAGKQVGAGGKKIGNAHLKWAFSEAVCLLIRSCPAVKAWQARHEKKHGKKKTLGILAAKLGRTVYHLLRKNVAFDVRRFLGQ

SEQ ID NO: 156853 - protein, 342 aa, unidentified
MNAVGIDVSKGKSMVTILRPFGEIVSSPFEIKHTSSDIHSLIKLIHSIEGESRVVMEHTGRYYEALAHQLSAADLFVSAVNPKLVKDFNNDSLRKIKSDKADSVKIARYALDKWQSLEPYSITDELRAQLKVMNRQFHFYVKQKTAMKNNLIGLIDQTYPNANTYFNSPTRSDGSQKWVDFVSTYWHVDCIRKMSLNAFVEHYQNWCKRKKYAFNKSKAEEIYTKTKELVPVFPKNEITKHIIRQAIDQLNSTSVTVETIRTLMNETASKLPEYSIVMQFKGIGPSLGPQLMAEIGDVTRFTHKGALTAFAGVDPGVNESGSYAQKSVPTSKRGSSNLRKTL

SEQ ID NO: 156854 - protein, 357 aa, unidentified
MPMLEGVVDGVIGVDTHKHTLTAAAVDPVGAVLDQQTDRAEPAGYQRLLTFGRRRVPGRRVWALEGAGSYGAGLAVFLADHGEQVVEIDRPARPARRSGAKSDLLDAARAAREALAREHLASPRARGTREALRVLLTCRHGAVTARTATINQLKALVVSAPAQLRSQLASMDAGELVGVCARLRGHPTRPIEHTATVRALRSTARRILALQAEVDEVGEQLGRLVAATMPALLEVVGIGPVVAAQLLVSWSHPGRLRSEAAFAALAGAAPIPASSGKTVRYRLNRSGDRQLNRALHTIVLARRAHHPETRAYVARRTAQGKTSKEINRCLKRALARRLYKLLEATTHADRIKRLVTT

SEQ ID NO: 156855 - protein, 331 aa, unidentified
MFPVGIDVSKNTLDLCMLYDGIKGRIKTRNIQNNRHSVENILRWLRLQHCSPEDVHVVMEATGVYHERLATELHDAGFRVSLANPHRSREFARGMGIMTKTDKVDAYMLACYAFLKKPHRWEPPAPEIRYLGALLRRRDVLLGDALREENRLEKYLSTDTPADIISSCRRMAQLLREEVSNIERQIKAHIKASPALRRDYTLLTSIKSVGPQLGMHMLVVLRSHNFVSAEQAAAFLGVVPIEKRSGTSVRRRPRMSKIGPPQLRAKLYMSALCGKIYNKRMRNIYDEMCLRGKPKMVAIGALMRKLVHWCYGVLKTGIVFNDGGLKQVLST

SEQ ID NO: 156856 - protein, 338 aa, unidentified
MTIVMGLDQHRAQITTEWLDSETGELGRARVVPAHRESVRSFLSRFSGQELEVALEATTGWRFVVEELRAVGAEVHLAEPAETAARRGSKKRAKTDRADARHLRELLMVGRLPESWIPPDHLLDLRARVRLRHTLSQQRGEWQQRIQAVLYHHGFAQRRQLMSGEGRAWLAGLALSATAREQIEVAIAMVDALDLQLAPIDSELRAYARRQSGCRALMAHYGIGALTAVTILAELGDARRFSSSRHAVRYAGMDITVHQSDQRRAPGHLSRQGPPALRWALFEAAQVARRPTSPDRDYYEQAAERLGGNRACLSVARRLLKRSYHTLSELGEEALAPA

SEQ ID NO: 156857 - protein, 415 aa, unidentified
MALKIVYQICCGIDVHKTFVVACIASTNKQGVTTYKRHRFSTFTQGLKEWLQWLLDNHCKDVCMESTGKYWIPIYNVLEKDCNIVLAHPKYVKAIRGKKTDKKDAKWIADLFKHDLVAGSFMPPADIRQLRDLMRYRFKLTCFMSSEKNRLQNCLTVSNIQLASVVSDTFGKSSQRILDKILENPDDTSFDIEPLIHGSMKKKLPELELAIDGFITPEQAGKLKVIKKHFEDLESRKAELEKLILALASPYQQELDLILTAPSFKNKFTAIGIISEIGVNMEAFPSAKHLCSWAGLTPTNNESAGKKKSVRVSKAGCYIKPLLVQCANSVVKSEKHPEIRNRYLRLRKRRGHKKAIIAIARMLLTALYNMLKNKEPYNAELYRKSDVLPVNREITIEQAILMAQFQGYKIKSAAE

SEQ ID NO: 156858 - protein, 315 aa, unidentified
MSTKSVAGIDVSSKKLDVYLLPSEDEFIVWNSPKGFASLICRLREANVELVVMEGTGGYERAAHRAIADAGFKVHVANPRRVRDFARASGRLAKTDKIDARVTAVYGLVFNPTATYLRDKSERELQGLVVRRSQLVAMGAADKTRLKHPACVCKASITRMLKKCAEEIALVENEIKALIETRSAWAAKARRLRTMPGIGFVTAIFILSDLPELGRLNRREIASLVGLAPINHDSGEHKGKRRTAHGRATVRTALYLASLTTAQEKRPFGPFRLRLIANGKPKMVARVAAMRKMIVTLNAMLRDGVDFAQPEALAA

SEQ ID NO: 156859 - protein, 357 aa, unidentified
MEAQTVDSLPPVAADHDPVRCLLAIELSKKSWIVAITTALSDKISRYTLDGCDWKGLMELMERIRTRVAREVSRPVEMISCYEAGYDGFWLHRLLERHGVRSHVIDPASVQVDRRARRAKTDHIDAKRLLRSLMAYLRGEPKVWSVLHVPSVAEEDDRRLHRERDRLIAERGQHVNRIKGLCAIHGIYDYEPMRRDRMLRLEQLHTGDGRELPSRLKAEIARELQRLELILGMLKEIEAERDAVALTEKVSEHTNSKKIQNLVKLKAIGAEIATVLTGEVFYRPFNNRHQVASYVGLTPSPFQSGSKCRDQGISKAGNPKARSTMIELALGLGADAGRACSVERAWPRGDARSAGAG

SEQ ID NO: 156860 - protein, 481 aa, unidentified
MANVLAGFPIRNYSLCRPSVHPVRISMFWLVGCSSAAYLCHVCACWFLQGMISRRKGAVFMNVFPVAGVDVSKRFSDMCILTPGNEVFDRVKIYHDTTSMDRALSLLQCAEQQFAAKPVIVMESTSHYHLILFQFFSDAGYEVIVVNPLQSNALKNINVRKIKTDKVDAYRLALLYRMNVLRRSQVPTEMLRSLRMLCRQHYELKGDITRYKNRLTALLDQIFPGFNKVFSDPAAAGALAVLEQCPTPGHILAVTPSELARIVQKASHKSSEYGNRKAALLLDIAEQAARIGIHAPGDPVLMRAVITILRQLIESVNLIDRKIKSLAAQDAYIQKNVTLLQTIPGVGPFSAAVLLSEIGDFSLFRKPKQLAAYFGLDPSERQSGTIQSTRNKISKRGSPYVRAVLYMVAHNTVHTNCFGSVGNPVLAEFYQKKCRSKPSNVAICAVMHKLSNIIYAVLRDQAPFELRSPETHAKMICGKAA

SEQ ID NO: 156861 - protein, 313 aa, unidentified
MLYVGIDVAKNKHDVTALNVPGKTVLKPLTFSNNKAGFELLDLSLRQLNQDCLIALENTGHYAFNLLNFLHEQGYKVYTYTPLLIKEFAKSLSLRKTKTDKKDAHGIALKLLSDPNREQFQHDNRQVELKILARHIHRLKRKQSDWKVQYTRCLDIIFPELDKIVGKHAECTYQLLTRYPNPQKRLEAGFDKLIEIKRLTASKIQDILSVAPRSIGTTSPAREFEIIKHYKRLIDKAEKCVNDLMAEFNSVITTVTGIGNRLEAVILAEIRNIHAFDNPAQLQAFAGLDSSIYQSGQIDLAGRMIKRGSPHLR

SEQ ID NO: 156862 - protein, 341 aa, unidentified
MTELKRIGVDTSKHVFTLYGIDAQDRPVLRRNLRRGEFLSFMAKLAPTLVALEACGASHHWARGLQALGHKVLLIPPQYVKPFVKRSKNDAADAEAICTAAGQPGMRQVPVKSAEQQAAAMLLGVRELLVRQRTQLANAVRGLAAEFGLVAAKGNAGVAALLAAAPERLPAPAVEALALLGQQIRQVEAQLAQADQTLQAQHKASPTSQRLAAIPGVGWLSALTLSVRVDASQFETGRHLAAWVGLTPREHSSGGKQRMGGISRAGDERLRSLLVLGATAVIRHAAKPGRGADKVSPWLLSLLARKPRKLAAGALANKMARIAWAMMTSGEAYRRPAPNAA

SEQ ID NO: 156863 - protein, 351 aa, unidentified
MSEHYAGRQIVGMDLHRRRSVLVRMTDTGEQLETIRISNDPEYLKAVMARAGEAPEVVLEAAYGWYWAADTLAELGATVHLAHPLGVKMFSYRRVKNDQRDAADLADLLRMGRLPEAWIAPPATRELRGWVRHRAKLVGLRSSLKCQVHGVLAHAGIWVPMSDLFGVAGQQLLAELSTGERLSIESRSRLDSALRVIGALEFEIELFTKLVNGRLRTDPGYRAIQQIPGVGLVLAAVFVAEIGDIGRFHRPEQLASWAGLTPKHHESDTTVHRGRITKQGSRLVRWAAVEAVQRVGAHTRLGQHRDRVAARRGRNIGVVAAARELLTLVFYGLRDHHIRALSPPAAGRPAA

SEQ ID NO: 156864 - protein, 402 aa, unidentified
MNCVGIDVSKGKSMIAVMRPFGEVVVSPFEVLHTDSELSKLARLLKSLDGETRVVMESTGNYHAPVAWLLHDAGLYVSVVNAMLVHDYGNNSLRRAKTDKKDAVKLANYGLDHWLTLPRYVPEEDARLMLKTCYRQYQQYSKVQTMLKNNLISLLDTTFPDANRLFTSPPRADGSEKWVDFVATFWHCECVCGRSEKAFTTQYQKWCRKHGYNFSEDKALDIYASACRHFGVIPKTDTAKLLVEQAISQLRATSAALAALKQEMQSLAASLPEYPVVMGMFGVGPTLGPQLLAEIGDVRRFHSKKALVAFAGIDAPPYQSGQIDVRSRSISKRGSASLRRTLFLVMSVILQCAPIDEPVYQFMDKKRSEGKPYRVYMMASANKFLRIYYASVKAYLESLEHD

SEQ ID NO: 156865 - protein, 418 aa, unidentified
MKVVYPICCGVDVHKTFLVATIITSQGITPHYSKKRFSTFNNSILQFKQWLIDNNCFDVCMESTGKYWIPIHNLLEDTIRVTIANPKWVKAVKGNKDDTKDSKWIGDLFRLGLVPGSYIPDKSIRILREYTRYRYKLVSCKSSEKNRFQNAFTVCNVALDAVVSDMFGKSASSITDYLISSDSFDPEYCSSLLQKSLKKKAVTVVESIEGYQMTKEQKERMVLIRSHLDFIQQSITELDVKLDKMVVPYESALTLLCTIPGVNRSSAITIISEIGTDMSQFANSKRLCCWAGLTPGNNESAGKKKSVRITRAGVYLKPALVQVAHAAVKSNTLPYYKIKYERIYKRRGKKRAIIAIARMILTAIFNMFITGEAFNPCDLYKIDMPQEMQDKQKEKAINQAVKLLISQGLIKASDISVA

SEQ ID NO: 156866 - protein, 425 aa, unidentified
MRFIALDVHRDFCEVAIAEEGEVRLAGRVQTTPGELELFAQSLGEDDQLVLEATGNALAIARIVEPYVARVVLANPKSVKAATETAKTDKLDARTLAKLLAGGFLREVWIVDEQTRVLRRRISRRAQLVRQRTREKNQVHATLIRNLKARPPVSDLFGVHGRRWLAGQALPADERETVEACLRQIDFLAAEIAVIDRALAELALASEQMRRLMTLPGVSFVTAAALMGAIGDVGRFPTAGHLVSYIGFDPRVRQSGSEPARHGRISKQGPGEVRHLLVEAAWHAVRTYGPLRVFAERLASKRGANVATVAVARKLVVIAWHMLSRDEDYAFARPSLVREKLRKLELLTGAERRKGKRNPVRVFATKEQHQLEKDLARQAEVAYRRLVRDWQPAMKKGTGAAPGRASRGPSSGQAARQNTAPRPAL

SEQ ID NO: 156867 - protein, 332 aa, unidentified
MMAQSEVVVVGIDVAKDKVDACIRSLSQRQTFSSTAEGRRALIRWLRKHRVGKAAMEASGGYEQDWAKALREARIEVRIVDPKRVRSFARSAGRLAKNDPIDAEMIAWFAETFTEAPGQAYDAARERLVKIVNARQGLLDLQTSLKNSGEHSVPDVVQKMQARLLKKIAVEVVKLETAIAAQVKATPHFAELAEIIESVPGLGKITSAGLIATMPELGQVNDNIVAALLGVAPYDDDSGQRRGNRHIKGGRRRARNLFYMPCMGAATRHNPVLKAFYDRLIAKGKEPKVALTACMRKLIVILNTMIARRQKWDANRYKVSDSARLPPSACPA

SEQ ID NO: 156868 - protein, 341 aa, unidentified
MEQVSTIGLDLAKHVFQAHGACASGAVVFRKKLRRDQVLAFFAGQPRCVVAMEACASAHHWARTIRELGHEVRLIPPAYVKPFVKRQKNDMADAEAICEAAQRPTMRFVAVKSEAKQASSVIFRTRDLLVGQRTQIINALRGHLSEYGLIAPQGPSHVERLIAQIEDPASGIPDAARSCLARLVETLRPLQDQIAALDREIAGRAKADDVARRLMTVPGIGPLIATAIEALAPPPETFRSGRDFAAWVGLTPVQRSTGGKERLGRTSRMGERTLRRLLIVAACGVVRWARRKGVPAGSWLARMLARKPPMLVIVALANKMARVAWALIAKGGIYRAPAAAA

SEQ ID NO: 156869 - protein, 388 aa, unidentified
MKGTDYKGYLGVDVGKYNHTACATDDSGKELFVVELKNTEEDLLELMSRVGKGFLVTVDQKRNIGMLTIRCARSCGLEVAYLPGHSMKKARDLYPGIAKTDVHDSRVISWASRAIPESLLPIAEEDSSSEKLRRFAAQYADLLCDQTHQKNRLRAMLLESNPAFEMAIDLGCSWNVSLLATLGGPWNILDAGKRRFNNWAEKTPYASTEKCGAIWCTLKAVSRVTQGQVEAEGYLVKSIASRIAAIDEEMARVAKIIDNGLKGDAVYQALQTIPGIGKRTASQLVLTIDITEFKDHDALASFCGLAPQNRQSGKTINSVTSSKKGNRALKNLLIFSCMSLIGTDNYYGRYYDACRARNMKHLKALKAVARKRLKVIYAIMRDAVPYAA

SEQ ID NO: 156870 - protein, 394 aa, unidentified
MLKYCVGIDVSKNDLQCCISVIDQLQKVTVKSSAKFANTKSGFPLLHQWITNGHKQKEVPLVVVMEATGIYYEQIARYLFKQHYALSVVLPNKAKKYLQSTGLKSRNDHIAAQGLARMGAEQCLELWQPMNSYFYELRELTRQHQSLQELKTTLNNQLHASQLGMYQSNLVVQQLKALITAVNKQIHELAAAIKKHIDDNEEVKHKVDNSCKIKGLGVLTVAVILAETNGFALFENSRQLVSYAGYDVVENQSGNHKGKTKISKKGNSHIRRAMHMPAFGVVSHEQHPFIDVFNRTFKRHGQKMKSYVAVQKKLLVIIYALWKSNSAYELNHQPKKHTGEKEQVLSSLPGLAQADPPPAAVRGGHKNSANLQEQAALHKVNILSNDRSLLPLCQ

SEQ ID NO: 156871 - protein, 367 aa, unidentified
MKKISTVGARQTRNFRDQKLTIGLDLGDRTSWYCVLDEAGEVVLEQRLSTTPKAMKEVLGRMPRSRIALETGMHSPWVSRVLSELGHEVIVAHARNVRLIGESRRKDDRFDARTLARLARIDPQLLAPVKHRSAQAQSHLMVVRARAGLVRARTSLINTARGLTKSYGERLRGCNPRNLNAEKARELSPELQAALQPLLAAIESLSERIYEYNQRIEKIATESYPQVARLKQVKGVGTLIALTYLLTLEDAQRFRKSRDAGCYVGLQPGRRNSGQSEPQLHISKEGDPYLRTLLVQGAHHILGPFGADSDLRRWGVKLAERGGKNGKKRAVIATARKLAVLLHRLWVSGEVYEPLRNSRPVLQSAAA

SEQ ID NO: 156872 - protein, 351 aa, unidentified
MLIIGCDFHTRYQQIAMAEDSTGELLVERRLDHESGEAQVFYRSLPKPVRVGIEATGPIHWFERLLAELGHDLWIGDAARIRASEVRKQKTDERDAALILDLLLAKRFPRIWVPTPAERDLRQLLWHRHKLVSLRTMLGNQLHFLAMSQGLCRKKKLFTKRGRRELVALPLGPWARRRREELLKLLDQLEPPIAELDRAVLEEAKRREDAVLLMSHPGIGPVTALAFVLAIGPVARFQRSKKIASYLGLNPSEESSGGRRRLGAISKQGNTMVRWLLIETVHHAVSQDPELRQDYQRLKFRRGHAVAKVAIARKLAVRMYWMLRSGADYAQLVRKQGSPGGTLMNANSSLA

SEQ ID NO: 156873 - protein, 410 aa, unidentified
MTVIAITQNTPVLVAIDIAKARHEVLIAVTGKKRRRRLTVLNELADFTRLITALKDYGRPVRAAFEATGNYHRALAYHLATAGFEVKLVSSVALARTREALHNSWDKNDPKDAQVILHMMEIGNEQFYHDPLVRGTNDIQELSKTHDIVSKSKTELWHRILTHYLPLYFPEADRFHRSSRSDWFFAFLERYPSPHFISAMSKDAFTADAWDVVGRKVAKERLLADIYETSKVSVGLPVALDSDAISMFRLVLGEGRSLIAQRNQIEARAVALLKDLPDYQLLTSIPGIGPINALTILAEAGDLRRFGHHRQFLKFCGMDLATIQSGTFRGQTKLSKYGNARLRRTLWMAGQVAILQRTNSFRDKFERYISKDRQNTHLRRKAYTAIAAKMARTVHGIIKNGEPYRPFFEG

SEQ ID NO: 156874 - protein, 410 aa, unidentified
MLELFVGDDWAEEHHDVELMDPAGRRLARARLPEGVAGMARLHAMIAAQLGEGVEDAVVKVGIETDRGPWAQALIAAGYEVFAVNPLQAARYRERHSVSGAKSDKADAHTLADMVRTDSHQLRPVAADSPRAEAIKVVARAHKTLIWERTRHTQRLRHALREYFPAALEAFEDLAASDTLELLSKAPDPGAAARLSISQISAALRRARRRKIEEKAAVIQSALRAEHLRQPEVVAAAYAASVQSTVAVLKVLVEQVKTLQGQVESHFGRHPAAEIILSQPGLGSILGARVLGEFGDAEDRYVSAKSRKNYAGTSPITRASGKKKLVLARFVHNDRLIDALAAQAFAALSASPGARAYYDRIRARGVGHRAALRQLANRLVGILHGCLTTGTVYDETTAWPADATDSPAAA

SEQ ID NO: 156875 - protein, 351 aa, unidentified
MKKVAYLAMDVHSGHCVLGHMDFDGTFIGNRRFPTSEQHIIEALKAVKAKEKYLALEESNLAYWAAQVARAYVTEVISSDPKENALIYRSPNKRDKVDTHKLCRLLRLGELKRVYHPENDERAIFKAAVQHYIDLRDQQVVLKNKIKAMYRHWGVIDVAGEAVYGIKRRHDYLQRVKHLHVRNQLHRLYCLMDETESMQKRALKAMKQLGRKYPEIKQFKKMPGIGEIHSHTFDAFIQTPHRFANKRKLWRYCRLGITDRSSDGKPLGFKRLDRSGVSELKSLSYQAWLCAMRSDNEVSRFYSESFRRTSNRVHARLNTQRKILAVMYGMWKTGEAYRSELFLDSPQMSVV

SEQ ID NO: 156876 - protein, 334 aa, unidentified
MNYNHYIALDWSQKVMAFARMTGSGSEIKDEKELVSDLREFKVYLSHLKGTKILTFEESSGSQWLYTELRDCVDEILVCDPYRNQLLKEGPKTDRIDARKMVLLLKAGLLKPVFHSGDDFIYLRKLVSGYLDVVRAGVRIKNQRASLLATVGKTKVSKLVHRPEDVFVMEGIERGVASYENEKQRYEEEFHRWVRKYPILQNLVSIPGIGEIGAVKIAAHVVDIRRFETRQHFWSYSGLVKLERISGGRSYGRKNPRFCRVLKSVFKSAAMSMLQKRVNHPLRDYYEWLIQQKHLAEYHARHALARRIAAITFGILKAKEKFEVERVVPCNISV

SEQ ID NO: 156877 - protein, 393 aa, unidentified
MLFIGIDVAADKHDYCVLSPDGKILSEGSFLNSRDGFEEFLRVTERCRLFKDGGGFKIGMESTGHYSANILAFLKANGFDTTLFNALTVKNYITSKTLRRTHTDKLSAKHIARMLATEDYDSVCRQDNPLDRLKSLTRARYRLDKEIQPVKNWHRRLIRLLFPEAIAFFGQIDTSTALALFDALPSAHDIACCNVAKLTSILSAASKGHFKRAKADALKHLARISIAVYDSGSAFELRQTVRRIKFLEQQKSDFDAEIKAIMLELNSPITSIKGIGYILGAVILAEIGDIRNFATPNKLLAFAGAEPSIYDSGKYSADKTPMAKRGSRYLRRALYLATDKARLNSPSFRAYIDLKRAQGKHFYTAMSHGMKKMCRVIFAVLTTNIPYVEPKSI

SEQ ID NO: 156878 - protein, 336 aa, unidentified
MLIIGCDFHTRFQQIAMLDPQSGEVIERRLEHENGEARAFYAALPGPARVGMEATGYAHWFEAMLAEQGHQLWVGDAGAIRAAMVRKQKTDSRDACHLLDLLATDKFPRIWTPSPSERDVRQLLRHRYKLVCLRTSVRNQLHALAMGQGICRRAKMWTVAGRQELEGLALGPWASRRRQELLEMLDRLDPSIDELDKAVIQEAESRPAAVRLMEHPGVGVVTALAFVVTMGPIGRFPKSKQVVSYLGLNPSESSSGGKQRLGSISKQGNSMVRFLLVEAAQTASRYDSDLRRDYQRLKFRRGSGVAKVAIARKLAVRLYWKLREAAQPGAAGSHAG

SEQ ID NO: 156879 - protein, 344 aa, unidentified
MGEITTVGLDLAKRVVQLHAEDEGGRVVLRRPVKREAVLSWFAQRAPCVVGMEACASAHYFARELAALGHTPRIIAAEFVRPFRMSGKNDANDAQAICAAVRQPQMRFVTGKSAEQQARLAVHRLRQGLQEERTAALNRLRGLLAEFGRVYANSASAALAGARGALADETLPAPLRQCVARQLTHLRELESHLADCDREVARDAQADPRAQRVVRLSGVGVLSASAIAATVVDAQQFRCGRQFAAWLGLTPRQYSTGGKTRLGRITRRGDAYLRTLLVQGARSALQAALRTAPTRRTPLAAWIVATHARIGYHKTLVAIANKHARLIWALLMNDEPLRAHGTAN

SEQ ID NO: 156880 - protein, 387 aa, unidentified
MLQTIAAPIPAAVDYERTLVLAIEVSNKSWVLAAQVPGLPHTKAKRTINPEAEALLAAITGYRIRAAAAGRSIERVVAVYEAGWSGFWLARRLMSCGVEVYVVQPSSVPIDRRMRRAKSDGIDSELLLRTLLAWLRGEPRVCSMVPVPDEADEDARRCVRERTELISERIGLTNRIGAVLATLGVSDYNPLLRNRYRRLAELRTGLGEPLPANAHAKIKRLLARLELVLTQIAELERERDAVMETEASDKASRMIQQLAGLRGIGVQSATVLVREAFVRRFANGKALGSYAGLASSPYSSGGIDREQGIGKAGNRRVRTVMVELAWLWTRYQPAAAQVCWFRDRVGSTGPRVRKIMVVALARKLLIALWRFVIDGVVPEGAVLKPAA

SEQ ID NO: 156881 - protein, 312 aa, unidentified
MADIICGIDIASQTLDARIGRDGEWRQFARTETGIGELATFCKENHVTLVVMEATGGYERLPFSLLWAAEIPAAIVNPRSVRRFAEAMGKFEKTDRIDCGMIAWYAETKRIQASQPASATQQRLTALVVRLRQLTDLQTQQKNQRRLVSDQEVQDSFTAVLQTITRQMRALQKSITAIIDADPLWAALDVAFREIKGVSDRTVARLIADLPEVGTLSGKAVAKLNGVAPLAHDSGQKTGRRLVRGGRESVRTILYMVAQVVRRYDPDFKAFYETLTAKGKPHKVIRIALARKLLVRLNAKARDVRKALELAA

SEQ ID NO: 156882 - protein, 464 aa, unidentified
MKKKTGTGKLRQRRVQGHLEQVNLYAAGIDIGSNSHYVAVPQELDENCVREFSCFTGDLNRMADWLVKIGIQTVAMESTGVYWIPAYEILEERGLEVLLVNARHVKNVPGRKSDVQDCQWLQRLHTYGLLQGCFRTPEESIALRTYMRQRQSLIESASDHIRHMQKALRQMNLLLDNVVSDITGKTGMGIIRAILSGERDPQELTKLRDPRCKENNKTIAASLEGHYREEHLFSLKQSVELYDFYQQQIITCDEAIEQQLHTLESKGDGDDLPPIKKRKGKNSLNFDVRSELHRITGVDLTKIDGMDENSILKVLAETGTDMSAWPSEKHFASWLGLSPGNKITGGKVLSSKTKPTANRAAASFRMSAYGLFNSKSALGAYFRRQRSRLGAPKAITATAHKLARIFYSMIKKGEEYVDHGQEYYEEQYRGRVVKNLKKKAQSMGFLLVADVAASDGSDATLSTG

SEQ ID NO: 156883 - protein, 521 aa, unidentified
MMSTTRTRKRPSTRRPEANVGKPRGVLHPRVQQVGPEHFGIVCFDPAKTRSKFFLADFYGHVLIPPTWVAHNRPELDAASARIRLAFADHELRDGLVAIERTGRYHRLVQRAFAAAGFETRILHPFVTKQYRQPVDPGNKTDDADLRAMHRATVTGCALVEATRDEAWTTLQLLIRHRRDLVRKGAALNCQIRDHLEAALPGYAACFDKLWESRIPWHLLRHYPTAAELLAAGVTTICHSLREASIRYQQRTIQAVVDWAERAAPGDVAAGQHRRIALALFDDRQRKTQEIQALERDLAGRLARTPYVLLLSFPGINVVSAADFAGEAGPMEHYANAKAITGRSGLRPSRYQSDTVDRANGPLVRHCNRALRTAILGIADNLIHCNHHFQHLAMHWASQGKDPRDIRVRVAMRFSRIAFQMVAGRQVFRHPCIQGRHYILDKLNVFHRLHETGMEQLLRDLKAAIDQLPTREYAAEAKPLQDEWQKIRDGRRRRPQVLGDILPIVFARLGVGAVQSTESGE

SEQ ID NO: 156884 - protein, 371 aa, unidentified
MKSIIYIGMDVHKKTYSLCALLKETGEIIGETKIPADVSLIIKFIENAKKSVDSDDVQIKTGYEAGCLGYSLYWQLAAKGIECDILAPSTMHRSAKNKVVKNDRRDAKNIAANLANGTYKSVYVPTDEDVEIKEYIRMMHDFKIELKKVKQHINAFLLRFGHHYPGKSKWIPAHIKWLKELELSDIYIEILDEYLSQLEILSEKIERFKHRLEELSQKETYNEKIGQLRCIKGIDTTAAMTMHAETSDFDRFPTANAFASYCGLTPGEDSSGESYHRLGITKQGNSMIRTTMVEAAQVLVRGTIGKKGKKVKSKQKDQDVKVIDYADKAVVRLQKKYHRMIFRGVKRNIAITAVARELACFVWGIETGHIS

SEQ ID NO: 156885 - protein, 374 aa, unidentified
MKGSEPLHELVAAHADDPAEVIVGIETDRGLWVTALVAAGYQVYAINPLAASRYRDRHNVAGAKSDKGDAKMLADLVRTDRHNHRRVAGDTEQAEAVRILARGHQNLIWVRTRHTNMLRNALRDYYPAALKAFTDLADRDALAVLAKAPTPAQGAHLSLSQIEAALKRGGRQRNLRSRAIEIQAGLRAGQLAASDAVADAFAATTIAAVGIITELNRQIIQLETTLAASFEQHPDSDIYHSLPGFGVVLGARALGEFGDDPNRYANTKSRRNYAGTSPLTLASGKNKAVLARHVRNRRLYDAIDQAAFCSLTQSPGCRTFYDEHRAAGDRHHQALRALGNHLVSILHGCLEHRCLYNEDIAWGHRATTSAPRAA

SEQ ID NO: 156886 - protein, 319 aa, unidentified
MAQNEVVVVGIDVAKDKVDACIRAFKLRQTWLGTAQGHRKLVAWLRKYQVNKAVMEASGGYERAWARVLREAGIEVRIVDPKRVRSFALSAGRLAKNDAIDAEMIAWFAETFSEAPSQPHDAAREELQALVKARLDLIDFRMRLVSQSEHAAPGLVQKAHAHILKSLASEIAKLEAAISAKIKSTPDFAERAEIIESVPGFAQTSSANLVAGMPELGQVSDEIAAALIGVAPYDDDSGKRRGERHIKGGRRWVRNAIYMPCVGAATQNNPVLKAYYQRLLAKGKEPKVAIIACMRKLIVILNTMIARRQKWDPSRYVLS

SEQ ID NO: 156887 - protein, 359 aa, unidentified
MEYGAIDLHKKQSQIRILTEGGDVIEDRRIVTARERFTAVFGLRRPMRILVEASTESEWVARHLETLGHEVIVADPNYLPMYGDRSRRVKTDRRDVAALADACRRAVYRAAYRRSDQQRAVQAQLRVRQGLVNTRTRAISLARSLMRASGHHIRSGESASFLQRLAACEVPNDLTAILAPLRGVIEVVNDELASADTRFAALVENDPVIKRLTTLPGIGPLTASAYVAALDDVNRFRGAKAASQVTSYLGLVPREFSSGERQHRGHLVRSAQPQVQTLLVQAAWRVRRSTRSETAALRDWADRVSRRRGKNIATVALARRLARILFAMWRDEVDYQPRRIHANRQPQAATTEQPVARAV

SEQ ID NO: 156888 - protein, 348 aa, unidentified
MTITMIGLDTAKAIFQVHGVDGSGRAALKRKLHRSELVAFFEQQPRCTVFLEACGASHHWGRLLSGLGHEVRLIAPEAVRPFVKRGKKNDAADAAALCVAGSRPETRFVPIKTVEQQAVLALHTARSLLVKQQTMLANALRGLAAEFGLAVPKGLPKLEALMALVSTEESIPAAGRQAMEELHAHGRMVAERLVTLEEKIVRHARQDATARCLATIPGIGPITASLLAATVGDTIGAFKSARHFAAWLGLVPRQYSTGGKTRLGRITKAGNAEIRRMLVLGATSMIGRAAHWNSRAGQWVQGVLARRPVRLVTVALANKMARIAWALMTRAEVYRAQGHAPAAAEATA

SEQ ID NO: 156889 - protein, 418 aa, unidentified
MKSMEITAVGIDVSKSKSTVAIRRPGGVIVARPFDISHSNHDLEKLVSILKTTGGDIRVVMEHTSNYWKPIALTLKEAGFYVSVVNAMLIHDFSDNSIRKLKTDRADSLKIANYALTFWNELPPFNDEDETRLVLREQSRMYERLASTATSLRNGLIALADQTFPSIDQAFGHAIKNADGHEKWVDFFSIYWHRDCVLRLSIEKFTESYRKWCLRRNYKFRTNTAHKLYALAQDAVPTLPKNNGTKALVLQACKSLNAVCEAKQSTQEEMNRLASLLPEYEVVMQMEGTGPITGPALMAEIGDVRRFKNKKALVAFAGIDAPPFQSGNFESKSRHVSKRGSPHLRRAVFLVANIILTLSHKDNSVFCFMDKKRAEGKHYYVYTIAGSAKFLRIYYARVTEYLRTQEIPVTASCLNGNN

SEQ ID NO: 156890 - protein, 343 aa, unidentified
MTCFVGLDVSQKMTAVCVVDNAGRRLWRGQCPTVPEQINILVRPHAGENARIGIETGAMTPWLVHELRTLGREVICLDARHARAALEMQINKTDQNDAEGLAQIVRTGWYRSVHVKSFDSHRARALLGARTQLIGMTTRLSNHIRGVLKTFGLLPGAMRGLPFDRKVEALLVGRSDVALIVRPMIVAWRQLRKQITAFDKVIRALVRSNSACRLLMSVPSIGVLSSLAYVSTVEDPGRFSRSRSVGAHLGLTPRQYQSGEVDRSGRISRCGDTLARTLLYEAAVVILARVKKASSLKEWARAIAKRSGNGKARVALARKLSVILHSVWRSGKPFRWSEPANAA

SEQ ID NO: 156891 - protein, 471 aa, unidentified
MGRIDHDPVRLARLARQLGKNAVEHAKPAPADKAVVDGLMRTISLRRITPHQSMLDHINDTRHDPAVIHSRYPVGQRKIWLYPAHLRLTQQKQIIHDNTSFDVVIDDVDAPALTDSAWYEPVSKAERGAFKMTITTIGLDLAKSVFQAHGVDGTGATVLVKKLHRKQMLPFFSKLAPCLIGVEACGTAHYWARTLAAMGHEVRLIPPSYVKAYVKRGKSDALDAEAICEAVQRPTMRFVPVKTVEQQAILMTHRARSLLVRQRTMLANALRAHLAELGFVANPGLANLAKLAEQVMADKDALPSYAQSALEILIRQIMTISGEISALDQQLKAWHTKSEASRRLAAIPGIGVITATALAATVTDPDQFRSGRQFAAWLGLTPRQHSTGGKTKLGGISKQGDRYLRRLLVVGATAVMRHVKDKPTPMANWIRKLSEKKPFRLVSVALANKLARIAWAVLTRKEAYRPYAHLT

SEQ ID NO: 156892 - protein, 343 aa, unidentified
MQTVTTIGFDIAKSVFQVHGVDAAGQVVIRRQLKRRHVLAFFEKLPRCLVGIEACASSHHWSRELQALGHTVRLMPPAYVKPYVKRQKNDMADAEAICEAVTRANMRFVPTKTPEQQSCLMLHRTRHLFIRQQTAVINSIRAHLAEFGIVAPVGRKGVTELLRVVADPNDGRVPEVARACLAALGAQLLSLKQQILEFDRMIMAWHRSNQTSKRLHCIPGVGPMLATALVASVVDPRTFRSGRNFSAWIGLVPKQHSSGGKDRLGSISKQGDRYLRSLFVAGALAVIRYAKIHGTGHRPWLTALLARRPTKVAAIALANKIARMAWAMMAKGECYKQPVALAA

SEQ ID NO: 156893 - protein, 347 aa, unidentified
MKITTIGIDLAKSVFSIHGVDGRGKCVLKRQVQREQVLEAMGKLEPCLVGMEACSGAHHFARELRKLGHDARIMAPQFVAPYRKSQKNDGNDAEAICEAVARPNMRFVTIKSEEQQALLVVHRVRKGLVEERTGLINSLRGMLCEFGMVLPQGRCRLRAGLPAVLRDEHERLPVLAREIFRELAQRIDELDQHILAYDRRIDALVRQSEAAKRLLHIPGIGPISASALVASVGDAKMFDNGRQFAAWLGLVPKQYSTGGKTRLGRISKRGDVYLRTLLIHGTRAVLCAAKSSCVGTPQPTALSVWAQQLRARRGLKKTAVALAAKNARIAWALLARGEHYRARGVTA

SEQ ID NO: 156894 - protein, 340 aa, unidentified
MLIIGADYHPGFQQIAFVDTETGECGERRLTHSKGEAERYYRALQGRQVRVGMEATGHSRWFERLLVELNYELWIGNPAEIRAKRVRKQKTDRQDAEHLLQLLMENRFPRIWIPDPENRDLRQLLWHRHRLVQMRTRVKNQIHAIAMNEGLQRKHRLWSQKGRAQLESLSLAPWTAQRRQDLLGLFDQLNGRIAELSLALQREAAQYPAARRLMTHPGVGPITALAFTLVMGPWERFRCGKQVGSYLGLIPSEDSSGDHQRLGHISKQGNALLRWLLVEAAHAAVRSEPQWRRKFMRLAMRRGPQVARVALAHKLAVRLYWMLRRGWDYEQMLKFSSHAG

SEQ ID NO: 156895 - protein, 344 aa, unidentified
MQITTIGLDLAKSVFQVHGIDATGQVVVRKSLRRSQMLPFFAKLPPCLVGIEACGTSHYWARELIKLGHEVRLMPPAYVKPYVKRGKTDAADAEAVCEAVTRPTMRFVPVKSPEQQAALSMHRTRDLLVKQRTQLINMIRGLLAEFGVDIPKGLERALLMARQIVDGKAPDVPLEAAKIVGTLSQQALDTHVRLREIDRDLAVWLRGNDVARRLTTIPGIGPVGATALAASVTDPHQFRSGRQFAAWLGLTPLQKSSGGKERLGRISKMGDKYLRKLLIVGMTSLVRRAKYNPGKIDPRLADLLARKPTRVATVAMANKTARVIWAIMARGETYRTGHQPALAA

SEQ ID NO: 156896 - protein, 354 aa, unidentified
MSQKLNAEIAVIGIDIGKNSFHIVGHDPRGAIVLRQRWSRGQVETRLANLPPCLVGMEACVGAHHLSRRLRMLGHDARLMPAKYVRPYSKGQKNDFRDAEAIAEAVQRPTMKFVATKTADQLDLQALHRVRDRLVGQRTGVINQIRAFLLERGIAVRQGPHSLRTELPGILATRTDVLLPRMLRIIEDLAGDWRRLDARIEGLSSEIETLARQDQACERLMTVPGIGPIISSAMVAAIGTGDVFSKGRDFGAWLGLVPKQISTGDRTILGKISRRGNRYLRALFVQAAWVVLVRVKSWERYGLQSWIEAAKKRLHHNVLAIALANKLARIAWAVLNKGRAFECVKTEEMASRPA

SEQ ID NO: 156897 - protein, 274 aa, unidentified
MGEYIGLDVSMKDTAISVRRDGKRVWRGKCASDPEAIARMVRKHAQEPERVIFETGPLSVWFFHALQAEGLPAICVDARHAKAALDMAANKTDANDADGLAHLAEVGFYREVRVKGFDSMLTRTLVAARTKLVRIKTEISNQIRGLMKTFGLVVPAGKGSTFDANVCAKLSESSDLAGIILPLLEAWRSVRMRAAELTRRLIGDARQSEACQLLMSIPGVGVVTATAFATAVEDPANFRTSRSVGAWLGLTTRRYQSGQVDYNGHISRRGDHQV

SEQ ID NO: 156898 - protein, 342 aa, unidentified
MAIVTIGLDLAKHVFQVHGVDESGQVLIRRQLRRAQVETFFKTLSPCRVGMEACGSAHHWARRISALGHDVRLIAPTRVKAYVQRGKKNDATDAAAIAEAVARPPMTFVPVKSEEQQGVLMLHRSRDMLVRQRTMLINALRAHLAEFGIVVAKGRSKVKDLITDLDDAEIPDLARFSLLQIAEQIGACDGRVEVLEKQIVAWHRTNEASRNLATIPGIGPITASAIAASVPDPSAFKNGRQLAAWLGLVPRQNSTGGKDRLGHITKSGDSYIRRLLVLGATSVIRYARDKAPGKSEWLKGLLERKSTRLASVAMANKMARIAWSVLTRGEVYRETYPVPKPV

SEQ ID NO: 156899 - protein, 424 aa, unidentified
MKVTYQTCCGVDVHKSFLVATIVKTTGGIEPSYQKKRFPTFNNSILEFKKWLLDNDCHDVCMESTGKYWVPVFNLLEDEINVVIANPKWVKAVKGNKDDTKDSKWIGDLFRLGLVKGSYIPCKKVRILREYTRYRYKLVSCRSSEKNRYQNALTVCNVALDSVVSDIFGKSSTSIIDYLLEQSGTSINHEEIASKLLRSLKSKEDAVIESVEGYQMTDAQKYRMRLVRAHMDYITAEINDVDKMIENMISSNPDFENAVQFLCTIPGVKRDSAITIISEIGTDMSQFSSSKRLCCWAGLTPGSNESAGKKKSVRITRAGVYLKPALVQCAHAAVKSDKSPYYKKKYESLVKRRGKKRAIIAIARMILTAIYQMLSTGEQWNPSDLYKIDMPVALVEKQKEKAIKQAKKLLQREGILPPDEPLAS

SEQ ID NO: 156900 - protein, 355 aa, unidentified
MSIVGGLDVHRRQITFNYLDTETGEQQRGRINDADRDHVRDWIERNFADRNVDIAFALEGCTGWRYVADVLDDANIEVHLADPAEAQAFRGRKKRAKTDSSDALLLRDLLIHDDLPESWIPPEHILEVRALVRLYKSLLDNRSKWQQRMQAVIFHQGVPETERLSAQDRREWLLNDAALSPAGRRQIRTGYAMIDAVNADLVPLRDDLGRIARRQAGCRALMDTQYGIGPLTSAVIWAEMGDCRRFANSRAAVRHTGLDITVYSSDNKRSPGHLSRQGPGVLRWALYEAGKCASRKTSPDHAYYQQVKDRCDGKIATLSVARCIARRSFHILAGLGDEALCPPADWPTRQAQHHT

SEQ ID NO: 156901 - protein, 366 aa, unidentified
MGELESCGCLFTRTVARSALGQIVFTRMGQKMKSYKRVIGIDISTERLDVADSNAKIVHEVDYTIEAIKSKILRLIKKPSETLVVCEATGGLEYSLVDMLHDAKIDVVVANPARIRDFAKGHGFLEKSDKIDAKVLQLYGQQVDATLAIPRTLQERNFIALTRRRTQLLQLINQESNRLRQSNDTQVKSFIEEMLKSLENQMKTLDSWISKALDEQSKTNPSIDVMRSVPGVGVVMTATLVAELPELGTISRTKIAKLVGVAPMIKQSGKSEERRRARGGRGGVRRVLYMATLAATQKNDVIKKRYIKLLASGKPKKLALVACMRTLLTILNDMVRHETKWGEKKKSVAGSVVSNRPAPAHVLDKS

SEQ ID NO: 156902 - protein, 334 aa, unidentified
MLYAGIDIHKAVFQVVVLDPDSGELCESRFEPSRARLGDWAMEWQGKLAAVAIEATTGWRWVARELEQHGFEVHLVDPGRASALRGRRRQPKTDRLDARWLALLLARELLSECEAWLPPAEIQRLRDRTRLRKALAGERTGWAQRLHALLAHEGWPCARGRLLTREGSRWVAALELDAHVRGQVDVIVAVMAALEEQLELVERDLRRFARADQRCQALQTIFGVGPILACHLLAEIGDVRRFQRPRQLVRASGLDPAVIESADSKRRGRLAKQGSRHLRWALVEAANHSHRRSSPDHALYSSTVKRCGRGRARLTVARKIARRSYHVLLAAEAA

SEQ ID NO: 156903 - protein, 390 aa, unidentified
MDVLYQSCAGIDVHQANIVVCILHGPLTSTRPKREMATFDTTTKGLRACHDFLSQFHVEAVGMESTGVYWRPVWHALCDDFELILAQPAHMKAIPGQKTDKKDAHWIAKLTRIGLLPRSFVPDETIQELRELTRQRKHYVESRNRETNRTHKILQSGGIKLTTYIEDIMGLSGRNLLQLLVDGTPITPRIVHQSVYTSLKKKVPQLLEALDGYFSDHHRFMLKQSLEIYDFYQKQIELLEERMNVYLSQYENHVEILDSIPGIDVITASVIISEVGVDMSQFPTSGHLASWAGLCPGNNESAGKKRSTKIRHGNSYLKKCLCQAAFAIKKQKGSPLADRFYQIQSRRGSQKATIALAHQLLKIAYILLKEQITYPEFLAQKKTTRDELVA

SEQ ID NO: 156904 - protein, 351 aa, unidentified
MFRVHGVDRAGKAALRKKVTRRQLLPLLADLGPSLVGMEACSGAHYWAREIEKLGHQVRLINPRFVTPYVKTNKNDANDAEAICEAVSRPATRFVPIKSQAQQDALSVHRVRGLLMRQRSSLINQMRGLLAEYGIVIAKGTAALRRALPAILDDQTNTLSGLLRELLLELRDRLRLLEERLHGYDLRIENLARSSAQAGRLMTVPGVGPLTATALIAAVGNAQQFRNGRQLSAWLGLVPAQNSSGDGTVLLGISKRGDRCLRTLLIHGARIALHHSSGKIDPTSRWVNTIKQRRGYNVATVALANKNARVLWALLTRGESYSAARRAASHPSAPGRLRAAGREAAREKSNR

SEQ ID NO: 156905 - protein, 317 aa, unidentified
MQEPTLCIGVDVSKAELVVAMGPERRPCSVSNDAASIANWLKEIPPDALIAMESTGRYHGLLAHLASQAGLKVYVLNARDVFFYARALGMRAKTDGVDAGVIARYLVEHHKQLHPWRPASSLHQRLHDLLTRRAQVTTHRASLRQVFTDIDTEGIDTSALQAAYKRLLQSIDEKVQALIASDAQMAQGCQRLCTITGIGPQTSALLVTLLSRLEFANADALVAYSGLDPRPNDSGTKRGRRRLSKKGPPLLRRQMYLAGFAASHSCALKPLYQAIRAKGFATTEAMVILGRKLLRVAFAIWKGTEEFDPRRLLPNAA

SEQ ID NO: 156906 - protein, 373 aa, unidentified
MFHFTTLFIGMDVHKESFSLCYYDMMANQFKHSTKVGPNVSYIVNYVNELRRLYGQDAEVLCGYEAGCLGFTLYHQLQAHRIPCIVMAPTTVMKEGSKRVKTDKKDAAQLAKALAFRSYRPVHIPTVEDEQVKEYIRMRTDHKVALKKIKQQILAFCLRHDFCYTEGSSNWTQKHVRWLRSLNPDGLYAEILTEYLLTYEKLVDQIERYDARIEQLGQSDSYQEKVSRLSCFIGIKTLTALSIVTEIGDFNRFATAQHFASYLGLTPSENSSGDKERRGAITKAGNSHVRRLLIEAAQSLAKGTIGYKSKELKRRQSGNRVEVIAYADKANERLRRRYRTLVLGKNKKQNVAKTAIARELSGFIWGMMTGRIA

SEQ ID NO: 156907 - protein, 391 aa, unidentified
MFYLGIDIGKNTHVASLMDEKGKTVFKAFSFPNSTDGGSNLLDKIASVSSVEIGMEATGHYWLSLYSFLVAHGFTVHVINPIQTDGWRKGTEIRKRKTDIIDSVLIADFIRYGNFLETSLADENMLSLRNLSRFRNYLVSSIGDLKRKTICVLDQIFPEYQTAFSNVFGKTSKEILLQLSSPIEFENVTSAQLEDILSQITFKGFAAKKINSISTLAKTSFGITFCLESLTFQLKLLIEQINFIEKQIVDVEAQIKVLLEKINSPITTVPGIGLVNAATILGEIGDINKFSNPSKLVAYAGIDASVCQSGEYQSTTNKMSKRGSPYLRKSLFQSALIASTHDPVFKAYYQKKRSEGKHHLTCLGAVARKLCYTIHAILKNNCAYEVQLPRE

SEQ ID NO: 156908 - protein, 307 aa, unidentified
MTASYEYHIGVDYHKSYSHLVVQDSGGKTLRSGRVKNDRQSLGGFLERYRENSHAVVEATRNWMVIYDWLDDICDDVVLAHPLKVKAIADAKIKTDKIDATVLAHLLRADLVPEAWAPSEKSRELRVALRERMFYVRLRTMVKNRIVTVFDRYPEQTAQLKMLGDLFGKAGRAQLAQVNVSEIDRIQIDRGLAFIDDIDGRIKQSEATIRAMTKANVNVKLLKTIPGIGEFFARLIDAEIDDIKRFRNPKKLAAYAGLVPSTYSSGGKTFHGKIIKQGNKWLRWAFVEAVAPAIATDIHSCAANTNT

SEQ ID NO: 156909 - protein, 460 aa, unidentified
MNRKRSKSRVDRTMPMMHPNAAAIDVGATLHMAAVRADRATEPVRSFGTFTTDLHRLVDWFTECGVETVVMESTSVYWIPIFELLDARGFTVFLVNARDAKHVPGRKTDVSDAQWLQRLHSYGLLRASFRPKGQIAELRAYVRQRERLLEYAASHIQHMQKALTEMNLQLHHVVADITGSTGLRIIRAILAGERDPEVLACLRHYSCHSSAETIAKALTGSYRTEHLFALEQALALYDAYHEKASACDVRIEAVLKELCIHRGRGIGSVAPAPRRRHRTDQANALAFDVRAALFALLGKDITTIDGLGPYLSLKLVAECGDDLSSWPSAKHFTSWLGLAPSNKVSGGKMLSSRTRRSGGRAAALLRLAAVTVGRTDTALGAFYRRLSSRIGKAKAVTATARKVAVLFYNAVRHGMEYVDPGASSYETRYRMRVVNNLHRRAKAFGFVLQPLEPKAGAVVS

SEQ ID NO: 156910 - protein, 375 aa, unidentified
MTNHSEAFVAFDTSKLRNAVAIADAGRSGEVRFVGEIENGGAATAKLVRKLAAKYERLTFCYEAGPTGYGLYRQIKSLGYECLVAAPSLIPTKPGDRVKTNRRDALNLAKLLRAGELTAVWVPDARHEAMRDLSRARGAAAEDLRRKRQQVSSFLLRHGLHYPPGRKTWTKSHMIWLASQKLEHLEQRIAFEEMLFALRQAQERIERLEQAIRAAVPDWSLAEVVTALMAMRGIDLISATTFLAEIGDLSRFQTPRELMAYLGLVPSEGSTGDTVKRGPITKAGNRRARRTLVECSWSYQHPARVGKEKQEKVAAAPRAVREIAWKAQCRLSARYRALVRRGKPKTVAVTAVARELAAFIWAINREVTTARAAAK

SEQ ID NO: 156911 - protein, 394 aa, unidentified
MIFTGKKRIGCAARPPHPPFGHLCNFPLSAIGAVMPVAVVDGRPMHLWDTKPVGELGSPSAVPLNPNSRQGRLRKQSPLRQGWDQMETIVGIDVSKNRLDVAVLPQGEAFAVGNDHAGIDELIGRLKTIGADAIALEATGGFETLAVAGLSSAGSTVLVVNPAQVRAYAHAIGRRAKTDPIDAAVIAAFVLATKPEIRPLRDAQTQALSELVARRRQIVQMIVAEENRLRMALAKQAQKSIKRLLSALRRELESLDADLDDHIRKSPIWRVRETLLVSVPGVGPTTARTLLAELPELGSLDRRQIASLAGLAPWTRQSGKWKGKSFIGGGRGKVRAVLFMAALVASRHNPSLKAFRDRLVNEGKPRIVAIVATMRKLLTILNAIIRDNKPWQNA

SEQ ID NO: 156912 - protein, 387 aa, unidentified
MPQPNDLSRSLVTLEQDSTLIAVIEMGQSSWLVAGIVPGIERQPLKKLAADQDGLLQLLHRWRKEAAQAGHPIKRIAVAYEAGRDGFWLARWLRAREIEAYVIHPSSVPVSREHRRAKTDRLDTELLKRAFLGWLRGEPKHCSMAAIPTVEDEDARRPSRERESLVGECTRIVNRVKANLARLGIRGFRPRLAHAPKRLETLRTPEGTAVPANTLAELQRDMVHLRFVKQQIKEIETARAKRLEQASEGGRDAMVRLLARVVGIGIETADMLVQEVFSRKLRDRKAVARYAGLTGAPDESGQKRRERGLAKAGNARVRHAMIELAWGHLLHQKDSALAEWYQRRTVDARGGTRKTMIVALARKLLIALWRLVTTGEAPAGLLLRPAA

SEQ ID NO: 156913 - protein, 398 aa, unidentified
MLYLGIDLHLKQMTVSLRNQNGDVLLRRQVSTRWPKLVEFRKQLHQAAAMEKYVAVVEVCGFHDWLVQWLRQDEHCDQVLVVQPLGRSASKTDRRDAHGLSELLWINRERLLRGERVHGVRTVYMPSEEELAARCLTRTRERLVRRRTQTLNQIHKILRRQNLEWERPTKTFQTVKVRQWLKTLELDPIDRLAMSQLLVQWALWDEQLLAADGWIRERFLTNQNARLLATIPGVSMFIGLAIACRIAPIARFPRGRSLANFLGLTPGCNSSGDTERVGSITKIGSRMVRYLLAQAIQHLLRRDGGIRAWYQRIKRRRGSKVARVAVMRRTATIMWRMLSTGESWRRSSEMPVAANEPRQGDAPQNKQAEDPSGETGLAGFNTGASSLLAGEEVTPCLA

SEQ ID NO: 156914 - protein, 367 aa, unidentified
MILVGIDVAKDKHDCCIINSDEEFPEEVFSILNNREGYETLYKRICSLTVDFTKVKVGLESTGHYSSNLLAFLLDKHLTAYVINPLRVNLFHKGQSLRRTKTDKIDSRNIAHLLMADSSLKPYSLSSYHMEELKSLTRYRSSKVRERTKLKTSIARLVTILFPELEQLVSSIHIHSIYAMLEKFPGSAYIAATHLTRLTALLLKASRGRFGRETAIRIRDTARRSIGAVSPAKSMELQHTIAHLRVYNQEIGEIESEIEKIMDDVNSPITSVPGIGMQMGAVILAEIGSFRRFDSPDKILAYAGMSPSMYQSGKLTGSYSRMEDPAIFVMHCSMSQGTFVTMIPASLPTCQRNERKENIITLPSPML

SEQ ID NO: 156915 - protein, 374 aa, unidentified
MTMMQHRQIRYIGLDVHKVSITVAIAEESGAPTSYGSIANDPAAIRKLMTRLGGPEVELRVAYEAGPTGYALHRQLAKMAIDCIVVAPSLIPKQPGNKVKTDRRDALKLARLLRSGDLIPVWVPDEAHEALRSLVRARADAKADQLRAKHRLSKLLLRQGCRPPSGVRTWSQRHVQWLRQLEFEHLPDRIVFADYLAEVTAAGERLKRLEAALYQCAQSSSQVAVIRALEAFRGIGFLSAVTLVAEAGDLRRFRTAPQFMAYAGLVPSESSSGGKQHRGPITKTGNSLLRHVLGETAHHARHAPRVSSKLKARQVAVPREIVELAWRAQLRLHARYRHLSSRIGSLKALTAIARELAGFIWAAGQVLQEVPTAA

SEQ ID NO: 156916 - protein, 375 aa, unidentified
MKQYSKYVGLDVHKEKIMVAVAQANRRAPVYYGEVANTSEAIGKVVRKIAGQEETGFCYEAGPCGYGLYRQITAMGHQCEVAAPSLIPKKSGTRVKTDRRDALALAGLYRAGELTPVWVPDKEQEAMRDMTRAREDMKMMERHSRQRLGGFLLRHGKVYPGRSKWTQGHFRWLEGIRFETASQQIVFQEYVDMVKHTQGRVTAMQEEMRKALDGYTLKEVVEGLMALRGIDLISAMTIVGELGDISRFTSPRQLMAHLGLVPSEHSSGGKRRQGGITKTGNSHVRRVLVEGSWSYRLPARKTAHLQRKAAKASKAVQEIAWKAQKRLCSRYWYLVYKGKLPVESCTAVARELVGFIWAIACEVMGNKRSLPVGKG

SEQ ID NO: 156917 - protein, 419 aa, unidentified
MTGISAMKKHIYRTKKINAIDWIQMKEQLQGTPVVFAIDVAKEKQYALLANADSSVSELLSWNHPEQTREVLTHLENLACPLTAVMESTGTYGDALRYQFRCSGFEVNQISAKRVSDARELYDGVPSLHDAKSATVIMRLHRDGLSIPWRESDDAERELDALRREYDLHQSQYQRNKNRLEAYLSRHWPEVLPLLPLDSVTLESLLIEYGSPEQIAKNTEEAAKNMHLWSKNQLKNEKIAVVIQSAVNTLGQPCIDAERRYLQALTAEMRHSRQQQKEVKDILEATVKADTGLSKLASVIGLITTAVLLSCRLDPRNFRNARSFQKALGLNLKEKSSGRDVGRLKITKRGCSLVRRYLYFAALRLINNDPVVKAWYQKKVDALAKNKTVIALMRKLAKALWHVARGERFDATKLLSVTA

SEQ ID NO: 156918 - protein, 422 aa, unidentified
MPFIFSRGLLRLDGAEPHERPGHECSGAFLFVTTRTSKHTQMKKELDLGLDVHKDCIITAVAEEGRKGEVRESGAISNDLHAVEKWIGRLRKAHGKETLLRACYEAGPCGFGLARRLRQLGVECQVVAPSLTPTRSGERVKTDKRDARKLARLLRAGELIPVYIPEPTDEAIRDLCRARSDAVDDRRRSRHRLKGFLLRQGYRYQGKSSWSAAHERYLRELALPHPAMKVILEEYLQAIAAAGERIERSEEAMSALLEKWRLVPAVRALMAMKGFQTVAAMILVSELGEVHRFAHPRQVMAYLGLVPTENSSSDRRRQGHITKCGNAHARWLLVECAQHYVAPPKVSKELSRRQHDQSAEVRAISWRAQNRLHNRYRRLLGRRLQRNKAIVAIARELCGFIWELLRTQPCYQAQTTSVSTKG

SEQ ID NO: 156919 - protein, 392 aa, unidentified
MVVSVGVDDSKDKHDCFILSSEGEVLADVFTIPNNLDGFRFLLQRIRDCTHAQDKIKVGLEATGHYSYNLLGFLLDNGLPTYVLNPLRTNIYRKSLSLRKTKTDRVDARTIASMLLSDVGLKPYTDTAYHNEELKSLTRYRFDKVKERAKLKSSVSRLVCILFPELEKLVPTLHMVSVYALLEEFPSARKVAAAHLTRLKALLETASKGRCKRDMALEIRDAARNSIGSRMPAKSLELQHTIRLIRELDNEIAEIEGQIQAIMDELHSPITTIPGLGFRMAAMILAEVGDFTRFDSPDKLLAYAGMSPSTYQSGQLKNCYPHMEKRGSRYLRYALYNATKYVCHWDPTFADYLAKKRAEGKHYNVAISHAAKKLVRLIFAMERSQKPYLPTS

SEQ ID NO: 156920 - protein, 404 aa, unidentified
MAVMIGIDPHKGSHTAVALDSHEAPLGEFRVRSAANQVDRLLGWAAPFAARTWAVEGAGGLGYLLAQQLVAAGECVVDVQPKLAARVRLLATGASNKNDPNDARSVAVAALRSTVAEVRAEDHAAVMKVWAKRHRDLSRQHNRVACRLHSVLCELVPGGIAGEISPAQATRLLEELEPVGAVAAARHELAMELVADLIRLDTQRRDARRRIAAAVTASQTTLTELFGVGPIIAATVIGDVGDIARFPSRDHFAAYNGTAPIEVSSGGRRKVFRLSRRGNRRLNHVIHMAAVTQIRFRHTAGRAYYDRKIAEGHSGKEAIRALKRRISDAIYARLRHDAEQAAKRPRGPGGQSGNVSVACAAGSRPEHRLFGQATPGPDSTLRPRQPRRRPGTTTTTPQPTQRST

SEQ ID NO: 156921 - protein, 343 aa, unidentified
MQTITTIGLDIAKSVFQVHGIDAAGEVVIRRQLKRRSVLAFFQKLPPCLVGIEACASSHHWSRELQALGHTVRLMPPAYVKPYVKRQKNDMADAEAICEAVTRANMRFVPTKTPEQQSCLMLHRTRHLFIRQQTAVINSIRAHLAELGIVAPVGRKGVTELLHVVADPSDKRVPEVARACLAALGTQLLSLKKQIVEFDRMILAWHRSNQMSKRLHYIPGVGPMLATSLVASVADPRTFRSGRNFSAWIGLVPRQHSSGGKDRLGSISKQGDRYLRSLFVAGALAVIRYAKIHGTGHRPWLTALLGRRPTKVAAIALANKIARMAWAMMAKGERYKQPVALAA

SEQ ID NO: 156922 - protein, 315 aa, unidentified
MTTKSETYVGIDVSKDRLDLAVLEEKRIEQYTNTERGIKELVDEMKALKPALIVVEVTGGYERAVVKALFEAGLRVARVSGYRARQYARAKGLLAKTDPLDAMNLADYGKHVQPRVYEAKSEEGQYLAGKLARRRQLGEMVQAEKNRLRLAYGDIGPSIERVIKFLQGELKQLEEEIRAYLDANPVWLEQEQLLRSMKAVGPVTAATLLAELPELGKLDGKQIASLVGLAPINQDSGKRSRYRKTGKGRPSVRNVLYMAALTGLRYNPVIKKQYDGLVLRGKVKKVALTACMRKLLTILNAMVRDQKPFGYAAMS

SEQ ID NO: 156923 - protein, 346 aa, unidentified
MSIIKVLGIDLGKSSFHVIGRDTSGQSILRKKYTRPKLIQFIANLPPCLIAFEACGGAHWLARRCQFFGHDVRLIPPQYVKPYVKGNKNDFIDAAAIAEACGRPEMRFVPPKSEAAQVQAVCHRLRESFITERTASMSRIGAILLEFGLALPTGHSAMKKLFQWLASQSSVELPKMLLLELQVAHDHYLLLNEKITVQDQKIKQAVKQDERCQLLKTIPGIGDITASQLVMEVGTGQQFKHGRNMAAWLGLVPRQYSTGGKTKLLGISKRGNKKLRCLLVHGARSVLSRLDRGEGPFHEWLKKLRASKPFNVALIALANKLARIAWAVLTSMQPFNAVKLHPSLQG

SEQ ID NO: 156924 - protein, 321 aa, unidentified
MQVIGNDMAKATFDAALPLSDGKYRTKAKFPNTTKGHTEFLAWRAKHAPDAAVGMEATGIYHEALARALVEAGVTVYVANPARVKAFGQAEGVRTKTDRSDAKLIARFFEAQRPEKLHPYVPPTPSEVKLRALVRRRDDLQEMLQMEHNRLEVADISVQQGINDVIRMLVEQVKQVEKAIQDHIDNDPDLRGRHQLLTSIPGVGDTSGAQLLAFLGDLNKYSDVRQVVAHAGLNPAQRQSGNYEGKARISRVGDGNFRKKLYMPALTGKTHNPVLKAFAERLREKGKSFKVVMCALMRKLIHLVWGVLKSGRPFDPEIVLA

SEQ ID NO: 156925 - protein, 345 aa, unidentified
MKTVYTGLDAGSSSCKVVTLNEEGKPVHSSEFPTTEANLIKAAKEIPGRAIVHLEASELAGWIRGILRREKRTVQRVIVSDPKLNAWIGKDPHKNDQVDAFKLAELARMGRFNEVYYPDDEGRAEFKMLVQHHERLTKQAVRVKHQIKSCLRLQGVIIKNMKLFSHEGRVPVLNQVSSEVPHKMLRQHYAVLDSIVKQRKDTLRLIRRESRKYPEIALLCEIPGVKGILAARFSAYVQTPQRFSNRRKLWRYSRLGIVDRTSDGKPLGYQRLDRQGSGTLKDLSRKAFLVSCKRCRKDNAFRRFYTMSLDTTHDEKHARLSTQRKILAVMMAMWRNQQHYDDNRG

SEQ ID NO: 156926 - protein, 342 aa, unidentified
MGEVTTIGLDIAKSVFQVHGVDAAGGTVLKRQLTRARVVPFFEKLGRCLIGIEACATSHYWARELRKLGHAVRLMPPSYVKPYVKRQKNDSADAEAICEAVTRPTMRYVEVKTPEQQSTMVLHRTRVMLMRQRIQLSNAIRAHMAEFGLVAAVGRDGLQRLISIVEDEYDSRVPAEARICLQMMAVQLRLVNEQVLENDRRIRTSARATDTGRRLMAIPGVGPLLASAFVATIPDPTMFKSGRNLAAWIGLVPRQNSSGGKERLGGITKQGNRYLRQLLVVGAMAVIRYAERHGTRRPWLVQLMARRTTKIAAVALANKTARMVWAIMTSGEPYREPELRVA

SEQ ID NO: 156927 - protein, 406 aa, unidentified
MQYLGIDLHRKQMTVSLRNHNGDVLLRRQVSTRWPKLEEFRNQLHQTLADGEKYVAVVEVCGFHDWLVQWLNRDERCLQVLVVQPLGRSASKTDRRDAHGLSELLWVNRERLLRGERVHGVRTVQVPTESEQADRCLTQTRERLVRRRTQTLNQIHKILRRRNLEWERPTKTFQTVKVRRWLKTLPLDPIDRLAMDHLLVQWSLWDEQLVAADGWIGERFLANRNAQLLATMPGVSRFIGLAIACRIAPMERFPQGRSLANFLGLTPGCRSSGDTERVGSITKIGSRMVRYLLAQAIQHVLRRDGSIRAWYQRLKRRRGSKVARVAVMRRTATIMWRMLSTGEPWRCGRARSEMPEADEPRQTRVPQDGPAEQLAPSADPELAGFNTGSSSCMFKSSCIPMDLGAS

SEQ ID NO: 156928 - protein, 367 aa, unidentified
MNNSSTVVGLDVHKDSIVAAVLPARAVKVSETINIGNSSLEIKRLVERITRRGTAEFVYEAGPCGYEIWRQITGMGVECSVIAPGLMPIKPGDRVKTDRRDAENLARYHRAGELTEVNVPTRLEESVRDLLRAREDLLQDRLRARHRTRNFLQRQARQYGKKLWGVNHEIWLKAQKFEYSALTQTFETYLRKLDEANAGLEEIDRLILGWAESEGYKDAVKCLRCFKGIDTLGAITILAEAQDLTRFGNAREFMSYTGLVGSEYSSGKRVIRGSITKAGNAHLRRVLVESAWAYRHRNVSGPALLDRRKGCPAEVVKIAKKAQDRLTGKFWRMLSKGKKQPVIVVAIARELAGFIWSMSRHFPAKAA

SEQ ID NO: 156929 - protein, 354 aa, unidentified
MKHFIGLDASVKETSVCIVDETGKICREVKVVSHSDDLLAVLKDPTLNIERVGLEAGPLSQWLFEGLACTGLPVICIETRHVKAFLKAQPNKTDRNDARGIAQMMRVNLYRPVHVKTLTSQKQRALLTARKLLQGKAIAIENDIRGLLRNFGLKVGVVGTVKFEERICELVEGMPDLEEIMEPLLAARRKLRAEFARLHQKVLAIARNDATCRRLMTVPGVGPVVALTYTATIDIPQRFRNSKAVGPILGPTPKLDESGESKRVGGISLCGDSMMRTLLYEAAQTLMTRVTKWSWLKAWAMNVAKRRGMRKAIVALARRLASSCCLIWNRRRSSAIAVSGDRPRNVARRPMSRR

SEQ ID NO: 156930 - protein, 342 aa, unidentified
MDHFAGLDVSVKETSVCIVDDTGKIVREVKVVSEPEALLGVLKNPGYHFKRIGLEAGPLSQWLFSALAEAGLPVICVETRHMRAVLKAQINKTDRNDARGMAQMMRAGLYRPVHVKTLRSQKLRMLLTHRKLLQSKAIAIDNDLRGTLRNFGLKVGVVRTVKFETRIRELVENLPDLAAMVEPLLIVRRTLREQFCVLHRRLLAIVRDDEVCRRLMTTPGVGPVVSLTYRATVDVPARFHKSKSVGAVFGLTCAKYQSGEVEWSGRISRCGDEMMRVMLYEAAQAMMRSNKWSWLKAWAMQIARRRGKKKAIVALARRLAVIMHRIWVDGTEFRWTRDVAAA

SEQ ID NO: 156931 - protein, 321 aa, unidentified
MANVNKIIGIDISKEKFDVCFSFQYCSYSSRSYSYNAVGIKLFLKDVPSDSICIMEATGVYHLRLAYALNKIGVFVSVVNPLSVKNFSRAIMCRTKTDKADARQLVDYARRMELTEWRPTPDGYIRIQQIYRSIELFLSNITQCENQLEAIDNSPVCDSKLCRMLRKHIKTLYKQITQLEKQIEDLIAEDDETVIEHIRSVPGVGKKTAIALLTATKGMHGFSNYRQLSSYLGLCPRIYDSGKSVHGKAHICKMGMGWIRKLLYMCAISAARHNRACASLYERLRQKGKAVKVALIAVVNKLLKQIFAIVKNNCAYCEFYA

SEQ ID NO: 156932 - protein, 315 aa, unidentified
MQTPLDIGADISKDHVMLACAAHSFPVQKLTNTRAALVAWLKGLPAGSRIGMEATGTYHELLASVARRVGCVVYVLNAKDVHHYAKGIGRRAKTDRVDAQLIARYVAKEHRELHPWHPPSPTQRQLQRLMRRRGKLTAARASLRSTLHSVPSLRSGLRTLLKDFDALIAKLDAQALKLIDVSHECRQAFERLDAIPCVGPTVGIALLAALQRWPLPRADAFVAFTGLDPRPDDSGHKSGRRRLSKRGNPELRRLLYTAAMSASRTRVWKPLYQRTLARGLSRIEALVILARRIARTAWSIYAHKTAFDPARLQTT

SEQ ID NO: 156933 - protein, 445 aa, unidentified
MHYKRLLTLIDSVSSYLSVGLDVGADFTWMSIALPNGSFIGKPFKIVHSDPRSRDLAVAKIKEAQETYSLKSRCFLESTGIYHIPLLCFLRDKGFDCSVINPIITKNSTNINIRKLHNDKFDSKKAALVGLNVSLKTSIIPDDSVVDLRNLVRDYYYFKDLQSAVALKLTAELKVSFPAYAKVFSKVTTQSSLKLLSSYPLAEDMLAASKDDIVKIIRSTARFGEAYALRKYDTIIAAAQDAAVFGRALPSNAVRIRLYIDTYQEYQKHLDALLKALHETVDRLQDTLIYDQICLLQSLRGIGFLSAIVLIAEMGDFKLFSSPKKLYAYFGLDPAVKQSGKLNGDKVHMSKRGSSLARRVLHMVALNNVKVDKGSGTPVNPVVYDYYTRKCSGKKKTVAMGAVMHKICNIIFAMLRDNKPFEVITPEEHCRRFAAEHPDKIRKAA

SEQ ID NO: 156934 - protein, 316 aa, unidentified
MDVASKSLEVRIGQQGAAGSFANNPEGIAALGAFCQVHQVDLVAMEATGGYEQQAFAQLSEQGLPVAILNPRAVRQFAQSMGSLEKTDAIDAGMIAWYAEVKKSQPACLAPENQQHLRALVTRLRQLTEMRVVQLNQQRLVTDRAVQASFKKLLGMLARQIRELEQRIAGLLEKDPLWRQLNASFRTIKGVADRTVARLMAEMPEIGTLSNKTISKLAGVAPLANDSGKHQGKRVVRGGRATVREILFIVASVVGRYEPDFIVFQQRLRAAGKAPKVVRIALAHKLLVRLNAKAREVRQQLATLQPDGTALIAESR

SEQ ID NO: 156935 - protein, 350 aa, unidentified
MNHVIIGVDTHKANHIAVAIDAQGARLGCTTISTTLKGYRDLETWASRFGQIKAFGIEGTGSFGAGLSRELLAKGHEVLDVMRPNRQLRYLHGKSDSLDAESAARSVLNGQATAPAKAQTGSSEMIRHLKVARDSAVKAKSQAMITLKTLIVNAPADLRDTLDRVRGRITLVRHVAAMRPGEITSPTASAKTAMRAIARRWLALHEEIEAHDRELDRLVRERAPELMQAHGISTMTVAEMLILVGDNPERIQSEAALAKLCGVCPIPASSGKTNRMRLNRGGNRQANAAIYRVAIVRMRDDEQTKTYAARRTAEGKTRREIVRCIKRYIVREIYQALCAPPDQTPATLQT

SEQ ID NO: 156936 - protein, 373 aa, unidentified
METTITKVALDTHKKQHTVAWVSCETGETEVFTVKNNAKELKKMVRKLKKASSSELHFCYEAGVCGFTLQRRLEALGCQCDVIAPSLIPTKPGERIKTDRRDAKRLLGLFAASELTAVHPPNIQQEAAREVTRCRHAAQENLKRARHQLVKLLTRHGYVYKDGNHWTQKHTKWLCSLQFDENDLQQVFAMIYTEVEHCVQRLASLDKEIQALAERPEYREIVGLLRCFRGIDTLTAMVLITEIFDFGRFRSADALMCYLGLVPSEYSSGDKRCRGGITKAGNSRVRRALVESAWHYRHLPNVGRTLRHRRKDQPLWAVDIADRAMLRLFKRYHHLANRGKIPQKITVAIARELAGFIWAIMREHQVREASDAA

SEQ ID NO: 156937 - protein, 384 aa, unidentified
MIYIGIDVAKEKHDCCIIDSDGVILNDSLRISNTLKGFELLYNSILSVLPDKDISNVKIGLESTGHYSTNIQSFLYNKGFKLSILNPLATNLFRKAQTLRKTKTDKTDALVIAKMLFSDDTKSYIPVSYQIQELKSLTRHRYRLIGYRSKLKISINRLIDIIFPELPKLLWSIHQSSSYALLKELPSPKDIESCHLTKLTNLLNKASKGKYTKDKAIELKTYAKDSIGTSNRSLSFELQQTIRLIESVQDEIKILDNQIKEVVTELNSPIMTIPGISYTLAAIILSEIGEIERFTTPAKLLAFAGLDPSTYQSGKYSASHTPMVKRGSKYLRWAILMASRTVCMRDLTFSEYLSKKRSEGKHYYIAMSHVSKKTAKSYFLSFKN

SEQ ID NO: 156938 - protein, 351 aa, unidentified
MPKARMESKPSSMIVVGGVDTHADTHTVAALDQVGRRLGCAVFPAHRAGYRALADWLAGHGEISAVGVEGTGSYGAGLTRWLSAHQITVVEVNRPNRAERRRRGKSDPVDAEHAAAAVLANTATAVPKARTGLVESIRLIHATRAGAVKARTAARNTFTNTLRTSPDAVREQLQPLTRARQLTVATGYRATGDDPDSTVKRCLRRLAVRISQLSEEINAADHELDRLTRELAPTMRSRPGFGPETTAQLLITAGDNPDRIGSEAALAGLCGVSPVSASSGRTRYHRLNRGGDRQANRALHMIILNRLRHHPPTRAYLASHSLQGQATPHLRRVLKRYLVREVYQLLSQLQR

SEQ ID NO: 156939 - protein, 351 aa, unidentified
MSRQSTPSPIATIGIDIGKNTFHLVGFDQRGAIVLQLKTSRQQLEQKLANLPRCLIGMEACSGAHHIGRQLTALGHDVRLIPAQYVKPFLKGHKNDYRDAEAIAEAVQRPTMNFVTIKTPAQMDLLALHRVRSRLVSLRTGVINQIRGFLIERGITVRQGPAPLRKALSDILSSSASALSPRIVRLIADLSEDWRRLDERIATVSTEIEALVDEDGDCQRLMTVPGIGPIISSAVVAAIGDGAGFKQGRDFGAWLGLVPKQESTGDRTILGKISKPGNKYLRTLFVQAAHVILARRPSAAMRGLWPWIAQASKRLHRNMLAIALANKLARIAWAVLARGSEYQPRIMLHAA

SEQ ID NO: 156940 - protein, 423 aa, unidentified
MLEETQDEQEIIERVAALDIGKAELVCCVRVPDPAGGSRRVQEVKTYSTMTRSLQVMADRLMDLGVTRVVMEATSDYWKPAFYLLEAHGFQTWLVNARDVKHLPGRPKTDRLDAVWLCKVAERQMMRSSFVPPIPIRRLRDLTRYRVALVSDRTGEKNRVEKLLEDAQIKLSVVASDIFGVSGRDMMAALIAGERDPRVLAQMARSRMRTKIPQLQEAFVGYFTDHHGFLLTKMLARIDALSSDIADLDVQIEAQIAPFADAVARLDEIPGIGPTAAAVIIAEVGTDMTRFPTPAHLASWAKFAPGVKESAGRKKGNGATGHGNRYLARVLGEAAVSVGRTDTFLGERHRRIARRRGKKKAIVAVGRSILVIVWHLLGDDNAHFHDLGSDYYDSRINPERKKRNHIRELQALGFKVTLEPAAA

SEQ ID NO: 156941 - protein, 371 aa, unidentified
MNTYILEAAPTACAIELKTDKRPKAKRILLGVDVHLRGYQAARKVDDGVIGVVDTFRSEVELLLHVEKQRQRAEEVVVVYEAGPLGYTLYRKLKAAGVLCYVCSPDGAQQRKKRRKNNKIDARNLASKLFNYLNGDKEALQLARVPTEAQEQLRLASRQHDQLVEERKRLGAKGNAMLLSQGFGSWSNWWRPKVWAQLSVLVPAWLLERLQIWVDVLRMLDEKLSQAKAALAGACSGPRPKGVGALSQMQLQSEVLDWHSYTNRRKIACLAGMVPSEWSTGEKERRGSITKVGVPAIRRIMVEMVWRIIFFQPQYKPVQKWQEVLRGSNPALKKKAVVAIGRQLIVDLWRMETGRVTAQELNLVMIEAEGV

SEQ ID NO: 156942 - protein, 359 aa, unidentified
MLGVLTSNATKEAPVSEQYAGKQIVGMDLHRRRSVLVRMTETGEHLETVRISNDPEYLRQVMERAGEAPEVVLEATYGWYWAADTLAELGAHVHLAHPLGVKMFAYRRVKNDQRDAADLADLLRMGRLPEAWIAPPATRELRGWVRHRAKLVGLRSSLKCQIHAVLAAAGVPVPMSDLFGAGGRQLLTNARLAPESRARVDSLLRLIEALDFEIELFATLVARRLREHPGYRALLQIPGVGPVLAAIFVAEIGDVGRFARPQQLASWAGLTPKHHESDTTVHRGRITKQGSRLVRWAAVEAVQRMPAHTRLGQIRDQVGERRGRNIGVVAAARELTELVFFGLRDGDVRRLSTPPQPAA

SEQ ID NO: 156943 - protein, 441 aa, unidentified
MAVINPNACGIDVGSKMHYVATGQGSEEVKSFGVYTKDHQAMVAYLQNKGVTTIAMESTGNYWQTLFAALEKAGFEVFLVCGNQTKNVKGRKTDVQDCQWIQWLHSVGMLSNSFIPNEFVSHLRIYSRQRLKYIQVQNRLINQIQRDLRAMNLRLEVALNDITGKSGRAIIEAILSGERNPKSLAGLADYRVKKSKEEIALSLEGNWHEGYLFVLRQHYSEYVQNLGRIQACENEIEKILKKSLECSEIDSQDAPNHKKALKKNKNTPVIDFQRYSFQYFGGVDLFAIEGINQNTVLSLMAEVGTDITKFHSAKAFSNWLHVCPNQKITGGKVISNHTKGGNNPLSQAIKSAANSIGNLKTVTHLTRFFKKIAYKKGRKEAITATAHKLAVIIYNMLTKYEPYKPFVREVNEQDERIKKLKEVERIVKSHNFKIEDINFGY

SEQ ID NO: 156944 - protein, 339 aa, unidentified
MRTYAGIDLHSTNNYIGIINDKDQRLFKKRLPNDLDVILSALEPFQQDLHGIVVESTYNWYWLVDGLQEHGYTLHLANPSAIKQYEGLKHTDDKWDSFWLAHLLRLNILPEGYVYPKEERPVRDLLRRRMMLVRQRTTHILSLQSMITRNLGINMPGRTIKSLTGDDIKHLFKDPCLVLAATNSISIMKFLKEKIRLIEQSVLSRVKLRKEFAPLLTLPGVGKILGLTIMLEVDNINRFPKVGNYSSYSRCVKSERISNGKKKGTGNTKNGNKYLSWAYVEAVHHAIRSYPYAKSFYQRKKAQTNGIVAVKALSNKLCRASYYVMRDQVPFDKEKLFRS

SEQ ID NO: 156945 - protein, 321 aa, unidentified
MEPAILGIDIAKRKFDVALLIADKMTVGKFDNTPKGFANLEEWLVKYGVERVHACLEATGTYGDALAEHLYHAGHVVSLVNPARIKGFGQSELSRTKTDRTDAQLIARFCSAMKPEPWQPLTPEVKELRALVRRLDELKSMHTQETNRLESADAVVRPSIQDMIDHIDVRILQVTRQIRDHIDRHPDLRGKRDLLETIPGIGPGTSAMILAEFGDVSRFQDAGQMASFCGLTPRQRQSGTSVRGRSMLSKTGSSRIRHALYMPALSAIRYNPVIRAFRARLLANGKHKMVIVGAVMRKLVYLAYGVLKSGRPFDPSIATAA

SEQ ID NO: 156946 - protein, 349 aa, unidentified
MAMVCGLDLHRRQITFDALEVDSGEEWRGRVWQPDRDRFRRWLREDMTRRANGEPVALAVEGCTGWRYVVEEIEAAGFEAHLAEPADTQAARGRKHRAKTDRTDARLLRELLLAGELPASWIPPAGVLEWRERVRLYVSLVNQRTVWCQRVHAELYQHGVAVPEGAIRTSKTRAMLADPSLELSPAGRQRIAVGYRMIDATDAEALPLKRDLQRFGARQPACRALVDAQYGIGGLIAVAVWSELGDCRRFSRSEQAVRHTGLDVTVDASDRRRAGGYLSRQGPQTLRWALYEAAKNSSHLRSPDHDYYAALKARHDGKIAAISVARKLARRCYHVLRNVDPELVYATPS

SEQ ID NO: 156947 - protein, 419 aa, unidentified
MKDIQAKKVKVINKETLIVTVDISKVTNVGYCRCPNGIDLKPFGFHNNGQGFKSFWDRIAHMKKAHNLKEIVIGFESTGSYGEPLIHYLKKKKVNLVQVNPMHTKRVKELTGNSPNKTDQKDPKVIADIIELGHALTVVLPEGSAAELRRLAHARERAIQRQVSLYNQLQDLVFIIFPEFLQVMKDVKTKSARFLLEHSPTAQDIVKFKLESLTVTLRKISRGQLGEERAKELYEVAKRSIGIKEGRRSILFEIKEILSTIETTERFIAEIEKEMSHHLKDISYSRCILSMKGIGEITVAGLIGEVGDFRKYKTISEVLKLAGLDLFEISSGIHKGQRRISKRGRHLMRKLLFFAALNVVRKGGIMHKQYHRYLERGMLKMKALIAVSRKLLGLIFVLARDHSEYIEDYVEKQKLKIAA

SEQ ID NO: 156948 - protein, 342 aa, unidentified
MDITTIGIDLAKNSFALVGMNKHGKIVFRKTLTRNKLLAFIAQCPPCLIGMEACSGAHYWGREFTKLGHRIGIIAAKFVEPFRKGAKNDNNDAEAICEAVLRPNIWFVPIKSPDQQAVLCIHRVRQGLVRDRTSMMNQLRGLLSEFGIIMPKGRYPAQAAIAGILEEAENSLPMIARRVIDNLWQRIKQANEQIEGYNRELAQLVKESTVARQIMTIPGVGAQTASGVVASVADPRMFKNSRQFSAWLGLVPRQYTTGGKIKLGRITKRGDQYLRTCLVHGARAVVAKLGDKQDWVSCWIRALIERRGYLRAVVALAARNARLIWTLMMKQEDYRAMPMAVS

SEQ ID NO: 156949 - protein, 347 aa, unidentified
MRFYTESHQHYCGIDLHARTMYVCILDAEGQVLLHRNLPCDPERFLRAIAPYRDDLVVAVECIFTWYWLADLCAREGIAFVLGHALYMRAIHGAKAKNDRIDAHKTAALLRGGLLPQAYVYPAEMRATRDLLRRRLHFVRHRGQLLAHIQNTHHQYNRPSPGKRIAYRSNRDGVAEGFEDSSVTQSVEADVALIDHYDAVIRELELAVLRRARGHDRDSYERLKTVPGIGKVLALTILCEIGDIDRFSKVQEFASYSRLVKCQASSAGKVKGTSGAKIGNAHLKWAFSEAAVLFLAKCPEGKKLLARLEKRHGKGKALSILAHRIGRAVYFMLKNKRAFDQARFLKM

SEQ ID NO: 156950 - protein, 318 aa, unidentified
MTYIGIDVSKDTFVVAYSPEKNSKTKTFKNTTRGIHEFIRTISKDEHHCVMEATGNYSALLVYLLSEAGITTSLENPLKVKNFARAMLSTVKTDEIDARLIALYGEKMQPAPYKLRSDAILTLKQKRTVIRQLKKQLIATRNLKGSMEVLPFFDAKCKKSIERTIAFLEKQVKDLEEDLSSLARSEYKKQMDLLTSVKGIGVTLAAALIMATGGFTYFDNAKQLTRHLGLSPTYQQSGTSVNFKGHINRNGDSSLRSQLYVAAFASLRCNTECRACYDRLRSNGKPGKVAVIAVANKLIRQAFAVVTQEKPYVDGYIS

SEQ ID NO: 156951 - protein, 355 aa, unidentified
MNSEKYIGMDVHQATISVAVRDSSGKLIMECILETKAATILEFIQGLCGNLSVTFEEGTSAAWLHDLLKPHVSHLVVCDPRRNALLKDGSKSDRIDARKLAELLHGNQLHAVYHGEHGVRTLKELGRSYLTITKDLTRVMSRIKALYRSWAIPCNGATVYAPRHRAEWLAKILEPGVHLRAERLYQQLDLLQPVRQEARRDLLVESHQHHAVKLLRQIPSIGPIRAALLVALLQTPYRFRTKRQLWAYSGFAVETHDSGEYRFVRGKLVRNRERITVRGLNHNHNHDLKNLFKGAAISASTRPGPLCDFYVALLEKGMRPTMARLTLARKMAAITLTIWKKGVEFDAKQLNRQAA

SEQ ID NO: 156952 - protein, 343 aa, unidentified
MQMVTTVGLDIAKSVFQVHGIDAAGQVVIRRQLTRRYVLSFFQKLPPCLVGIEACASSHHWSRELKVLGHTVRLMPPAYVKPYVKRQKNDAADAEAICEAVTRANMRFVVTKTAEQQSGLVLHRTRHLFIRQQTAVINVIRAHLAEFGIVAPVGRKGVEELLNVVTNASDKRLPVVARMCLASLGAQLRRLKQQILEFDRMIMAWHRLHEASRRLEAIPGIGPVLATALIVSIPDPNAFRSGRNFSAWIGLVPKQHSSGGKDRLGSISKQGDRYLRSLFVAGALAVIRYAKIHGSKHRPWLTALLARRPTKIAAIALANKIARMVWVLMARGERYKEPIALAA

SEQ ID NO: 156953 - protein, 348 aa, unidentified
MLADELDYVIGVDTHRDSHSLALVSSPAGARLGETQLQAGEEGYVAALSFACEHAPGRRAWAIEGTGSYGKGLTRYLQRSGELVIEVERPRRRSTRDQSKSDSIDALRAARFLLTKERPVVPRSAGPREALRVLLQVRASALAARKVALAQLRALLVTCPEPLRGELRSLTRARLLSRLRSLRMKPGREHELASCLLALKVLAKRVDALSLEIELFDREILPLARELAPRLLAERGVGPICAAQALVSWSHPGRFRNEAAFARLAGVPPIPASSGQTVRWRLDRGGDRRLNCALHMIVLSRRQHDPETVSYIERRVSEGKSEREAVHCLKRYLARHIFRLLEEGARAA

SEQ ID NO: 156954 - protein, 352 aa, unidentified
MTAKKRPVTGGVDTHSKTHHAAAVDQTGRVLGDQQFPATTAGYRALLVWLRSFGRLVKVGVEGTGAYGAGLARYLVGERVELVEVDRPDRKTRRAKGKSDPIDAIAAARAALSGQACGTPKTRIGPVEAIRALRVARSGAVKARTAALNQLHGLIISAPQTLREELTALPASTLVAHCAALTVDEARMSDPLDATKAALQTIAARVETLTAEIATANKRLRPTVTKTAPVLSAMFGIGPDVAGQLLATAGDNPDRLRSEAALAHLCGAAPIPASSGRTDRHRLNRGGDRAANKALYTIALCRMQYEPRTRAYIDRRTKQGLSKKEIIRCLKRYIIREVHTALLADFAALNSA

SEQ ID NO: 156955 - protein, 387 aa, unidentified
MPQLNDLSRSLVALDHDSTIIAVVELSQSSWLVAGMLPGIERQPQKKLEPSAERLLGLLHRWRDEAVRAGKKITRIALAFEAGRDGFWLARWLNARGVEAHVIHPSSVAVSREHRRAKTDRLDTEMLKRGFLGWLRGERGHCTMARVPTIAEEDAKRPNRERECLVGERTRIVNRIKSTLARLGIRNFKPTLRKAAERLATVHTPEGMPLPPNTLAELQRDMARLGFVVSQIREIEQARQKRLEQETETGPHAKVRQVARVIGIGIETADMLVHEVLSRPMRDRKAVARYAGLTGSPDESGARRREQGLARAGNARVRRGMIQLAWRFLRFQKQSALAQWYRARTADSRLGMRKTMIVALARKLLIALWRFVTTGEILEGVILRPAG

SEQ ID NO: 156956 - protein, 425 aa, unidentified
MTGNTQDTHHLRTDDMHVVCPRAAGVDVHKTRITAALRVCEAGGGPARVMTQEFSALPDGLQAMTDWLLDHSVTAAALESTGVYWKAPFEALEDAGIRADLHHAAHVRQIRGRKTDGSDSLWLARVCQFGLVAPSFVPPRRFRQMRQLTRYRRTLVAERSRARNRIHKILDHDGLRLGGVLSDIFGMNGRRILDGLAAGRPARRILADVTGHIRGKLELLSRTLAATLDPLALVTLQMQLEAMDRTEAALAALDRRIQAALADYRRPLVLLQTIPGIDLRSAAAILVEIGPDVAAFRSARHLAAWAGVAPGNHVSARKRRSGRVRPGNRMLRATLAECAHGAARSTSSQFHRYHQELAKRLGYKRAILATAHKLLRVIHAVLSNDRPYSDPRIDYEGLVIESGAPRWIRVLKQDDLIEEVRSMGT

SEQ ID NO: 156957 - protein, 402 aa, unidentified
MNAVGIDVSKGKSMVAIMRPFGEIVSTPFEIKHTSSDINSLVKLIKSIEGESRIVMEHTGRYYEVLAHQLSEANLFVSAINPKLIKDFDNDSLRKVKTDKADSVKIARYALDKWQNLKQYSVMDELRNQLKTMNRQFGFYMKHKTAMKNNLIGILDQTYPGVNTYFDSPARSDGSQKWVDFASTYWHVDCVRKMSINAFIDHYENWCKRKKYNFSKSKSEEIYGKAKELVPVLPKDDITKLIIKQAVDQLNSASITVESLRTLMNETASKLPEYPVVMAMKGVGTSLGPQLMAEIGDVSRFTHKGAITAFAGVDPGVNESGSYEQKSFPTSKRGSSDLRKTLFQVMDVLIKTHPQDDPVYQFLDKKRAQKKPYYVYMTAGANKFLRIYYGRVKEYLASLPES

SEQ ID NO: 156958 - protein, 321 aa, unidentified
MIAIGIDISKKKFDIAVCCNNGKVLHKVFDNTLVGHQALLPWLEKKDVCVDQIHACMEATSTYYEALAEYLHQSGCRVSVINPLQIKAFGQAQLDRQKTDRADALRIAQYCAQQQPPAWQPPAPEIRYLQRLLARLEAVNQMQVQEKNRQYEANGEIEASIERVLTKLNEEEKALEKQIDTHIDRHPDLRDKQTLLKTIDGVGPKLSAYFLAWVPMDRLTTVREAVAFIGLSPAQRESGSSVRGRPRTCKMGHGRLRKMLYMPALSAMRCNLAAEQVATRLRQSGKTGKVVVVAIMRKMVHWMFAVLKSSQPFNVQLALAK

SEQ ID NO: 156959 - protein, 312 aa, unidentified
MHSTEMSAIGIDTSKEWLDCFYWESRKAVRVRNKAKAIERFIVSLPSGSFLVLEATGKYHQALTKMATLHGIPYAVVNPKRVRDFAKSTGLLAKTDALDAEVIARFGATIALSPSVPVADNIESLRALVVRREQLVDTVTQEGNRLSCEENKVLKASLKKHLLWLRNEVATLTKAIQTLVKADSCLASKISLLTSFKGIATLSAAKLIAYAPELGTISKQSMAALIGVAPFNDESGQMRGKRRILGGRAAARNCLYMVALVATRWNVTIKSYYQRLVANGKPKKVALVAAMRKIVLIINAMIKYNQPFRATP

SEQ ID NO: 156960 - protein, 437 aa, unidentified
MQVVHTRCAGLDVHKKSVVAAARLLSADGTLTTHVRTFGTTTAALLELVAWLLSLEITHVAMESTGEFWKPIYNLVEGSFTVLVVNAAHIKYVPGRKTDVKDAEWIAELLAHGLLRPSFVPPPPQRALRDLTRQRTHLIRERASEVNRMQKVLEWANIKLSSVVTDITGVSARAMLEALVAGQSDVTALAQLAKGRLRTKLTELELRGTLEPHHAFMIGQHLALLDVFDEQIAAFDDRISAAIEATGAANPPDGDTTAAGSDADAPSAPTGAWTAQAILDAIPGIGLRVAEIILAELGTDMSRFVDAAHVSSWAGLAPGQHESAGKRKATHIRDGNKYLRATLVQAAWAAVKQRDTFLAAFFRRLAARRGKQKAIIAVAHKILVIVYSLLKTGQVYEERGAAAVDEQQKERIVHRLERRIAQLGYKVNLEPISAAAS

SEQ ID NO: 156961 - protein, 462 aa, unidentified
MPGREERATSEKSRRQLEGLPVIRRGVAGIDLGSEQHWVCAPTLDRSGREVARFGATTAELIRMAEWLKARQVESVALESTGVYWIAPQEVLEGQGLQVLLVDTRQLAQVPGRDKKSDPTDCEWIQRLHSCGLLRGSFRPEEAVCMLRTLVRDKANLVAESGDWLRRMQKSLDQMNVRVHRAVSDIDGVTGMAILRAIAQGERDAQKLARLRDRRCSKTQEEIAEQLSGHWREDHLFSLQQALKMYDAVQERIAAYEQEILGKLGEMEREEPHELTAPPLQNARKARTIKKRGQEAKRQALYRMSGVDMTQIDAIGVETVEVVVSEYGPDLSRFPTEKQFVSHVTLAPRVPKSGGKPVRKKKRNSASTRVAAALRMAALSLRHSQTALGAYYRRIAQRRGADIAVFAAARKLATLIYRLLRWGQPYVDEGAAAFENRYRQHRIGRLAATAKELGYQLTAVPA

SEQ ID NO: 156962 - protein, 356 aa, unidentified
MNYAGVDYHKRYSVVCIIDEVGGILHEERIEHSFPERFAALLGGYAPLEVAFEATMNWSWLHELLEETAGIQRIVMANPLHVRLIAAAQIKTDKVDARKLAQLLRAGLLPASHIPDRATRLRKEVLRQRTFWVRSRTQVRNRVHRLLGRQHGLAMPQVTDLFGRKGRTALEKAVLAPPDDLLLRQQLALLDALGEQIRGLETQIAGDGASDEAVTLLTTIPGLGSILSNVVATEIDGIDRFGDSASLCAYAGLIPTTSSSGDKTYHGRLVPGCNKWLRWALVEAAWVAVGCSAYFGGLYRHHRARGKKANTAILIVARRLCQVIFRMLKERRPYEARAWSIPVPGRSQQGRTTQVA

SEQ ID NO: 156963 - protein, 430 aa, unidentified
MTKPQLTPTQGILVAIDIGKTRNEVLIEIPGQARRRRLTVLNTRADYDRLIDLLSGLGQPVTCAFEATGNYHRPLAWRLLQAGFTVRLISSLALARTREALHNGWDKNDPKDAQVALHMLRIGASQHYHDPLAAGLNDIQEVSKTHEAISKAKTEVLHRILTHHLPLYFPEIGRFRHNSRSDWFFAFLDRFPTPGSITALSKEAFIAAAWGVVGRKVAKERLLGDIYETARASIGLPIPIDAPAVRLFRLVIAEARSLIEQRNALEAMAIELLHESPDYKLLCRIPGIGPITALTILAEAGDLRRFGHHRQFLKFCGLDLATHQSGAFRGQTKLSKYGNARLRRALWLAGQVAIRQKENSFRDKFERYIARDRHKADLRRKALTAITAKMARVVHAIIKSGADYRPFVEGPVPGGRTSLSMGREGATATL

SEQ ID NO: 156964 - protein, 324 aa, unidentified
MIDGVLGIDVSKNTLDASMSSCNRVRARSFANSPDGWRHLLDWLITQRVRRVHACLESTGRYSLGIAGALNEAGHVVSIVNPAQIRDFARTKLGRNKTDGVDASHIREYCELFKPKPWAPPSEAHRRLGELQTIRAGIIAGLTEWKNRKNSGMIDAVAQSLADVTISHFTSQLSAVDEAITQTINNDSVLRRKRDLLLSISGVGETLAGVVLAELPGPEVMHSSAEVVAYVGLNPRQHQSGTSIDRVTRISKIGNAVLRAALYMPAMSAMRYNPAIVALVARLKSQGRLKPKQIVVAAMRKLLVLCFGVLKTGKPFDPAIAMGC

SEQ ID NO: 156965 - protein, 420 aa, unidentified
MSPPSDGSFAAFIGIDCADAKHDICLQAVGSNKLEHAILVNRPQDIDAWACTLRKRFHGQPLAVCLEITHGPIVYALQKYDFFLLFPVNPETLARYRKAFAPSGAKDDPTDAQLQLELLVHHRDKLRVLKPQSPAMRKLLRLVEQRRRLVGDKCRTANRLIDALKQYFPQALECFETRDTGVFCEFLTRWPTLEQAQQARRTTLERFFREHRVPSADVIARRIRMLKDTVPLTQDPAVIEPNMSLVQALVNQLQVTLQAVKRFDAEIAAVADTLPDYALFRSLPGAGAILAPRLLAAFGEQRDRYANAAEFQKCTGIAPVTERSGQKSWVHWRWQCSTFPRQSLVEWAGETISRSFWAGTYYRQQRAKGCSHLAAVRALAFKCSRILYRCWQARTPYDESTYPNALKHHGSPLLQQMAKH

SEQ ID NO: 156966 - protein, 351 aa, unidentified
MENSITETIGCDLGDTTSEVCVLKADGTKQRATVRTTRAGMRLFFTRPAAHVVIEVGGHSRWASALLTELGHRVTVANARRIQLISQSNNKTDQNDAELLARLGRADIGLLSPVVHRKPETQADLAVAKARDVLVATRTRLVNHVRGTMKSFGDRIPTCRAETFVRHTRDLVPELLKPALDPIYEALEAIEKKIREYDKTIDRVAERYPDVAAVSQPAGIGTLTGLVYVLTLEDKQRFAKSRMVGAYLGLRPRKRTSGNDDPQLRITKAGDPFLRRLLVNGAHYVMGPFGPDTDLRRWGLELAKRGGKNAKKRAVVAVARKLAVLLHRLWVTGEVYEPTGYHARQLEARAA

SEQ ID NO: 156967 - protein, 339 aa, unidentified
MANVAVLGIDIAKNVFQLHGVDADGQVVLRRRVMRDQLLQVTEAMPPCLIGIEACTGAFHWQRHFEAQGHTVKMIAPQYVKPFLKGQKNDGNDAQAICIAVQQPHMRFVPKKSIIQQDIQGLHRARQRLVNQRVALISQMRGLLLERGVAIAKSASIAQRTIPEIINNPRIDITELTRDIIGTLHAFLLQINEKIRYFDKQIEAVFRESEVCQRIAKIRGVGPKTATAVVAAVGDGADFKNGPHLAAWMGLVPRQHSSGDRRVLLGISKRGSQHLRTLLVHGGRSVVRTAQRKSDPASEWVNELRERRGYNRAAVAVANKNARVIWALLHHGGEYRANS

SEQ ID NO: 156968 - protein, 390 aa, unidentified
MNGQTDFTATKVEPEDFKNTLFLAMELSRSTWLVATFAPRLGDKISVHAIPGGNTKRLLELIGRLQAKLRDKDVSRVRTVCCYEAGYDGFWLHRVLVNHGIENHVLDAASLPIDRRAKHIKTDNIDAKRLLRAIVGFVQGDPQSCRVVRAPTPEEEDARRLHRERQRLVRERTGHLNRIKALLITHGIRTLRITDAKWCERLDKMRTGDGRPIPARLKIEMEREWKRLKVVAEQVREIEAERDRPVKGSEPSGDVCTEKMRRLIKLHGIGAEFATVLTREVFYRPFQNRRQVASCVGLTPAPYDSGDTKHDQGINKAGNTRARVIAVQMAWLWLRYQSKSELSLWYYRRVGDLKGRVRRIMIIALARKLVIALWRYVETGRVPTGAIVTT

SEQ ID NO: 156969 - protein, 313 aa, unidentified
MSESVYVGIDVAKDTFCVAATPDLVCTTLPNTPQGHRQLCQRFHHQPVARIVVEATGGYERAVVAELLAAELPVVVVNPRQVREFARGMGQWAKTDPIDARLLATFAQIVNPTPKTHATPQTEALTELVRRRRQLSDLHTQETNRMEVIRHPKVKKSIQKLVRTMDDQIAQIDALIRGHIEVDDNFRNKDRILQSVPGVGPQTSAMLIAALPELGKLNRREIAALAGVAPWDRKSGKYDGRAHIFGGRKDVRCALYMAAFSACRCNPTLHAFAQRLKQQGKAYKVVQTACMRKLLTTLNVMMRNQTLWTPKLT

SEQ ID NO: 156970 - protein, 319 aa, unidentified
MARNDLVVVGIDVAKDKVDACIRSLSQRQTFPNTAQGHRKLVAWLRKHKVSKAVMEASGGYERAWAKVLRESGIEVRIVDPKRVRSFALSAGRLAKNDVIDAEMIAWFAETFSDAPSQTHDAAREELQTLVKARLGLIDLRMRLVSQSEHAAPGLVQKAHAQILKSLASEIAKLEEAICAKVKSTPDFAERAEIIESVPGLAETSAANLVAGMPELGQVSDEIAAALIGVAPYDDDSGKRRGERHIKGGRRWVRNAIYMPCVGAATQNNPVLKAYYQRLRAKGKEPKVALIACMRKLIIILNTMIARRQKWDPSRYALN

SEQ ID NO: 156971 - protein, 364 aa, unidentified
MTAVQAERQADSSAVEVVGGVDTHKDTHTAAAVDTAGRVLGSAQFPTDAAGYRALLRWLRGFGTLLLVGVEGTGVYGAGLARLLAAQGVAMVEVDRPDRKARRWQGKSDPVDAEAAARAALARVRTGLPKQRDGRVEALRALRVARRSAVGQRADVQRQIKALIVTAPESLRAQLRALPDRELIKVCADQRPDRAGAGDPGTATKIALRSLARRHRALSVEIADLDELLGPLVAQINPGLLALKGIGPDVAGQMLVTAGENADRLTNEAAFAMLCGVAPLPASSGRTTRHRLNRGGDRAANSALWRIVITRMGTDDRTKNYIARRTAQGLTKPEIIRCLKRYVAREVFLALTSASAEKRPAKAA

SEQ ID NO: 156972 - protein, 397 aa, unidentified
MSTLFVGVDVSKDDASAQGLDREGKKLFYLEFSMDGEGFSRFLDRVKAHCGNLSEVTVAMESTGCYHINLFSFLSSEGIPCVVINPLLISNFARLSLRKTKTDKKDALSIAQFLLAHKDSLSRVAFSQNSQDLKDLARERESMTVMISGLKNDIRRLLKMSFPELEHRSKIFTETMLHVLIKFPSARALTAAKPKEIAKSLIHVEGKRKRVLIRAEEIIQMAKASVATDSAAKELILSEKISTLFYLEEKRKKITGVLVKTCQSMRVEDLEIITSIDGIKQINGSTFLAEVGEMNHFKSHKHVIAFAGLDPSIHQSGQYEGISRISKRGNRHLRRVIFLMTTCVVRSNNIFRQYFLKRKAEGLPPKKAILATAHKLLRVLFAMLTSKSYFRKEVVEV

SEQ ID NO: 156973 - protein, 426 aa, unidentified
MRVIGLDVCRTFAEVAYLDDGVLRAGGRVELSHAALNKYAQGLRPTDDVVLEATTNTASIAAALRPHVRRVVVANPLQVRLIAESRIKTDKIDAAILAQLYASGFLPEVWIPDERTQALRRQVARRAQIVRQRTRLKNEIHAVLAAHLIERCPATDLFGKKGRAWLAEQPLPLDERLGIEQRLRQLDNFGEDLQAIERQLGQAVLGDDQVKRLLTINGVNINVAISLIAAIGDIGRFRSPQKLVSYFGLNPRVRQSGVHPAYHGRISKIGRSHARAMLVEAAWATAKTPGPLRSFFLRIHGRRGMQIAAVATARKLATVVWYCSPDTKTTHGAVPPLPPKKYRALELRAGSPARKGQRGPAAEYSVREVREKEREMLEHAERAYARFVEGWKRRGPKPIPKIAMETSASRVPFAPPAQLRLAASSL

SEQ ID NO: 156974 - protein, 342 aa, unidentified
MSIVGGLDIHRRQVTFDVVDTVTGQAWRGQLSPADREHLRGWLAGFAGRGQVHLGVEGCTGWRYVAEEVAAAGFTAHVGDPAEIAAKRGRKRRAKTDRADARLQRDLLIRGDFPDCYLPPSPVLDWRQRLESYHDLREQHTAWVQRIHAVLFHQGAPACADLRTAAGRARLDQLCGQLTPAGQDQVATALAQLDLAEEQMRRARRALTAIASHVTGARILATDLYGVGPVTALAMTAWLGGAGRFSSARKAVRFAGLDITVHDSDRHRPPGKLSRQGPPVLRWCAYEAGMVQARRTAPGHDYYAAVAGRLDGKRAALSQARRLIRYATHILADLGDQAFAPC

SEQ ID NO: 156975 - protein, 403 aa, unidentified
MKTIIGIDWSEKKHCVHAYNDAGAQLLRLEVAATVAGFRKLTQQVNKLNPEPANCLIAIETAHNLLVDYLHEMGYTLYILAPSLVSSNRGRQGSSGAKDDDRDAQLLAEILRTDLGQLIPWQPDGPLVRQIRTLLTWVDQLTKSIVRQRNRLRANLLRFYPQALDAFEKLQTQFSLRFLTAFPGPASLETLDFEQFAAFCQQQGYYEYERYPEIWNALRASPTCINQQLSPAFCQQVAWQAERLLAMLLQKRDLIAQVQPLFQQHPDTFIFASLPGAGKLLAPKLLVMFGDHRQRYPTRSWLPAIAGTAPVTVASGKSRYVKFRKACNHEYRQTAQQFAKCSIRESSWAATYFYRAIDRGMSKSHAYRCLANRWLHIIWSLWQHREAYDEAYHLRQVSMHRRV

SEQ ID NO: 156976 - protein, 405 aa, unidentified
MISVGIDAAKDKSTVCIIKQTGEVIRNSYDIKHTKKDLEDLVNELKKLAKNDEVKVVMEATGIYHWPVLIYLKNNGFFVSVINPLRMKLFAKDMNFRNVKTDEIDAGIIAIYGTEKWSKLKNFSFEEDKRGDLKRLSRAYEEYQKPKVLLKQHLDLELDKCMPGIKECFSDDYKLYDFIEYFYHFDNISKLSKDKFLDKFNTWAKKKNHRFYSSTPSKIYELAISMIPTVPFDEVSKLVLLSAVNALRSIEKGIDNILSRMNEIASTLPEYKVVLDMSGMGETLTPLVIAEVGDIRDLKNKKSLVCAAGIDVPPYISGKYVANQRVITKKGNKHLRRHLYLVMNSVVSTKPKTDTAVYDFMCKKKAEHKKNKQIRVAGMRKFLHIYYARVKEEYIKQGIWDKQLS

SEQ ID NO: 156977 - protein, 429 aa, unidentified
MAELAPLAPLAALIGIDWADQHHDVALQETGTAQVERLRLPHTPEAIGEWMATLRTRFANRPVGIAVETSRGPLIHALLDHDVVVLYPVNPRSLKRFRESFAPSGAKDDVPDADLLRELLVKHRDRLRPWVPEDVETRALRRLVESRRRTVDLRTKLTQQLIAALKEYFPQALEWAGEDLSSALACDFLLTWPTLEAVQRARRKTVEAFYTAHNCRRPERIAQRLEAIYQATPLTRDPAIVETSVLVVQMLAKQLKTLADSLARFDTEIAHRFAAHEDAALFSSLPGSGAALAPRLLVVFGADRTRFRRAAEVQQYSAIAPVLKRSGNSAVVHWRWPAPTFLRQTFHEFANQSIRFSRWARAYYALQRSRGNDHHAAVRALAFKWIRIIWRCWQEHTPYDEAHYTRSLFRHTTPLTSRLAMDAGATKRA

SEQ ID NO: 156978 - protein, 429 aa, unidentified
MSYRIAGIDDHKKMLAVVVSDVEIDSEYQFERRRFSSNPEQLRSLAAWLLEQEAEEVVMESTAQYWKPVWEALERYWKPICETREGARRKSGTLHLAQALSNRGRRGRKRDFPDAERLVKRLVARELTLSFVPDAEQRLWRTVTRKKYQLRCDRIRLQNQLESLLEEAHIKLSSLVSDLLGLSARRMLKALAEGETNPATLAALADERLRATPEQLCDALGACTELNAVYRRLLKMALEELRLIDEQIGRLDQEMASLLSEHQDAVQRLAEVPGLGVDSAQQIIAEVGPTAATFPSEKCLSSWVGACPGDDETAGVNYSHRSPKGNRHMRRLLNQAANAAARTKGSIFELAYRRSVPRLGHNQAIGAIAHRQCRLIWLILHQGVRYEERGPAVGKRSKQLRTWRMIRQLRNLGYRIEPPNPQPSQASAQ

SEQ ID NO: 156979 - protein, 400 aa, unidentified
MLSIGIDVSKGKSTVCGMKPGGEIGYTPFEVQHTRKGMSELVSLLRSSGEEVRAVLESTGSYHCPVVAALLENGIFVSVVNSLRMKRFCSQSIRKVKTDRIDAMQIALYGLAYWQELQPTKLPEDTYRELQLLARQYYQMTSMLIKAKVDFTALCDQVLPGMQELMSDHAGRHKLSDFVLRYRHTTHILEMGETRFRKDYCKWAEKKGYRNCERMAALIFATAQNGIPVLPNAPSTQIVITEAIRVLHTVEASRDAILTQMQALAKTLPEYSLVREMPCIGDTLAPRLIAEIGDVRRFHSKRALIAYAGIDAPPYQSGKFCANNRHISKRGNRYLRKTGYEVMQSYVMHKPANDPIFTFIEKKRSEGKSGKLAMVAGLNKFLRVYYGKVTELYRSLPAIE

SEQ ID NO: 156980 - protein, 401 aa, unidentified
MKYGVGIDISKGKSTIAIMSIEGEIIEEPFEIKHDINGLEILESKLKKLPKEDLKIVMEETGTYYLPVLYYLLDKNYIAKAENALLIKKFLDQGLRKAKTDKKDAYKLAEYACTNWFKIVKKEKNDEIYDELKFLSRQYLSTVDVQVKEKINFSNLCDLLFPGYYQLLDDNTFILGLKIFKKYFHPEIVKSKKESQFIAEIDKLAKKLGHRSAGITLATKIYILAQNTIPPRPNNKYSQLSAISCVNALIQIIETANIIITEMDKLASVLPEYDVINKMPGCGKKLTSRIIAEIGDIRRFKNAGSIIAYAGLDAPPYQSGQFEATNRHISKRGNKYLRKTGYEIMKSIKSNVNGDNEIKKFIIKKENEGKLKKVAKIAGLNKFLRMYYGTVKMKYKELEIW

SEQ ID NO: 156981 - protein, 427 aa, unidentified
MPYRIAGIDVHKKMLAVVIADVAAEGEYSFERRKFGAAPSELQRLARWLVEQEVQEAVMESTAQYWRAVWATLEQYWMPVMQHREGAGPMAGKLHLAQAQSNRGARGRKNDFRDAERLLRRLVAQELVLSFVPDPEQRLWRTLTRRKAQLMQDKVRFHNRLESLLEQMHIKLSGLLSDLLGVSGRRMLQALAQGATDPAAVAALADPTLRATREQLCDALAACIDLLPVYRRLLKMEMEQLEFLEQQMDKLEREIAQSLQAHSAAVERLAAVPGLGVESGQQIIAEIGPTAAVFVSPKHLASWVGVCPGEEVTAGEAHSTRSPKGNRNMRRLLNQAAHAAVKMKGSIFEVIFHRLLSRMTYKEAIWTIAHRLCRLIWKILHQGIQYEERGPAVSAKAQRARQAKMIRELTKAGYHVQLPAPVQANSV

SEQ ID NO: 156982 - protein, 330 aa, unidentified
MKIKETIGIDVSKLTLDAHMHSTKETATFENSKKGFARLIKWAYQKSDEPRENILFAFEHTGLYSEKLGEYLTKENVPYSVKSGLEIKRSLGITRGKDDRIDAAKIALYAYRLREEITLSKAPSKQIKAIKKLYSLRERLVRQRAGYKASLKEQKKVLGQRDHALLIQVQQRLIGEFTKQIKAIDLEMQAIIKSDKELNRIYDLLLSIRCIGNQAAMLFIAHTEGFTKFNNARQFAAYCGIAPYPHQSGTSIRGKSRVSQMANKSVKSLLNMCALSSILYSPEIKNYYEQRVAAGKNKMSTVNIIRNKLVSRAFAVVNRGTPFVELYRPA

SEQ ID NO: 156983 - protein, 353 aa, unidentified
MRYLGMDVHVKSTVWCLLDAGGEVVEKGKTPTTAAELTGLVQRLAKDEPLVAAQECGKLSHFVHDVLSPLDVKLLTFNPYHLRVIAASRKKTDKRDAYWLARTVQSGMTPHPVYIPTGIVRQLRALLNERDCVTGQRKAWLVRASTLLQAAGLDARQHSGKGWIEKLLQQPDGIDEQLKLALERCDRMALALTGELAVIDARLHQHATSLEQVQRLQTIPAIGEKVALTIYAWVGDISRFHTARQLCAYAGLTPSVRQSADSSVTGRITKEGSKQLRRALTQAGHVLLFRCQSESSAPLKAKPARIAVQRARRKIAVVAAARHILRTAFYVLRDQTDYNPALLRSPAATTQAA

SEQ ID NO: 156984 - protein, 342 aa, unidentified
MYYIGLDVHKKTISYCVKDVSGRIQQQGTVRATRTDLDSWMKTLPQPWTVAMEVTIFTGWIYDHLLPHAARVKVAHPLMLRAIAAAKKKNDRIDAGKIADCLRCDFLPECHMVSSEIRDRRRTLRYRHLLVRQMVQMKNRISGLLMEAGVSHNKQRLHKVGYFRELLATNKDIHDSIRPLLRLSRETIVRLQKTEYALISSLERDPLLAERLKNLKTVPGVGPITSLTWALEIGDVSRFRSVKQAISYCGLCGDEKSSADKVLRTPLSKQRNKHIQRVLIEAAKLGPKQSPELALVYEKEKQKGHANRATLAVARKMVTYLLAVDREHRAFVPAEDRITAAA

SEQ ID NO: 156985 - protein, 410 aa, unidentified
MSKLFVGIDVSLRKNNVRCMNSNGDTVRKFNVPNTLAGAQALVDYVAEAAALNSSQEVVLGLEATSNYGYHLASFFKNSEKMAPFSPQVHVLNARVVHQFKKSYNDLPKNDDVDAWVIADKLRFGRLPQEVFMDERFLALQRLTRTRFHLATMISREKTYFLNNLFLKFSSLRQEKIFSNQFGATAIGIVQEFLSPDELVAMPLEELVSFLEEKSKNRLVDSQEVAKALQKAARSSYRLSKSMADPVNASMAASISVIKAMQSEIKKLDKLIAMHLEAIPQTLYSVKGIGPVYASGILAEVGDIKRFKSHKSVAKFAGLVWNEHQSGEFKAEDTRRIRSGNKYLRYYLVEAANLVRLHDQEYACFYRAKYDEAHTHKHKRALVLTARKLVRLVYALLRTNQLYTPRKRGD

SEQ ID NO: 156986 - protein, 409 aa, unidentified
METIYEHCAGLDVHKDSVVACVRHWQGGRVKEEVRSFATSTRALLELGDWLAGEQVTHVAMESTGVYWKPVWNLLEGRFELLLVNAAHVRQVPGRKTDIKDCQWIAQLLQHGLLKASFVPDRPQRDLRDLTRQRSQLIAERARVSNRIQKILEDANIKLGSVASDVLGVSGREMIAALIAGQVSPEAMAQMARRRLREKIPQLTEALSGKMTDHHRFMLKMLMEQVNWLEKQIEQFDQRIEAVLRPFEKRAMELLDTIPGINTRAAQSIVAEIGADMTRFPTAGHLAVWSGMCPGNHQSAGKRKRGKTTEGNRWLKGTLTQCAWAASRTRNTYLSRQYRHLAARRGKKRAAIAVGHSQLVAAWHLIKNGEVYQDLGVNHLDKVQGERQVKHLVRRLERLGFQVELKAAA

SEQ ID NO: 156987 - protein, 335 aa, unidentified
MLYAAIDIHKRLFQAAVLDVETGETVERRFGATREELSDWAMPLQGELAAVAIEATNGWRWVWRELSARGFDVRLVDPAQAKALRGRIKRAKTDRLDARWLCVLLAKEMLPESWLPPAEIQALRDQTRLRKALAEDRTRWAQRLHALLAHEGWPCQRARLLTVEGRRWVNALSLSPAARSQVERLLRLIEAVEDELRSLETELRRFARSDRRCIALQTIYGVGPILACHLLAELGEAARFRRARQAVRAAGLDPVVDESGETRRRGRLAKHGAPALRWALVEAAQHAQRANSPDRGLYTQAATRVGGKRAVLTVARKIGRRAYHVLNELETQAAA

SEQ ID NO: 156988 - protein, 441 aa, unidentified
MVRRDAAGIDLGSEQHWVCAPAAEGTRREVASFGATTLELIRMAKWLRERNVRSVAMESTGVYWIAPHEVLEGEGFVVLLVDTRQLAQVPGRNQKSDRMDCEWIQRLHSCGLLRGSFRPKEEVCMLRTLVRDKGTLVGEAGDWLRRMQKSLDQMNVRVHRAVSDLDGVTGMAMLRAIVAGERDAVQLAKLRDPHCKKSEAEIAEQLTGHWREDHVFSLGQALQMYDAIQSRIADYEQEILRKLGEMAGEDRRGQPVPPVRNAVKRGSLRRRRQEPMREAWYRMSGVDLTGIDAIGVETVQVVLSEYGPDLSCFATEKQFVSHATLAPRRRTSGGKPLKKKKRNSASTRVAAALRMAALSQRHSETALGAYYRKLASRLGGDVAVFATARKLATYVYRLLRWGQQYVDEGAQAFEKRFQANTIKTLTAKAKKLGYQLTPAAT

SEQ ID NO: 156989 - protein, 387 aa, unidentified
MARNSQSSAFVPSNFDIFAGLDVDKKSMSITFTDHDTLQRSLRLPYSATQLLNYTRKHFPGQRVAFVYEAGPTGFGLYDELTAAQRYCLMVTPAMVPSAPRDRVKTNRLDSKKLSEGLRGGQLKGIHVPPQIFRELRHLVQLRDTQVGQLSATKCRIKSLLLFEGIPFPDAQGKWSGRVLRELEKLPCHPGVRFKLACLIDALQFHFQTAAKVQKEIRRFCDNEAELKQAISLLTTLPGVGTITATHALARLGDWRQIKNVRQIAGFLGLVSSEHSTGEKENRGQITRIGDQRLRNKLIQCAWIAIRKDPELRAFYRRIYEQRPKKTAARIAIVAVARKLTTRMYAVLKQQRPFVIRADSSIAPLTAEETTGLRERLDMAQNDELSF

SEQ ID NO: 156990 - protein, 383 aa, unidentified
MESTLITDFTPEMTTLAVAFELSKASWKIGLHDSKREHPAMHTVADEAAQKRLEQAVAVIEETKQKWGLAQPLRVVVMYEAGQDGFWIARALIQLGYEALVIDPASIPVERHARRAKTDRLDTIKLLTCLRAWLRGERDRMHVIRIPESAAEAQRQLVRDRGELQKECGQHRDRIRKLLRTVGCWDSMDSHFARRLADGDVRCHDGSALAPELQQRLRRESVRMELAEQQLLALEKALVKQLPESTQERIATLTRLKAIGKVGAMRIVLELFWRDFDNRRQVGSCVGLVPQPYDSGESHIDQGISKQGNRRVRALLVEMAWMWLRYQPESALTRWFDKRTQGSGPNKRARRIAIIAVARRLVIALWRYLKDGVIPDGATLKAA

SEQ ID NO: 156991 - protein, 386 aa, unidentified
MKKHTKNETTKSKRETKKVAELESAGLAEREANTLVIGIDLGDRTSAYCIRTLGQQIVKEATVATTATAILEAFQGLVRQRVVIETGTHTRWVAQLLELMGHEVIVANARKLKLISENNQKSDKVDARLLSKLGCMDVDWLHPVYQRSQAAHSDLLLARARQTLVDVRTALINHVRGSVKSYGSRVEKCASERFVGVARETLPEGLKPALGGVLATLEEINEQIYGYDCQIEHLCNTKYQESAKCLLQVNGVGPVTTLTYVLTIENKDRFEQSRDVGPYLGLVPKKRQSGQRDPQLGISKAGDEMLRKLLVNCAHHILGANGEDSDLRRWGLELVRAVERKGKKGARKLAATAVARKLAVLLHRLWVTGAKYEPLKNRGAQQAPAA

SEQ ID NO: 156992 - protein, 350 aa, unidentified
MQYIAFDSHKRYTQASVSSMTGTIQREARVNHEPGSVVAFLREFDPGSPVAVESLGNWYWIVDEIEAAGMVPRLVHPRKAKLMMGMINKTDKLDARGLNRLQQSGTLPAVWIPPGDLRDKRDLPRTRMLLVQQRTRLKNRVHATLAKYALGSTGVSDAFGKRGQEVLREQVAKLPPETQFVTDRLMEEIASLAAHVDAMESRMKALFAETPELKFLRTLPGIGFILSTVIALEVGDIARFPTASQLASYAGTTPRIHSSGGKTRFGPLRTDVNHYLKWAFVEAANSISRNARRWPDRHVVRLYCRVRTRKGHQKAVGAVARHLAEASFWVLKKGEPYLEPTPPAVSSMEG

SEQ ID NO: 156993 - protein, 448 aa, unidentified
MQNRNVKMEVVNSNAAGIDVGSRSHFAAIGQGSGDIKEFGVYNEDLQQLTKWFGDNEIKTVAMESTGTYWQHLYITLQAAGFQVILCNGKFTKNIKGKKTDVKDAQWIQKLHTIGLLTGSFLPDEATEQLRTYCRHRTNLLQQSADTTRKMQKYLRLLNLRLDVVVKDIAGLTGLAIIDAICKGEKSPEKLAALRHSNCKKSEEEIAKALQSNGRKDYLFGLRQEYQLYVNFQEKMKECDMEIEKLLNEQINSDDEKRQHFIDKKVYKKINKNTPKNLDINLLSYQYFGGVDLLAIEGVSHATALALMSEVGNGIHKFETAKQFASWLRLAPNNKISGGKMLSSRIPKGSNRLKIALRNAANAIGNLKDTALSNFFKRIAFRKGRPAAISATARKLAVIIWNMIVKGIPYKSENDYEFLDQKRKRKVQEMKKLIHKFDIKINDLGLHV

SEQ ID NO: 156994 - protein, 407 aa, unidentified
MDPMQHPAAFAGIDWGGHEHQLCVVDGAGSKELELRVTHDVAGLDELVRALARHGEHVPVAIERAECLLVEHLQAHGYPVFPVSPRISARARERYRVAPVKDDRFDACVLADTLRHEHAHWRALAVPSTLLGELRALTRDRDRLLETQQATEAQLRAILEAYHPAPARLFSSMDRQIALAFVADYPTPAVASRVRTTRMAGFLRRNAYTGRVPAQVLAERMRGNLLSGSSGTVAGKAHSAKTFAHLLGAMNESLAEFDDAIASVVAEHPDAHIFASFPGVGPILTAVLLAEIGEDRSRYPTVQALLAESGLAPVTRSSGRSHSVRFRYAANTRLREATMWWAFNSLKTSPWAAAAFRQARDERGQRYHRALRGLAARWMRVAWRCWQDGAAYEPARHMAAVIAEATA

SEQ ID NO: 156995 - protein, 338 aa, unidentified
MNITTIGLDIAKSIFHLYGINSVGRLLKKKQLKRHQLLKYLANLDASLVVMEACGGANYWAREIMLLGHEVKLISPQYVKPYVKGNKNDYNDAQAIAEAAQRSNMRFVPIKSVEQQDVQNFHRQRERIKKERTALVNQIRGLLAEYGIVIKKGVAAVRRELPRILEDAENGLNTLSRELFAELQDELHALEERFVQCNHRINLMNQDNAVCRRLEGILGIGSITASATYAAVGDGKEFKNGRHLSAWLGLVPGQHSTGGKPVLLGISKRGNSYLRTLYIHGARAVLRYSANKQDRFSRWAQQVLARRGHNKACVAVANKLARIAWVIMARGESYRALV

SEQ ID NO: 156996 - protein, 318 aa, unidentified
MEPQVSFNQVVSRGCGIDVHQKVVVATISGDGLKKETREFGTFTRSLTELKDWLLEKGVTHVAMESTGIYWKPVYQVLEPTSLKVWVVNARHIKYVPGHKTDKQDSAWICKLLLAGLLKPSYIPAREQRELRDLTRFRTKMIQNVASQKNRIIRILEDCNIKLSSVVSNTHGVVATKLIHKLCEGHSITMVDIDEVYHKRLEVSKSDLYEACQGLMDEHHIYLLKLIRQDIASTEAVIENLNVWIKEMLSGYDNVLENLRAIPGLGHKTVEDLVAEIGLDMSVFPTEKHLSSWAGMCPGNNESAGKKKADAPTTATNR

SEQ ID NO: 156997 - protein, 427 aa, unidentified
MSERKSLELRVSVDVGCRRHSVAVGLSDGQVLEEFEIRHRREGFQEFFSRIEKHQKAQGCKVAVAMEGYNGYARPLDSLVRQRGYRLYNINNLKLARFKEIFPGAAKKDRIDARKGLELFQLRDHLPLAKDVLQEVTGSPQENEILKRLTRRRRRLVNERVRVVNNLQADLQAVCPGLLEITTEASNQWFLNFVISGDTILQLARLGKSTLLKIPAVGRKYASLIQQWQKRAHFSEEAQWVSEMIQEDARRCLELDERIKTLETKIKEVAKSSKIANTLLSIPGFGAVCTSELAGEIGTVERFSKEGSLALYLGMSMLDNSSGKYQGTKQPKHVNTRAKAAMMTAVDRHRKYVPQSQKYYEKKRTEGKTHNQAIRALGRHLCRIIYQKLKEQREYRVRSEKGDTQVRVDSRSCVKTKIRRPKISAHS

SEQ ID NO: 156998 - protein, 386 aa, unidentified
MQSSSACTPTRDHHGTIFVSIELSQRSWLVTIHSPDRDRLSRYALAGGDHAGLLAVMEKVRARATLKLGSPPAVVSCYEAGYDGFWLHRLLTAAGITNLVFDPASIAVEQRARRAKTDRIDGELLLRTLLAHWRGEPRVVRIVRVPSVEQEDARRASRERDRLIKEQTGHTNRIKALLRLVGLAVGNPRRSDWLNWLDRQRDWQGCPIPPHLRAEVTREHARLMLVRDQLAALAPRLEASAVSTAPSQPQLMTERRNRLLRLKGIGEVFAGTLTSEVFYKDFRNRREVAGYCGLAPSPWRSGGIVREQGISKAGNPRARHKAIELAWLWLLHQRDSALSRWFRERTAQASGRIKRIAIVALARKLIVALWRYLTTGLVPDQAVMKA

SEQ ID NO: 156999 - protein, 490 aa, unidentified
MTASVYAKPQPELRNLFDRAGDPRKVLCVPIDYAKRKHIVLFCNGVGDILKQAFSVDNSPTGLTDLLAQLNATCRHHHLERTSAFFGGEDVPAWAENFIAALRVKGFPVARVNAWEAKKQRENFQASSDTLDLLGIAQCLLKQRGKFNPPVADAYRHLRDLCRERHGFVTAATALTNRLHNYGDRLFPQFLNPNKSGIPPFTPACWWLLQDRFSAPQVAQRRTASLIKGLQRQGLPDAPTAAATLQALAREVLPPCPQYVATWQQLVKALADEGQSLQQIIAGLDHQIAPLLAKTPGAVLTSIAGIGVTLAAGIAGELGPPDQLPNLDLLCSYAGIVPATKQSGGPDQAPVVLGVRHRCNHHLKNYLVQAANKMGQMGPPELQQRYRDVQARNSHADFVVAKDLLGLGKSLMQRQTLYLPPDLYAPESCASARAAYYLDLWPKLLIKWQPKAPLAQVFAADTPLGKWRAMVQDIYSISLPLPQRSRSAKA

SEQ ID NO: 157000 - protein, 387 aa, unidentified
MPQLNDLSRSLVALDQDSTIIAVVEMSQSSWLVAGVLPGIERQPQKKLEPSAERLLGLLHRWRDEAVRAGKKITRIALAFEAGRDGFWLARWLNARGVEAHVIHPSSVAVSREHRRAKTDRLDTELLKRGFLGWLRGERGHCSMARVPTIAEEDAKRPNRERECLVGERTRIVNRMKATLARLGVRNFKPTLRKAAERLATVHTPEGTPLPRNVLAELQRDMARLGFVVSQIREIEQARQKRLEQETETGPHAMVRQVARVIGIGIETADMLVHEVLSRPMRDRKAVARYAGLTGSPDESGARRREQGLARAGNARVRRGMIQLAWRFLRFQNQSALAQWYRARTADSRPGTRKTMIVALARKLLIALWRFVTTGETLDGVILRPAG

SEQ ID NO: 157001 - protein, 391 aa, unidentified
MIYIGIDVAKDKHDCFITNSDSEVLFKAFTIANNLDGFNDLYQKSESVMDDVTKVKVGLEATGHYSYNLLGYLIDKGLPTYVINPLHTNLYRKSLSLRQTKTDKVDARTIASMLMSDVNLKSYSDTFYHNEELKSLTRYRFDKVKERAKLKTSVSRLVCILFPELEKLVPTLHIASVYALLSEFPSAKHVATAHLTRLTNLLSESSKGRYGKDTAITFRDAARASIGSNMPAKSLELKHTIKLIQELDSEIDEIENEIKIIMDEINSPILSIPGINYRMGAMIIAEIGDFNRFDSPDKILAYAGFSPSTYQSGQLDGAYAHMEKRGSRYLRYALYNATKYVCHWDPTFAAYLAKKRAEGKHYNVAISHAVKKLVRVIYHLEKTRQQYIKVA

SEQ ID NO: 157002 - protein, 433 aa, unidentified
MNTPHPYDLIIGLDRSDTKADLHLIDTATGQRRSETIDTAPEALWEWLVELRQQHPQARVALCLEQPAVHLIPFLEAYAWLTLYPINPITLQKYREAFVTSRAKDDAKDAFYLAELLLTHHDKLKPWAPEDTQTRAVQQRVFHRRAVVDERTGLTNRLQALLKQYFPQALVLGGEDLWRPLATRFLLKWPSLQAVQKAKPATLKQFYYLNGSRSAKLLEQRLALVAKAVPVTDETARIESFVLRVQLICRQLQLVQQTITHYDWQIAQAYAAHPDREIFASLPGAGPVLGPRLLASLGAQRERYACAADLQHYTGVAPVTKRSGGSCYIHRRYLCPKFHRQSFHEYAKESILWSRWAAAYYLQQRTKGAPHHTAVRALAFKWQRVIWRCWQNRRPYDERIYEAALQKSGSLLVNLFDRVELGKSPWKNPAKKS

SEQ ID NO: 157003 - protein, 365 aa, unidentified
MKTSTKDQSPKRKSIRRMQSLTIGMDLGDKNSRFCVIDADGNVMSEGGLATTRKAIGEKFAGLHHCRIAIEVGTHSPWVSRLLVELGHEVIVANPRQLRLITESSRKSDNVDAETLARLARVDPSLLRPIRHRSECAQMDLMVIRARAALVQARTSLVNTARGLVKAIGERLPKVDAEALDLGKASGLPDALQEVLRPLLVTIEELTQKIKAADKEIERMARTRYPETELLMQVSGVGPLIALTFVLTVDDKERFAKSRDVGCFIGLRPRRQDSGERRPQLPITKEGDMYLRALLVQGAHCILSRQGPDTDLKRWGERMCTGGKNAKKRAIVAVARKLAILLHRLWTTGEVYEPLRNNSVLAAAA

SEQ ID NO: 157004 - protein, 405 aa, unidentified
MQVIYDRCCGLDVHKKSVTACTVTPEGKEIQTFATMTGDIIALVDWIKNKGCSHVAMESTGVYWKPLYNLLEVEQIETLVVNAQHIKAVPGRKTDVKDAEWIADLLRHGLLKGSYIPGRDQRELRELVRYRRSLINERSREVNRLQKVLEGCNIKLSSVASDITGVSAKAMLKAIIDDVGDPVVVAKLAKGKLKNKQKELEKALLGLVGPHQKMILTAQLNHIEFLDQQIIELNQEIEARLHPFELELELLDSIPGIGRRTAEDILAEIGTDMNRFSSSAHLASWAGMSPGNNESAGKRKSGKTTKGNKSLRVTLVLAARAAAKSNNTYLSAQYRRIAARRGGNRAAVAVGHSILVMTYHMLKKRESYKELGSDYFDQRKKDHVIKSSIKRLESLGLKVTVEAAA

SEQ ID NO: 157005 - protein, 407 aa, unidentified
MPRDYIGVDWADTEHAIWVEDESGTQVAALTVPHTAAGLSEFGRWLYERQAQGIECWAAIERPEGRVVDFLLDHGVVVYPVNPKALDRARDRFRMSGTKSDPFDARVLATFLRTDHPHLRPLRPSSELAQELKLLTRDAQRLIRQQTRLLNQLTATLKEYYPRPLEVLGELTTPLARAFLTAYPSPDALAALSRAQWRRFARTYRLSEARTMALWTALQPPQLPVPAHVVRAKARLVRVLVDELSATVRAVEEYRQAVDDFFATLPAAEWARSLPGGKSGTTVPTLWAELGDAPDRWQSFAHVQAQAGAVPVTARSGKSQHVRFRFACNTHLRAATHTLAFLSLRQSEWARGYYKQYRARGHRHHEALRALGAKWLKIIFVMWMHHTPYDEQYHLANMARQHLRQAA

SEQ ID NO: 157006 - protein, 414 aa, unidentified
MTETAYAMYVGIDWGTASHQVAVLDAQRVPLGERAVAHDGAAFQACTEWMTLLAGGDPARIAVALEVPRGAVVDTLLERGFHVFALNPKQLDRFRDRYTVAGAKDDRRDALVLATALATDQPAFRRLAPEDPLIVELREWSRVEDELREEWGRLANRLREQLHRFYPQLLSLCPAADESWFWALVGLAPTPAAAQRLRRAAVLALLREHRIRRLTADQVLAALQTTPLRVAPGTVEAASAHGALLIPRLELVDRQRRDCARRIERLLDALATTGEHQGHRDVTILRSLPGVGRVVAATMLAEASRLLAARDYHGLRTHAGVAPVTRQSGKRLLVGMRYACNPRLRNALYYWGFISVRYDAHSRHHYQRLRGRGHSHGRALRGVVDRLLTVLMTMLATQTPYDPGRRRAVLAQAQ

SEQ ID NO: 157007 - protein, 352 aa, unidentified
MSNQQIAAVTYGIDLGKTWFHVVGVDAGGHPVKKVKLSRSTVQNFFVNIPRALIGMEACPGSQWLARKLQALGHQVRIVPAQFVRPYVKSNKNDIIDAEAIAEAVTRPTMRFVQIKHTEQVDLQALHRSRQLLVSTRTRLINQMRAFCLEYGVAMRHGVGGFKSGLPAALADEVNDLTPAMRELLSGLAEDMNFLEGRISMLSRQINAVADASDSARRLTSIPGVGPLIATALVAAVGDARQFKTARDLSAWLGLTPGQYSTGGKTKLTGISKRGNTYVRTLFIHGARSTCMHLDRSKDRLGLWLDQAQARLHHNKLVVALANKMARIARVILSKAGSLYEREDPRFASQIG

SEQ ID NO: 157008 - protein, 356 aa, unidentified
MSHDVKYIGMDVHKEAIVVAVLSGSGKLVMESVIETKASSILQFIHGLRSELHVTWEEGTWAAWLYDLLQPQVEQVLVCDPRRNALLKEGSKSDKVDARKLADLLRTGMLRPVYHGENGLRTLRELARSYQTISKDLTRVMNRLKALYRGWGIPCAGTQVYAPRYREEWLKKIPQAGVRRRAELLYQQLDGLQALRRNLRPEFLAESRKHKAAKLLRQIPCIGPIRAARLIALIQTPHRFRSKRQLWTYSGLGIETHDSAQFRFVRGQLHRSKKPQQLRGLNQNHNHEMKEIFKSTATRASCSMGPFRDFYQALLAKGMKPEMARLTLARKIAAITLTLWKRGERFDAEQLKAQAA

SEQ ID NO: 157009 - protein, 445 aa, unidentified
MAGKPKVVGGVDTHADTMHVSVLTLLGRKLADKEFRTDARGYWDAIRFMTSQGSVQAVGVEGTSSYGAGLAKALITAGITVIEVNRPDGAARRRLGKSDPLDAELAARAVLSGNATSAPKDPGIEAIRALFNARRSAVKARTAAMNQMTSMLVTAPEPVRAKYRSLKEKSLVTALASCRPGGDDPIAAAVLTALRTLAKRHRFLTDQADELESQLDVLVTAANPALRAAFGVGPGTAAQLLITAGGNPERLGSEASFAALCGAAPVQASSGKTNKHRLSRGGDRGGNSALHRIALVRMSNHPRTKDYVARQVKLNKSKAAILRMLKRAIAREVLRLLTNEIPVAEYGDLRPARQAKNITLTAVAEIFDVWPNIISKLERGLYRNDAMADRDGDRIAALAKAIGQFVLGSVKCRPPINRARDDRFRQVPPNSQRSRRCSRPARPLG

SEQ ID NO: 157010 - protein, 344 aa, unidentified
MDTHRDAHVAAVLSPLGAVLGTEEFPATAAGYHGLLRWAGDLGTVRRAGVEGTGSFGAALSRYLLSQGVEVFEVNRPDRTDRRLRGKSDPLDAQNAARAVLSGRARARAKTGDGPVQIARMYKLAKGSAVKARTQAINQVKAVLITAHPDLREELAQLNTPDLLRTCARFADDSKDDEGEEETVLQATRATLCLLAHRIVQLTEQIKDLERRLALLAERHIPQLLAVVGIGPDTAVTLLITMGDNPERLGSEASFAALCVVSPVERSSGARQYRRLNRGGDRQANAALHRIVQTRLRCDPRTQEYCERRIKEGKTRREIVRCLKRYAAREVFHLVRPVESRPWS

SEQ ID NO: 157011 - protein, 356 aa, unidentified
MKKKGLLNYIGVDIGKRNCVVCIMDSNGSIIKETNYNNTLEQAESFASSIKRKHGTESTAVCESTGNLWLKTYQAFEKHDIDVKLANPLKTKAIAEARIKTDKLDARTLAHLLRSDLVAECYIADRETREDRSLLRLRTNLVQDRTRTINRVHSLLDKYDMNFSYSKIFGIKGLQWLRDLKVTGNDQILLHEYIQQIEFLTREIKNVESKIRIDASNNESVKILMSMTGINYFSAMMISSEIGDISRFSSPQKLVSWAGLCPSVHQSGNSLYMGRMKDGNKKVRWILIEAANTASRTDGRLRKFYLRLAKRHGRHIAITHVANKICTIMWHMLTYKKLYNERKISLYETKLKRIQH

SEQ ID NO: 157012 - protein, 366 aa, unidentified
MTDATITYTDGRTLPVLETGRFGTDRAGYRAMLAAGRCWPERTWAVEGCQGIGRHVAQRLVADGETVVDVPAKLSARARVFSTGQGRKTDATDAHSIAVVATRTAALRPVAREDELMALRLLADRREELANARTQAVSRLHRLLLDLIPGGAPRFLSATQARALLATVRPRGVAGRTRRQIAAELLAEIVVLDRKLKDSDKTLREAVAATGTALMSLHGLGPVGAARVLADVGDVARFPARAHFSSWNGTAPIDASSGEQIRHRLSRAGNRRINRVLHIMAIVQLRNDTEGRAYFRRKVAAGKNQDGSPAVPQTAAIRRALPPARRRGRPSPADTWRLNGNGPGRTRGGGYEIQRGRHQPHSRLFG

SEQ ID NO: 157013 - protein, 325 aa, unidentified
MFEVSTVGVDANGKTVVRRQLRRSQFLSFFEGQPRCLIGMEACSGAHHWGRKLQEMGHEVGLMPPSYVKPYVKRGKTDAADAEAICEAVTRPSMRFVPVKSEADSAALVLHRARDFLVGQVTQIGNAIRAHMAEFGIVGPKGLKRVEDLKSELNALPEAARLPLQALFDQFAETRARIDRLTDEIEAVHRQSEVGRRLASIPGVGVLTATAIAATTPDVSNFSSARDYAAWLGLTPKQHSTGGKPRSGGISKMGNRYIRRLLYLGAMAQIMVRRRSRRPGADWLSRKLATKETKVVAIALANRMARTIFALLRDGTSYRPQVSAA

SEQ ID NO: 157014 - protein, 345 aa, unidentified
MEEAMKDYTGQRVFVGVDVHKKSYSVTAVVDQQVIKRSTIAASPELLVAYCQKYFKGAIIESAYEAGFCGFHLHRFLETKGIQNKVVHPASIEIAARERVKTDRRDSQKIAVQLSTGRLKSIYIPEKTREDFRLISRIRETLLREKVRKGNQIKSLLYQLGKMPEGHVPRMSAHWIESLKQIELTAQQRFCLEILTKQWLELEIEIAKINKQLKEQAKQDEGLQAIYQSVPGVGPIVAQTLANELGDMKQFKSERALFSYTGLTPREYSSGEHRRLGHISQQGKPILRKMLVQAAWVAIKQDEGLKEIYERISKKAGAKRAIVAVGRRLIGRIRACINKGCMYHS

SEQ ID NO: 157015 - protein, 323 aa, unidentified
MEKIKQFLGIDISKNTFDVYHPKSGHAQFETNHKGFDAFAKTLDQISHCVMETTGSYHYQLAVFLYNHEFAVSVVNPLVIKRFIQMKLQRIKTDKSDARMIYQYGVEQMVEPWEPEPYYIEACKMLQSATESYFKQSTALKNKIHSLSSKGITQGILIRSLKRQVLRLKKEIKSLEGEIEKLIKQHDQQLYTNLSMIPGIGRKTALLLISTTNGFRSFETSGQLSAYFGLAPTERSSGTSINGRSRISKAGNPKVRNYLFLCSFTACKRNPQCKALFDRIVAKGKSKKLALIAVANKLIKQTFAVAKSGIPYDSNYRSVLTIV

SEQ ID NO: 157016 - protein, 334 aa, unidentified
MSSLVCGLDVHKDSVYATVMSYGGEVIEKRKLSNDEVVGFLGRYPIDRVAMESSTSIVPVYRALRGKGYEILVSHPKKTRLVAESRIKTDRVDSWAVTELARLDALPLSYMPPDDIAALREKVRRRAFLVRMRSKLKVKIRSQLAINGFTPPSEYGLFTSKGVEWLRSLQLEAVESYLPVISTLDVQVGKLSRELRMMASDDEDVGLLMTIPGIGYYSALLVKSEIGDISRFPDGEKLCSYAGLVPSVSSSGEHRRYGSITKEGSRWLRWIMVECVHTHLKYDTSITRTYHAIAQRKGKPIAKVAAARRLLMCCWSVLQNQKPYYDPAGHYQPS

SEQ ID NO: 157017 - protein, 344 aa, unidentified
MIYIGIDVSSKSFVIHAIDGRKKVVFKGEILPEKRPLLKLLKDLGDEPKYVVFEAGNQMKWIAQALLKVEDVTLHVVHPNELKWISQCNGKTDKVDARKMAELARGDLLPRKVHIVEGTVRELREMLSARQLLQSKRIALVNSIRAMMLQEGIKLPEKFFSRTDWHDRLEKVSISETTKLIIAAFMKAVEGLSSSEDELETKVVAIGDERIKRLESIPGIGKLSSRTLLGALDEANRFDNKKAAAKYGALTPTIYQSGNVTHMGHICRNGRHEIRRVLLQCAHTVARMKNFESKPLREFFERIHKRRGKKIAVVALARKLLTIAYGVLKAETYFDPKMLSPNRA

SEQ ID NO: 157018 - protein, 402 aa, unidentified
MSIKREGIVSVDVSKSDLTYQPWSGYCEPRAKPKKCPMRIDAMSEIADLAVEMAALCGNEPTVALEDTGVYGRPLIAFLESKGIKTARMSPLLSAKVAKANDKPVKTDAIDCSTIAEVYYTKDKVRGMNISIKAMDPSDLSRQLRERAKEGQAAKCRFRKTLDLVWPLWDRAFSDVYAAGPWAIVKEYLHPSVLLSKRKATVVKFLESSGIHGQRAEAMAAKAIEYAKSCPSGVWECSPMVDDLRYKMATLDAILEDKARIEDDLFSRFGRGENYRIATSIPGVGRSLALVLLAEIGDPSRFRSPKSIVSYAGMEPRIRSSGRDDGLHRGITKKGNARLRWAATMAVRVMVIVGSANPIVRFKNRLINENHLSCEAATVAAASKLLRVLLMMLKSGQEFKQN

SEQ ID NO: 157019 - protein, 364 aa, unidentified
MKKNSKQTRKPMTSLTIGIDLGDKYSHYHVLDADGEFVESGSVLNTEAAARKHFAALPSAVVAIEAGARTHWWAQLLASFGHRVIVANARAFAAGVKGRRKNDRNDAERLARYARLDPQLLNPVQLRSAEQQADLSHIRVRDALVRTRTLLVNVARALAKENGCRLPASLTHTFGERSLSVLPAALAAVLAPALASIDDLTKKIEAAEEHIETLCREKYPETKYLRSIPGVGSITALTYVLTLASPERFRHSRDAGAYLGLQPAQQQSGESDPQLGISKQGNGYLRRMLVQCAHHMLGPFGKPSRLREWGRALAHRGARNARKRAITAVARKLAVLLHRLWHDRALYQPFYSQPPRPGTTTTAA

SEQ ID NO: 157020 - protein, 341 aa, unidentified
MDKIASQPVAWCGIDVSAQQLVVALQRGDRAVQHRTFPNGSVGHQALIRWLARSTGTVRVCLEATGLYSLDLALSVHEVPGIELAVLNPKAVCRFAETLRRSKTDPADALVLLDYARRMPWQSWQPPSATALVLRSITRRFAALTKQHTMEANRLHAAEASKTVPRCVRQDLKQSLRQIECRLRRLQSEARELVTRDVELEQRYTLLRSIPGIGESSALQIMEELEVLAPDLDVRQWVAHSGLDPLQHTSGSSVHRAARISRAGNRHLRRVLYMPAVVGVRFDPYLRTFYEHLLERHKTKLQAIIAAARKILHAIYGMFRSRSRYDGSKLFPLLQPTAQAA

SEQ ID NO: 157021 - protein, 335 aa, unidentified
MKVFYLGVDVSKKKLDLCLRSNGKDILYDVIPNDLSSIKSWLTRTFEKFFLSEDSLVVCAEHTGQYTYPLVCATKSIGVYLCLEDAAKIKYCHGIPRGKNDKIDACRIAMYAERYNDCLQPYTASELIIQKLKNLSTERSMLVADRAKYQPQLKDQVDYMEHSIYIAKCNRVEGIINTFTDYIAQIDLEIKELINQAPVIAHQMDLLMSVDGVGERVALKMIMETDAFTSFTDPRKFCCHAGVVPFVYVSGSSQRSKNRVSNRADKSIKHLLHMAALSVSQVKNSPLKKYYDRKVEEGKNKMSVLNAVRAKLVTIMFAVIRTDAFFSRNYQNSLA

SEQ ID NO: 157022 - protein, 423 aa, unidentified
MKPLATGGFSAYVGIDWADTKHDVCLQARGNESREFDCFAHRVAAIDQWAHSLRQRFGSPIAVAVELAKGPIVYALQKYDFLVLFPINPSTLAKYREAFKPSRAKDDPTDAELALDLLMRHPERFAPLQAQSEDMRALLSLTEQRRQLVGDKTRFTNRLTHTLKQYYPQALDWFDQRDTVLFCDFLARWPTLTQVKRARPSALKAFFYAHNGRRAHLISARLDAIKAATALTQDLGVIAPCRLQALVLVEQLRTTLQAIERFDREIAELAPRLPDYRLFRDLPGAGPHLAPRLLAAFGEDRQRFAHADELQKYAGIAPVTERSGKKSWVHWRWQCPTFVRQTFVEWAAQTINKSFWAGAYYRQQRDNGSSYQAAVRSLAFKWIRILYRCWQTNTPYDESRYLNALRKRRSPLLKNLDLDAQNA

SEQ ID NO: 157023 - protein, 443 aa, unidentified
MSKKRTAHLRGARGQAFADLTRGISSEHILCVSLDISKYFHVVMIHNGLGEIVTPTFEIDIFQSGFDQLCQAIDQAKSRTNAQLVLIGMEPTSHYFENLARRLLQRTQPVTLINSFAVKQNREQQLMRREKTDEIDVAAIGDLLRRGEGTPFRPPTGIYLQLQQLDRVRLGKVKIQAMLKNQILGHLDRIFPGLVILGDEAKERYTPLFEADFWTCQTLQHLIRVCPNPHQLARMLSAQLVQVFHAHQYRLGPAVAAKLIAYAQKVLLPDPQLAAIRCELLQHDLTLLDEVQAHIAALERRLADLVAQTPYQIWTKVKGLSTVQVASLAAAIGDPDHYTHAGQVFRRSGLVSGRNDSGRRQRKGKGNRVLKTGDVYLRRALMNAVATLILHQPTLGRYNQLLQKNKPAGVARVATARRSIGILWATLRDQYPTTLISCKGAEM

SEQ ID NO: 157024 - protein, 341 aa, unidentified
MNHYAGIDVSLKDSSVCVADANGKIVRESTVASEPEALIAWFSELGFAVTRIGLEAGPLSQWLYAAMQKAGLAVELLETRHVRDAFKAMPVKTDRKDAQGIAQLMRLGWFRPVHCKSIEAQETRAILSARKLVQSKLHDVEMSLRGTLRGFGLKVGKTTPNRFAARIKELVEGHPTLQIIATSLLAVHAALLREFKVFEKQIRIMARDDERARLLMSTPGVGVLVALTYVSAIDDPGRFTSSKRAGAHFGLTPKKYQSGETDITGRISKIGDKGVRTALYEAAHIILTKPVKGSALKSWAARLAKRAGMNKAKVALARKLAVIMHRMLVDRTPFNPAAAAA

SEQ ID NO: 157025 - protein, 388 aa, unidentified
MIYVGIDIAKLNHFASAISSDGEELIKPFKFTNDNDGFQLLISKLNPLDKDSLIIGLESTAHYGDNLVRYLVAKNYKVCVLNPIKTSTMRKNNLRKTKTDKVDTYIICKTLMMQESLRFVTFYDLDLMDLKALGRFRQKTIKQRTRLKIQLTSYVDEIFPELQYFFKSGLHQKSVYALLKEAPTPEAIASMHMTHLAHLLKVNSHGRFNKEMAQQLRVLAQKSVGASDSSLSIQVTHTIQQIELLDSQLERVEAEMTEIMKFNDSVIMTIPGIGYINGGMILGEIGDIHRFSSPNKLLAYAGLDPSVYQSGNFQAKKTRMSKRGSKVLRYALVNAAHNVVKNNTTFKTYYDAKMAEGRTHYNALGHCAGKLVRIIWKMMTDNLEFNLD

SEQ ID NO: 157026 - protein, 429 aa, unidentified
MDGVDGIRLERFRQLRKDIRGSKKHLIVGIDIAKEKHYAFFGTANGKTLLKRLVFENDLDGFKKLMTHVRAVKVQNDLDKVVFGFEPTGNYHKPLAEHLIKCAQEVVLVAGTAVKKNRELLDGRWDKHDTKDSANVADLISQGKCLFYEYPIMALRELRSLLSLKRRLKKLEHGTKVRIRNNLLAQYFPELDRYFGNMSKCSLGVVNWCLEPAVIAGLEYEEFLRRVAPGKLTLKQREQVKRIWETAVYSVGCDAGESMQFEAKMMVEELQHLRDRISEVEKRIEDICLQFPEYNYLLTIPGFGKDISSKVLGAIGNPFRFDSAKQVLKLAGWDLSANRSGKNSARAIPVISKKGKADLRYGLYQAARVASCKNQYFIKYYTDKLSQRVREKGIKTKMRVKLAAKLLVIAWTLMKKQEAFDPAYLELST

SEQ ID NO: 157027 - protein, 343 aa, unidentified
MRGITTIGIDIAKSVFQVHGIDAEGNVIIRRQLKRRYVLAFFQKLPACVVGLEACASSHHWSRELQALGHTARLMPPAYVKPYVKRQKNDATDAEAICEAVRRPTMRFVETKTLEQQSCLVLHRTRHLFIRQQTSVINAIRAHLAEFGIVAPVGRRGVEELLDVIGEASDKRLPEVARACLATLGNQLRMLKAQILNFDRMITAWHRSNETSKRLDELPGVGPALATALVASAADPKAFRSGRDLSAWVGLVPKQSSSGGKQKLGSISKQGDRYLRSLFTAGALAVIRYAKIHGTKHRPWLTALLARRPTKVAAIALANKIARMAWAMMARGERYREPVALAA

SEQ ID NO: 157028 - protein, 461 aa, unidentified
MRNNRKSGDRPGSTRPIAGLPIVRAKVAGIDIGSERHWVCAPGLEGSGREVADFGATTPELVRMAEWLKERKVESVAMESTGVYWIAPHEVLEKDCEVLLVDTRQLARVPGRNKKTDPSDCEWIQRLHSCGLLNGSFRPQEQVCMLRTLVRDKANLVAESADWVRRMQKSLDQMNVRVHRAVSDLNGVTGMAIVRAIAAGERDAQKLAQLRDRRCRQSEQEIAEQLSGHWREDHLFSLRQSLQMYDAIAERITAYEQEILRKLATMEIGEYPGGVVPPVKNLEKGKAIKKRGQEPKRQALYRMSGVDVTQIDAIGVETVEVVLSEYGPDLSRFPTEKQFVSHATLAPRVPKSGGKPLKHKKRNSASTRVAAALRMAALSLRHSATALGAYYRRLARRIGGDVAVFATARKLATLIYRLLRWGQPYVDEGAEAFEQRYRQQHIKGLALRAKELGYQLMPTTT

SEQ ID NO: 157029 - protein, 355 aa, unidentified
MDNLRYIGLDVHRDTISAAVLDHDGKLIMQSVVPTRASAILDFLHGIRGTLHVTFEEGIHSAWLYDLLQPRVARVLVCDPRKTRLLKSGNKGDLIDARKLAELLRNDALSPVYHGELSSLEVQRRTRSYTMLTEDTTRIMCRVKAVFRGQAVPYHGKSIYRPDRRESYLAQLPTEGLRQRVELLYQELDAVHRLRLRAKREMLAECRKHPAMKWLQSVPFLGKVRTAVLIGRVQTPHRFRTKRQFWSYCGLALETHDSAQYHVLHGQVERKPRFVQVRGLNWNHNHDLKGVFKSAATMAAVREGVFRDYYCGLLAKGIRPEMARLTLARKIAAITLKIWKEGGMFNAEQVKPQAA

SEQ ID NO: 157030 - protein, 391 aa, unidentified
MIFVGIDVVKNKHDCFITNTNGEILFNSFTITSNLDGFNGLYRKITSITENITNVKVGLEATEHYSYNLFGYLFDKGFPTYIINPLHTNLYRKSLSLRQTKTDKVDARTIASILMSDVNLKSYSDISYHNEELKSLTRYRFDKVKERAKLKSSVSRLICILFPELEKLVPTLHMASVYALLSEFPGAKQVANAHLTRLTNLLSEASKGRYSKDTAITFRDAARTSIGSNMPAKSLELKHTIKLIKELDSEIDEIENEIKIIMDEINSPILSIPGINYRMGAMIIAEIGDFSRFDSPDKILAYAGFSPSTYQSGHLYGAYAHMEKRGSRYLRYALYNAAKYVCHWDPTFTAYLAKKRAEGKHYNVAISHAVKKLIRVIYHLEKTNQQYIKAS

SEQ ID NO: 157031 - protein, 364 aa, unidentified
MVVVGTDAHKYSHTFVATDEVGRQLGEKTVKATTAGHATAIMWAREQFGLELIWGIEDCRNMSARLERDLLAAGQQVVRVPTKLMAQTRKSARSRGKSDPIDALAVARAVMRETDLPLATHDETSRELKLLTDRRDVLVAQRTSAINRLRWLVHELDPERAPAARSLDAAKHQQALRTWLDTQPGLVAELARAELTDIIRLTGEINTLAQRISARVHQVAPALLEIPGYAELTAAKIVGEAAGVTRFKSEAAFACHAAVAPIPVWSGNTAGQMRLSRLGNRQLNAALHRIALTQIRMTDSRGQAYYQRLQDAGKTKRAALRCLKRRLARTVFQALRTVHQPSSEHTQPAAACHRSYCSRSCLSG

SEQ ID NO: 157032 - protein, 377 aa, unidentified
MHKDGSAFVGLDTSKLKISVALAEEGRQGEIRFFGDIENTPGAVRNLVTKLTGKYNKLQFCYEAGPTGYGLHRQLTDLGQDCVVIAPSLIPKRPGERVKTNRRDAVSLARLHRAGELTAIWVPDAEHEAVRDLVRAREAAMLELREKRQHLQSFLLRHGRIYAGRRPWTKVHARWLSNLTFSHPAQYLVLREYRQSIEDAEARLERLTDQVAEVVSSWSMSPVVDAYQAMRGVAFLTAVIFVAEIGDVRRFETPRQLMAFLGLVPSERSTGETVRRGGITKSGNPRARRVLVEGAWTYRYAARLSRPLEVRQERLPKTVRAIAWKAQLRLCARYRRLAAAGKRQTVVTTAIAREMAAFLWAIGREVEPRQSKQVAAC

SEQ ID NO: 157033 - protein, 367 aa, unidentified
MKKGSTVAAKPSRKISEQKLTIGLDLGDRSSWYCVLDESGSIVLEQKVSTTSKALKEVFGGMPRSRMALETGMHSPWVSRLLSELGHEVIVAHARNVRLIGESRRKDDRLDAQTLARLARIDPQLLSPVKHRSAKAQADLTVIRARAGLVRARTALVNTARGLAKSYGERLRGCNVRNMNPEKAEGLSPELQAGLTPLLAGLESLSEQIREYNERIEQLAQSSYPQVALLKQVKGVGTLIALTFLLTLEDPHRFRKSRDVGCYLGLQPGRRNSGQSEPQMHISKEGDPYLRTLLVQGAQHILGPFGVDCDLRRWGLKLAERGGKSGKKRAIIATARKLAVLLHHLWVSGEVYEPLHNHQHRPLAIAA

SEQ ID NO: 157034 - protein, 344 aa, unidentified
MSKVSTIGLDIAKSVFQVHGVNVAGAVVIRKRVSRAKVLEYFGELPPCLVGIEACPSAHHWGRELQALGHMVRLIPPSYVKAYLKRSKNDANDAAAICEAVTRPSMRFVPIKTKEQQTALMLHRTRQLLVRQRTMLSNALRGHLAELGIVSAKGRNGTAELLRIIADDRDSRVSAAVRGILNVLARQYGAIGAEIASIDKSIMALHRGCEASRRLAEIPGIGPVGATALVAEIGDWNTFSSGRSLAAWIGLVPKQHSTGGKERLGSITKQGNRYLRWLLVVGAMAVIRYARKHGTARRPWLGRLIERRPTKVAAVALANKMARMAWAIMVRGERYKEPRLSLAA

SEQ ID NO: 157035 - protein, 437 aa, unidentified
MTTHNHSTSPRDIVASFNETINQNNSESVAAVNITSSSTIRLIDGFRPMGIDLAARKYQICFQENLGRLINTEVNKAELRQFLINAEHKYLICIEACSGASYWKRYAESCGHKVKVISGKVTRALNWLRNKDDYIDAYSLYQALFIPGLPSCQTHSEEELAISALISEKEALLKNLNVQVNKTRSLLIETGEYDRAIRGATSAMKAIDDYLSAHIHDAVEHRYTIICMKELRKMLVILTKSIDEINCHICEYAMHSEVAGLLLTIPGIGVETAVSIAIEAKSIDRFDSARQFQAFFGFFPGHSGSGGKIAMGRMANNGNRAVKRTLYEGALSIYHQGKISGEPRSDWINSKAALNKGAFKKGMIVIASKMLRTAYGVLKNGKGYNPAVDNSLGRMKARLHRRSNPKYREQEQNATQLSCYLNSYMQEERLTDIDYLF

SEQ ID NO: 157036 - protein, 395 aa, unidentified
MISVGIDVSKGKSTVCILKPGGEVIKPPFDMVHAVENLDFLISLINSFDEETRVVLEDTGHYHIPVASYLSSHGIFVCCVNALRMKKFCAQSIRRAKTDKIDAVRIASFGITYWSELTRAYDAPDTYDELRFLARQYYQITSILVKAKVNLSNLLDQVMPGISNLLQNQKDNHKLTEFVDRYIHFQTILDMGEKKFTADYCKWAKKKGYRCNERKAAEIFALAQNGIPSLPNSQSITIAVREAVKVIHSTEESRNTILSQMQEICKTLPEYSVVRDMNCIGDVLAPCIIAEIGDVRRFRNKHSLIAYAGIDAPPYQSGAFNASERKISKRGNSYLRKTGYEIMQSLIKHKPINDPVYDFIQKKRSEGKCGKEAMIAGLNKFLRVYYGKVMELYSE

SEQ ID NO: 157037 - protein, 338 aa, unidentified
MGWYSGIDLHSNNCFVVVIDESDRVMYRRRLPNELGKVLEALELYRSELAGVALESTYNWYWLVDGLQAAGYKVHLAHPAGVKRYDGLKHSGDESDALQLAHLLRLGILPTGYIYPAAERGLRDLGRRRLQLVRHRTMHVLAVENVQARQSGTRMTGDRVKRLSAEEVQALGFDEDVTLGLQANVAVIATLNAQIAKLERRMLEHLKPRPDYALLNTVPGVGRVLGPIILLETGSIERFREVGNYGSYARCVNSVRISNERKKGEGDGRNCNKFRAWAFIEAANMARRWCPQARRFHDRKRARTNATLATKALAHKLARACYHVLKKREPFDMRRCFG

SEQ ID NO: 157038 - protein, 340 aa, unidentified
MRIVMGLDQHRAQITAEWVDTETGEIGRARIAPAHREPVRRFLARFASQELRVALEATTGWRFVVQELRAVGARVHLAEPAETSALRGNKKRPRTDRADARHLRELLMIGKLPECWIPPEHLLDLRARVRLRHTLIDDRGEWQQRIRAVLYHHGVRHRPDLVLLRADGQARLAQAPLPDTAREQVTVAVRMIDALDRQLPGLDRQLRAYARRQTGCKALMGHYGIGELTSVAILAELGDCRRFSSSRHAVRYVGLDITVYQSDQRRSPGHLSRQGPSTLRWALYEAAVVAGRAGSPDRDYYLQAAARLGHKRACLAIARKLLKRSYHTLRELGDEALQPA

SEQ ID NO: 157039 - protein, 416 aa, unidentified
MDVIVARCAGLDVHKNTVMACVRAPGPDGGRISTVRRFGTFTDALRQLRAWLVAEGVTQVAMEATGVYWKPVWHVLEAVPEFELLLANAHAVKNMPGRKTDVADAEWLALLCECGLLRPSFVPPPVIAELRDLTRYRKKLIEERSRETQRIQKLLEDAGIKLDSVVSDILGVSARQMLEALIAGVRDVEALAELARTRMRPKIPQLRRALEGRFGAHHALMLQMHLDHVDQLSAAITRLDVEVDRVIRPFSAQLQRLITIPGVGRRTAEVIIAEVGVDMRRFATAGHLASWAGMCPGNHESGGKRRSGRARKGNQALRAALCEAAWAAAHGKTGYLPAQYRHLMRTFGKKGQTRAVFAVGHSILVIAWHLLANDCDYTDLGAEHFTRNADPEARKHYLIRQLEALGHKVTVEPAAA

SEQ ID NO: 157040 - protein, 345 aa, unidentified
MELHTIGIDLGKTVFHLVGLNLRGEVVVRKKFSRIQLLRFTANIHVELIGMEACGGSHFLGRALREQGHEVRLIPAQYVKPYVKTNKSDYIDAEAIAEAVSRPTMRFVPIKTDDQLDMQSLHRVRERWVMRRTAVINQIRGLLLERGITLRKGRHHVHAALPLILEDADANLSGAVRLLLTQLKLDLDQLSVRIDEADAVIQKTAHENEACRRLVAIPGIGPVTATALIAAIGNGGAFHKGREFAAWMGVVPREHSTGGQQKLLGISKRGNSYLRRLFVQGARAVLQQRTKQSSGLSAWLAQLTSRTHRNVAAVALANKLARIAWAVLAKNEQYRPAVVADVAAA

SEQ ID NO: 157041 - protein, 345 aa, unidentified
MQPMYYIGLDVHKQKISYCVKDGPGKIHDEGWIPATRFDLDRWMKRLPQPWSAALEATMFSGWIYDHLKPHAAALKVAHPLMLRAIAAAKKKNDRIDANKICDCLRCDFLPECYMAPTAIRERRRKLRYRNLLVRQMVQMKMKISTLLMEAGVSYNKQKLHKAGYFRELLATNPDIPEGLHPLLRLCREMVVRLGKTESALIHSLQQDRLLTERVERLMSIPAIGPITALTWALEIGEVQRFSSIKKAISYCGLCGDEQRSANSVQRTPISKQRNKHLQTTLIEAAKMAPRYSPTLALLYDREKQKGNANRATLAVARKLVAYLMAVDRGQCHFLVIDQETRTAA

SEQ ID NO: 157042 - protein, 387 aa, unidentified
MTVCTVNHQPAATHGETARCLFAIELSRKSWVIGIITPLSAKISRRILNGGDWRGLLELIEEVRARVSRETGRAVEVISCYEAGYDGFWLHRQLEAHGIRNYVIDPASLQVDRRVRRVKTDRIDTERLLRSLMAYLRGEPKVWSVVRVPSVAEEDARRLHRERDRLVSERVQHVNRIKGLCALQGIYDYQPLRPQAMAGLEQLRTAQGAALPPRLKSEIKRELHRLELVVEMIASLEAERDTIVEDKASTHVNAKKIQNLHKLKAIGPEFAAVLVGEIFHRDFNNRRQLASYVGYAPSPFQSGNVAHDQGISKAGNRKGRTTGIELAWLWLRYQPDSDLSVWFRARVGTVKGRIRRIAIVALARKLLVALWRYLETGLVPRGAVLKG

SEQ ID NO: 157043 - protein, 366 aa, unidentified
MAIWRLGMAVIEGRERHIVGGVDTHKDLHVAAVVDEQDRILGTRSFPTTRQGYRQMLAWMLSFGELQRIGIESTGSYGAGLLRFMQQAKVVVLEVTTPDKQDRRRRGKNDDLDAQNAAHAALAGQRTVTPRSRDGMIESLRILMACRKTAVSARRIALQMIHNTIVCAPDALRDQLRNLTRMQLVRTLASWRPDLTAYRDLDSAYRIGLKSLARRYLELHDEIADLDVMIAAIVNELAPNLVARNSIGHIGAAQLLLTAGDNPERLRSEASFASLCGVSPVPASSGKTVRHRLNRGGDRAANSALHIIAIGRLRTDQRTKDYVARRIAEGHSKLDAIRALKRYLAREVFTLITQRRKEINATRIAA

SEQ ID NO: 157044 - protein, 312 aa, unidentified
MSSNTSTIIYAGLDIAKLNLQLHLAGRFYDLPNTAAGHRRLLELLKAHPAVQVICEATGGYERDVVEALHQGTIALSILNPARVRHFARAQGQRAKTDRIDAAVLSAYGQAFQPKTTPSRTQAEQHLVELVRRRVQLLEMLVAQRQQAERLSLPSLRRQAKSLVRRLEADIAQIEEQLQELRQQTAALDERAKKLQAITGVGATALAVLAELPELGTLNRRQTAALAGLAPHPRDSGQWQGRRTIGGGRAEVRRALYMAALVAARSNTILKVFYQRLREAGKPAKVALTALMRKLIVLMNRILKDPNFELQN

SEQ ID NO: 157045 - protein, 346 aa, unidentified
MLYAGLDLSRKRLDFHLLDAAGATVDVGASPPDADGLQHLSERVALYGESVSAAIESMNGARFVHDRLELDGWQVEIADAQKVKGLAPLACKTDRIDAWVLAELARRDLVPAIWLPDPRVRAERERARWRLHLVRHRSSLKQRVHAVLLTHGKPCPVSDLFGLRGRQLLAQLGLPEPWQGTIEASLRLIDDLEREIGECERELRRLGADHRYVPLLLTVPGISWVLAYTIAAEIGDITRFASPRKLAGYSGLCPRVYQSGERDLRGPLSKQGPRYLRWALVEAATHACTHPTYRERYQQTKARIGKQRGAKVAQIDLARRLSEAIWHMLTREQPFAPKGATDPLAA

SEQ ID NO: 157046 - protein, 356 aa, unidentified
METAYDGRQIVGMDLHRRRSVLVRMTEDGRRLGTARITNSPQKLRREIARAGRHPRVVLEATYGWYWAADTLEEAGAEVHLAHPLGVKGFSYRRVKNDERDSADLADLLRMGRLPEAWIAPREVRELRELTRYRHKLVSLRTSCKDQVHAVLAKLGIPVTCSDIFGKAGSAWLDGLGLPQPYAGKVTSLRQLTGELTTEITMLTQVIADLLAGDRGYQVIQQLPGIGPVLAAVIVAEIGDVTRFRNAGQLCSWAGLTPRHRESDTKVTRGRVTKQGSRMLRWALIEAVQRAGGDCVTGAVRNAIIARRGKETRNIAKVAAARRLLTLVYYGLRDGQIRCLPAPTPEPPETMPARAA

SEQ ID NO: 157047 - protein, 339 aa, unidentified
MEIVATIGLDIAKQVFQVHGADKSGRLVLRRKLKRSEVARFFSEQPSCLVGIEASGSAHYWARVISSFGHTVQLMAPQFVKPYVKSQKNDANDAEAICEAVTRPQMRFVPQKSIEQQDLQCLHRVRSRLVACRTQLINQIRGLLAEYGIVLPQHPGQVRRGLPTVLEDAENQLTRSGRELFQSLYEELAELDEKIAAADDRIQVAFQSTPNCQRIAAIEGVGPLIATAVVAAVSNGHSFENGRQFSAWLGLVPRQNSSGGKSRLLGISKRGDPYLRTLLIHGARSVVYRAKAKTDKRSLWIIDKQQRLGTTKACVAVANKNARIIWSLIAREQEYRRAA

SEQ ID NO: 157048 - protein, 338 aa, unidentified
MLHVGLDLHKRFSTVTVMDDDGTILEQDKLYHDDRARLTEFFRRLAGKAVVTVEATRNWYWLYELLEELGLTVKLANARKVRLIAEARLKSDKVDPGSLAQLERTGFLPEAYIPSRAIRDNREYLRYRLTLVRLRTGLKNKVHALLDKLGISHQFADLFGPAGRRFLSQLTLRPVYQKELTNYLALADDLERRIMAATKEIKQQLKPDPRAGLLMTIPGVGHLTAYLLLNEIGDVQRFPTPGKLCAYGGLVPIVRQSADHRWQGHLTPEGNHYIRWALTESACKAPNKDYALGSFHRRVALRRGPLKARVAVARKLLVAVWCVLTYDEPYKVTKLPTI

SEQ ID NO: 157049 - protein, 319 aa, unidentified
MSNVIIGVDIAKLKFDVARLCDGKYKHAQFPNDAQGYADFIIWLTRFGDDSPSICMEATGSYSLPLAEFMTDRGYWVSVINPAQIHAFGKSELSRAKTDKADAKLIARYGLQAELRAWIPLPINIRDLQAMTHRIGHLLEMQQMERNRLDTADTAIAASINTVLTILEAELKATRKAIHDHIDKDPDLKERSDLLDSIPGIGAATIAHLLVALSHHHGYTSAKQAVAHAGLAPAIRESGQWTGKTRIAKNGDARLRKALYMPALVAWQHNPVIRAFCERLKANGKNGKAIACAAMRKLIHLAFAILKSGEPFDPNFSFA

SEQ ID NO: 157050 - protein, 400 aa, unidentified
MTNLGERIWVGIDAGKGHHWAVAVNADGETVFSQKVLNNEDEILQLIATACEAGGEVRWAVDISGRASALLLALLIAHSQQVVYVPGRTVNRMSGAYRGEGKTDAKDALVIADTARMRRDFAPLATPPELVSELQLLTAHRADLIADRVRLLNRLRDLLLGICPALERAFDYSGSKGSLVLLTGYQTPAALQRIGIKRLTTWLERRMVHSAADVAARAVEAAQTQQTALPGEKRAAKLVCDLAHQLLALDQRIKDIDREIRETFRTDDRAEIIESLPGMGPILGAEFVAIVGDLSTYKDAGRLASHAGLAPVPRDSGRRTGNHHRPKRYNRRLRHIFYLSAQTAMMRPGPSRDYYLKKRAEGLRHTQALLSLARRRVDVLWAMLRDKRLFTSASPVTQAT

SEQ ID NO: 157051 - protein, 351 aa, unidentified
MELIAFDSHKKYTLARIESEDGRSHRESRIDHAPGVIRRFLERCSKGSPVAVETIGNWYWIVDEIEAAGMVPQLVHARKAKLMMGHTNKTDRLDAQGLNRLQRTGTLPTVWIPPMELRDLRELLRTRMDLVVQRTQLKNRIHAAMARYCLKLEEANDAFTLEGREEMARLFEKLPPHTRFANTLLLEEVDAVQKQIDRLEERMEAVLEDSPEIRLLKTLPGVGRILSAVIALEVGDVKRFPSAGHLASYAGTTPRVSSSGGKTHFGKLRSDSNRFLKWAYIEAANVAAIFHRKHPERHLSRMYAKLRKEKGHAKAIGAVARQLAEATYWVLTKKENYKEPARTGTGSSTEA

SEQ ID NO: 157052 - protein, 342 aa, unidentified
MYHSAGLDVSVKETSVCIVDDTGKIVREVKVASEPEALLAVLANPAYHFKRIGLEAGPLSQWLYSALADAGLPVICVETRHMRAVLKAQINKTDRNDARGMAQMMRAGLYRPVHVKTLRSQKLRMLLTHRKLLQSKAIAIENDLRGTLRNFGLKVGMVGKMKFEARIRELVENIPDLAVLVEPLLIVRRVLREQFVIQHRRLLAIVRDDEVCRRLMTVPGVGPVVSLTYRATVDVPARFRKSKSVGAVFGLTCAKYQSGEVEWSGRISRCGDEMMRVMLYEAAQSMLRSEKWSWLKAWAMQIARRRGMKKAIVALARRLAVILHRIWVDGTEFRWTREAAAA

SEQ ID NO: 157053 - protein, 451 aa, unidentified
MAKRGEKRERRSMVLEPDAAGIDIGAEEIYVAVPPDRDEESTRRFSSFTGELHALADWLGRCRIQSVAMESTGVYWIPLFQILEERGFKVYLVNAHYLKSVPGRKSDVSDCEWIQYLHSVGLLRASFRPPEAICALRTLWRHRGSLLEMAAEHILHMQKALSQMNLQLHHVLSDITGTSGQAILDAILAGQRDPVALAQLCHCRVKSPRETVAQALVGDYRSEHLFTLKQSLAGYRYYQKLILELDQETARLMQALPSATEDPMPPRTKATAYHRKGNDPQFDLRSELYRIAGVDLTDIPGVSAATAQVILTEVGIDVGRFRNASAFASWLGLCPEKRVSGGKMLSCKTRKVKHRAATALRMGANSLCRAKGYFGEFFRRMRAKLGTAQAITAEAHKIARILYHVLLTKEPYAETVFHRCDEPAHRRAEMRLRKQAAQLGFQLLPIPAIGE

SEQ ID NO: 157054 - protein, 410 aa, unidentified
MSAIFCGIDVSVDSCVVLCVDQSGRPLGQSRTFSNDLAGAGELTAFLLEMAQKQRATRLEIGLEATSVYGVHLRNFLVATPDLAGLETKVYEINPALVAGFKKSFPKRPKTDSLDAFAIAERVRFGHLTPFSQERLVTEPLLQLTRLRLHLVQTLVVEQNRAYNYIYLKFSNYRREKPFSSVFGRSSLAVLQDYTPEELLNLELEDLAGFILENGNNRLGDPEEYARSLKATARRAYRLHPQMGSAVETALAMTISNIDFLKGQVRKLDRLIARELDAIPQTLTTVPGIGPVLASGIVAEIGDIKRFASQAALAQYAGLTWSRYQSGNFDAEDRSLTKVGNRYLRYYLVEAANSLRVHNEEYRAYYQAKYAEVTKHQHMRALVLTARKFTRLVYALLSKGQIYAPGQVNI

SEQ ID NO: 157055 - protein, 340 aa, unidentified
MQVTTIGVDLAKNVFQVHGITATEEVVFNKPLRRAQFLSFFAKLEPCLIGMEACSSAHHWARELTALGHEVRLIPPMYVKPYVKRGKSDAIDAEAICEAVTRPTMRFVAIKTVEQQALLSLHRARDLLVRQRTQLINGLRGLVAEFGIYIPRGLARVIGFAEDITLGEVLDLPDIANEVIRNLSEQLMALHKRIRWYEERLKQVAKEDARVRLLRTIPGVGAVTASAIIASIGDGHQFRNGREFAAWLGLTPANKSSGGKEKLGRITKMGDQYLRSLLVVGMTSLVRQTRSHPERASKWLTSLLERKPARVATVAMANKTARIVWAVLTRNEPYSPRTVA

SEQ ID NO: 157056 - protein, 360 aa, unidentified
MTSISHPCCERITVGVDTHKHAHVAVALNEIGGRVAELTIEVHPDGYRQLEQWALALGGRAVFGIEGTGSYGAGLASHLRRQGHRVIEVMRPDRQQRYLRGKNDALDAENAARAVLAGTATAIPKTGDGCVEMIRQIKIAKDTAVKSRSQAMITLKTIIVNAPAQLREELERLSDRKLIDRCADLTYASMTNPADAACYTLRTLARRYRHLSQEIDISERILATLTERAAPQLTSIIGIGADSAAELLIVAGDNPERIRNEAAFAKLCGVCPIPASSGKTNRHRLYRGGHRQANAALHRIALSRMRFHQPTIEYAARRTAEGKSKLEIMRCLKRFIAREIYHFLLADFRKQQSALPLDES

SEQ ID NO: 157057 - protein, 381 aa, unidentified
MLDQTAHNPVPTVYAAIELSKKSWVVAIVQPAKGQPSIYRIKGGAFSDLVMRLRTATPGGERLLVCYEAGYDGFWLARSLQTEKIDCRVLDPASLQVNRRARRVKTDRIDVLMLVRALIAVDRGDRHVCSIVRVPTVEEEDARRSHRERQRLIRERTAHINRIKGLLFGQGIRGVEPRLRRSRIDFSDLRTGEGLPLPARLRAELKREYARLDLVETQLRATETERDTADAQDPSIEYKRNMLIQLRGVGPASAAILTREIFGRRFANRRQLGSYLGLTPSAYDSGSTTRCQGISKAGNSFARRVMIEVAWLWRKYQPNSALAKWYEERAAGQSPRIRRIMLVALARKLIVALWRYVEIGLVPAGAVSCANNGAALDAAAA

SEQ ID NO: 157058 - protein, 363 aa, unidentified
MVPSTIDHRTREGPKMKITIVGIDLAKNAFRLHGCDEEGRAVLRKQLTRGQLLAFIAQLPACTVAMEACASAHYWAREIEQLGHRVRLINPRFVKPYVKANKNDASDAEAICEAAGRRSMRFVPVKTAAQLEVQALHRVRQQLVKSRTALINQVRGLLAEHGIVISQGRAQLQRALPRILEDADHRLSGIMREILSEIGERLKFIEARLHQYELHIERLFRQDPRCRRLAEVAGVGPLIATALVAAVGNAAEFKNGRELAAYLGLVPRHRATGGRTQMLGISKRGDRYLRSLLIHGARAALWTIARRGDQRSAWAARLKLRRGSNVAAVALAHKNARVLWALLSRGEGYRGAPCSPRMAQAAG

SEQ ID NO: 157059 - protein, 386 aa, unidentified
MSKHNDLSRCLTTLEQDGTLIAVVEMGQATWLVAGIVPGLDRYPLKKLCPDRDALLQLLHRWRDEAAKAGHAINRIAVSYEAGRDGFWLARWLRSQSIEAYVIHPSSVPVSREHRRAKTDRLDTELLKRAFLGWLRGEPKHCSMAAIPTLEDEDARRPGRERQILVEERTRILNRLKANLARLGIRGFRPNLARAASQLGSLRTPEGVAIPKNTLAEMRRDLDRLRFAKQQIKEIEKARAERLAKAPDEPRHAAARVLTRVVGIGVETADMLVQEVFSREIRDRRALARYAGLTGAPDESGQRRRERGLAKAGNARVRRGMIELAWGHLVHQKGSPLSAWYRRRTVDARGGARKTMIVALARKLLIVLWRLATTGEAPEGLLLRPA

SEQ ID NO: 157060 - protein, 362 aa, unidentified
MNTLARVTSAAQIEVAGGVDTHQDTHTAGVVDHAGRMLGHRTFPTTEAGYRQLLAWLGGFGTLRVVGVEGTGAYGAGLARYLMAQGQAIVEVDRPDRKTRRAAGKSDPIDAESAARAALNRVRTGLPKQRDGMVEALRNLLVARRSAVSQRADCMRQIKTLIITAPQELRERLRDLSNTQLLRLCTGFRPNLCLVGEPEQAAKVALRALGHRHAALSEEIAELEALIAPLVEQINPALLALNGVGPDSAGQLLITAGQNTERLHSEGAFAMLCGVAPIPASSGKTNRHRLNRGGDRQANAALYRVVLSRMRWDPRTREYVARRTTEGLSKKEIIRCLKRLIAREIYYVLRQPAATLVSAHAR

SEQ ID NO: 157061 - protein, 333 aa, unidentified
MNYKYFVGIDVSKKTLDYSILSEGKEILHTQLTNSIEGLEQFLKKLSVICKNDNFDDVLFCMEHTGIYCEHIFTLLEMYDINLWVESSLRIKKTMGMTRGKNDQIDAKRIALFSYRFQDKIRLWIPERSIIRRLKHLLTFRTRTVETIKLLKAPLKELKDFLSDEEYIKLSNLHLNTLSALEVDLKGINKEIDTLIKEDIRLSYLFSIVSSVKNIGTMSAVVIIATTNEFLSINEGKKYACYAGVVPFQHQSGSSIRGRTRVSHIANKTVKTMLHMAALSSISRPGEFKDYYDRKVEEGKNKMSTINAIRNKLVLRVFACVRDGKLYDSNYKY

SEQ ID NO: 157062 - protein, 343 aa, unidentified
MTLKASFKWVNPQDINVLGLDVAKAKIDICFLSSNHSWFYQIANNSQAISQFSQELKALGLNATIPFILESTEGFHLLLATLLKNDGWNVKEINPIITHQYIKHTVRGTKTDTTDAQLLAKIGLIEGDNLKSFDRDLNIIKLRMLISFLAHLETLTQQSKASFNALEKGLATLRLWESQELEKMKEVIKVLEQRAKGLEREILDIQLSPEAQEQVNYLDSIVGISPFTAKVAYALFAHNTFSSKRAMLAYVGLDPRLRQSGTKTWALRMSKRGHPYMRKRLFQSAFCSLQHSSYFKSIYDKHIQRWKHHFIAVLAVAKKMIYIMRALLKNNTQFDHNYHLLST

SEQ ID NO: 157063 - protein, 371 aa, unidentified
MEKDSTTKFIGLDVHSKTISVAIADEGRKGEVRHYGTIDNTTEAIEKVIKSLTLTGAELRFIYEAGPCGFALYRYLTGNGFKCIVTSPAMIPKRKSVRIKNDRRDALTLARLYRAGELTGIYVPDPEDEAIRDLARARNDARLAERKAKQRVISFLLRHNFVYPGKKPWTKTYFVWLSKVSLKHPAQKIALQEYIDAVHECTGRVKRLSEQISLAVEEWRMAPTVKALQSLRGVSLITAAITVAELGNISRFQHPKELMAYLGLVPSEHSSGESIKRGHITKTGNSHARRVLVESAWTYKHHARVTLPLIKRQQDLPKGICQISWKAQLRLCARYRRMMARKKPMQVVVIAIARELAAFMWAIAQEVEATA

SEQ ID NO: 157064 - protein, 349 aa, unidentified
MLADELDYVVGVDTHRDEHVLVAVAAPTGAVVARQAVRANARGYRETLRFAELYAPGARAWAIEGTGSYGAGLTRYLAGCGETVLELSRAPRRERRLRGKDDSLDATRTARAALASETLVLPRSGERREALRLLLVARRSAVDVRREALGQLRGVIVTAPDRLREQLRGLPAGKLLERCSRMRRSSSQTADEVATRLVLRSLARRIEAATLEADQLERELLGHVHALAPTLLDEPGVGPIVAAQLIVAWSHRGRVRSEACFARLAGVAPVPASSGQTTRHRLSRGGDRQLNRALHTVILYRRQHDPTTKDYIARRIAEGKSRRDATRLLKRYLARHLYRLLERQEPLMT

SEQ ID NO: 157065 - protein, 354 aa, unidentified
MPHNTSRLEAVATIGIDIGKNTFHLVGLDRNGAIVLRQKLSRRQIEARLANTPPCLIGMEACVGAHHLSRQLKAYGHDARLMPARYVRPYSKGQKNDFRDAEAIAEAVLRPTMKFVAIKTVEQLDLQALHRVRERLVCQRTSVINQIRAFLLERGIAVRQGPPALRSEIPIVLSMTDKLSPRMIQMIEDLCADWRYLDERVETVSDEIRTLSEQDDGAKRLMTVPGIGPIISTATVAAIGNGDAFSKGRDFGAWLGLVPRQMSTGGRTVLGPISKRGNRYLRMLFVQAAHAVLLHPKCWERHGLKSWIAAAARRLNRFKLAIALANKLARIAWGVLHGGRSFEVRSMKPAAQCL

SEQ ID NO: 157066 - protein, 330 aa, unidentified
MTNAKVRESTSSPLEFVGVDMAQQVFEWALHGVRGTHSAGNDERGFEALREALKGRNLGLIVLEATGGLERALAGYLLRHGLPVAVVNPRAAREFARSMGHLAKTDAIDAVALAHLAQTLAAKADQAGVRLMPPSAEVELLQAMVARRVQLLSMRTAEKNRLGGAVRVLHKSIEAVIKTLDKQIAKLDRDIDAHLEQHFTEQAQRFDAIKGLGMTTCAAVLAFMPELGTISGARAAKLAGLAPLNNDSGKEHGKRHIWGGRSIVRSALHMATLSAVRFNPVIKAFYDRLLAARKPKKVALTACSHKLLRILNAMARTGQPWDESLHAITP

SEQ ID NO: 157067 - protein, 312 aa, unidentified
MMRLACAAGVDVGRDWLDVAQATSGRPFREPNAPKGIEAIVGRLKRAGVVRVVLESIGAYGQPLVRALGGAGFEVAVVDPRRVKALRLAEGRRAKTDRLDAGLIARFALLMSDVVRPAPSAQALEIRALSTRRRQVVELCAVEKTRLKQAIDADVAASCRRLIALLEEERAQVEARLDAALFAVPGNREKAALLQTIPGVGPAVSSTLLADMPELGTLDRKAVASLAGLAPHPDDSGTRTGRGRIGGGRACVRVAMYMAALGASRSEAGLKREYQALRDAGKPPKVALVAIARRLLIAANSIIRSGEPWKPT

SEQ ID NO: 157068 - protein, 406 aa, unidentified
MRVVHERCAGLDVHKSSVVACALLPEGKQLRTFGTLTWQLEQLAEWLRGLRVGVVAMESSGVYWKPVFNILEVAGLELLVVNARHIKAVPGRKTDVKDAEWIADLLRHGLLRPSFIPGREERELRELTRYRRTLIEERAHEVQRLQKVLEGANIKLEEVISNVVGLNGRRFLSALIAGDYDPETVAATANYGLQRKRELLAQALQGTLGTHQRFLLDQLLSHIDFLEQRVAALDQEVKQRSRPFEAAIARLDQIPGVGIRAAEEILAEIGTDMSRFPSARHLASWAKVCPGNNESAGKRRSGYAGKGNRWLRSILVESAWCATRKKDSYFKVQYHRLAARRGRKRALLAVGHSLLTVIYHLLNDGVIYQDLGPNYFDQRDRSHITRQAVRRLERLGYHVSLTEGAA

SEQ ID NO: 157069 - protein, 265 aa, unidentified
MHEVWVGVDVSKQSLDVAVRPGDESWSEQNSQAGIKILTRRLKKLAPQRIVLEATGGYEYELALRLSKAKLPVAVVNPRQVRNFARAVGKLAKTDPIDAKILSHFAEAVKPPCRLVKDSKLDEVDQLVTRHRQLVEMIVAERNRRMSLRGEAQNDIDVTIRFLQGRLQKVDERLKTLIDKNPEWNRKAALLKSVPAVGPVLISSLIAELPELGTINRKQIASLVGVAPFNNDSGKSRGRRHIWGGRAHLRALLYMAVLRVFVSTR

SEQ ID NO: 157070 - protein, 355 aa, unidentified
MTSTKYIGLDVHKESISIAVLNSAGKVVMECVIETKASTILQFIHGLGGNVHLTFEEGAWAGWLYDLLKPYVTELVVCNPRKNALLKEGSKSDRIDAHKLAELLYMSKLSSVYHGEHGLRMLKELSRSYLTITKDLGRVMNRLKALYRGWAIPCAGTQVYAPHYRSEWLSKIREVGVRRRAELYYQQLDALRLVRQQARKELLAEARKHRATKLLRQIPGIGPLRAAHLVALMQTPHRFRTKRQLWNYSGLGLETHDSAQYRVVEGQLQRSKKPVTLRGLNDNHNHDLKDIFKGAAMRASTAAGPLHDFYEALLAKGRKPTMARLTLARKIAAITLIVWKKEVRFDANYLKQQAA

SEQ ID NO: 157071 - protein, 342 aa, unidentified
MSKITTIAVDLGKAVFQIGFADRHGREVRKQRRLTSRDEFRAFIAEVDPRCEVLMEVGWGAQGWARAFRARNIRVRLLPAQQVIAHRTGAKNDRNDVLAILRAGQDASIHAVPVKSAEDQAIQAEHRVRRGWVRRRTAISNQVRGLLADQGMVFAKGDAAFVNGAQGALEDASLPIPDRLRVLIQALLIEWHQLGARIHDSDANLERLARDHPIARMLQQELDGVGPIGATALACKAVELERFADARHFAASFGLVPEQHSSSDRIRLGRMSKRGDSYIRATLVSGAMAVFRYLPMRADNPDTRRLQRWHARHGTKGAAIRLANRNLRIAFSLMRSKKGTST

SEQ ID NO: 157072 - protein, 328 aa, unidentified
MKNYQEVIGIDVSKNKLDAYAYNRSSHREFSNDVKGYKALLQWANGKEQKVFFCFENTGHYSLKLALYLSSKKQVYVQENPVVIKRSSGVIREKNDVVDAMMIARYGWLHREELSPSELKDNELLEVGRLLALRDQLVRSRTGLKNTLSELKKLLSSSSTDTCCKTLVSSITHLTSQINKIEKQLKSLIKTSEALSQNYKLITSLKGVGLVVGAQLLYHTNNFERFNSWRQFSSYCGTAPFGHSSGSSIHKKRKCHPMGDRQMKSLLSMAACTAIQYDSELRQYYKKKREEGKLKMIALNNVRNKLLSRVFAVVKRGTPYVELQRFAA

SEQ ID NO: 157073 - protein, 341 aa, unidentified
MENCGIDLHVKSSQVCVVNEAGQTTERAQIPTTEKSLARWFGGRGPMRICIEASGLSPWVARVLAEFGHEVIVANAQRVRLIAESTLKNDRVDAETLARLVRMDPKLLRPIVHRSEETQRLRGMLRVRRILVTNRTACMNTARGLLRSFGYRLPGGKAERLARGLTTGTVPEELCALAAPLIATALELDERIGILDGEVVEAGRSFPEVERLQQVPGIGPLVALAYVLCIEDPSRFRTSRDVASFLGLRPKMRESAERSRFGSITRAGDAEMRRLLVQAAHGCLRSRQDCDLKRWAEQLAGRVGKKKTVVALARKLAVLLHHLWVSEQAYQPRRTDLAAAA

SEQ ID NO: 157074 - protein, 322 aa, unidentified
MSHHSMIIAGIDTGKGKLHVCLLPTGERFSVNNDEGGIATLVAHCRAAGVVRAGIEATSIYHRAAAQALREAGIETAELQPRQAHGLAVALLKRAKNDTIDAFVIAKLVELLNGPWKQPPAAQLEALAEALTFIDMLDERLVVLKTQRERFTAKRFLAGLDKAIKALEKQRRGELRRLIACLRKDQMLGERLDLLLSIPGLGERTAASLLIRMPELGSLTREQAATMLGVAPFDDKSAERDGQRHIAGGRARLRKTMFMAAFAAAHHWNADLKAFYARLRASGKAHTAAVIACERKLIILANAVLMRGTPWQDRRGMPCLAN

SEQ ID NO: 157075 - protein, 353 aa, unidentified
MRIVVALDVHRRQSTYKTLDRESGEVRRGRIVPATRGAVREWLEELAGCEVEFALEGTTGWRFVVEEIERAGQRAHLADPAETAGKRGRKRRAKTDNADCDLQLKLLLAGELPESWIPPAYLLELRTRVRMRKVLIDQRTAWQQRLQAQLFHQGVAAGLKPRTRAGREALAQAELSPAGRELVALALRMLETIDRELAPLDRALCAFARRQPGCRALIANLYGVGVISATAILAELGDCRRFTSSDDAVRHSGLDVTVHQSDSKRAAGHLSHQGPELLRWALFEAAHQSARRSSPDHDYYLQVAGRIDHNRACLSVARKLCRRAHHILRELGDQALAPVEPEPQAEEAIQAAA

SEQ ID NO: 157076 - protein, 343 aa, unidentified
MTKVYVGIDLGSSQFEIVAMNREGIVVERRSLKTSELNLRSAFSQLRQNKKCELHVHLESGELAGWAREVIAPLVTRVVIGDPRRNAWIANDPAKNDQIDGFKLADLIRMNRVHEVYYEQAKERRIFKQVVQHYEDLTRKQSALKIRIKARLRVQGLIRKDTRVFSQREAILDQLADKQLRAIIKQLYDLLDATEAQRKEALKTMRDMSRQFPEIALLQKTPGVKLINACRFSAYVQNPHRFSNLRKFWRYARLGVVQPSSNGKPIGAQHLDYAGCGPLKDISRKAFEAARRRHDNNSFKRAYEQSLARTGNAAHARLSVQRKILAVMRAVWITGTPYRDELG

SEQ ID NO: 157077 - protein, 316 aa, unidentified
MSGYIGIDVAQVELVVAREGVAGSKAYSNSERGYRDLVKDLKDAQLIVLEATGGYQRGVVAALGGAGLPVVVVNPRQVRDFAKATGQLAKTDLLDAHVLASFGARVKPELRALPSEDEEELRDFLTRQQQVIQMLVAEKSRLLQAQGKGRQALRRQIKSHISYLERELKTLDSDLDQMIRKSPLWREHDDLLQSVPGIGKQTSRILLGTLPELGAASAAEIARLAGLAPMNRDSGKMRGKRWIGGGRPRVRAALYMATLAATRFNPTVKSWYKRLLAAGKPKKVALVACMRKLLVVLNAMVKTKTRWQSPQLTATA

SEQ ID NO: 157078 - protein, 352 aa, unidentified
MKICNESFRSNEKSVEENPLASYCNYVALDWSMDNVCIATMKAASKYPQVVQLEANVELIKEYAQRLAGKSILCFEETTGSHWLYVELKEYFDEIIVCDPYRNALLKEGAKTDKIDAAKLCQLLRSGLIKGVYHSLDSAYEYRQLANSYLQLQKLGTRLKNQKSALYRAKGKRYKKESLHADSDVEDLIYHSKDSLIEAFEREKAAYKKFISNLVRQNRTMRALRDISGIGDIFAFLICAIVIDATRFPDKYHYWSYCGLVMHQKQSGGRDYGQRRGRYHRVLKWVYNAAALAAITNQNDIRHYYDYLLQSGYSTRNAKHAISRYIAKVTWAMMKNKTRYEPYRWRKNMEEK

SEQ ID NO: 157079 - protein, 378 aa, unidentified
MKRVRFVGLDVHAETIAVAVAETDGEVRSLGVIPNRVESIRKLVKKLGPAEQLRVCYEAGPTGYVLYWQLTALGAPCEVVAPTLVPVKSGERVKTDRRDAVKLARSYRSGDLTPVWVPDAAHEALRDLVRAREAAKKDQLRARNRLSKFLLRHGKRPPAGVKSSWTGNYLLWIKQEVHFEQLAQEFTLLDYWHEVEHAAGRVERLDRALEEAVKSAPPPMRAVIEGLQALRGVAQVSAVTIVAELGQISRFARPRQLMGYSGAVSSEDSSGERVRRGAITKTGNAHLRRIVMEAAWSYRHRPAVSRALRQRQEVVCEEVKEIAWKAQHRLHARYRKLTARGKNKGQVITAIGRELLGFIWAIGVQVEGAQKEPLQRAA

SEQ ID NO: 157080 - protein, 392 aa, unidentified
MFYVGIDIAKKNHEASIINSKGELLDKSISFSNSQAGCTKLVSLFGKFEADSSNVIIGMEATGHYWVSLYSYLIDLGFTVYVINPIQSDAFRKMYIRQTKNDSKDSFVIAQIMRFGEFSSTSLADEDIMALRQLSRYRLALVDECSDWKRKCIALLDQVFPEYSKLFSDTFGVTSRELLSKYPTPEDMLNVDTDTLSDLLSKASRGRFGILKANEIQEFASNTFGVNFAKDAFAFQIKQIIAQINFIEDQLKELEVEISTLLHQINGVITTITGIGDILGAIIIGDIGDISRFDSAPQLVAYAGLDVAVKQSGDFIGTQTKISKRGSPYLRRAIWLAATVAAFKDPALSVYYQSLKERGKHHLTAVGAVARKMCNIIFAVLRDNKPYVPHTK

SEQ ID NO: 157081 - protein, 343 aa, unidentified
MQAVTTIGLDIAKSVFQVHGVDAHGKVVVRRQLKRRYVLPFFRKLSPCLVGIEACATSHHWSRELQALGHTVRLMAPAYVKPYLKRQKNDAADAEAICEAVVRPNMRFVETKTADQQSCLMLHRTRHLFVRQQNAVINSIRAHLAELGIVAPVGRNGVEELLDVVADPDDDRVPEVARDCVVALGAQLRMLKAQILEFDRRIVAWHRSNETSRRLDEIPGVGPALATALVASVADPRAFRSGRDFSAWIGLVPKQNSSGGKEKLGSITKRGDRYLRSLFTAGALAVIRYAKIHGTKHRPWLTALLARRPTKVAAIALANKIARMAWAMMAKGERYKEPAALAA

SEQ ID NO: 157082 - protein, 433 aa, unidentified
MSNLSLGRCDVKPLYTQTFTAYVGIDWADTKHDVCLQAVGSEQREFACIPHQMHRIDEWAKLLHQRFGGTIAVALELAKGPIVYALQKYDFIVLFPINPLTLAKYRQAFKPSRAKDDPTDAELALDLLLRHPERFAPIQPQSVAMRSLISLTEHRRELVGDKTRLTNRLTNTLKQYYPQALDWFEQRDTVLFIDFLTRWPTLAQAKRARIDHLKAFFHAHNSRRTKVINTRLESIKSALPLTEDLGVITPCRLHALMLVKQLRVTLQAIEQFDHEIAELAPTLPDYSLFQRLPGAGEHFAPRLLAAFGEDRQRFQHADELQKYSGVAPVTERSGKKSWVHWRWQCPTFLRQTFIEWAGQTINKSFWAGAYYRQQRVKGSSYQAAVRALAFKWIRILHRCWKTRTPYNETTYLNALRKRGSPLLKNLMPDATNT

SEQ ID NO: 157083 - protein, 322 aa, unidentified
MFTFNLGIDVSKAKLDCALRLANGKLRHKVLANSRDGFEALRAWLSHQGVEQYHVCMEATGVYWEAVAEFLVGIEGCTVSVVNPAQIKAFGASRMVRTKTDKVDAQLIAEFCAERNPRPWQPPPAAEQALRALVLRLESLQTMHTQESNRLEVARPVIQAGITSHLDWLDKEIKQLIKQIKDHIDADPDLRDKQRLLDSVPGLGERTIAVLLAFYAQPERFGNARQAVAFAGLDPRQHESGSSVKGKPKISKVGHAFLRKALYMPAMVTLYKTDWGGKFRTRLAASGKPSMLIIGAMMRKLIHVAFGVLKSGKTFDPAMHGA

SEQ ID NO: 157084 - protein, 425 aa, unidentified
MKQETLEPEEFGAYIGLDWADRTHVLSLRSPDSNKVERYKLDHTPEVLAEWVSGLQQRFPGQRVAVALEQARGAVVYALMGYDFLVLYPVNPKTLAKYREAFSPGGAKDDPTDADLLLELVTLHRDKLRAWLPDDELTRTLTLLVEYRRDLVDTQTGLSNQLTSLLKLYYPQALAWAGELTTVQACDFLQRWPTLAKVQQATPAKLRQFYLAHGCRKADVIARRLQEIKLAQPLTRDGAVITASLAMVQATISQLRPVLAAIAQMEKQIAELFSQHADHELFNSFPGAGPVLAPRLLAAMGADRGRFAAAREVQQLSGIAPILERSGKSCWIHRRWACPKFVRQSFHEFAAQSILQSAWARAFYNQQRQRGNGHHAAVRSLAYRWIRIIYRCWQMRVPYCEETYCRALARRPSPLARVLSAQTQN

SEQ ID NO: 157085 - protein, 493 aa, unidentified
MKTPTSSPAAKRRARNVRKLQRQHKQAANPPAKSLDELTPIHRRAAGIDVGSANNFVAIPTEGLAVGESPVGVFGVFSAEQDALVEWLQKHQITTVAMEATGIYWLSLYDKLENAGIDVYLVDPHGVKAVPGRKSDWLDCQWLQKLHTYGLLSKAFRPDLPVRRLRTLTRQRAELVCCGAAHQQHMDKALVAMNLHLSLAISDLVSDTGLRVIQAILDGQRDPKELVKLRDVRCRKSSVAEMEQALTGTYEEEQLFILRQALEGWQFYQKQIEQCDERIHKALAAIPTAAPVTRAAPPKSVPTDPRATATKRAKRPLKGHNAPTLDFTQAVVRICGVDLTKVCGLNLLSVLMLIGEIGVDMSRWRSERAFCSWLGLCPGAKISGGRVLSRRTRKVTNRASTILRLAAWTAGKTNTWIGRFYQRIKARRGPAKAITATARKLACVIYHMLKYQEQFVPLNNSIYELKVQFHRVRRLRREAKAMGYQLVEKEQVA

SEQ ID NO: 157086 - protein, 374 aa, unidentified
MQKNKEYVGVDVSKESLDMAVYSTGEIRSFGNDDASIAKATTWLKQVNPAIIVMEATGGMEISLYVALQEANLPLAVINPRQIRDFAKSMGILAKTDKVDAKVLARYAATIQPEARPLPDEEARQLNTLVRRRCQLVEMIIAESNRATITRDKAMKQRINAHIDWLKQELAGIDKDISQMMKENPVWHAKDKLLQSVPGVGPVLSATFIAELSELGILNRKKIAALVGVAPFNRDSGKHRGERSIWGGRCRVRQPLYMAALSAVRFNPTIRIFYERLLANGKEKKVALTACMHKLLIMLNVMLKHNSYWSCNYAIFNNTCIPDAKTVARWERARVRVKFPPPSTSRRGWEYSRGLRSLFRVCFVAIAPRNDIGV

SEQ ID NO: 157087 - protein, 376 aa, unidentified
MMDETGKVVFKAFSFPNTSDGGNALFSKLTSYSSNTDDFEIGMEATGHYWLSVYSFLFEKKFFLHVINPIQTDGWRRGIEIRKRKNDIIDSVLIADLIRYGQFVETRLADEDLFSLRSLTRFRTYLVESISDLKRKVVCVLDQVFPEYQSIFSDIFGKTSKEILLQFSSPIDFETVSSQTLAELLAKLSRKQVGPAKADQLKAAASCSFGVTFAKSSFTFQLKTLIEQISFIEKQVKETEIEITGIMEKLESPITTITGIGSVTGAAIISEIGDISKFDSPRKLVAFAGLDATVTQSGEFEAAHNVMSKRGSPYLRKAIFQAALVAAFKDPVLSVYYQKKRAEGKHHLTCIGAVARKMCSIIYAVVKNNQPYVPKA

SEQ ID NO: 157088 - protein, 360 aa, unidentified
MNKLTKIEKFFNNVNLTADDNLFVGIDVHKKSYHVALYLNDAPAMDFVMPAEKQQLSQKLKTASVALRQVVYETGSNGYGLARCLNKENLPVFVAATSKIPRLAGPEDKTDKLDSKKLAEYAAKGLLKPVAVSTVKQEADRQLYRMRHRQARNLAKVKTQIKSFLLMHDLQEPAGLSHWNKESIEQLRMLRLQKTLRLSLDELLSDLDYYTLRVNQLNKSLADHLNKGILAQRIELLKTHPGVGIVVACQFATELFHYRDFNSTREVFKYLGLSPKIHQSGNRSVTGSINRVSNSRLRSNLVQAAWRWVAVDITARKSYLRVLNNCGGIKQKAIIAMARKLSGHLWTMLIKKEPYDPGEL

SEQ ID NO: 157089 - protein, 411 aa, unidentified
MGRHTLSCRNASQGGKAMPELFVGIDVAKDTSSAQGIDRNGKGRFSLTFAMDSEGFMQLWKAITAHRKDLLEVSAAVESTACYHINLYTFLTAKGISTVVINPLLIANFAKLSLRKTKTDKKDAMSIAQFLLVHRETISQLSLSQDLQDFRDIARERESVGNLLSAHKVEIKRLLQSTFPELERIGDLSTRVMQEFIAAFPSARLVKAAKPKAIQKILQRKGVGTRLTYTAEDLIQAAKQSVATISPAKELILQGKVRTHEHLRERYEELTKILTEYCKSSMLEDFEIITSIDGISKCTATTFLAEIGCIGNYASYKKLIAFAGIDPTVYQSGKFEGSSRISKRGNRHLRRVIWLMTTCVLQHNATFRAYFMKKRSEGQPFKKAVFATAHKLVRVIFAMLTQRTMFREVCA

SEQ ID NO: 157090 - protein, 360 aa, unidentified
MSIYYIGADVHSNSTELAIEKRGKILARYSVPTNIRAIANVLDSIQGKKHFAVEEGPMSGWLYRNLNKKVDKFISSDPRRNKLICSDGDSDDGIDAVKLASLLRGNYLREVYHSDDDKRSEFKHWVSLYHDRVKDAVRNINKIRSRCRMHGLRMPGSVLKNPANRLKWLSEIKNPALTKQLNMFWIGYDATAKQTRVAKQQLIELSKKYPIIHYWKELPGIGLIRATTLFAFLDTPWRFKKKNKLWKYCGVGLQRSASGTDKKGRPKPARLKLPWAVNRTLKDVVMGAALTAINQKDNVFRDYYEGMVQNGIIKKNAQRSVARKMLTVMWAMWKSNSSYDETLLCIDCEPNSSTAKALSR

SEQ ID NO: 157091 - protein, 344 aa, unidentified
MDNHTQYSGFAGVDLAKKVMQIHFVTGDGEITDKQVKRAEFLDFFRNRTKCLIGMEACGASQDWARKLEAMGHEVHLMSPKAVKPFVSGQKNDYNDAIGIYKAMFNGVRRVPVKSTEIRDLQTLRRIRSQVTKDKVKEINHVRGLLAEYGIVMGKSITAFNKGISSALESLKERGDVSPLVAEELQTTVESIKTKIERQKRSDREIEQLARGCKNYENFLKTPGVGPFTAAMLCVLLCDPAIFANGRQFAAYIGLAPRSRGSGGKNFIIGIPSKFNCDSESRAVFVECAQALARYKNKSPWVDGILRRKPKKVAVIAIANKLARQVWAMANKGESFKQMTILTA

SEQ ID NO: 157092 - protein, 439 aa, unidentified
MRIASSVPMPNEVPIENEIVAYVGLDWADQQHVICWQAAGSAQVQTAVVQQRPEELQAWVAELRQRFPQGLVAIALEQSPGAVIAALMHFDFLRLYPINPKSLARYREAFASSGAKDDPDDAGLLLELLVKHRDRLTPWVPDDALSRQLALRVEHRRQLVNLQTKLIQQLRSHLKVYFPQALDWVGELDSLQACDFLQRWPTLAAVQKARPSQLEKFYHQHHCRRPQLIQQRLEQIRQAQPLTQDPAIVQAYSQMVLALVAQLRVLILTLQQWQQQISQLFAQHPDAALFASFPTAGPVFAPRLQAAFGSRRDRFGSASEVLQFSGVAPVTKRSGKSRQVQRRWARPKFLHQSFVEFTGLSIPHCRWARALYQQLRARGHRHWAAIRVVAYKWIRILFRCWQDRVPYDEQKYLKSLERRNPTLWAAIQQLPAQPSRKEV

SEQ ID NO: 157093 - protein, 401 aa, unidentified
METVRDNGTRIKRFRALKATLRTDRTRLLVGIDVAQAEHVVHLRHAHTRVVVPTLTIPNTTRGFTQLWARIQQAQRSTGCREIVCGLEPTGTYHRALAAFLETQGADVVLISSSVAYWNRRTQDGTWDKNDRKDAANCADLIEQGKILFASQPTGPLAELRQLVRLLRRARTELAACKARWRTTLRPSLAPMGEPLPSRLWAELPAVLQAWEPVAPGRPAVPKGRLPLGVATACTDLGAQVTAVQARITTIEAACTPLAERLPAYALLRTIPGIGPTVGAILVAEIGDVAWFTKFSQLRKLAGLDIVRVQTGQYAGQWRISKCGRGLLRWALYQAAGGLARTTPGRARLAALKAKRCGDRFAGFKAMVELAAKQLRLVWGVWRSGRPYDPTRAGGVQRQRR

SEQ ID NO: 157094 - protein, 402 aa, unidentified
MTEVIIGIDPHKGSHTAVALDRDERTLARLRVRASAGQVDQLRGWAASWPERRWAVEGAGGLGRLLAQQLIAAGEHVVDVQPKLAARVRLLNTGQVNKNDPNDARSVAIAALRAPSVPAITAEGDTAAMKMWARRYRDLGGLWTQTVCRLHAVLCDLVPGGFARRISVPQAIQLLATISPCTPADSARLELARDLVADLQRIDDQRRDVKRRLTKLVAASKTTLTEIHGVGPVVAATVLGFVGEVGRFASRDHFAAYNGTAPIEVSSGNRRVHRLSRRGNRQLNHAVHMAAVTQIRNPGTCGHDYYQRKLTEGMGRKAALRALKRKISDALYNHLVADTQRVSKDPGGQPGNDSVSSAAGSHPAAPTLRTSHSRVSSQPTTAPPIPTQPPHTQAARRTNRTA

SEQ ID NO: 157095 - protein, 343 aa, unidentified
MDQYIGLDVSLKETAISIRQDGKRIWRGKCASDPKLVAEMIRKHAPHARRVVFETGPLSTWFYHELTKEGLPAICIEARHAQKVLNETLNKTDANDADGLAHLAEAGFYKAVRVKAFDSMLTRTLVAARTQLLSISTQLSNQIRGVMKTFGLIVAQGKGRVFDNNVRQLLDGNDGLAKIILPLLEGWRDIRMRAADLGRQLVAAARESQATKRLMTIPGIGAVTAISYVAAIEGPDNFKTSRSVGAWLGLTTRRYQSGEVDYDGHISRRGDPHLRGLLYEAATVILTRTSARNESRLKSWGLKLRERLGFKRAAVAVARKLAVIMHSMLKTGDVFNRLAGATA

SEQ ID NO: 157096 - protein, 347 aa, unidentified
MSITMIGLDTAKSVFQVHGVNETGKVEIRRKLRRSELIAFFEKQESCTVVMEACGAAHHWARLLTGLGHTVKLIAPEAVKPFVKKGKKNDAADAAAICEAASRPGVKFVPAKNVEQQGILALHAARSLLVKQQTMLANAMRGLATEFGVTVPKGIRKLDELMTLVDADENIPKQAKQAITGLHDYCKELNEGIETFEAEIVAHARHDETARRLATIPGIGPITASLIAATVVDISLFKTARQFAAWLGLVPRQNSTGGKTRLGRITKAGNKEIRKLLVLGATSMVGRADGWNSNVGGWLRNILERRPVRLVIVALANKMARIAWAVMTRKEVYRPNGGVAVAAQAAA

SEQ ID NO: 157097 - protein, 393 aa, unidentified
MRISVGIDVAKEVHWTTAVTQDGRVLLDRKVENTAADIGRLAVEVAALKGERLIGIDLYGGIATLLSAMLLAAGERLVHVPGLAVNRSRQGSVGGQAKSDPKDARVIADQLRLRAGDFRPIALEDDTLAELRLLVGRRGELVTDQTRRISRMRYLLNTIHPDLERALDLTNAGPLSLLARYVTAAEIRSAKPKVIARHLRAKAVRNPEALAEAAYEAALAHPNLKLPAEAVTAALIREMAEEAIACRSRLAAIDRRLAELVQAHPDGALIRSLPGMGAVLAAEFLAEAGSISRFRSAAALASAAGLAPVLRQSGKSRRLQRPGYANNKLKRVFYQSAFCSLADPLSRAFYERKRREGKRHHQAVIALARRRIDVLWALIATRTPFSANHRKVA

SEQ ID NO: 157098 - protein, 424 aa, unidentified
MNCTQNERINQVSEQTLVIGVDIASELNYARAFNWRGIEKGKVFKFFNNLEGFQAFNKWAHQVMSANKLTNIMVAAEPTGHYWFGLADYLKDEKLKLVLVNPFHVNRAKELDDNHPSKTDAKDPKTIAKLVIEGRYMEPYIPEGVYADLRIMYNCRQKVTKAMISLENQLKRWFKIYFPEYLSVFGNLSGQGSMAVLEKAVLPEDIISLGVDGINKLWRERKLRAVGMKRAESLYEVAVKSIGRREGSVGGRAEFRMLWEDYCHKMEQMEKLNIELESLLHKVPQAEEVLKMKGIGVVSVAGFFAEVGDLRRFESPKQIQKLAGLAIRENSSGKHKGQTTISKRGRARLRAVLFNAAIALVGRNGAFKSIHEYYIGRKANPLKKKQSIVAVSCKLIRIIYAICRHKEAYDEAKMLRDIRREQLA

SEQ ID NO: 157099 - protein, 457 aa, unidentified
MGDDVMISVDPHKASNTLAVMDPVTKTVIARHRFANSAIGYRRLREFAGGWTDRRWAVEGCHGAGRSLAQRLIGDGEIVLDVPAKLAARVRVYSQGHGRKTDADDAISIGLAALNSTRVAVVRRDDTLVSLRLLCDRRDELGALRTQAVCRLHRLLCELTPGGTHRGLRASRAEQLLAKLRPVDPVDVVRCQLAHQHLDDIRALDAKMTAVRAQIAALVDATGTRLTELYGIGPIIAGRILAEVERIDRFPSRHHFASYNGTAPIDASSGEQVRHRLSRAGNRRLNHALHMMAVTQIRRPETMGRGYYERKRLEGKTPKEAMRCLKRRLSDVVYWQLVADRRATITQCGSATTPTRTRPTSTSATTPVPRIAPLRRPPHPTASTGSSHSTGKTAASSASKSSTPAVGSPKTSSTKQKTRAEATRKPRTNSAAVPDRRPTSAPAAGVKAGTATRRARP

SEQ ID NO: 157100 - protein, 407 aa, unidentified
MTITCGIDWAETHHDVALIDEHGVVLARSRIDTGAAGFSVLLALIAEHGGGVDDTPIAVETDKNLIVVALVEAGFVVYPINPRAVARYRERYGQAGGKSDPGDAAVLAHILRTDRDMHRRLPANTSRASAVKVLARQHQETIWALHQTVSRLRSVLLEFYPQALQAFPNLKHHTATTVLAAVPTPAAAEKLTPTRLTTLLRRCGRGNQPVLAQRILTELRVPALRQPTRVEEAYGHTVRGLVGAVVTMRAAADELEKALACEFDQHPQSDLLRSVPGLGAVLAARILAEIGDDPARFDNPQSLRAYAGTAPVTIASGRSRYVKARKVRNKRLADACHWWAFTILTKSDGARAHYDRRRAAGDHHNAALRNLANKLIGRLWWCLANNQRWDEHGAWPNTTNTEKPTAA

SEQ ID NO: 157101 - protein, 299 aa, unidentified
MEIKRISIDTSKHVFTLHGVDAEERPVIRRELRRSQLSAFFERLPATEVVLEACAGSHHWGRLLSGMGHRVKLIPPQYVKPFVKRSKNDRNDAEAICEAASRPTMRTVPVKSLDEQAATIILRHRDQLLGQRTQTINALRGHAAEFGIVAAKGEAHVKALLAAVAAATDVPPKARAMLARMGQHIDDLTAKLAELDRELSAVHKSNPISQRLAAVPGVGPVTAVTMALSINAEHFQSGRHFAAWLGLTPQEHSTGGKQRIWSWSCPGLVDISGAFGVGRLGVGPFVFDWGLVPESRVAA

SEQ ID NO: 157102 - protein, 424 aa, unidentified
MKTNCDYAAYVGLDWADRVHQVCLRAAGSTRDEQSELKHTPEALHAWANGLRARFPDGQIAVAVEQSRGPVIYALSRHAHLTLFPLNPAMAAKYREAAKAASGTKHDPLDASLQCELVRLHRDWLRPLAPLPAETRELLLLVEARRGLVEQRTALGHQLKAALKGYYPQALELVGHDVGTPLAWAFLRRWPTLAAVQRARPQTLRDFYHAQHVRAADRIEQRLAAVRHATALTNDAAVLATQPVLVAALVAQLEALQPAIDDYDQRIAECFRRQADATLFASFPGAGPQLAPRLLVAFGPDRSRYASAQQLQQYSGIAPVMVASGQTCVTHWRWHCPKFLRQSFHEFARCSIGQSAWARAYYTLQLHRGKTDQQAFRALAYKWQRVLFKCWQDRTPYHEAVYLAALRKHGSSLVPLIEALETAA

SEQ ID NO: 157103 - protein, 376 aa, unidentified
MLYLGIDQHKKQLTVNLRNETGDVLLKRQVSTEWARVREFLEALKKQAVREGGFVAILEVCGFNDWLMKLLVEYGCRETILIQPEKRSKKKTDRRDANTLGEILWLNRERLLAGKPVQGIRRVQLPSEQDAADRQITALRQRLGRLRTRTINKIKHILRKHNLEQECPTKGLDTIRGKKWLTEVSLGSIDRLEMDQLLVQWELWDEQIEKVDAEIVKRQAASKTAAVLATIPGCGAYSSLALASRIGAIERFPRPGSLANYWGLTPRCRNSGEATDRLGSITKEGSAMARFILGQLVLHLLRRDAWTKAWYGRIKRRRGSKIGRVAVMRRLTTVIWHMVKHNEPYVTGGPPRKKAKAQRGSGDERQRRRCPVGSEV

SEQ ID NO: 157104 - protein, 402 aa, unidentified
MNCVGIDISKGKSTIAVMRPFGEVVVSPFEVCHTASELSELARLLKSLDGETRVVMESTGNYHAPVAWLLHGAGLYVSVVNAMLVHDYGNNSLRRGKTDKKDAVKLANYGLDHWLTLPRYVPEEDARLMLKTCYRQYQQYSKVQTMLKNNLISLLDTAFPDANRLFTSPPRADGSEKWVDFVAAFWHCECVCGLSKKAFTTKYQKWCRKHGYNFSEDKALDIYASACGRFGVMPKTNTAKLLVEQAISQLQATSAALAALKQEMQSLAASLPEYPVVMGMFGVGPTLGPQLIAEIGDVRRFHSKKALVAFAGIDAPPYQSGQIDVRSRSISKRGSASLRRTLFLVMGVLLQCAPMDEPVYQFMNKKRSEGKPYRVYMMASANKFLRIYYASVKAYLDSLQHN

SEQ ID NO: 157105 - protein, 359 aa, unidentified
MDKYIGFDIDSKKVIACAVQKGQKEFYSTIAADVQSMRKYLKQQKADGGKVHLTFEISGQAGYLYDSLIDCVDSITVSNPSKMTWIYRTAKKNDRLDSRKQAVLLSIGEIPAVHIPSAEVRQWRNMILHRRNLVNKVTEVKNKIRAVLKSQGFVRPMHRGSLWNRKNRGWLKSLYEAKVSLTGLWCMSLYNLLEQLELLEGQVKRVTMYLDGYLSRQAGGGLLMSIPGVGPRTAEAVLAYTDDINRFGSSKEYCSYFGLTPRLDESGMSRRLGHISKLGPSVVRWVLCESSWKVVRKSKAMRAFYERVMCGQASRKKIAIVAVCRKLLAVMRAMQLTGEMYNEGLVSRECGYEDMKKVG

SEQ ID NO: 157106 - protein, 351 aa, unidentified
MEMVGGLDLHRSQITFRTVDLRTGEVQRGKIHPGARDAFRDWLGGFEPGTDAHLALEGTTGWRFVVEEIQRLGFTAHLADPAELSERRGPKRRAKTDHADCELMVNLVLEGRLPESSIPPAHILELRALVRLRKTLVDQRIEWQQRLQAQLFHQGVVPGLRLCRPEDRRRLTGMEMSPAGRQTMGTGLVMLDDFDAQLVPLSAQLVSLAKSQPGCRALEHELYGVGWLTAVAIVAELGDCRRFHSGDQAVRSSGLDITVHESNGKRPGGHLARQGPAVLRWALFEAAQCAARKASPDHAYYVRVRDHIDHNRACLSVARKICRRACRILKDLGDAAMAPPEPPARRDPKAA

SEQ ID NO: 157107 - protein, 350 aa, unidentified
MLYTGIDYHRSFSYLTTMDEKGEIIGQKKLPSNEEIVEFLKEFGEEMEIAVEATPSWYWLYDHLESEGFQVKLSHPLKTKAIAYAKVKTDKVDSTTLAHLLRSNLLPLSYVPEKVVRLNRELLRYRASLVKIQTRVKNKVHTILAKNNVTHSYSDLFGKQGIAFLHSIPLAENYKIALDGYLTVLDAVRQEIREASKKVRQVAEEDPDTLLLMTVPGMGYYSALLTKSEIGDVRRFRSAKQLCSYAGLVPSTYASGNTCFHGHITKQGSRWLRWILVEAAIHAVKSPGVLRRFYFKVERKKGGQIAKVATARKLLEWIYHILRDGMTYPEMERIADLLGQGEPGNHSGRA

SEQ ID NO: 157108 - protein, 314 aa, unidentified
MSMPVAGIDVSKRTLDVALTGSTARFTQANQAHGHRWIAEELKRHGVRRVGMESSGHYEAALAAFLRKAGFEVAILDPGQVHGFRRFRLKRAKTDAIDAALIAAATAALEESRAPPDERLAALAEHLTFIEQITADIARHKTRRDRFADPAITRFLEAEIKRLTARREKELARLRTRLHPHADLAAKLDLLLSIPGIGLITALALVIRMPELGRTTRAEAAALVGVAPFNTDSGAFAGERHVAGGRARLRRSLYLAAFSASQRWNPILMALYRRLIAAGKHHKIAVVACARKLIEIANAVLARQTPWTDKPLPA

SEQ ID NO: 157109 - protein, 397 aa, unidentified
MLYAGIDIAKRRHMACITDALGNKIAGPFAFDNTRQGFALFTKRMEEACGEVEVVVGMEATGHYWMALFSHLQQAGICACLINPVKTDAWRRFLGSSKVKTDAIDCAIIADAMRIGAFDPSMLACEEIGELKALTRMRQDLSESTSALKCRIIAALDRVFPEYAKLFSDAFSASSKAILKRCPTPKECSKMKASSLERMLAKASRGKCGYEKAQKIKAAARESCGAAFADRAISFEIKSLVAQLEFIERQIDEADLMIRELLDGIEPLVLTIPGISYAIGAQIVAEIGDINRFDNSDALVSFAGLNPSKNESGEFSSTENRITKQGSPYLRRALYLAAQAQLVQGNAFRAFYDRLRGRGKRHRVALVAVAAKIARVVFAVLSKQEPYREGAVGVATS

SEQ ID NO: 157110 - protein, 316 aa, unidentified
MKTYIGIDISKDTFDAATSSQKQSVTLKNSPAGFKKLIKWLGELDTPHIAMEATGKYYLGLALHLYEQGYPVYVVNPYKIKHHAQSQLKRVKTDSEDAKLIAEFCEVHTLKPWQPDSPVISKLQEFSALQDLLIRTKTCFKNQMQSTLDPEVQKSQKRQIEQLEEQIEQVQLQMKACVEQDIDLNKQVELLTTIKGLGEKTAIELVTHIKDIDRFDNAKSLASYSGLVPQIQQSGSSLNRSSLSKMGNVNLRKCLYMPAINSMAYNPVLKSFADNLRKRGVAGKKIVAAVMRKLIHLVYAILKSGKPFDPEYKIRA

SEQ ID NO: 157111 - protein, 404 aa, unidentified
MSLDAHSNPAAIRVQLCAIFVSLELSRSTWLVTSLSPGSGEKMSRHAVMGGDLSGLLALFAVLRCRAQVRSGEVYPIVTIQEAGLDGFWLHRALEAEGIESHVVDAASIAAPRRRQRAKTDRLDGESLLRALLAWLRGEPRVCSMVRVPTPAAEDRRRPSRERQALIAERVRHVNRIKGLLFSQGVGDYEPVRRNRRARLEALRSGDGRVLPERLKAQIGRELDRLELVLEQIKALEGERDALLRAACAPPAAEPAPSAAEAPMPKGGGAPPIPAMLMGLKGIGADFAAVLWSEGLCRSFANRRQLAAYAGLAATPWCSGSINREQGVSKAGNPRLRTAMVQCAWLWLCHQRDTDLAHWFQERVRARPKARKTTIVALARKLLVALWKYVTQGLVIVGAVMKSA

SEQ ID NO: 157112 - protein, 305 aa, unidentified
MFNRFIGVDVAKAKVDVFLSETGELLQIKNIEIDLKRFVQSLERTEETLVIIDLTGGYETQCVKAFYQAGFTIHRAEGRKVKAFMRACGQLAKTDSIDARALADYGKRLQDKLTLFQPVDNEIKPYVMRLNELKQLLQMEKNRLQSPQTDNKIYEQISRHIAFLKTEINLLAKELQQIIEKTPQLHQKQKVLTSQIGIGETTANLLLALLPELGYLPRRKIAALAGLAPYAKDSGTLNAARHVYGGRKEVKRALFICALTAIKRDKEMKRFYEKLIKNGKKKMVALVAVMRKMIIILNAKCKNLS

SEQ ID NO: 157113 - protein, 352 aa, unidentified
MSRKPLPCDVTTIGIDIGKNTFHLIGLDRRGAIALQLKVSRGQLERRIANVPCCLIGMEACSGAHHIGRQLEALGHDVRLIPAQYVKPFLKSHKNDYRDAEAIAEAVQRPTMRFVRIKTPEQMDLLALHRVRARLVGQRTAVTNQIRGFLIERGITVRQGLTPLRRALPEILSATSGPLSPRTVALIADLVADWRRLDERIATVSSDIEALAERDDSCQRLMTVPGIGPVISSAVVAAIGNGAGFKQGRDFGAWLGLVPRQESTGDRVVLGKISKRGNKYLRTLFVQAAHVVLVRRPGTARRGLWPWIVRAAKRLHRNMLVIALANKLARIAWAVLARGHAYQPRTAVNAAA

SEQ ID NO: 157114 - protein, 368 aa, unidentified
MNDCITVVGMDVSKEKIAVAVLPSKMEQITEELMIENHPKAVEKLVKRLASKGLVEFVYEAGPCGYELRRQITEMGHKCAVIAPGLIPVRPGDRVKTDRRDARKLARLYRAGELTDIRVPSREEEAARDLLRIREDILEDRLRAQNRLGKFLLRQGRVHQETKSWGVAHLAWVKAQRFEWEALRQTFQGYVRCWEETNARLQTLDQQVQDLSEREPFRTRALYLKCLKGISTISAMTLLVEVSAFERFSKARQFMSYTGMVASEYSSGNRVVRGSITKVGNAHIRRILVEAAWHYQRKSVLSKVLADRRKGCPETVVGIAKKAEDRLCRKFSRMTGRGKLPQIAAVAVARELSGFAWAIAKHFPTTAA

SEQ ID NO: 157115 - protein, 343 aa, unidentified
MQTITTIGLDIAKSVFQVHGVDAAGQVVVRRQLKRRYVLAFFQKLPPCLIGIEACASSHYWSRELRALGHTVRLMPPAYVKPYVKRQKNDATDAEAICEAVTRANMRFVPTKTPEQQSCLMLHRTRHLFIRQQTAVINAIRAHLAEFGIVAPVGRKGVTELLHVVADPSDGRVPEVARACLAALGTQLLGLKEQIVEFDRLIMAWYRSNETSKRLHYIPGVGPLLATALAASVADPQTFRSGRNFSAWIGLVPKQHSSGGKDRLGSISKQGDRYLRSLFVAGALSVIRYAKIHGTKHRPWLMALLARRPTKVAAIALANKLARMAWAMMARGERYRNPVALAA

SEQ ID NO: 157116 - protein, 347 aa, unidentified
MEQIIRIGMDTSKHVFQLHGVNAAEQPVLRKKLRRSEMIAFFEKLPATTVAIEACGSSHHWARLLGGLGHDVKLIAPQLSKPYVKRGKNDAADAEALCEAMSRPTMRFVQVKSAEQQASLMLMGMRDRLVRNRTQLANAIRGYAAEFGLTAAKGMCKVEPLLDRIAIDPSVPALARELFASHAMEYRQLDEQLDEIDEKLMKWHRANECSRRLAQIPGVGPVGAALLMMKTPAPELFASGRQFAAWMGLTPKDHSTAGKSRPGIITRAGDETLRCTLVVGATSLLQHVRAGRGKNGTPWLLELLKRKPPKLVAVALANKIARIAWKMMMTGEVYRASAALPPQACAA

SEQ ID NO: 157117 - protein, 424 aa, unidentified
MKVTYLTCCGVDVHKSFLVATIVKTTGGIEPSYQKKRFSTFNHSILEFKQWLLENDCHDVCMESTGKYWVPAFNLLEDEINVTIANPKWVKAVKGNKDDTKDSKWIGDLFRLGLVKGSYIPCKKIRILREYTRYRYKLVSCRSSEKNRYQNALTVCNVALDSVVSDIFGKSSTSIIDYLLEQADNSINHEEIASKLLRRLKSKEDAVIESIEGYQMTDSQKYRIRLVRAHMDYITAEINDVDSMIESMISSDPDYENAIQFLMTIPGVKRDSAITIISETGIDMSQFCSSKRLCCWAGLVPGSNESGGKKKSVRIARAGVYLKPALVQCAHAAVKSEKSPYYKKKYESLMKRRGKKRAIVAIARMILTAIYQMLSTGEAWNPSDLYKIDMPEALLEKQKTKAIKQAMKLLQREGLYPPPEPIAS

SEQ ID NO: 157118 - protein, 356 aa, unidentified
MLYLGIDQHARQITISLRNENGDVLQARQVSTQPERINTFFQRLTRERLRDGESFVAVLEVCGFNDWLIRMLRDYRCHKVILIQPDDRKKRKTDRRDAAALSELLWVNRGRLLQGKPVRGQRQVEIASSTDQENRRLTTLRKETGGARTRIINKIKQILRRHNLQWEMPTKTFPTVAAIAWLKGLVLPEIDRMEMNHLLADLEQVEKRLKELEQVIARRSAASKEVAILSSMPGVGGGFTAISLACRVGRIERFPRAHSLANYWGLTPGCRNSGEDNQRLGRITKAGSSTARWLLAQLVHKVLRRDGRLREWFKRIKRRRGSTIARVAVMRKLATIIWHMLSKRKTYAQCRAVAAA

SEQ ID NO: 157119 - protein, 372 aa, unidentified
MNYNTVYVGMDVHKESFTFCAYTIDAEKGSRFQRTEADYKNVLRYLEFLRTVYGNDANFICGYEAGCLGYTLYHQLTEHHVNCVILAPTTMLEQRSKKRIKTDKRDAEIIAKCLAQHNYSPVHIPTAADEETKEFLRMRDDHKLALKKVKQQILAFCLRHNYRYDGNSHWTAAHIKWLKSLKPEALYKEILDEYLLTYTALSDKLERLDKRIEELASKDEYKESVKKLCCFIGVKTHTALSVLVEVGDFHRFASAQNFASYLGLVPGEDSSGDGQTRLGITKAGNRHVRMLLTEASQCYARGQIGFKSKKLKSRQAGNSPQVIAYADKANERLRRRYYKMVLGKSKKPNVAKTAIARELACFMWGMMTDHVA

SEQ ID NO: 157120 - protein, 399 aa, unidentified
MIRDHETVDIFVGLDVGKGEHHAVAVDRAGKKLLDKALPNDEARIREILAGLEHHGRVLVVVDQPATIGALPVAVAQAAGMLVGYLPALAMRRIADLHPGEAKTDARDAFIIAEAARTMPHALRSVQLADEQIAELNMLCGFDEDLTKQVTAAANRIRGLLTQIHPALERVLGPRLDHPAVLDLLRTWPTPAALRHAGRRRIANRLTKLAPRMGERLADEIIEALGKQTVIVVGTNAATIVLPQLAAMLAGLHESRLTVYAQVEALVEAHPLHAVLTSLPAVGVRTAARILTEVAGKDFPTAGHLASYAGLAPVTWRSGSSIRGDHSSRKGNKVLKRALFLSAFAALKDPISRAYYDRKRAAGKRHNQALIALARRRCDTLYAMLRDGTLYQAKTLTTA

SEQ ID NO: 157121 - protein, 346 aa, unidentified
MKTSYQKKNLFGAFDLHSNNCYLAIIDGEDNRVYHQKMPNSPDIILAELEPYKDDLIGIVVESTYNWYWLVDLLMDNGYDLHLANPAAIQKYNGLKHSDDKYDAFWLAHLLLLGILPEGYIYPKNERPIRDLLRKRGHLVSLRTSLVNSLQGTIQRNCGTNLSASKIKASRKDNVSPLLNSNEDLALSGSVSLESIHCLGEQISRIEKVVLNKVKLRKEFEKLHTMSGVGDILALTIMLETGSIDRFRKVGDFTSYCRKVPSKWTSNSKNKGKGNVKNGNKYLSWAFSEAAEFARRYDDLARAFYNRKSAKNNNMVARSALAHKLARAAYYVMRDQVTFDSQKLFA

SEQ ID NO: 157122 - protein, 396 aa, unidentified
MHFVGLDWASRTHAVCIIDDRGAVLAHFEVEHTDLGVDELLERLKKLKEPRLAIERPEGVLVDRLVDAGIHVVAVHPNIVKAARSRYRTAGKSDAGDAYVLADLLRTDGHRFNALVPHAAEIQALRILVRLRKDFVQTRVGLGNQLRATLDAFYPGAVGVFSDLTSPISLAFLRAFPSEAHALKLTEQQLQRFLSEHRYSGRRSAADLLLRLNGAPRTALSGDVAETATVAVLSHVATLEPLVAQIRSLTAKIEARLRELPDANILQSFPGSGGVTAAMITAKLGSDRERFQTPEHFAALAGVTPVTYASGKHRAVAFRWACDHELREALTCLADNSRKRSVWAADMYRRALERGCDHPHAIRILARAWARVIWKCWRENTPYELAKHGQAAKLAA

SEQ ID NO: 157123 - protein, 350 aa, unidentified
MNYSGIDLHKDNSYITTVNKQGRIVNEGRIANEETMLLGYFNSIKGKHKVVVESTSSWYWINDLLKREDIDVTLAHSKYLKAISYAKVKTDKIDSMTLANLLRMELIMASHKISEELRGERDTMRMRLRLVQKRTSCYNSIHRVAEKFNCDSEIDNEEEIVPEKLPEEYKMQVRLLYSQIELLNKQIKELEKMLGPRLIPNEDIQRLLGVPSIGLITAFTIYLEIDGIERFTDVKKFLSYCRLVPGAKNSNKTIKHRSGNKDGNKYLKIAFSDAGVHAKRFYPEIRSYYQKMLHRSNKAIARTLVAKEIAKIVYFILKNKTEYKGFKGKAIIKQKAQRWPRLSNPNGRLE

SEQ ID NO: 157124 - protein, 406 aa, unidentified
MIFVGIDWSEAHHDVCVLDDKGMVLAKGKVGDDVSGVGRLHAMAAEHVEDPSEVVVGIETDRGLLVGSLVQAGYHVYAINPLAASRYRDRHAVSRAKSDPGDAKVLADLVRTDRQNHREVAGDSELAEAVKVLARAHQNLIWSRQRQVNALRNTLREFYPGALRAFTTSQLATIEACSVLAMAPTPTWARDKLTLQRLRRSLSASGRKRNLDRRAKQILHALQAPELSAPALVEQAYGEVVGSLVVVIDGLTHQIAKLEAELAERFEGHPDAEIITSLPGLSSVLGARVLAEFGDDPTRYQDARARRRYAGTAPITRASGTRLVVLARVARNRRLFDACYLWAFSSITTSAGARRYYDAHRARGKTHHQALRALANRWIGILHGCLSRHESYRENVAWVAPVEAAA

SEQ ID NO: 157125 - protein, 340 aa, unidentified
MALYAGMDLHSRNTLVGVINGSFQRVFEKRVPNDLSLIVDTLEPFASRLKGIVIESTYNWYWLVDGLMDAGYSNVRLANPSAVKQYEGLKHTDDRHDAFWLAHLFALGILPEGYIYPKEDRPVRAPLRKRSFLVKHRTAHILSLQSMLEREKGYKLRGNEIKRLKTEDIARIFSQEHLVMSAQANRASIEFLRHHIKRIEKAVRNRVKLHRSFEYLMTVPGIGDILALTIMLEVGDIARFARVGNFASYARCVSSQKLSDGKKKGQGNRKNGNRYLAWAFVEASHHAKRYNERLRSYYQRKCAKRNQAVATKAVCNKLARACYYIIRDQVPFREEALFCS

SEQ ID NO: 157126 - protein, 344 aa, unidentified
MANLNQFCNFTKIIGIDIAKSVFQIYSCDTQTGEITNVQVKRDKVLESFANCGKCLIGMEACGSSQYWARQLQALGHTVRLMDPKLVKPFVRHNKSDKADAEGIYHALVSGVRAVTVKTETERDIQTLLTMRALLVKQRTARINHVRGLLAEYGHVMPRNVNQFDNNVDECINSLEGDAVQLVINMMRDTVKSIRDDQDRIKTLQREISRLANQTRNAKHFLTVPGVGETIMAYMCVLLADPTQFSSARQFAAYLGLVPMHTGSGGKTVTTKIPGRCDKALRAVLVQGAHAVARSKCRTDWVKNILAKKPKKVAMVAIANRMARQCWAVASKGQDWRRMPVTAA

SEQ ID NO: 157127 - protein, 387 aa, unidentified
MYYIGIDISKFKHDCAVIDDSGEIVTPSWSFTNDSEGFAQLKILLDSLDAETRIGLESTGHYGMNLKLFLESNNFSFMEFNPLLINRFVKSKSLRKTKNDSIDCMMIARYLMTVEYKPYPPLLYHIEKLKSLTRFRDSLIRLRSRQLVELTNILDKVFPEFKPFFGSRFSVTALYILSNYSSPEKIANMNSKSYEALRKLSRGRFSTVDFAKLKQLAKNTIGTTEDYLLLQMQIVLDIYRQLDSKVDETEVSIKECVSDMNPPMLSVPGIGIESAAVILAEFGDFSKFKNASQMLSFAGLEPGYFQSGTSETTGKMVKHGSSYLRYTLMNCAQTVVNYEPTFAMFYAKKRAEGKPHRVALSHVVKKLLRVIYTLQLKNIAYDADFVR

SEQ ID NO: 157128 - protein, 411 aa, unidentified
MNAAGIDVSNGRSTVSVLRPFGEVVKLPFNVKHTPSELSKLADELLAIDGETRVVMEHTGRYYESIAKILHEKGLFVCAVNPLLIKEYGANSLRKVKTDKADSQKIARYALDNWADLRDYTPMDTVRYNLKTLHRQFHLSSKQKTAANNNLVALTEQVFPGIRKCFESPVRKDGTQKWVDFITTFWHADCVRKLSLKAFTERYRKWCKRNGYLFKLSNAEEVYELSKNVVALVPKDSVSKTIVQQAAKQLTAISGSVEAYRAEMNNLASQLPEYEVVMNMYGVGESTGPQHMYGVGESTGPQLMAEIGDVTRFERKQSLVAFAGVDPVPKDSGDKTSRSNKASKRGSPYLRRTLFNIMSVILQNAPVDEPVYQFLDKKRAEGKPYYVYMTAGANKFLKRYYAKVVEHLNVL

SEQ ID NO: 157129 - protein, 338 aa, unidentified
MQTYAGIDLHSSNNFIGVINDKDKILYGKRHPNRLDDVLRALDPFRDSIQGVVVESTFNWYWLVDGLQEHGYPVHLANPSAIQQYEGLKHTDDPWDSVWLAHMYRLGILPEGYIYPKEHRAVRDLLRRRLLFVRHSTSHILSLQSMITRNRGLNFDGCQIQRFRDDFIQKMFDCAHLVFTAQKQLATIRFLHRQIKEIEAVVRPQIQLKPEFEKLVTIPGIGDILGLTIMSEVGDIKRFAKVGHYSSYCRCVSSKRLSNGKKKGENNKKNGNRYLGWAYVEAANFCKRNCAGARRFYQRKLAKTNKIVAIKALSNKLAKASYYIIRDQVPFDANKLFG

SEQ ID NO: 157130 - protein, 468 aa, unidentified
MELILGIDVACRAAHQASLARPDGTYVWTGRKFFTRPADLEKLWKVIGLSEQDTVRVVMEPTRNAWVPLASWFRHHGARISMVPTTQSADLRAYYSKHTKNDHLDSKLLARLPLLHPEGLRDHSGDGPGEPLRRLVKIRSSIVKRRTAVFQRLDAQLELLGPAWYDALGSNYGKAALALLARYADPHSLIRLGHARLTRFLIRHSRGAWREPHATLLLTAAQESLQLWGSGANARIDFAELAADIATEAEQAQMLTEQIDDLDERAANLYAEADPRGIIASAPGVGPVTCAVIAGRIGDPHRFHSLAAIRAYSGLVPKVNQSGQAEQRHGLTKAGDPLLREALFAAADQARKSDPQLAAKYKRLMSTERHHDSAICHIATILLTRIATCWRAGAHYVLRDTDGRPITFEEGRRIVRAHHTVDKKTRINAASKRYSQRQKGRTGREQQESLRAPIHRPVHPSIKPTEVA

SEQ ID NO: 157131 - protein, 346 aa, unidentified
MVADEVDFVVGVDTHGDQHALAVVEAGTQRTCRQLTVAASRQGYRQALRLAKRHAPGQRAWALEGSGCYGAGLARFLDSRGERVLEVERPSREGQAGRLKTDALDAERAARQVLAGSAGARPRLAPDTQALRSLLTTREGAVSACTAAINELRALIIISPPELRERLQGQTDAKLLDACVRLRPGQTDSERSAVALALRSLAQRIRQLRSEAKTLEKELARRVRTLAPDLLAQPGVGPISAAAVLIAWSHPGRLRSEAAFARLAGTAPIPASSGKTIRHRLDRGGDRKLNRALHTIILTRKRTDPHTQAYIARRLTEGKSEREATRCLKRYLARHLYRQLEAMPPT

SEQ ID NO: 157132 - protein, 405 aa, unidentified
MNAVGIDVSKGKSTVTIRQPGDVVVLAPRDYRHTQSSINDLITTIKCLEGETKVCMEHTGRYYEPVASWLSAAGIFVSAVNPWLIKDFGNESIRTPKTDKADAKKIARFALDRWAKLPQYSRMDELRNQLKTMNRQFGFYMDQKTAMKNNLIALLDQTFPGANSFFDSPARSDGSQKWVDFVYTYWHVDCVRSKSLEAFTEHYKNWCKRKDYNFNAAKAKEVYLAAADLIAVFPKDDYTKLLIRQAVAMLNVASETVETLRIKMDQTASQLPEYPVVMEMDGVGATLGPQLIAEIGDVTRFKHRGALTAFAGVDPRPNESGDYKRASNPTSKKGSPHLRKTLFQIMDGLIQRSPVDNPVYAFMDKKRAQGKPYYVYMTAGANKFLRIYYGKVNAYLSPTEGAEDS

SEQ ID NO: 157133 - protein, 324 aa, unidentified
MNKNNQIYGVDISKGVFDVVNSTGEHFQFKNNVSGFKSFLKILIKEDLVVMEATGYYHYRLAQFLYEKGIKVSVVNPLSVKRFIQMKLSKIKTDKSDAKAICEYASTNEVPLYTARDKSQAEALQILRLIAIYTKQSTALKNKLHGEKVLGKPSKVVYHSLNRSLKVLQNEIKTLESRLTEIVKDDQQKQLTLLKSIPGLGNKTAIMLIVLTHGFTSFEDASQLCCYAGITPTIRASGSSVRGKSRISKIGNPKLRNLLFMCSFTACKHNKACRDIYERIIAKGKSKKLALIAVCNKLLKQAFAVATSGLPYDENYGGCKLNSV

SEQ ID NO: 157134 - protein, 340 aa, unidentified
MKLYVGVDLHGNNNFVAMVDKKGKRVDQKKLPNDLSIILEFFKPIQKEMVGLVVESTYNWYWLVDGLMEAGHTVHLANPSAIQQYSGLKHADDKHDAFWLAEMLRLGILPEGYIYPKEERPIRDLLRKRGHLVKLRTSLIISLQNIISRNCGVQFRVNEVKRLKEDRVSPLLEGNEDLALAGKASKETIDYLTRQIRKIETWILQRIELKECYRFLLTLPGVGKILALTIMLETGPIRRFAQVGDYVSYCRKVPSRWTTNEKSKGKGNQKNGNKYLAWAFSEAAEFARRHDAQARAYYNRKMRKTNFMVAHSALAHKLARAAYYIMKDQVPFMSEKLFAR

SEQ ID NO: 157135 - protein, 381 aa, unidentified
MIFVGIDVAKNKHDVAVLNDKGKLILKPLTFSNTRAGFNLFINTLSQLKQDYLIALEDTGHYAFNLLDFLHEHGATVYTYNPLLIKEFAKSLSLRKTKTDKKDARTIALKLLSDPNREQFRHDNRKEELKILTRHIHRLKKKQSDWKVQYTRCLDIIFPEIDKIIGKHSDYAYELLSHYPSPQKMSEAGFEKLLEIKRLTMPKIQDILKVAPNFIGTTSEAREFELIEIIENIKHYKRLISKAENKVDELMAEFTSVITTVAGIGNRLGSIILAEIRNIHTFDKPAQLQAFAGLEPSIYQSGQLDTQGKMVKRGSPHLRWALIQAAKSVARFSPAFKAYLRIKLDQGKHYNVAVAHVAKKLVRVLFHLLKNNTPFDESKVR

SEQ ID NO: 157136 - protein, 409 aa, unidentified
MPYRIAGIDVHKKKLAVVVADIEVEDEYQFERRWYGSNPEQLRVLVQWLIEQQVEEVVLESTAQYWKPLWSALERYWKPTCQKREGAGKMSGTLHLAQALSNRGRRGRKKDFRDAERLVKRLVSQELTLSFVPAAEQRLWRTLTRTRYQRRRDRVRLQNQLEALLEEAHIKLSSLVSDLFGVSARRMLHALAEGETDPTALAALAHQRLRATAAELRDALGACTELNPVYRRVVKMALVDLQLIEQQIDQLDQEIASLLREHQDAVQRLAEVPGLGVDSAQQIIAEVGAKAATFASAKNLVSWVGACPGEEESAGVNRSKRSPKGNRQMRRILHQAANAAVKHKGSIFEIVYRRLVVRLGHNKTIGAIAHRLCRLIWIILHNRVRYEERGPTVCEKAKRVRTSRMIRTL

SEQ ID NO: 157137 - protein, 343 aa, unidentified
MQAVTTIGLDIAKSVFQVHGVDAAGQVLIRRQLKRRVVLGFFQKLPVCLVGIEACASSHYWSRELQALGHSVRLMPPAYVKPYVKRQKNDMADAEAICEAVARANMRFVPTKTPAQQSCLMLHRTRHLFIRQQTAVINSIRAHLAEFGIVAPVGRKGVTELLHIVADPSDKRVPEVARACLAALGNQLLSIKEQIVEFDRMIMVWHRSNETSKRLHYIPGVGPMLATALVASVADPRTFRSGRNFSAWIGLVPRQHSSGGKDRLGSISKQGDRYLRSLFVAGALAVIRYAKIHGTKHRPWLTALLARRPTKVAAIALANKLARMAWAMMAKGERYKEPVALVA

SEQ ID NO: 157138 - protein, 467 aa, unidentified
MRQDTVKRTVCPSSKKAKGKAPERLRVMHPDAAGIDIGATEHFVAVPEDRDDAPVRSFGVLTTDLHAMARWLKACRVTTVAMESTGVYWIPVAEVLEGQGLEVLLVDAHYVKNVPGHKSEVADSRWIQELHTFGLLRGAFRPEPQIRVLRAYWRQREDLVEQCARQIHMMHKALEQMNLQLHKVLTDVTGVSGQAILRAILAGERDPAALAAMARPGVKSSPETIAGALTGEYREEQLFVLRQAVELYDVFQAKIAACDCELQQYMARLAPAPVAQTAAPAPAAKRPRRRKNQPHFALAAELVRLTGVDLTRIDGISASTAQTILAECGRDLTAFRTEKHFASWLGLCPNHRITGGKIKRKRTRKVRNRAAEALRLAAQSLHHSRSALGACFRRFKARLGPAKAVTAIARKLACLVYRMLRYGQDYVDQGQEQYEQRYRERQLRCLQKQARHLGYQLISPDTGECVS

SEQ ID NO: 157139 - protein, 394 aa, unidentified
MILVGIDIGKNKHTFSIIDKNSGEILLSPSDFSNNLKGFLFLIPKLSSYTKSKLLIGMEDTGHYHFALLKYLLDRRYTVALINPTTTDLTRKLQGGITKNDPLDSLTICDVISSNHRNKPYRVTTLNRFDLYEQKQLTRHHHNLKEELNTYKNRLQKCIDIVFPEFNSLFHSKYGIVYMNILKAFSSAKAIANADIRSIRKCFEFKGQGKRISLSAEQLKLTAKSSIGIPSVAEEIQIRHLVSQIELLEKQLSEIDKRIEEFSLKNNSPILTIPGISHFSGTSIISELGDICNYTKASQIIKFAGVAPYHYESSQFTAHHTAITKKGSKYLRKTLYQIILPVISNNEVFYAYYTKKLNEGKGHRCAQGHCIRKLLRIIYHLLTTGQQFNPELLV

SEQ ID NO: 157140 - protein, 418 aa, unidentified
MCIKTKKVKWINKKTMIATFDIGKNVHYGYFKAPDGRERKPFCFHNTQKSFKQLWADIFQFKQDHHLEQIVIGFESTGPYAEPLFHFLRKKPVKLVQVNPVHTKRIKELTGNSPNKTDKKDPRVIADVISLGHALTLIVPSGASAHLRRLTQARERALRDRTATSNQLQHLIFVIFPEFLSIMKNISTKTATYLIKHYPGAQNIAAMGVEDLTAIMRKISRGKLAGERAKELIAAAKNSVGICEGRESIFLEIAYLSARIENENDFIDTLENQLDEYLQQIPYSSSIMSVKGIGVVTTAGLIGEVADFKKFDTISELMKLAGLDLYEISSGKHRGQRRISKRGRPLMRKLLFFAAINAVKSNGIMHETYQRMLERGMLKMKALVAISRKLLGLIFAIVRDNTKYIEDYNEKHHYKLAA

SEQ ID NO: 157141 - protein, 401 aa, unidentified
MVSDFRKGRYNLMKIFVGIDIAKLNHFAAAISSDGEILLEPFKFTNDADGFQLLVSKLESFDKNSIIIGLESTAHYGDNLVRYLVAEFYQVCVLNPIKTCQMRKNNIRKTKTDKVDTYVIAKTLMMQDDLRFVSFYDLDMMDLKALGRFRQKTIKQRTRLKIQLTTYVDQVFPEIQYFFKSGLHQNAVYALLKEAPSPKEIASMHMTHLANLLKVNSHGHFTKEQATELRVLAQKSVGANDSAISIQITQTIQQIELLDSQLKKIEAEMTDIMKFNDSVIMTIPGIGYINGGMILGEIGDIHRFSNPNKLLAFAGLDPSVYQSGNFQAKTTRMSKRGSRVLRYALVNAAWNVVRNNATFKAYYDAKRAEGRSHYNALGHCAGKLVRVTWKMLTDEVEFSLE

SEQ ID NO: 157142 - protein, 339 aa, unidentified
MNKLYGGIDLHANNSVVVVLDEEDQVQYRKRLPNELEQILQQLAPFRAHLQGLVVESTYNWYWLVDGLQAEGYCVHLANPAAMQQYAGLKYTNDDTDARWLAHLLRLGLLPTGYIYPKEERAIRDLLRKRSQLVRQKTANLLSIQNLLTRNTGQALKGTQIKQLTPSTVRALVALPEQALALEVTVAVMQHLAEQITQVERAVHARVKLRPTFQSLLTVPGIGQTLALTIMLETGEIDRFPTVGQFASYCRCVGSTKLSNGKRKGQGNPKNGNKYLAWAFVEAAHFAIRYEPQIAQFYQRKRAKTKVVVALKAVAHKLARACYYLMRDTVPFEVTRAFA

SEQ ID NO: 157143 - protein, 342 aa, unidentified
MDYFAGLDVSVKDTSVCIVDDTGKITREVRVASEPDALLAVLTNRSYRFKRIGLEAGPLSQWLFSALAEAGLSVICVETRHMRAVLKAHINKTDRNDARGIAQMMRVGLYRPVHVKTLRSQKLRMLLTHRKLLQSKAIAVENDLRATLRNFGLKVGMVGTARFEARIKELVENVADLVVLVEPLLVVRRTLREQIGVLHRRLLAIVRDDAACRRLMTVPGVGPVVALTYRATVDVPARFRKSKSVGAVFGLTCSRDQSGERDRPGAISRCGDEMMRAMLYEAAQAMLLRSTKWSWLKAWAMQIAKRRGMKRAIVALARRLAVIMHRIWVDGTEFRWTRQVTA

SEQ ID NO: 157144 - protein, 421 aa, unidentified
MKKADTGKVKFVKEDALIVAVDIGMEMNRGYCTTPDGRSTKTFKFANTREGLDALWGMIMTSKNRFKCNEVIVGYESTGPYGEPLVHYLMKKPVMLVQVNPMHTKRVKEISDNSPLKTDDKDPRVIADIIKLGRTLSIVIPEGDAAYLRRLNNSRERHVRERTALVNQLQQLVFLLFPEFRTVIKDIKCRTPLYLLKKYPTPEAISGLDKQLLGEEMRTRSRGKFREHHADMLINLARTTIGIREGVPGLSMDIRHILVQLEMLKTLIAEIEGEMEITLGRIPYSSKLLSIKGLGVISVAGIIGEIGDFKKFGTQSEIMKLAGLDLYEISSGKMKGQRRISKRGRSLLRKILYYAAIQTIRKNGILHDYYTKLTDRGMKRMMALVAVSRKLLGIIYAIVRDDSEYSVNFESMKRQVIKKAA

SEQ ID NO: 157145 - protein, 325 aa, unidentified
MSQNNINKVNTNTIHAGIDVAKATLELDLGGTIYNLANEAKDHTRILKLLAAVEKAQPGSKVHVIIEATGGYEAALVRVLHEAAQPLSVIQPSRVRHFAYAKNQRAKTDPIDARVLTDFGQAIRPAPTPPPSAAQIHLAELVNRRAQLVETRSAQLNRAAHYTDKLLCRQSRQLLALLDRQIAACDKAIAKQIAADEIMKGRAERVQQVAGVGPVVAAVLQAEMPELGTLTEGEAAALAGLAPYNCDSGPRKGTRRIWGGRAPVRCALYMAAMTAVRHDPILRAFYIKLCAAGKKPIVALTAVMRKLVVLLNRLLKNPQFKLSAG

SEQ ID NO: 157146 - protein, 339 aa, unidentified
MQVTTVGLDLAKNIFQVHGVTDGDEVAFNRALRRAQVLPFFERLDPCLVGIEACGTSHHWARELIKLGHTVKLIPPIYVKPYVKRGKSDAVDAEAICEAVTRPTMRFVEVKTPAQQAILALHRTRDLIVRQRTQTINMLRAQLAEFGIVFPQGVGHATQFAKRVLEGEQPDLSEAAGDVIAQLSEQLLFLHGKVAWYSLEMTRVAKREDRVALLQTIPGIGPITASAIVATVGTGRQFNNGRDFAAWLGLTPLNRSTGGKERLGRISKMGDRYIRRLLVIGMMSRMRQIMQNPERYDPWFADILARKPGKVAAVAMANKTARMVWAVLTRNEPYKVRTI

SEQ ID NO: 157147 - protein, 428 aa, unidentified
MSQKDYSRQVAKRQRIKKSTLIVGVDIGKAFNAVGFMDKDGNVLNSCPKLYNSREGFEECINLIEGLKAKHHLKDVLIGMEPTGHYWRKLAYFAKDHGYEVRFVRTTALKHHREIDESSSAKSDRRDALTIANITREGKYIDTVIEDGPLRQLRTLSKARERLLRYSVSAKNSLHAALDDYFPELHEMFWSMGSRSLWAILEQSPFPQDVLLMKESTLKELIAQSSRKKAGSAQKAKALCDAAQNSIGVKQIGGADRYRIEMCLEEVKRTVMTLKNIDMQLKRMLKEIPSAPYLMSIPGIGPLSAAVFLGEIGDPVNFHNARQLVKYAGYDPQESDSGSRIGRRFISKKGRWLLRKYLFFMSMRVVVLSKYFQEYYLRKLETKNRFGQHPRRKEMLCAVVIKLIKVIFALLRDKRGFEDLAPVALAAA

SEQ ID NO: 157148 - protein, 415 aa, unidentified
MFSLRYSSFRFYLLSLNWNQKNPLWYLEFKREKGQKVMSDVKFFNVYLKFKRMRTNQMFIKQSVGIDVSKDTLDVSICCLNNHIEICNIAQATFENSKKGVIGLENWIRNHSIKDLDYTVVVEATGIYHETLAYHLYEKNIKIAIVLPSKISAYFKSTNKRSINDKISACLIAEFGLMRKLDTWTPPSPCLRKLKVLVRERLRLIEMRTMVKNNEHVYKYAANATGTAQERICELKNMLNKQIKEIEEEIRVILSENPELYEKVKRICTIKGVSLITVVTIVAETNGFSLIRNARQLVCYAGYDIVKKESGTSVRKGGNISHRGNKNIRRALYFPAITAQQNNTFFSNFYDRLYNRHSIKMKAYVAVQRKLLILIYTLWKNNEEYNPEKHQIYKFLEQPNQAALIELDHCPLFVD

SEQ ID NO: 157149 - protein, 375 aa, unidentified
MTKIIRIGIDTSKSIFVLHGVDAAEQPVLRKKLRRSQVLEFFAKLEPTKIGLEACGAAHYWARELTALGHEVVLLPPQYVRPYVKRGKNDAADAEAICEAMSRPTMRFVPVKTVEQQAALMLAGTRDALIRRRTQLTNAIRGYAAEFGLTAAKGLDKIEPLLARIAAAAELPRLAQELFAGYGKEYAQLKVQIQKIEAKLMAWHKDNELSRRLVEVPSIGPIGASLMAMKVTDPHAFRCGRNFSAWIGLTPKDHSTAGKTRLGVITHAGDESLRSILVVGATSVIKQVRRGKGHPSPWLVELVRRKPPKLAAVALANKTARIAWKLMVSGERYNPAAAARAGRGSPLTRGCAPRPALAARIRSRGAALPAAGTEA

SEQ ID NO: 157150 - protein, 347 aa, unidentified
MKVSIRVDPHKASLAVAALDEATGELLERASFPQSRVGLRSLERWAERFPERRWAVENVGGLGRHLAVRLAGSGESVVDVAPKLSARVRVLSTDNARKNDGIDALATALAASHSERLAAVDPEAASEVLRLLSERREDLVAERTRALNRLHGLLRDLLPGGVTGKLSADRAARILRSIRPKGCASALLRRRLASEILHDVRTLDRKIADLSGRIEAEVEASGSTLTEIFGIGPILAARIIGTVGNVARFPTKAHFASYAGTAPLEASSGEVVRHRLSLGGNRKLNYALHMVALCQARSDARGGAYYRKKIAEGKSHKEALRCLKRRVCDAVFKSLMADSLALSRCAA

SEQ ID NO: 157151 - protein, 348 aa, unidentified
MTEQLMAGIDLHSNNLVIGIMDQSGQRLKHQKLDCNLQQVEQFLAPFKAQLKSIAVESTYNWYWLVDGLRARSYPVVLANPAQIDQYSGIKHADDKNDAYFLAELQRLNILPTGHIYDPVLRPVRDLLRRRMSLVHQRTALMLSFKSLYARTTGQTMSLSRLKSMEMAEAKTLYEHPANCLIATVQKEHIEKLDQSLERIEKAVLQSARELPCYERLNTLPGIGRILGLTVTMEVGEIKRFKTPGDFASYCRTVDSKRLSNGKKKGDNNQKCGNKYLAWAFVEAANFAKRYDEHCRKWFDRKAAKTSTVIATKALACKLAKAAWHVMSQGTDYEAKRMFPELALKTTT

SEQ ID NO: 157152 - protein, 391 aa, unidentified
MIYVGIDVAKDKHDCFISNSDGEVLFKPFTITNNRKGYEELYSRICSSTEHLSNVKVGLEATGHYSYNLLGFLVDKGLASFVINPLHTNLYRKSLSLRQTKTDKVDARTIASMLMSDVNLKSYSDSSYHNEELKSLTRYRFDKVKERAKLKTSISRLVVILFPELEKMVPALHMASVYALLSEFPGASKVASAHLTRLANLLETASKGRYSKDTAVRFREAARSSIGSDMPARSLELKHTIKLIQELDAEIAEIENEIKIIMDEINSPILTIPGISYRMGAMIIAEIGDFSRFDSPDKILAYAGLSPSTYQSGQLDSSYSHMEKRGSRYLRYALFNAAKFVCHWDPTFAAYLAKKRAEGKHYNVAVSHAAKKLVRVIYQLEKSGQIYIKAA

SEQ ID NO: 157153 - protein, 403 aa, unidentified
MKHVIAFDISMGKSYMVVYNGLKKCELEKEIEHNRSEFIELKVLINNLMDGYGEQPHIVFEATGVYSRPLERFMKENNYRYCLLNPLEAKLQCDSLRMHKTDRSDAHQLALTHFTNERRIETESADVYRQLKRLSRLYSELDDELSVARSRMHKVIQETFPELEKIFTTKSELFLNVVQLYPHPDLVLNQSKTVIKNRILANTNKRLSVKKAEEKAVELLEAAKQSYPAASSTDVLCDQVILYAKRFQELIHQKEQCINRMESLVEELEEYKVLRSIPAIGANTAVRLIAEIGDIRRFDNNKQLNAYAGIDIRRHQSGKFLARDKINKRGNKHLRKILYLNVQNMIKQRRFGENHIVEYYDKLKKQPYNKCHKVASIACVNKLLKTVFFLVTHNQNYDNRLAP

SEQ ID NO: 157154 - protein, 347 aa, unidentified
MTIVGGFDVHRAQITFDYLDTDTGEVTRGEIRPATRSVLQTWFGRFAGRADVAFAVEGCTGWRFVVEEMVAAGIRPHLAEPADTATQRGRKKRAKTDRADARLQRELLCQGRLPESWIAPPHVLEVRTLVRLYVALMGERRTWQQRIQAQLFHQGVPTLRGLLTQEGRATLASAALSPAGRQMVDTALAMIDELGERVVPLRAQLQAIGRRQAGARSLTAHYGIGALCAAIIWAELGDPRRFSRSDQAVRFAGLDVTVWSSDSKRAAGHLSRQGSAVLRWALFEAAQSAARASSPDHDYYTSLADRLGGKRPALSVARKLIRRCYHTLRELGDDAWSTTGAALQEAA

SEQ ID NO: 157155 - protein, 322 aa, unidentified
MDKSTKIIGIDISKDTFDIWSESLGHEKYENTQKGFRRFYKLLDDRTYCVMEYTASYYQKLALFLYEKQIQVSVVNPLTVKRFIQMKLQRNKTDKSDSKMIALYAKEQDVKLWKPAADYIEQCSFINTTISVYFKQTTALKNKLHSFNSIGVKGKVLTSLKRQLRNIKNEITELELILEQLIKENEPELLTNLTSIKGIGKKTAILLIVSTDGFTKFENARQLSSFFGLAPTEISSGSSVRGKNRISKKGNGMVRNHLFMCSFTASQTNLQCINLYNRIVAKGKSKKLALIAVCNKLLKQAFAVAKSGIPYDPYYKSCIPTI

SEQ ID NO: 157156 - protein, 407 aa, unidentified
MSDVFALDVSKGHSTGTWYRDDQCLKEFVCTHDQVGFAQLYQMIKQADNPVVYFEATGIYSQPLVRFCQDHELRYCRLNPLELHLNSEKLRRVKTDRKDAHKIALSVMHHQYRLTTPWTPEYEQARQLSRFYQQIIKDVKHTRLELYSALQQTFPEVEELFSSRVSKLALNVVLLFPHPDFVRGISRTCLKNKLMSQTDKKLSKAKGLQYAEKLIAFAKNSYPSADADSVQVQEVRYYFRRLIELAQQEDALRKQLIAAAKPQAEFQLYQSVPGIGALSAAQLVGELGDILRFDNSKQLNAYVGIDLNRYQSGEYTRQDHINKRGNSHARALLYVIIQNMIRKQAAAPNHIIDYYYKLKKQPIPKLDKVAMVACMNKTLKCLYAMEMTGTKYRYRYTDSKSTNHTES

SEQ ID NO: 157157 - protein, 358 aa, unidentified
MQSVTRVGIDLAKMFIQVHAVDAVGKLVCNKQLSRDKFIAWCNQLPAGCLVAMEACSGSHAWARKLIALGLDAKIIAANHVAPYRLEGKGGKNDANDAAAICEAASRPSMRFVPVKTLSQQGMLCVHRYREGVKEERTANINRIRGLLAEFGIIAPQSPNKLRERLAEIIEDADNDLCGIARMVIQEAFSHWDEIDKQLEWCAQRISAHVKENQQAQTAVQLMGVGPVTASAAVVTVGDFKQFKNGAQFGAWLGLTPRQNSSGGKTKLGRITKRGDVYLRMLLIQAAKAAVMTAHKRDDPISRWLLQLREKSGWQKAAVAMANKNARILWAVMTKGCGFDPRYVSVKPSGGGSIAAAI

SEQ ID NO: 157158 - protein, 341 aa, unidentified
MDTISLIGIDLGKHCFHLHAQSASGRTVLRKKLTRNQMFTLLGNVPSCIVAMEACAGAHWIARRLQALGHQARLISPQYVKPFLQGNKNDFADAQAICEAASRPSMRFVSPHNETQQTISALHRVREALVRDRTGTVSQIHAFLLEFGVSLPKGAAVIRRLPVVLAAHELPPQLVALLERLQAHFKYLDEQVRQIESELIRQLREDERSQRLLEIPGIGPITASVLAMELGDARQFACARQFAASIGLVPRQYSTGGKPMLLGISKRGDKNLRRLLVQCARTVMLQIERRTDRLGTWVRGLLMRRHSNVVACALANKLARIAWAILAKGTHYQGEQAVAAA

SEQ ID NO: 157159 - protein, 418 aa, unidentified
MEVLHERCAGLDVHKNTVVGCVRVARGGRVEKEVRTFKTTTKELLALADWLDGHGVDHVVMEATGVYWKPVWHVLDDGERELVLANAAHVKNVPGRKSDVSDCDWLCDLGAHGLIRASFVPDSPTQDLRSLLRTRKQLVRERTSHTLRLQKTLEDANVKLDSTISNIIGLSGRRMIEAMVAGESDAKALASLADRRIKASPEELCEALRGRVTKHHRFLLGLHLGHIDAIDSAIDKIDQEIEANLEPFCDGVALLTTIPGVNDLAARGIVAEIGLDMSHFRSCGHLLSWGGLCPRSDESAGKHRSTRVRKGSGWLKTLLVQCAWAATRSKATYLHSQFVRIRARRGAKKAIVAVAASILTAAYHMLSTGTVYRDLGPQHLKLRNKQARAKRLIASLRRLGYAAVLQPVQPAPPAAVSC

SEQ ID NO: 157160 - protein, 373 aa, unidentified
MSDGITFVGLDVHKNSIQVALLPPDGAKPVEWQEVHTTESLRRLSRRLLREAAGEIRCCYEAGPTGYGVQRRLTAAGIPCLVAAPSLIPIRPGARVKTDRRDALKLAELLRAGLLTEVQPPNERDEALRDLCRCRDDVRLDLARSRHRLSKFLLRRQCVFRESKHHWGTRHMAWLRRLQFEEAVTQAVLDSYMLTVEHLSERQQQLELQMGEFGACEPYGEPVAWLRCFRGIDTVTAVSVVAELHGFERFRSPRGLMAYLGLIPSEHSSGETERRGSITKAGNRHVRRLLVEAAWHHRHRPAVSAPLRKRREGQPAWVIAVADRAQERLHRRYARMMARGKPRAKVIVAMARELAGHLWVVLYKHAYRQTEPE

SEQ ID NO: 157161 - protein, 340 aa, unidentified
MSEITTIGLDLAKHVFQVHGIDAQGTTVLRKRLRRGQVLAFFSRIPRCVVGLEACATGHYWARELRALGHEVRLMPAQYVKAYIKRNKHDAADAEAICEAVGRPTMRFVPVKTAEQQATALLHRGREQLVRQRTMLVNALRAHLAEFGIVAARGLRNVSQLIAIVRDDADIRLPAVAQQVLQVLANQIEQIETAVAALERQLLTWHKTNPVSQRLTSIPGIGPIIATAIATTVADPRVFRSGREFAAWLGLVPRQNSTGGKTRLGGITKRGNRYLRRLLINGASANLLRSKATKADPWVIGLRRRRPPLGVAVALANKTARIAWAVMLREKEYQPRAMAA

SEQ ID NO: 157162 - protein, 260 aa, unidentified
MEIVRIGLDLAKNIFEVHGVDAEDKAVLRNTLRRDAVAQFFADLAPCIVGMEACSGSHYWAKVFADLGHEVRLISPQFVRPYVKSNKNDRNDAEAICEAVSRPSMRFVPPKSSEQLETQAVHRIRQRLVSDRTRLVNQIRGLLAEHGLVVARDISRLRYALGRIADGTDNNLGHIISELACDVRDELSELDQRIAAYNKRIRDLFRSNEMCQRIGKIEGIGPITATALVAAVGDRTCFKNGRQFAAWLGLIPKQRSSGGK

SEQ ID NO: 157163 - protein, 343 aa, unidentified
MQTITTIGLDIAKSVFQVHGVGAGGQVMVRRQLKRRYVLTFFQKLPPCLVGIEACGSAHHWSRELQALGHAVRLIPPAYVKPYVKRQKNDATDAEAICEAVTRANMRFVPTKTPEQQSGLVLHRARHLFIRQQTAVINAIRAHLAEFGIVAPVGRHGVEELLTVVADPNDRRVPEIARACLLAFGAQLRRIKEQILEFDRLIRAWHRSNEMSMRLEEAPGVGPVLATALVAAVADPKSFRSGRNFSAWIGMVPKQHSSGGKNRLGNISKQGDRYLRGLFVAGALSIIRYAKIHGTNHRPWLTALLARRPTKVAAIALANKIARMVWAMMARGERYKEPAALAR

SEQ ID NO: 157164 - protein, 410 aa, unidentified
MEVVHAHCAGLDVHKDTVVACVRHMTDGKVTTTIKTFNTATQELLALSDWLSAENATHIAMEATGVYWKPVWNILSDGEFELVLGNAAHIKNVPGRKTDVKDAAWLADLMAHGLVSGSFVPDQTTQEMRDLLRTRKQLVRERTSHTQRIQKTLECANIKLDSVVSNVIGVSGRRMLEALISGQTAPKELAAMAHGRLQATPAELEAALRGRVTAHHRFMLRLHLDQIDSFDEAIARIDKEVKDNDKNFRAAVELLKSVPGVGSLAAEVIVSEIGIEMNRFATAGNLVSWAGLCPKNDESAGKRRSNRLKAGAPWLKTTLVQCAWAAARSKGTYLHAQYVRIRARRGNQKAICAVAASILTTVYHMLKDGTLYEDPGPDYFDKRNKDQQANKLVNRLQNLGFNVTIQPAVA

SEQ ID NO: 157165 - protein, 342 aa, unidentified
MESTRHIGIDLHRNCFTACVRLENGRNYLTEWRLEQLPKFVAKLRPNDEVAVEVTGNTRLFYDAVAPHVKRVVAVNPNQFQVITHSVKKTDPNDARNLALYLAKDLLPEVRMKDKTRAQIASLTQTRDTMVKLRTALKNKINNICSAHGVNLSKESLASEKGLKAVLEMPFDPLVELELKILVEQIRSLNKSIAELEETISRESQKLEGHKHLTSIKGIGGLSAGILLSIIGDIGDFADEGKLAAYFGIVPRISHSNETEHSGRITKRGTKLGRTTLVQCALIAQRYSPYLKNYYERKKSRGTGKAIIALARKFLGIIYRTLKNKWLFEDFPNFVLAEEATA

SEQ ID NO: 157166 - protein, 354 aa, unidentified
MPRKTTSLEAVATIGIDIGKNTFHLIGLDKVGAIVLRQKLSRSQVDTRLANMPPCLIGMEACVGAHHLSRQLKALGHDARLMPAQYVRPYSKGQKNDFRDAEAIAEAVLRPTMKFVAIKTVEQLDLQGLHRVRERLVCQRTSVINQIRAFLLERGIAVRQGLRALRTAMPNVLATTDKLSPRMIHMIEDLCTDWRYFDARIATVSNEIETLSEQDDGAKRLMTVPGIGPIISTATVAAIGSGDVFSKGRDFGAWLGLVPRQMSTGGRTVLGPISKRGNRYLRMLFVQAARAVLLRPQSWEKHGLKSWIEAAARRLNRFKLAIALANKIARIAWGVLHGGRNFEVRSMRTAPQAG

SEQ ID NO: 157167 - protein, 310 aa, unidentified
MGNIIVGIDVSKDRLDVAVRPTGEVFAVERNAAGIDRLIARLEELSPRLVALEATGGFETVVAAALAAARLPVVIVNPAQVRAFAKAIGQRAKTDPIDAGVIAHFAEATKPEPRPLPDEATRSLADLVARRRQIIEMIGAERQREKRVTVPRLKKSITRLLKALEKELATVDTDIDDAVRGSAAWRGKEDLLASVPGVGPTIARTLIAELPELGQLGRKEIAALAGLAPFTRQSGQWRGRSFIGGGRPTVRSAMFMGAMVAKQHNPILKAFFDRLVAAGKPKMVALIAVARKLLTILNAILRDNRPWQTA

SEQ ID NO: 157168 - protein, 371 aa, unidentified
MESIIYVGMDVHKDTYSLCSFDAKRNLLFSQTQMKSTTGNVVRYLKKVSEMNNDALTVSGYEAGPTGFRLCRELQKQGFACVIIAPTSIARTVKDKAVKTDKSDAQMLAKTLAFHSYKEVVLPSENIEAIKEIVRLRKSALKVCKRSKQNLLSFLLVHGFSYSEGKHWTVKFSSWLKTIHFESEYLTYCFEEYLSEATRQIQRLALLDKKLKELEDDEEIRDGVKKLKCICGIDTIAAVGLAAEVGDFNRFKTAKNFANYIGLCPGRHSSGLTDRGTGITKQGNRYLRTLLIEAAKSVKRSAPHGHKSKRILSRQEGSSSEIINYADKTGTRIRMKMNHLELRALHCNKAATAGARELACFAWGMMTGNIS

SEQ ID NO: 157169 - protein, 351 aa, unidentified
MTMVGGFDVHRKQITFDYVDDDGLVRVGEIRPATRTTLRHWLSEHCPAGDAEFALEGCTGWRYVVDELATAGVVAHLGDPAEIATLRGPKKRAKTDRADARLLRTLLLECRFPESWIPPAHVVEVRTLGRLYCTLMDERRAWQQRIHAQLFHQGCPPIRALLSVAGRDALAQAQLSAAGRQYVDTALRRIDELTVEIGPVRGQLVSFARRQVACQALQARQYGVGWLCAAIMWAEIGDARRFSSSDQLVRFAGLDVTVYSSADKRSPGHLSRQGSPELRWATFEAAKCAARHGSPDHAYYQRLATKHDGHNGKNPTLAVERKILRRSYHTLRELGDAALAMPVPEEQGVAA

SEQ ID NO: 157170 - protein, 349 aa, unidentified
MKKIIKQVVATDVAQAELVVSLGRKHDDLSAEVYAHRTFPNSIKGFVALISWVKKLTDETAAVRYVMEATGVYHERLAYFLDENGYEVSIVLPNKISNYFRTLDVKTITDKTASEAIAGFGLERELVRWKRPGQVFKKLKQLTRERDQIVSERTMVKNQLHAERAEAEPNKSTITRAEKRITILNKQEKEIRTEISQLVKGDQGLNQNITLICTIPGVGILTAATVLAETNRFDLIRNKRQLVSYAGLDVKEKLSGTSVKGKPKISKKGNKYLRKAMHMPALAAIRHEERYKAIFRRLVSKHGIKMKAAVAVHRKLLEMIYTIYKTKTAYDKNYLQKVKVNHDQQEILA

SEQ ID NO: 157171 - protein, 333 aa, unidentified
MLSAISGYRTRAANLGHKIERVIAVYEAGWSGFWLARWLRRHGVEVYVIQPSSVPVDRRLRRAKSDSIDAELLLRTLLAWLRGEPRVCSMVPIPDEADEDARRCVRERMELVSERVGLTNRIGAVLATLGVGDYNPLLRNRRCRLAQLRTGLGEPLPPNAHAKILRLLDRLELVLAQIAELERERDAVMETEAPDKASKMIQQLTKLRGIGVQSATVLVREAFVRRFANGKALGSYAGLASSPYSSGGMDREQGIGKAGNRRVRTVMVELAWLWTRYQPASAQVCWFRERVRSTGQRVRKIILVALARKLLIALWRFVIDGVVPEGAVLKSAT

SEQ ID NO: 157172 - protein, 370 aa, unidentified
MEQYTEAFVGIDTAKNKHALAIADLGREGEVRYLGEIDSAPAAVERMIRKLAGRYGKLYFCYEAGPTGYGLYRQVRALGHDCIVVAPSLVPKRPGERVKTNRRDAVTLARLLRAGDLTPVWVPDTVHEAVRDLVRAHAAASQDLRRKHQQLLSFLLRHGRIYSGRKHWTKPHLRWLAQQKFDHPAQQIVFQDAVDTIEDAATRLRRLDEQLAAIVPSWSMAPVVEAYQAMRGVSFAVAVTFVAEIGDLQRFDNPRQLMAFLGLVPSERSTGERVRRGGLTLAGNKRARRVLIEGAWSYRHPARVSQTLQARLEGLPKAVRAIAWKAQIRLCARYRRLTAAGKKRPVVIAAIAREMAAFLWAIAQHVAPTA

SEQ ID NO: 157173 - protein, 306 aa, unidentified
MEKVTTVGIDLAKSVFSLHGVDAAGKAMFRRTVRRDRLLETVAGLSPCLIGMEACSGAHEWGRRFQAYGHTVRLMAPKFVAPYRKSGKNDGNDAEAICEAVTRPNMRFVPVKSVEQQALLAMHRVRQGFVVERTATINRPRGLLTEFGVVLPLRSVTVRRQAAAAAEGLPELAKRAIGDLLEQLRVLDERIGSYDREIEAQAKLSEPAQRLMQIRGIGPTTALAIVATAGNAREFRNGRQFAAWIGLVPGQYSTGGKTRLGHISKRGDAYLRNLLVQGARSVLNSAGMHQNRMSRWILELQSRRGY

SEQ ID NO: 157174 - protein, 285 aa, unidentified
MLYLGIDQHARQITISLRDDGGDVLQARQVSTQPDKINAFFRQLTRERLHDGESFVAVLEVCGFNDWLIRMLQEYRCHKVILIQPDQRKRCKTDRRDAAALSELLWVNRDRLLQGKPVRGLRQVDIARGTDQENRRLTTLRKDAGQARTRLVNRVRHILRRHNLQWQMPTKKFPTKAGIAWLKQLALPEIDRLEMNHLLADLERVQGRRKELEQVIAQRCGVSEEAVLLSSMPGVSYFTAVSLACRVGRVERFPRARSLANYWGLTPGCRNSGENTPPTIWPTPV

SEQ ID NO: 157175 - protein, 422 aa, unidentified
MKNIIASKLKQIPERYLIAGVDTHKKKHAVVLRTQDAVVHSRFQVGNSRQGFNELLERTRRCMTKVEARGVMFAIEAGGRYWRPLAYFLDGNGIPFRLISPFTLKRRREGDDVDRRKNDYHDAETAAELLRTGAFTETKLAEGTYAELREAYHAHHRLGEEITQTSNLLGSLLDGIFPEFCQVFRDIDSKTALAVLDAYPLPHIIAGMPPEKFQDAMLESNKGMRLMRKKLVAIHEVARDSIGIRAGSRAVAMEVSMLVERLRLLHAQRERTDCLLVEIEESLPESKLLLSVDGIGPITVAGLLGELGPIRNYRKAKQLVKMAGINPVQSESAGKRGGRTPMSKKGRPLLRHCLWEACGGLLRYNASFKAWFERLLERPVYGHPLNKREARGAMCRKLLHLVFALVTNGSSYRREGMVSVTV

SEQ ID NO: 157176 - protein, 467 aa, unidentified
MRKVKAADCVSRPVVTDEDEAGLPVVRQGAAGIDLGSEVHWVCAPKTDRRGREVATFGATTPELEKMAAWLKERKVETIALESTGVYWIAPHEVLERHGFDLTLVNTRELARVPGRKKTDRIDCKWIQRLHSCGLLSGSFRPAEAVCILRTLVRDKTTLTAEASDWLRRMQKSLDQMNVRVHRAVSDIDGVTGMAIIKAIVAGERDPRKLARLRDGRCHKSEEEISEQLSGHWREDHLFSLKQALKMYEAIQQRIAEYESELLRKMAEMEREETRGQEPPALSNLRKGRQILADGDEPMRQALYRVSGVDLATIDAIGVGTIQVILSEYGPDLSRFPDEKHFVSHLTLAPRQAISGGKAVTKKKKKGTASTRVAAALRMAALCLRNSKTALGAYYRQISRRLGGDVAVFATARKLAIVIYRLLRWGQPYVDQGAANYEKQYQQRRLSNLKTAAQDLGYALIPKIAEA

SEQ ID NO: 157177 - protein, 315 aa, unidentified
MEQSPIAPRFVGIDVSKDRLDVHVCPSGHAFAVMRDGRGLEQLVNDLRRLAPTLIMLEATGGFEITVAAALANAGLPLAVVNPRQIRDFARATGRLAKTDALDAQIIALFAERIRPEPRPLADADSQSLAELIARRRQVVEMLGMETNRLHQARNPRVQRMLKATLKTLKAQLAELDRDIDDTIKRSPIWRAADDLLTSVPGVGDVTAHTLIADLPELGQLDRRRVAALVGVAPINRDSGQMRGRRTIAGGRIEVRNALYMATLSAIRWNPVISKHYQSLVERGRPKKVALVACMRRLLGILNAIIRTNTPWRCA

SEQ ID NO: 157178 - protein, 342 aa, unidentified
MKEVNIIGLDLAQNVFQAHGAGTDGSVAFRRKLSRGQLLKFLSDQPPCVVAMEACASAHHWGRAVGDLGHEIRLIPPAYVKPFVKRQKNDMADAEAISEAASRPTMRFVAVKSEAQQAAAMVYRTRDLFIRQRTQTINALRAHLAEQGIVAPKGPAHIGRLAGIIDGDEGTLPVEVRELARLLLDQIADYAEKIADLDAKLRQRAASDDTARRLTTIPGVGPITAAAITTFAPPMETFSKGRDFAAWVGLTPRQHSSGGKERLGRTSKMGQKDIRRLLITGAIAVVRWAARKGAPEGSWLARMLARKPKMLVAVALANRMARTAWALMRKGEDYRDPVAMAA

SEQ ID NO: 157179 - protein, 378 aa, unidentified
MKRILKIGMDVHTTNYTLCAMEPIIGEDDRVFATIKVTPDYKNILMFIENLKLKLGLNDEYDIQCGYEAGCLGYSLYNQLTAVGIKCVILAPTTMLTPQGVRIKTDMRDAYMIAQCLSYGGYHAVYIPTEDDDSVKEYLRMRNDHKLALKKIKQQINAFCIRHGFCYDGTKWTLSHLKWLKKLEITNGLYRETLDEYMASYEEQEAKIERYDKRIGEIAEQTRYHDKVKKLGCFLGIKTHTALSLIVETGDFERFAKGNQYASYLGLAPGENSSSDNIHRLGITKAGNSHLRQLLIEASGGICKGAVGHKSKELRARQNGNMAEVIAYADKANTRLRSRYYKFIRHGKKRNVAVAAIARELACFVWGMMTDNIEMKAA

SEQ ID NO: 157180 - protein, 457 aa, unidentified
MKRSSAATALDTLTCIHPNAAGLDIGSREIWVSVPTDRDAEPVRRFSTFTPDLKRLVAWLTACRIDTVALESTGVYWIPVFELLETAGLKAELVEPRQLKRVPGRKSDYLDCQWLQKLHSLGLLTASFRPDTEMRTLRTYLRHRAELLQHRAPHILHMQKALQHMNLQLHHVLTDLTGVTGLKILRAIMAGERDPLKLAQLRNPACKSSTETIVQALTGTWQAEQLFALRQALELYDFYTQKVAECDGVLEKQYAAMKPRWEGEVPVDLPALKPNSHSKNQPSLQTRRELYRLTGVDLVAVHGLSASLAQTILSETGTDMTKWPTEKHFCSWLGLAPHNDISGGKILRSRVLPTDNRAGQAFRQAAASVIRSQCAFGAYYRRKKAQMGPLPALVATAHKIARTVYYLLKHGVQYEDIGAEAYNQKHAERELAYLKKKAAKLGFTLVEHQPALMMSPA

SEQ ID NO: 157181 - protein, 465 aa, unidentified
MRTDKKQWRNRKAKKELARQLQSENPGLEVVHPHAAGIDVGNSAHYVAVRPDRDPQPVRRFECFTADLHRLANWLQSCGVQTVALQSTGVYWIPLYDILEERGFEVYLVNARHTKNLPGRKSDVQESQWLLKLHTYGLLNNSFQPLSKIRILRTYWRQRLQHVTGAATCVQRMQKALTQMNIQLANVISDLSGVTGQLIVRAIVGGERDPWKLAELSHPRIQASRGEIAKSLEGNWRQELIFVLQQEMEMYDTYQRRVAECDQELQKHLRAFADTVPPPVKEELPPKKKKKQNKNNPHFHLAEELQRITGVDLTRIDGVDVIVAQTLVSEVGLDMSRWKTEAHFASWLGLCPENRISGDKVLSRGTRHVLNRAANALRLGASTLLKSQTYLGAQYRRLRSRLGAPKAITAMAHRLARLVYRMLKYGQHYVDKGAEYYEQRNRQQQIDFLRKKAAQLGLQVTAPHA

SEQ ID NO: 157182 - protein, 360 aa, unidentified
MTIVAHNHPFVIGVDTHARTHTLAVLVAATGELVASEQFPATGAGLDRAIAWAARRTEGELATLWVIEGIASYGAHLASAAKRAGYEVVEAAAMNARAHRGTGKSDLFDARRIAASVLSLEPEQLRRPRSDDGIRAALRILVTAREHMTTERTATVNALTALLRVATLGVDARKPLTASQISEVARWRTRVEDLVTVTARAEAVRLAKRVVDLTEQLATNYKNMIDLIHASKAAVLLDKTGIGPVTVAVVYTAWSHAGRVRSEAAFAALAGVNPIPASSGNTVRHRLNRGGDRRLNRALHMAVIVRMTHDPDTKAYVERRRAEGRTTKEIRRCLKRYLARHLYRTLEKLHAEPNANPQAA

SEQ ID NO: 157183 - protein, 455 aa, unidentified
MPKKSTGDRPELKPVNVNAAAIDVGSKMHMAAVNPTCTDTPVRTFGTFTQELHDLADWFKACGVTSVAMESTGVYWIPVYEILEQRGFEVMLVNARFAKNVPGRKTDVSDAAWLRQLHSYGLLRGSFRPDAEVVTLRAYLRQRERLVEYAAAHIQHMQKALMEMNLQLHHVVSDITGATGMRIIRAIVAGERNPDVLATYRDVRCHSSIETIRAALVGNDRDEHVFALTQSLELYDIYQAKMLDCDRKLEVLIAALSNKGAKPVGKLSKPRVKTKQVNAPTFDVRTALYGVLGVDLTDIHGLGPSLALKLIGECGTDLKAWPSAKHFTSWLCLAPGNKISGGKVLSSRTRRSSSRAAALLRLAATTVGRSDTALGAFYRRLSSRAGKSKAVTATARKIAVLFYNTLRHGMLYRDPGADQYERQYRSRVLANLQRRAKSLGFMLQAIPGDDDPAVS

SEQ ID NO: 157184 - protein, 336 aa, unidentified
MNIVKMAVGIDISMDDFHACIKVKNESGKVVIKGTKTFNNTGAGFNEFYRWALGRKKGGCASSFVMEATGIYYEDLAYFLHGKKERVSVVLANKMKGYAKSLNVKTKTDKVDSKVIASFGIERQVEEWKPMSPVYKDLRDFCRELLSVKKEMNRAKSQLHAMVRSHNKSKEIVNLKKKQIAFYEKTIEAIEKKLIKIVDKDPALKEKLAKLESIPGLGFETAVILASETNGFELFTSIRQLVSYSGLDIEFKESGQFKGKTRITKKGNSRIRQALFMPAMSACRHNESIKRLYTRVCERSPDIKRKGIVAGMRKLLIYAFVIWKKDTAYDREFVWG

SEQ ID NO: 157185 - protein, 430 aa, unidentified
MEQVNGIRLQKFRQVKNEIRGSDQYLIVGIDVAKEKHNAFFGTANGKTLHKGVIFDNTIEGFQKLLTLTEVFKVQHELTKVVFGLEPTANYHKPLGEHLIECGHLVVLVSGAAVKNNRRLLDGRWDKHDTKDSANVADLICQGKFLYYEYPDPEMQDLRNLLSLKRRLKKEEHAHRVRIRNQLLAQYFPEMDRHFGPAISLAVVGRCLDPSMIAGMEFDEFRRSVAPGRINIAQQKLLQTIWQIAPESIGCHVGNAVPFEGKVMVSKLNQVRETIKAVEDKIEDLCLQFPEYPCLLSIPGFGPDVSSKVLGAIGNPFRFTSNKQVVKMAGFDLCAQRSGKTSNSVTPVISKQGRADLRYALYQAAFIASLHNKGFMTYYANKLRGRQREKGIGTKMRVKLAAKLPVIAWTLMKKKEPFDQKYLNQEDIQV

SEQ ID NO: 157186 - protein, 342 aa, unidentified
MKFYCGIDLSARDCHVCVIDEQLKVMVQQKLRNELPRILKLLEPYQANLKIVVESTFNWYWLIDGLQAAGFEVMLAHTLGLYLITGAKVKTDRRDAYSLAKLLLAGVVPAAYIYPVETRPVRDLLRRRTRLVQVRAGEYGSLRRLLLRQGILSSKQQEIKTATETELEQWFEHPLVRLHASQELQRIELYSQQIAELEKTILALAQTEQSYELLLQLPGVGQTIALTILYEVGELTRFANVKVFSSYCRLVPGIAQSGNVTRRGRASKQGNHYLKAAFSQAAVHAVRCYPKVRRYYERQLKRHQGRGRQMICYNIIAHKLAQAAFHVLKEQTEYREELLFGR

SEQ ID NO: 157187 - protein, 340 aa, unidentified
MSNLPLFVGLDYHQDSIQVCVLNQQGDVLLNRSVGNDCDQVARAIDPLGGRVQRVGIEACCGAADLGEELVERLGWNVSLGHPAYVARIKSSPDKSDYSDGRLLADLTRVGYLPRVWLAPAHVRELRQLVNHRQRLVDHARALKLQVGAVLREQRVTIAADRGSRWSKGWTASVRDHDGLSRHARWIVNDLLDDLRYAKGKIAAAEARLRGAAEGDPVIARLMRQPGVGEVTAWVLRACVGDFGRFKTAKQLSRYCGLSPCNASSGNRVADAGLVDACNKLLRATIVQAAHRLIRTTDRWGTLAASLRRRGKPSCVIVGAVGNRWVRTLHHAMGPNPTMP

SEQ ID NO: 157188 - protein, 423 aa, unidentified
MFKIIRFNCCGLDVHKTWIFACIGITDASFRTEYFEARFSSFPKDLRRLAAWLQEHKCEEVCMESSGKYWIPVFNVLEESCKVTLAHPKYTKPQKGNKTDRKDAKWICDLFMCGMIKPSFIPPPAIRHLRDLIRYRFKLTNMLTSEKNRAQNCLTVSNLKLDDVFSDIFGKSARSITEYILSHPGEKFDVTPFVNKRCKTPVDQIQAAVDGAISPEQAVKLRECLNHIDELNAHRDRIEAEILDLVKPFSAQLGLIRTVPGMDKDPMTAILILSEIGSDMSVFPTAKNLVSWAGCCPRNDKSAKHVKSTRIAQAGCYLKPLLVQVTNALLKSKNHPEFTERYRRIKSHRGHKKAMIAICKMLLTAIWNILSTGEVYNPSGYLIQTPRPSNETKVLTQKQALELLRLRGYVIKEDPVEPEPVLA

SEQ ID NO: 157189 - protein, 362 aa, unidentified
MSKTEETRRLCVGVDLHKTQFTVSALTEDGEVILQEEYRTTPEGYSKFKEEMHRYEEEDGCSIELAVETTGNARFFKNQMEKEFFDVTVVNTNKFKVITYSTKKTDANDALTLAMYLQKEMLPEAHLCSQTSEEIRRMLKTRRILVQSSVKIKNQIHGMLLGYGIETNTAQFQSKRKRQELMNDLANHYYSDFTASSLEVMLNILDVLADQIKDVEEQIESMVEDNEDVELLKTIPGVGKIGAATIASYTEDLERFDGDFKRFAAYIGIVPSVHNSNETVHLGHITKHGPQELRTAFVQVALGMIRASKQTSDWRLIEEYRRKKTEKGSGRAIIALTRKIARIVFVMLENREPFNPELMLSK

SEQ ID NO: 157190 - protein, 353 aa, unidentified
MFGEKPEGGATMITVTAIGLDIAKSVFQVHGVDAAGQVVLRQRLARGRVLAFFEKLAPCLVGIEACGSSHYWARELTARGHEVRLMPAQYVKPYVKRSKNDAADAEAICEAVTRPTMRFVPVKTPEQQSVMMLHRVRLMLNRQRTQLSNSMRAHLSEFGIAAPLGRRGLDQLLTVVADPEDTRVPADARLCLQMLAAQLAVVKEQILENDRRVRTSARTELGRRLMQVPGVGPLLASAFIATVADPAAFKTGRDLAAWIGLVPKQNSSGGKERLGSITKAGNRYLRQMLVVGAMAVIRYAERHGTRRPWLVQLMQRRSTKVAAVALANKTARIIWALMTSGERYREPTVAMAA

SEQ ID NO: 157191 - protein, 329 aa, unidentified
MSQGALSVVNLLALLGIDVSLLENVVCLRIGQRCHRAAFPNTAEGRQALIQWALKLASEGLLAAVEATSNYHKELVQDFRDAGLSCLVLNPRQVRDLAKGLGIACKTDRVDAEIITQVLEVPKLRSQVLRSREHDDLRDISREIQALTDTCVDTQHRLNTPARCQIAKTADANLVKFLKQQMRELEQQWMRLLAECPELKERYEDQVSIDRIGPKTARVVVSELAGDLSTFRTKQVAHYMGVSPDTKQTGQQKPTGRIGGGNVFLRKAFFMPALTACSKDPECKDLYARMRAKGKTHKQALVAVMHKLIRRSAAVMIRRSPWRPRLDMS

SEQ ID NO: 157192 - protein, 328 aa, unidentified
MHYLGIDVAKAKLDCSLLLDPNSAKRKAKSVANTQAGFAELLQWLRKQDIALSNIHAILEGTGVYHEQAAMALCDAGLAVSIINPAQVRDFAKGLAIRSKTDGIDSQVLARYGALVQPGLWTPPSPQARTLQALLSRREAIAQDLQRERNRQEKADATDTPELIRQSLADSIHFLQTQLKKLQQDIDDHIDRHPVLKDDLVLLNSIPGVGPQVGRHLLSVLHRHHFDHAEQLAAYLGLVPVEWQSGSSVLGRARLSKAGPAHLRAVLYMAAVVATKYNPHVKALYERLLTRGKCKMAALGAAMRKLVHLCFGVWKTRQLYQADYAKIS

SEQ ID NO: 157193 - protein, 333 aa, unidentified
MISVAHTRQVTVTRIICGVDIASSSLAARVGEDGAEATFGNSTEGIAELAAFCHNHDVELVAMEATGGYEQQAFAQLSESGLPVAIVNPRAVRQFAQSMGRLEKTDSIDAGMIAWYAEIKKSQPLCLASQTQLELRARVTRLRQLTELRTTQLNQQRLVTNYAVKAGFGKMLAFLAQQIQELERAIAALIDADPLWRELDQAFRTIKGVADRTVARIMAEMPEIGTLSNKTISKLAGVAPLAQDSGKHQGKRAVRGGRAAVREILFIVASVVGRYEPDFMVFQKRLRAAGKPPKVIRIALAHKLLVRLNAKAREVRQRLATLDPAPSSLLAPY

SEQ ID NO: 157194 - protein, 369 aa, unidentified
MTQHTTNTIWVGLDVHQASITAAILYGDNPEPEVVRLPGDLNATRKLFRRLAKKGMPRGCYEASGAGYVLQRTLDHDGFHCEVIAPSLIPSLPGDHRKTDRLDAVHLARMFRSGHLTQVTVPGMDQEAVRHLVRARLFLRRQITRSKHRIMGILRTTDYRFTETKSNWTKKHRAWLAKLLREITGPLQIVLSSEMQLLEYLESSQIALDARISEVAQQHPWRVQVEALCCFRGIKTLTAMTIVSEIGDIKRFRSPRQLMGYTGLVPSERSSGERQRRGPITRSGNRYLRRVLIESAWHYSKRACSTLRLQRQRMGQDPGVVGIAVKAQHRLQRRYQHLARTKHTNKAVTAVARELSGFVWSMLWEIKGR

SEQ ID NO: 157195 - protein, 399 aa, unidentified
MLAVGIDISKSKSVAAILNQDGSMHTSPFEFHHTQPELDAFIKYILNSNQSATILMENTGHYHYPVLKAFREAGLPVCMVNAYQIKKFGDMDLRKAKTDKKDAVRIARYALEKSYSLVPYTSMEQKYEDLRFLARQYNQRMLTLKTNKVFLLNLLDETMPGITNILPLTTRTPETSLSVLFINRFKSYDRIKKMGKSRFLDAFEKIARKSRNRQTKTYGLAIYEAALRNITTRGENEYTLAAQDQCLELVCESQKAADSIILKMKTLAETLPEYAVLRSMAGVGDRLGPLILAEIGDIRRFHSGKALNAYAGNDAPPYQSGIFESHNRHISKRGNAALRKYCFEVMQALKLTRPQNDPVYLFLLKKEQEGKPYNVAKMAGVNKFLRIYYARAMETLKQQ

SEQ ID NO: 157196 - protein, 458 aa, unidentified
MKSKPRKQKKIHAVRPQPLNPINHHAAGMDIGATEIWVAVPFDRDPHSIRAFPTFTRDIIEMAQWLLTCKVATVAMEATGVYWIPIYDILEAFGIDVCLIDPRQTRSKKKSDVLDCQHLQQQHSYGLLDNSFRPKQQIRCFRTITRQVEMLEKSRARHIQHMQKALHEMNIQLDTVLTDITGQTGMNIVRAICSGEHDPLVLARFRDPRCKHSSEDIVKALEGSYLEEHLFILQQALQLYDYYSSLISSCEAKLEELYNQFGISEFCQGVLPETKKAGRVNRKDPEYRRRMHLYHMCGVDLTEIDGFDCDTAETILTEIGPDVSAWETVKHFASWTTLAPNNRVSGGKILPHHHKKANNRVAQALRLAARSVGRSNTALGAFYRKILYKRGPGQATKATAHKLARIVYVMLKTHTAYNRMDQSLFEAQYEQRVRKNLERTAAKFNLKLVPCDAVPAFG

SEQ ID NO: 157197 - protein, 452 aa, unidentified
MTEKDKISMEIVNPRAAGIDIGSRSHWVAIGQGPTDFKEFGVYNEDLYSIAQWLRENEIKTVAMESTGTYWQSLYAVLIAEGFQVILCNGKFTKNIKGKKTDIQDCQWIQKLHSIGLLSGSFLPDEATEQLRTLCRHRANLLDSAAAASKKMQKYLRLLNLRLDVVVNDICGLTGMAIIKAICNGEKNPERLADLRHHNCKKSKEEIAKALHSNGRQDYIFALKQELEMYEMFQAKIAQCDIEIEKMLNETIDNDENKKQHYIEKKAYKKVNKNTPKNIDLNLMAYQHFEGVDLMAIEGMSYSTILSLISEVGVDGIKRFSTAKHFASWLRLAPNNKISGGKVLSSKIPKGSNRLKIALRNAANAIGNLKDSTPLSDFFKRINFRKGRVSAISATARKLAVIIWNMVVKGVPYHNPEEYLFRDQKKKLGLLKRIQKQINKFELESTDFQFSN

SEQ ID NO: 157198 - protein, 385 aa, unidentified
MRTAKKRGPGPSHLLLTPDHAGNVVGIDPHKRTLTATVVDPRGGVLASEHFRVSGDGHRALEAWARQFGQVVRWGIEGSASWGRHTAVYLIGRGYDVRDVCANRTPRSDRARQRGKSGTLDSERIAREVLAHSLLPKAFKRAGQNQGPDELHQLLGLWHNRRRSILAGRQHLVNEAEQLLCELPLELREQLPDTKSVRPRLAALQRRNRRRRYDPPTRLRLQLLDGYHQQIHALDHEEKQVIAHLEELVRRSGSTLGELCGLSTRSVAELLVEVGDPRRFTEGGFARFNATAPLPASTAEGPGEPVRHRYNPGGNRRVNAVLHRMAITQLAREPRAQRIYANARAGGHTKKEARRVLKRHLSDVIYRRMIRDLHAQLPDQSLLAA

SEQ ID NO: 157199 - protein, 353 aa, unidentified
MMVIGVDPHKQAHTAVAVDELGRRKAQKTARARRDGHRELIAWARQACPDGRTWAVEDVRQVAGNLVRELLAAGEQVVFVPPKLMAGQRRGGRERGKSDPIDALAVARVALREEITLPAARLDGPVLEVRRLGGYRDDLVAERTRVVNSLRWMVHDLDPALAPAPRSLGSARARARLETGLRALPGSAGRAVALSQLARVAALSAEITQLEQDLAPLVTALVPGLLALPGVAVLTAAKILGEAGDIRRFASPAAFARHDGTAPIPASSGTGEDGPHRLNRGGNRQLNAAIHRIALAQARCHPGARALLERRGRDKHETRKASFRVLKRHLSDVVYRALKADAWRLDNPDQQAA

SEQ ID NO: 157200 - protein, 366 aa, unidentified
MIVIGADPHKLGHTAAAVERATGELRSSETVAARDSGHAQLLDWARALDDERVWAIEDCRHVSGGLERFLVDRGEHVVRVPPKQMAGARKSARKRGKSDTIDAVAVARAAIREGIETLPAAFLDEEALAIKLLLDHREDLVGESTRAQNRLRWHLHDIDPELAPPERSLRHLHVLRSLGARLSRREQTVRVRLARELVRRCAALRRELEALERELQTRVREQAPELLELPGCGPLTAAKLIAEIAGAARFPTDAKLARHAGIAPLPASSGARHRHRFDRRGNRQLNCAFHRIAITQARIHPEARAFLERKRSEGKSNREALRSLKRHLVRRVHRLLAPPSVSPPLPMSSSPIRASSAPAVMPCLMP

SEQ ID NO: 157201 - protein, 363 aa, unidentified
MLYVGIDQHRKQLTVSVRNESGSVVLRRQVSTHWEKVRAFFSEIRDLAAEDGGYLAVVEVCGFNHWLLALLAEHGCRETIVVQPEEQSKHKTDRRDASQLSEVLWLNRARLQQGLPPRGLRRIQLPGAEAQADRRLTSLRHNAGRELTRTINRIKAVLRRHNLEQECPTKGIQTKAATKWLHTLKLSTVERIELDEQLHRAGLLREQVQHLQAEITARFERNAAARLLSTIPGAAPYSALGLASRVGDVRRFKHPRSLANYWGLTPGSRNSGEATDRLGSITKQGSALARFLLGQLVLHVLRDDAWMRSWFKAIKRRRGSKIARVAVMRRLATIVWHMLTRNEAYACGGPPRARLQPRPAGAR

SEQ ID NO: 157202 - protein, 345 aa, unidentified
MEHYVGLDVSLKLTAICIVDRTGKIQREGVVHSDPEAIAAFIKSNAPHVARIGLETGATSTWLWTELNKMGLPVICIDARHAKAALKMQINKSDRNDAVGIARIMQCGWYKEVRVKDLDSHAVKALLVSRALLVKIKRDLENQIRGLLKNLGLVIGSAKMNAFALRAAELIENRPELAVAVTPLLTARVAIEQQIADLDRKVMKLARSNAQVRQFMTAPGIGPVTALCFLATIDDPTRFKRSRSVGAYVGLTTRRYASGEIDWTGRISKCGDKMLRGYLFEAANVLLTRVAKWSALKAWGIRLAKRSGLRKAKVAVARKLAVILHRMWIDGTEFRWSKETAMQTA

SEQ ID NO: 157203 - protein, 343 aa, unidentified
MKLIRVGVDLAKNVFQVHGVDRSEKPVWRRKLSRANWLKALLETVEPGCEIGMEACAGAHHWARQLQQAGYAVKLIAPRFVKPYVKSNKNDANDAEAICEALGRPSMRFVAVKTVEQQDVQAAHRIRAGLLEQLIAKANQIRGLASEYGLVAPKELVHLRHAMAHWLEDADNGLSVRFRRLLHGLRADLMALDERVGELNEEIASIARADPLAQRLQQLRGVGPMIATALVATVGDVRQFANGRQMAASLGLTPRQNSSGGKARLLGISKRGDAYVRCLLVHGARAMIRTAQAKDDRLSQWVMRIAARRHPNIAAVAMANKTVRIAWAMMKNGTDYHPQLAAG

SEQ ID NO: 157204 - protein, 370 aa, unidentified
MLDTTTFVGLDVHARSIKAVSLDVMTGEVRAATFGYDAGAVAEWVRSVDPGARCVYESGVTGFDLQKRLSGLGVDCVVGAVSKMIKPSADRRRKNDRNDAEFLARMLSVGNVVEVWVPDDECEAARDLTRALEDARDDLSRSKQRLSKFLLRHGLVFDERTPTGRRKGNWTRAHWSWIESIRFAEGADEEVLAYYVDAVRRAAEEKARLEGLVEAEARKPRWRRRVDSLRCLKGVDTASAADLVFEAGEFSRFRNARSFAAWVGLTPSEHSSGESDRRGAITKAGNKHLRKTLVEAAWHYLTCSGRPKDLAKGQAPDRGARRHAAKGVRRLVERREALLARGVHGSKANVATARELACWVWAVGLMAEEA

SEQ ID NO: 157205 - protein, 396 aa, unidentified
MAMIWAGIDAGKTHHHCVAIDESGNRLLSRRVANDEPELLELLTEVLALGDEVIWGIDLADGGAALAITILFNHDQRVHYISGRAIHRASESYRGEGKTDAKDAAVIADQTRIRRDLHLLRTGDETVTDLKILTGRRTDLVADRTRTVNRLRAQLTDIFPGLERALDLTNTGPLTLLTGYQTPASLRRIGKKRLEAWLRNRKVLRADRLAETALEAAGRQHTHLPGEKLTAQMVHTLAREVIALNQQVAELDKTIEARFREHRDFDVITSMPGLGVILGAEFLAATGGDMTAFGTADRLAGFGGVAPVPRDSGKISGNLRRPRRYNRRLQRVFYISALFSIRHCDESRRFYERKRAEGKRHIQAVLALARRRVNVLWALLRDGRTYERVPPIALAA

SEQ ID NO: 157206 - protein, 338 aa, unidentified
MKNLKYAIGIDISMKDFACCLSVINEQQEVKVKASHKFSNAPAGFKALSEWATRHCKEVLPVVFVMEATGVYHEQLAWFLNSKEQQISILLPNKAKSYLKANGAKSKNDKIDARGLSQIAAEKKLELWVPPSRDLYTLRAYTRQHQNLTEIHTALSNQVHSIQHSQFPNKDIIKQLKKTIKLIDDQLKEMNAAITKTVKSDNVLNQHYQNICTIKGLAMLSFAVIAAETNGFALFENAASVVSFAGYDVVENESGKHTGKTKISKKGNSRIRRILHMPALNAVRDDQPQFKKLFERVYDRTRIKMKGYVAVQKKLLVMMYYLWKKNEKYHPTFGHIQK

SEQ ID NO: 157207 - protein, 407 aa, unidentified
MFFVGIDLSDKDFCAYMTDASGNRLSAKTFDFNDDGFYSFIDWLKKHEISSDKCMIGLENPRSRMVDFLNQRQYTVIAVNPNAIAKYRESRFPSGVKTDPGDAHLIADYIREHEKALRPITIPEEGIRELRILLEDRDRLVSQKVSFSNQLTQTLKDYFPQALDAFGSIDNKCALKFLERYDSFQQVKALSTQQIEQLFKDCHCYHEKSKARFRKAMKQRISHIPPEMIRAKILLKNSLVSHLILIIQHIEQYDNFIKELMSAIPNGAIFTSLPGADYLLGAKLLVLYAGRDFSNANEAQAFYGTAPYTASSGNYHSVRFRIGCHKFGRNTFQQLACCSIKTSQWARKHYDKKKNSEGKGGNHALRCLANLWVKVTFAMWRSKTPYDEIKHMASVAMHIIHQPDYVN

SEQ ID NO: 157208 - protein, 420 aa, unidentified
MLFVGDDWAEDHHDVEIVDDTGRRLVRARLPEGIEGISRLHALLADHLPEEWADPDTGTVGGQVVVGIETDRGSWVAALVAAGYQVYAINPMSAARYRERHSTSGAKSDAADAHVLAEIVRLDRAHHRRVAGDTPEAEGLKLVARTHQSLIWDRQRHVLRLRGTLREFFPAALAAFEAAGLDLTSPDALELLGRAPDPDRARALSRSKIAAALTRARRRDVEAKTGKIQAVLRAPELRQPAAVQRAYAVIVASQVRLITALIGDIAELEAVVAEGFGRHPDTEIYASQPGLGTILGARVLGEFGDDPHRYTDAKARKNYAGTSPITRASGKKSVVLARYARNKRLGDAVHQWAFCALTASPGARAYYDTLRARGIGHHAALRQLGNRLVGILHGCLKTRTTYNETTAWAHHTTEQSSTAA

SEQ ID NO: 157209 - protein, 416 aa, unidentified
MIDAVTERCAGIDVGKKFILVCALCGPSNEAPQVEIRTYGTTNGALRTMEQWLYGIGCLHVVMESTGEYWKPIFNILEQRMTVVLANPAHIKNIPGRKTDVKDCQWLAHLLRHGLVRSSFIPPRPIRELRDLTRRRRQLLVAGTSERNRVQKVLEDANVKLASVLSDLFGVSGQDMLEALVCGNPEPEQIAGFARCRLKQRIPEIKAAVDQHQLRDHHRFLLRQSLAHIAFLEGQILELDRQIMESLRPYQEQFELLQTIPGIRRDSAAIVMAEIGPDMSQFPTPDHLAAWAGVCPGSNESAGKRKAAHARKGNRWLRGTLTQSAWAASKKGNSSFKERYARLAARRGSKRAVVAVARMLLITAYHVLAKRVPYHELGPSYLDDRQRNRQIRYHFKRLNELGFSISQDQLHSASSE

SEQ ID NO: 157210 - protein, 369 aa, unidentified
MMGWTPRTASMCQSGVFEHHLREASVSGVITVGLDIAKHVFHAHGVDDQGRALFSKRISRGKLLDFFAAQPSCTVALEACGGAHHWARQLTQLGHEVRLIPPAYVKPFVKRQKNDAIDAEAICEAAQRPNMRFVAMKSEQQQAAGLVFRTRDLLVRQRTQLINAVRGHLTEYGWIAPKGPSHVAELAHLIEEKRMAGSLPEAARAMFRLMLDQLASLNGRIAVLDKEIARRAREDEVSRRLMTIPGIGPISATAIAALAPPVETFAKGRDFAAWLGLTPVQRSTGGKQKLGATSKMGERTLRRLLIIGSSAVVQQASKRGAAKGSWLEQMLARKPRMLVTVALANKMARIVWALLVKREVYRAPVAANA

SEQ ID NO: 157211 - protein, 392 aa, unidentified
MVFVAPHSPGRYVCMSSQAGDTKMTTHVTQYVGLDVHKDTIAIAVADATNREQPTFIGTTQYSPKQIRKALRNFGTPPQMRLCYEAGPCGYGLARELLTLGFECEVIAPSRVARRPADKIKTDRRDALLLARLHRAGELTPVLIPDPNDEAVRDLSRAREDAVNARRRARQQLTAFLLRHGRRYTGGRAWTKRYQLYLSTLKFDNAIHHTVFAEARLALTAADNRVERTNQALCDHVQNWRWIDTVRGLMTLRGVDLITAVTLVAELGDFRRFVRPGALMSYVGLVPSEHSSGTHVRRGRITKTGNQHARRIMIESAWNYRFPARIGETIQPRLVNQPQDIIDIAWKAQLRLCKRFQQLKARGVHHNKVCTAIARELLGFVWDIGIRTSPTD

SEQ ID NO: 157212 - protein, 317 aa, unidentified
MTTWVGIDVSMETLDFAWLEGKEKNHVKIANDQKGFEAILRKAPGDARFVMEATGTYYFNLALFLHQAGRFVSVVNPLQTKSFMRSDLRRTKSDKTDAFAIAQFGEERKPGEWSPPAREISEMQQLLTLDDILSHQLVQYRNLEHAFCKTVHYSPEAIVFARNMIKDLKAQREAVMASLECLAEKVMPREIDIISSIPGVGRASAIRIAASVMDFNRFENGRKLVSFFGLSPTTKQSGTSVKSRGHISRMGGSKVRGTLYMCAMNALQLNQQCQRMWKRMKEAKKHGKVIMVAIMVKLVRQIHSMVIHDTLYNPSFH

SEQ ID NO: 157213 - protein, 394 aa, unidentified
MKLVGIDVGKNSHHFCVMDKETGELNVTPSSFSNSKEGFEFLINSLKPYSKKSILLGMEDTGHYHVALLKFLLSNGYTVALINPKTTDLTRKMEGGITKNDRLDTITICDVLDTPERKKQYRITKVDRFDLYEQRQLTRHHHNLKEELNIYCNRLQKSIDLVFPEFNTLFSSKYGIVYMNLLKTFGSAEAIASTDIRTIRKYFEIKGRGGRISLTPEKLKECAKNSIGISSEVEIIQIKHLVSQITLIKEQIAETDKKIEEFSITNNSPILSIPGISHFSGTSILAELGDIGNYSKPSQIIKFAGVAPYHYESSQYNAQHTGITKKGSKYLRKTLYQIILTVINNNPVFKKYYLLKISQGKGHRCAQGHCIRKLLRVIYHLLETGQSFDPALLR

SEQ ID NO: 157214 - protein, 315 aa, unidentified
MATQHFVGVDVSKKQLDVAIFPTAKSFSCPNSYAGHKKLVQHLRRLKPALIVLEASGGYQSAAARALAQANLPVTVVNPRQVRDFAKATGELAKTDKIDAAVLALFAYKLRPQLRPVPDAAAQQRRDLGLRCQQLRDNLAAERVRQHQACGAHRDSIARHIAWLEQELQQMQAQWQTSLQSDQQLCQLQKLLCTVPGVGPGVSAVLVTYLPELGQASRQQIAALAGVAPFNRDSGQHQGKRCVYGGRVQVRCALYMAVISAIRHNPLIRAFYQRLKSNGKATKLALTACMRKLLCILNAMVKNQTQWQPQTLTTA

SEQ ID NO: 157215 - protein, 334 aa, unidentified
MENIALIGIDLGKNSFHIHCQDRRGKAVYRKKFTRPKLIEFLATCPATTIAMEACGGSHFMARKLEELGHSPKLISPQFVRPFVKSNKNDFVDAEAICEAASRPSMRFVQPRTESQQAMRALHRVRESLVQDKVKTTNQMHAFLLEFGISVPRGAAVISRLSTILEDNSLPLYLSQLLLKLQQHYHYLVEQIKDLESQLKRKLDEDEVGQRLLGIPCVGTLTASTISTEIGDGKQYASSRDFAAATGLVPRQYSTGGRTTLLGISKRGNKKIRTLLVQCARVFIQKLEHQSGKLADWVRDLLCRKSNFVVTCALANKLARIAWALTARQQTYVA

SEQ ID NO: 157216 - protein, 313 aa, unidentified
MDKKVVGIDVSKATLDVALLGAGEVLQFANDADGVEALRTKLGSSPVDLVVMEATGGYETFVATALVGAGLRVAVVNPRQIRDFAKATGRLAKNDRIDAQVIAAFGAAIEPEIVQLPDEDARELGALLVRRRQLVTMRVQEVNRLGLAQGLMRKNIKAHIDWLEKQIDRLDIDLTAALRSSPAWRAKDELLRSFKGVGRLTSGTLLVQLPELGQLDRRAIAALVGIAPFNRDSGVMRGRRSIYGGRSQVRTLLYMAATTAIRSNPVIRAFYERLKARGKPHKVAMVACMRKMLTILNAMVRQSTPWTPETNPL

SEQ ID NO: 157217 - protein, 363 aa, unidentified
MASIALDRGDVIVGVDTHKDQHVAVAIDGVGGLIDEPKFLDANNDGYAELLAWARSLGKVHVFAVEGCGSYGIGLARFLRRHGHPPVEVSRPPRAGARRMSGKSDAIDAEHAARTALAGVGVVTPKLADGQVEAIRLVKIARDTAVKAHTTAMITLKAVLVTADQDLRDQLEALSDFKLVAACSELDASADLADPAVAMRHTLASLARRWFDLHAEIKTHSKHLKALTRAAAPELLDAFGVGVDIAAQMLITAGDNADRVRSETAFAKMCGVAPIPTGSGKTSGRHRLNRGGNRQANAALYRAVIVRLRWHAPTIAYLERRTADGLSKKDIIRCLKRYLARELFQLLPDVSAEQAPAPAARAA

SEQ ID NO: 157218 - protein, 343 aa, unidentified
MPLYVGLDVSQKTTAVCVVDQQGRRHWRGACATDPSAIASLVRRRAGVDAKVGVETGSMTPWLVHGLRDAGLVVVCLDARRVKAALQMRLNKTDQNDAEGLAQVVRTGWYRAVHVKSLDSHRARSLLGARAQLVGMRTRLINMIRGVLKTFGMLPGSGRGRQFERHVESLLQEEPQVTTIVRPLLNVLRQLEEQITTFDKAVQRQVRADPTCRLLMTAPGIGALSSLVYVSTVEDPQRFSRSRSVGAHLGLTPRRYQSGEIDRSGRISRCGDGLARTLMYEAAIVILHRVKRASHLRDWALAIAQRAGPGKARVALARKLSVILHSVWRSGEPFRWSTQTQEA

SEQ ID NO: 157219 - protein, 424 aa, unidentified
MNNTQNQKIAQVTDKTLIVGVDIGSENHYARAILARGFEVSKKPFPFTNTEEGFESFVNWTHNLATAHKLTKIMVAMEPTGHYWFAFVAFLKKYDVQVVLVAPQHVKHSKEMDDNTQEKDDRKDPIVIARLVPEGRYLIPYIPEDVFAELRVAFNRRCELVEEQVRIANRMIRWFDIYFPEYRKIYGRIDAKTGIMILKRAPLPADILDIGVDGICQIWKDAKLRGYGSKKAKQIYSAAEHSVGMKGGASVRWKLWQLLEEYELIERQLHDILQLIEGLLYQIPGADKLLKIPGAGLVTVAGFLSEVGDTKRFSDPKQIQKLAGLAVVENSSGKRKGLPGISKRGRSRLRWVLFQLARSMVMFNPEMKAYHQYYTTRKENPLKKLQSLVAISARIARIFYGILKNGTDYDPTMVMKDFNKAVAA

SEQ ID NO: 157220 - protein, 345 aa, unidentified
MKIVGCDLHTRYQQIAMLDTETGELIERRLEHANGEARAFYAGLQGPVRVGIEATGHTRWFERLLAELGHELWIGDAAQIRAAMVRKQKTDARDAAHLLQLLVEERFPRIWRPTMAERDLRQLVWHRQKLVWMRNAVGNQLHALAMGEGVCRKKQLWTKQGRAELQALNLGAWASYRRQELLEMVDQLDGSLEKLDRAVEEQSQQNEAAVLLRTHPGVGPVTSLAFVLTLGPVERFKRSKQVVSYLGLNPREHSSGGKQRLGGISKQGNPMMRSLLVEAGHSAARLDAELHKDYQRLKLRRGSGVAKVAIARKLAVRMYWMLRQQANYAQLVRMQGSPWATLVEK

SEQ ID NO: 157221 - protein, 436 aa, unidentified
MRKGRGDLEQINIDAAGIDIGSEFHYVAVPEDRAEQSIRKFGCYTADIEGMAKWLKECGIKTVAMESTGVYWMPVFQILEANGFKVLLVNARHIKNAPGRKTDVVDSRWIQQLHTYGLLQGSYQPEAVIRKLRTYLRHRESLIRSRGTHTQRMQKCMIQMNIQLHKVISDITGFTGMRIIRSILEGERDPLKLAQLKSSRIRNSADIIAKSLEGNYQEEQLFCLRQEVEQFDYTCRKIQECEEIIEKTLCEMDGCTGDNSDNKNHKNHKENIKNKLQAVCKVDLTEIDGLDVNNIETIVSEVGVDMNKWPTDKHFGSWLGLSPNNKISGGRILSRKSKKVVNRAATAFRLAAYAAGKSDSSIGAFYRRLRNRIGAPKAITATAYKIARLFYMCMKTGRSYKDLGADYYEKMYKERVLKNFKKKAADLGFSLLPLHV

SEQ ID NO: 157222 - protein, 372 aa, unidentified
MKKNTRYVGLDVHAQTIAIAVAEGGRDGEVRSLGTIPNTPEAVRKAVKKLGSVENLAVCYEAGPCGDVLYWQLTELGVRCEVVAPTLVPMRSGDRVKTDRRDAEKLARCYRSGDLTAVWVPDAEHEALRDLVRARESAKEDQRRARQHVRHFLLRHGRRPEGATRAWTAKYETWLGSVRFEQPALEATMLDYRMEVQHARDRIERLERAIDAAVEKAPAKMQAVIAALQALRGIAKVSAVTLVAELGEFSRFARPRQLMGYAGAVSGEHSSGESVRRGAITKTGNSHVRRIVGEAAWAYQHRPGVYGALRKRQAGLSEEVKAIAWKAQHRLCGRYRKLAGKGKPHQKVVTAVARELLGFIWAIGTHVERTAA

SEQ ID NO: 157223 - protein, 400 aa, unidentified
MLSIGIDVSKGKSTVCGMKPGGEIVYAPFEVQHTIEGMLELVSLLRSSCEEVRAVLESTGSYHCPVVAALLENGIFVSVVNSLRMKRFCSQSIRKVKTDRIDAMQIALYGLAYWQELQPTRLPEDTYRELQLLARQYYQMTSLLIKAKVDFNAICDQVLPGMQELMNDHAGRHKLSDFVLRYRHTTHILEMGETRFRKDYCKWAEKKGYRNHERMAALIFATAQNGIPVLPNAPSTQIVITEAIRVLHTVEASRDAILTQMQALAKTLPEYSLVREMPCIGDTLAPRLIAEIGDVRRFHSKRALIAYAGIDAPPYQSGKFCANNRHISKRGNRYLRKTGYEVMQSYVMHKPANDPIFTFIEKKRSEGKSGKLAMVAGLNKFLRVYYGKVTELYRSLPAIE

SEQ ID NO: 157224 - protein, 467 aa, unidentified
MLSGAMQTLAGRDADMWAEAPDATSQRRVASCPVRERPRISWMRGDAPPRISFGRLRSRALGQAPPHRRREPGMIYAGVDIAKTDHVIGAVDERGAEMCRPMPFKNTEAGLERAVALLEGLAGSPSDVVVGMEATGHYWMACYSFLVARGYSVAVINPMQVKAVRKLKKLDKVKNDRVDAWLIAETLRIGQYDETRLATDEVASLRSLSRYLQSLRGMAAELKTQCVCLMDAHFPEYAGIFSDMFGAGSRAVLSKSPLPFELARRRADSLARDIAEASRRGGKSAGCAARIKAAARSSIGVRLGQEAASFQVKSLIRQIEFADSECAKVEARVRALLDEVEPLVLTIPGVSYVTGAQIVSEIGDVSRFRNASALVSYAGLNSSVSQSGQFDSGGGPITKHGSPYLRRALWLAANRARQYDPGLRAFYDKKRAEGKPHRVAVTAVARKLCHIVFAVMRDQVPYDPGRE

SEQ ID NO: 157225 - protein, 311 aa, unidentified
MDTTVVVGIDVSKDRLDVHVLPSGESFSTPRDEQGVGALVQRLAPLGPYAIAMEATGGLETLVAATLNGANLPVIIVNPAQVRAFAQALGKRAKTDAIDAAVIARFVAATKPEIRPLPDADTALLAQLIARRRQIVQLMVAERQRTTQLPTRPLRRSAARLIKALQRELDVLDREIDTTIHGSPIWREKEELLQSVPGVGPVIARTLLAEMPELGALTRREIASLAGLAPWTRQSGRWRGKSFTGGGRASVRTALFMAALVGSRCNPILKAFRQRLDAAGKPKMVALIAVARKLLTILNAMLRDKSPWKTA

SEQ ID NO: 157226 - protein, 341 aa, unidentified
MEQMYGIDLGLSSFEVSFFDVQGKSHQLKQVKNTVEGIGHFLSLLPANACLCAEYTGVYGDLLLHLCNCAGVRICFVPGYEIKHSLGLQRGKSDEVDACRIREYAERFSDRLQTSFAPTEELEELQELYRTRGQLVESRKRLSTLNRGDNCKVVVSLAAARARQHLLDELDEQIRGLDAEIDRLIKSNPEQEKSYRILTSVLGVGPVTACELIIKTENFQKLDTAKRCAAYAGIAPYPKESGKMKCNNHSSPLGDKHLKSLLFLCARSAKGHNKEILLYFIRKYQIEKKPYYLVMNNIANKLLRLLYSLIHKGELYDRDYIQIDPRNNQEIRKGGIAKLAS

SEQ ID NO: 157227 - protein, 339 aa, unidentified
MNRIVVGVDIAKRVFQLHWVEPETGEIVALQLKREKFLEHFANRSGCLIGMEACGGSQHWARSLQKLGHEVKLLSGRTVKPFVGGNKNDAADARGIWTAMHQPGIKAVAVKSEEQQAVLALHRMREQLVKFRTAQINGLRGLLTEYGEVMPQGRAGIKRDIPGALGRLSDRLPAIVIETLREQYARLGELDEQISQIEGRLRQWQREDPATQRIAAIPGVGLLSATAAVATMGDAKAFKSGREFAAWLGLVPRQTGTGGRVRLLGISKRGDKYLRTLLIHGARAVLSHSKSPPEWLTELMKRRPKNVAVVAMANKMARTIWALLAHERVYQSSYVSRPA

SEQ ID NO: 157228 - protein, 354 aa, unidentified
MNTTQNSTKSKIVKVIGVDLAKDHCDVIGYDENGKICLRLDGCSYAKLREILSNLPQAVVLMEACKGSMFHARSIADLGHEVRLVKGTDVKALRNVNHKNDLRDAAYIAKLYFVPGTTYVYIKSQQQQSLQFLQNEYKSLQELRIQVGNQIHAGLEEFGCPVRKSSKFIKTRMVAHLEKHAELIPEDVMASFKRRREIWLNLLQQEEEAKRRLEQVAATDANAERIMTVPCVGPQTAVGLLVHVGVDFGRFKNSRQFAASLGLVPKQNSTGGNNTLNHITKCGPKSLRSNLVQCAQLVLMYAEKWKGNFGDWVRKMRDSGKKHGVIVCAIAAKLARIIYRLMKDKVDYTPILSC

SEQ ID NO: 157229 - protein, 404 aa, unidentified
MIDTGNIDVFLGLDVGKGEHHATAVTPAGKKAFDKRLPNTEPKLRELFAKLQTKHGTVLVVVDQPASIGALPLAVARDMGCPVAYLPGLTMRRIADLYPGEAKTDAKDAFIIADAARAMPHTLRAIDGEDETIAELEMIVGFDDDLAGEATRIANRLHGLLTQIHPSLERVLGPRLQHPAVLTLLERFGSPAQIRKAGRRRLVTLLRPKAPRMAERLVEDIFAALDEQTVTVPGTEAAALIVPSLAGSLAAVLDQRKLLAGRIEELLDAHPLSKVLTSMPGVGVRTGARILIEVGDGSTFPTSGHLAAYAGLAPATRSSGSSIRGEQPSRRGNKQLKRAFFLSAFAALGDPASRAYYDKKIAQGKHHTQALLCLARRRADVLFAMLRDGTFYEPQPVRAVAPQT

SEQ ID NO: 157230 - protein, 327 aa, unidentified
MSFAALGIDISKDTLDVALYQDDSYRLATFTNEKDGYRRLAKWLKKHKARECRVCIEATGRYGETVAMYLYERDYSVSVVNPARIKAYGASMLKRNKTDREDAKVIAHFCATQNPGVWAPPPPEIQELQALTRRLEALKADRTRELNRKQSGVQSKTVLADIDAHIDFLKNQIAIIEQRIRDLLDQHPDLREQHDLLTSIPGIGDITAARLIAEIPDVNDFQSANQLAAYAGLTPRNHNSGSSVHRHGRLVKTGNKRFRTALFLPALTAMRFKPIVQALVERLQTKGKNRMTIVGAVMRKLVHLAYGVLKHRKPFDPDCLVNVQVSA

SEQ ID NO: 157231 - protein, 341 aa, unidentified
MDIAILGIDLGKNSCSIVGLDSSGKVVLRRRMQRKTIVTTAAKLSPCIIAMEACCGAHHLGRILAAQGHTVRLMSPEYVRPYVKAQKNDDRDAEAIAEAATRPTMRFVALKSEEQLDMQSLHRARDRVVVDRTSLMNQLRALLLERGIIVPQGRAKLRYRVTELLAQPCEELSPRILVLIEDMLTRWQALDERIAAFDTEFAAEVKQNEAARRLTSIPGIGALNATALVAAVGDARTFARGRDLAAWLGLVPRQATTGGKPRLLGITKRGSKYLRKMLIQGARAALPTLSRGSTLLGQWLRGLLARAHSNAVVVALAAKMARMVWALLRHGSTFEHRAITV

SEQ ID NO: 157232 - protein, 340 aa, unidentified
MKNFIKKRHFLGIDISQEVLDISLMNEDSYGVYKDKQVKNTFDGFETILEWTAKQKIKIEDCLFCMEHTGTYGLLLFAWLSQMNIDYCVEPGLKIKRSLGLTRGKNDKIDARRLAEYACTNRAKLQAFELPSALILQIKQFLTYRDQLVKIKTSLKNSLKSHKTYQKVSGISEISADIMSQIKDYENHIGKAESKIIQLISLDPEVKKNFELATSVKGIGLVIAAFMLVTTNNFKGFDNGRKYACYSGIAPFEYSSGSSIRGRKRVSQLGNKRIKSLLSNGANSAYKYDPEIRAYYTRKRSEGKDHKLVINAISCKLVNRVFATVKRQTPYVTIYQQNFA

SEQ ID NO: 157233 - protein, 442 aa, unidentified
MGTQSTSEALTDYRGGTAPAGSRLYVGIDAGRRQHVVAAIVLERMENGSWERAAVHRIQTTGQGFRELIVWLQAFGHTPDQVRIGCEPTGLWCAETVVAWLERHGYEVQWLQTWALHERRRLAIGKQTKTDALDARLIARLLYEREFHAQNRGFLKTGPRSTDGLRLLVRSRVRLIEQRTRLRLQLTNVEDALFPELKEFFKTSITSPAVRRLLEAFPTPKSIAVGPAEDVYRVLVVQGRSRIHAARVNELCQLAAESAGLVEVEPILHAQGWLLRQLNAVDEQIEDLELSIVAALESWPAEQRAVLASFPYMSHMRQAVLLAAIGDVNTFRNDGQLRKFLGWYPEARESGTTISTHRLGNSGNRLGRREVWFWAMQLITPRQPATPFAVYYQRLRTRGVPGHAAVGHLAGKLISVLFFCLRSGRLYDPAQHARALGLGDAR

SEQ ID NO: 157234 - protein, 371 aa, unidentified
MSESSTIFVGLDQHKESITVAYVGADRSLEPICLGPIGTRTSDIDAMVRKLQSKGKKLVFAYEAGPCGYGLHRHLTRKGHTCLVVAPAKIPRKPGERVKNDKRDATNLCRLLRSNDLKCVYVPQIADEAIRDLCRAREDAVSDLKSAKHRIKSFLLRHDIRFNGKADWRTPHLRWLGEVKCATSAQQVVFQEYVRAMVQGFERVERLEIELTQHVKSWRLSPVVEALQALRGVRFTVAVTAIAELGDLTRFEKPRQLMAFLGLHPSEHSTGERRRLGGITKTGNTHARRVLVEGAWAYRFPARVSKQIQARQEKLPEAVRDIAWRAQVRLCKRFQKMIARGKNANVVVTAIARELAAFMWAIAKQVPVAAQ

SEQ ID NO: 157235 - protein, 343 aa, unidentified
MQTVTTIGLDIAKSVFQVHGVDAEGNVLIRRKLKRRSVLAFFQKLSPSLVGIEACATSHHWSRQLKRLGHTVRLMPPAYVKPYVKRQKNDAADAEAICEAVTRANMRFVETKTPEQQSCLMLHSTRQLFIRQQTSVINAIRAHMAEFGIVAPVGRKGVEQLLAIVTDASDPCVPEVARACLIALAAQLRMLKAQILEFDRRIMAWHRSNETSRRLDAVPGIGPALATALVASVPDPKAFRSGRNFSAWIGLVPKQHSSGGKDRLGNITKQGDRYLRSLFTAGALAVIRYAKINGTQHRPWLAALLARRPTKVAAIALANKIARMAWAMMAKGERYKEPVALAA

SEQ ID NO: 157236 - protein, 316 aa, unidentified
MTKYVGVDVSKESFDGYCPDLGNRQFSNDATGFKVFGKWIGDSVHVVMEASGPYYLQLATYLHESGIPVSVVNPLVIRRFCQMKLQRAKTDSKDAMAICQFAQMTNPKVWVPAPQHLQQMLQMQAVMEQLRKQLTATNNIMRSFDHHPTVDERAVKSLRRVAEEQQHQIQELEKQIMELTKKNYQAEFDALVSIPGIGTKTATILITATDAFTKFETAKQLVAYAGLAPRIFQSGKSINKKPKISKLGMGDLRRSLFMCAFQAIKNNAGCKTLYERLRAKGKAAKIALIAVCHKLLRQAFAIVKNKISYVAELSLG

SEQ ID NO: 157237 - protein, 414 aa, unidentified
MEQKLIYLGIDWADDHHDIVITDDSAKTLNQFQIDHTPDGFAQLHANIANYQKSPADVLIAIETNRGLLVHELIRTGYTVYAINPKAVNRYKDRHVLSKAKSDILDAQALAHLLRTDRHRFKALVPLPEDYRLLDRFCGDLRKLIDEKSRIVNQIISCLKEFYPKALELFSLNSQIFIDFLKAFPDHDTLRACKKKTFLAFIKKHRYPYPGKIEELWETIQSSTLQADTVTARAGKLRLLMLLDQLENLKIHCTHYEQEIQKILDTLPESNSIQSLPGVGDRLAPELVAALGPNGKDTHHRFHCAEEIAKLSGCVPIIKQSGKWEKVSIRHACIRSLRRTFHDWAFTSLKSSTWARAYYDYHKARNQSHFTILRNLGKKWIKILFAVWSKGTTYDEALHIQNLKARNIPWAMAL

SEQ ID NO: 157238 - protein, 391 aa, unidentified
MIYVGIDVAKDKHDCFITNSDGEVLFKAFTISNNLDGFNELYQKIESVMEDTTKVKVGLEATGHYSYNLLGYLIDKGLPTYVINPLHTNLYRKSLSLRQTKTDKVDARTIASMLMSDVNLKSYSDTSYHNEELKSLTRYRFDKVKERAKLKTSVSRLVCILFPELEKLVPTLHIASVYAMLSEFPGAKQVANAHLTRFTNLLSEASKGRYGKETAIAFRDAARTSIGSNMPAKSLELKHTIKLIQELTSEIDEIEHEIKLIMDELNSPILSIPGINYRMGAMIIAEIGDFTRFDSPDKILAYAGFSPSTYQSGQLDGAYSHIEKRGSRYLRYALYNAAKYVCIWDPTFAEYLAKKRSEGKHYTVAISHAVKKLVRVIYHLEKTNQQYIKAA

SEQ ID NO: 157239 - protein, 403 aa, unidentified
MNSVGIDISKGRSTIAVMRPFGEVVISPFEVRHTDSELSKLARRLKSLNGETRVVMEATGNYHAPVAKLLHDAGLYVSVVNAKLVHGYGNNDLRRVKTDRKDAVKLANYGLDRWLTLPRYIPEEDTRLLLKNCYRQYRQYSKVQTILKNNLISLLDTVFPNVNRLFSSPARADGSEKWVDFVAEFWHCRCVSEKSEKVFTNKYQRWCRKHGYNFSEEKAHTIYVEASGHIGVMPKSETTKLLVEQAVAQLRATSAALAALKHEMQSLASMLPEYPVVMDMFGVGPTLGPQLIAEIGDVRRFYSKKALVAYAGLDAPPNDSGDVTGRHKSMSKVGASSLRRTLFLVMSVYLQNAPLDEPVYQFMDRKRAEGKPYRVYMMASANKFLRIYYATVKAYLESLEHTA

SEQ ID NO: 157240 - protein, 345 aa, unidentified
MEHTTIAVDLAKSVFQVAVSHRVGQVTSEHRLRRSQMMPFFAQQPAATVLLEACGSAHHWGREFQRLGHTPRLLPAHDVHRYVRRNKTDRADAKALLEAGRNDEICAVPVKSIEQQAIASLHVIRATWLATRTARLNALRGVCREFGISIPVGATRVIPAVRAQLTPDGPLPPMLWPALEALCAEVTSLKAGMDAIERQLATLAEQMPDVIRLQTIPGIGLLTASALVARIGNATRFPDGRHFASALGLTAKEDSSGLQRRLGGISKRGDVYLRQLLINGARAVLCHSKRHRELDPLREWALRTQDRRGHNVAAVALANKLARIVWAVWTRGCDYQAMTPRPQVP

SEQ ID NO: 157241 - protein, 335 aa, unidentified
MKNYLVHLGVDISKFKLDVVFFDKQTPSLAEHFIVENTSKGVKNLITVLQKRKIDLTTVLFCCENTGVYTFPLSSYLSDKKLDCWGVPAIEIKRSKGISRGKNDKTDAKDIALYSLRNIDKLKLSSVDEKTIQELKLLHTEREKVMKSFKLFEATKENIDFMPKQVYKSINAVNAKTIKFLKATLKVVEKKMIEIINNEPKLKTQFELVKSVPGVGDRTAIYMLIATKGFTAFDNARKFACYSGTAPFEHSSGTSIKGRTKVNHMADKKMKSILQMCALVAVKHDPQLKEYYNKKKAEGKNAMLVLNNVKCKIIGRVFSVINRQTPYINTYKFAC

SEQ ID NO: 157242 - protein, 347 aa, unidentified
MRFYNRQHQYYCGVDLHVKTMYVCILDTRGEVLVHRNVPSTPGAFLATVAPYRDDLVVAAECMFTWYWLADVCAAEGIPFVLGHALAMKAVHGGKAKNDKIDSHKIAGLLRGGLLAQAYVYPAAMRATRDLLRRRLHLVRKRGQLLAHIQNTRAQYNLPEFGRRLAYPANRDGVREHFPDPNVRKSIEVDLALLAQYDALINDLEMTLVRDAKRHDADAFHRLKSVPGIGKILALTILYEIHDITRFDRVQEFASYARLVKGQRQSGGKTLGTSGAKMGNVHLKWAFSEAAVLFLRHTKDGKKLLAQIAKKHGKGKALSILAHKIGRAVYYMLSRGTVFSTEKFRAA

SEQ ID NO: 157243 - protein, 408 aa, unidentified
MEQLYVGIDVSSTKHAAYLMKPDGDKFSSFPMQNDRSGAKMISEKIVSALTKLGLKDVVIGMEATSIYGDNLVYALREDGNLGRFHRKIHVLNPKQVKNFKKSYPELPKNDPVDAFVIADQLRFGRIGKEVYMDDYRYKALQTLTRARFYAVQNLTREKERFANYLFLKCSGIAQSKDIPNTSATTLALMEHFETVDELANADLNELTAFVNRAGHGRFADPEATAKLVQAAARGSYRLPKTVNDSINQVMSASIAAMRALESQIRTLEKAIEKQFEIIPNTLISIPGIGKVYSAGIIAEIGDICRFTGQASVAKYAGLVWTQHQSNEFEAEDTRLIKSGNRYLRYYLLEAANSVRRCDSEFRRYYDLKFKEVNKHQHKRALALTARKLVRLIFRLLKDNRLYKLPEG

SEQ ID NO: 157244 - protein, 417 aa, unidentified
MQYALPLVLPDVPAGGVCAGIDWATADHVACVVDMTGRVTDRFSAAHDKAGIAALITRLRRSKVTEVAIERGDGPLVDALLAAGLTVVVITSRQVKNLRSRFGAAGAKDDRFDAFVLADTLRTDRARLRPLVPDTPATISLRMTVRARRDLVRHRVAVCNQLRAHLAVAFPAGITLFHDLDSPISLAFLARFGSQDAAAGLDEQAIGAWLATIAVRGRPAPASVLHARLQAAPPGATGTDGAAQAGITAALTATLTALSAQIKALATQIAGQLAAHPDGHIFTSLPRPGTVRAARLLAEIGDCRSRFPDPESLAGLAGVAPVTRRSGTRIAHGFRWAVNRQLRDALCDFAADSRHASPWAAAIYDDARARGKDHPLAVRITARAWTYVIWRCWHDGTAYDPAKHNALQAVLARQQDQ

SEQ ID NO: 157245 - protein, 354 aa, unidentified
MSNQSNSTVATMGIDIGKNSFHVVGLDQRGAIVLRQKWSRGQVEARLANMPPCLIGMEACVGAHHLSRKLQSLGHDARLMPARYVRAYLKGQKNDFRDGEAIAEAVQRPTMKFVATKTAEQLDLQALHRVRARLVSQRTGIVNQIRAFLLDRGVAVRKGPRFLRTELPRILSTRCDVLSPRMVHVIEELAGDWHRLDERIKSVSSEIEALADQDPACERLMTVPGIGPIISSATVAAIGNGAAFSKGRDFGAWLGLVPRQISTGDRTILGKISKQGNRYLRVLFVQAARVVLVRPNSWERYGLKSWIEAAKKRLHHNVLAIALANKLARIAWAVLNKERKFECVRTSAMASRSA

SEQ ID NO: 157246 - protein, 309 aa, unidentified
MDKVVGIDVSKDRLDVHVEPSGETFVVGNDHAGIEELVRRLGALSPPAVGLEATGGFENLAVAALSAAGFGVIVVNPAQVRAYANALGKRAKTDPIDAAVIAAFIAATKPQLRPLRDAETKALAALVTRRRQIVQMIVAEENRARMALARQAQKSIKRLLTALKRELESLDGDMDDHIRASPAWRVKEKLLASVPGVGRTVARTMIAEMPELGTLDRHQIASLAGLAPWTRQSGKWRGKSFIGGGRSRVRAALFMAALVAIRHNPVLKAFRDRLVNAGKRKIVAVVAVMRKLLTILNAILRDQKPWQTA

SEQ ID NO: 157247 - protein, 389 aa, unidentified
MKIFVGIDIAKLNHFAAAISSDGEILIEPFKFTNDADGFQLLVSKLESFDKNSIIIGLESTAHYGDNLVRYLVAEFYQVCVLNPIKTCQMRKNNVRKTKTDKVDTFVIAKTLMMQDDLRFITFFDLDMMDLKALGRFRQKTIKQRTRLKIQLTTYVDQVFPEIQYFFKSGLHQHAVYALLKEAPSPKEIASMHMTHLANLLKVNSHGHFTKEQAKELRVLAQKSVGANDSAISIQITQTIQQIELLDSQLEKIEAEMTDIMKFNDSVIMTIPGIGYINGGMILGEIGDIHRFSNPNKLLAFAGLDPSVYQSGNFQAKTTRMSKRGSRVLRYALVNAAWNVVRNNATFEAYYNAKRAEGRSHYNALGHCAGKLVRVIWKMLTDEVDFNLE

SEQ ID NO: 157248 - protein, 331 aa, unidentified
MKKPVLIGIDVSALTFSIAEAFPDQEVREVEGENTPAGHRELCRRLAKARRPVRVCLEASGIYHLDLTLALAATPNVEVMVANPRASRDFARAQMGRSKTDRTDARSLLEFVRRMPFVAWVAPSPQTLALRAIARRIAALSVHSAQERSRRDAVDHCEALPDVLDQETDAHLTFLKESCKRLAAEAVKIIDADPWLRKAFGHLVSVRGIAQTSAIALLGELAILPTDMSARQWVAHAGLDPRHFKSGTSVDKPPRISKTGNRRIRAALYMPALVAIQSEPNVRAFYEKLLARGKKPLQAIVGVMRKLLHAIWGMLHHDCDFEGEKFYRLPA

SEQ ID NO: 157249 - protein, 357 aa, unidentified
MKMMTEKKGSVIGKDVYVGIDVHKESWQATVRTEGEEIFNGRIPGRYQSLKKLRERYQGCRMNAAYEAGPFGFWLSDKLAADDIEVLVVPPSLIPVESGSRVKTDKRDSRKLAKLLESNMLKRVYVLTPEEREHRDLLRTRRQIVDHRNDVARQIKSKLLFYGIMSPFSSTTRWSLKYIEWLKTLRFDTDYLKESFALLIDLYEYLTRQIARINRKVVQLCHDNKYCDRIKLLCTAPGIGRLTAIEILVELQDISRFKSAKELASYIGLTPSEYSTGDRTRQGRITRCGNKRVRTYLVESAWLLITKDPVIRLKYLKLKNLRGGKRATMAIARKLLIRIRRMLIDNVPYRMAEAMAV

SEQ ID NO: 157250 - protein, 351 aa, unidentified
MFNQVAILFVSNSKIMKNSLTIGIDVSKLTLDWAVFNGQKIIFRFHGENTQSGIKAFLSKLKKEKISAEEALYCLEYTGLYINPSLYYLHEKRLKVWVETPLQIKRSMGFTRGKNDSVDAERIAIYAFKNQEKARLWSPPRLVIVKLKALSRLRSKLIQNLNAITVPLAEAEKYLDHATFQSMNMLSKKSRLALKKDIEAIDQEIKKTMKADDLLNHLNNIITSVVGVGIQTSVTILVSTNEFKSINDARKFACYAGVVPFEYQSGKSLNFKPTVSQYANKEVKKLLHMAALSSIAMNSEFKDYFDRKVKNGKSKMLVINAIRNKIIHRIFACVKENRIYEKNLEVYLANP

SEQ ID NO: 157251 - protein, 391 aa, unidentified
MIYVGIDVAKDKHDCFITNSDGEVLFKAFTISNNLDGFNELYQKIESVMDDVTKVKVGLEATGHYSYNLLGYLIDKGLPTYVINPLHTNLYRKSLSLRQTKTDKVDARTIASMLMSDVNLKSYSDTSYHNEELKSLTRYRFDKVKERAKLKTSVSRLVCILFPELEKLVPTLHIASVYAMLSEFPGAKQVANAHLTRFTNLLSEASKGRYGKETAIAFRDAARTSIGSNMPAKSLELKHTIKLIQELTSEIDEIEHEIKLIMDELNSPILSIPGINYRMGAMIIAEIGDFTRFDSPDKILAYAGFSPSTYQSGQLDGAYSHIEKRGSRYLRYALYNAAKYVCIWDPTFAEYLAKKRSEGKHYTVAISHAVKKLVRVIYHLEKTNQQYIKAA

SEQ ID NO: 157252 - protein, 302 aa, unidentified
MKLLQRWRDEAGQAGHAIKRIAVAYEAAGDGFWLARFLRAHGIEAYAIHPASVAVSREHRRAKTDRLDAELLMRAFLGWLRGEKRHCSMAAIPTIEEEDARRPSRERESLVGEQTRLINRIKAVLARFGIHSFRLSLRSAADRLEDIRTAEGTALPHNTRAEVHRFLERLSLVRQQIRAIEQERERKLSAIPAAENGPHAMVRLIARIIGIGVETADMLVHEILSRGLRDRRAVARYAGLTGSPDESGKRRREKGLARAGNARVRRGMIQLAWRFLRFQKDSALAQWFQGARTTAARPRTRR

SEQ ID NO: 157253 - protein, 421 aa, unidentified
MLKQKNKKANGLSSAPVLEPNAAGVDIGATEIYIAVPPDRDAQPVRRFATFTEDLIAAADWLQRCRIETVAMESTGVYWIPLFQILEARGLKVCLVNARHVKNVPGRKTDVSDCQWLQYLHAVGLLRASFRPEQQICVVRSLMRYRERTTGMAILDAILAGERDPIKLANLRDWRIRASEATIVKSLVGDYRREHLFTLRQSLIAYRHYQKQMADTDVEIEQMLVEFSDGAGPDAPALPQPKDTHKPRRNDLRFDLRAHLYRIFGVDLTAIPGINAMTAYVLLSEVGRDLSGFRSAAAFASWLGLCPDNRVSGGKVLSSRTRPVNHRLAHALRLAAQALFRSQSWLGQYFRRMRAKLGAPKAITAAAHKLARIVFHMLTTGQAYDETVFAQQEVQNNQRMQQRLRQQAKQYGFQLVEITAV

SEQ ID NO: 157254 - protein, 428 aa, unidentified
MNGTDGIRIGQFRQLKKEIRGSEEHMIVGIDVAKEKHHAFFGTVRGETLLRRLIFENNRQGFAKLMSHVDNLKALHGLCKVVFGLEPTANYHKPLGAYLIKSGCMVVLVAGESIKKNRVLLDGRWDSHDTKDAANVADLIGQGKFYFYDYPSMQLQDLRNLLSWRRRIKKHEHGLKVRIRNHLLAQYFPELDSYFGAGGKEMLAVVKWCVSPSVIAGMEFDEFMGVVAPRDRGLRQRQKLRSIWDLAADSVGCTGGASLAFESKMMVDGLVQVRKAIRITDERIEKLCLAFPEYHYLLSIPGFGPYVSAKVLAAIGNPYRFEAGSQVLRIAGYDLGAKRSGKTSQSAVPVISKKGKADLRYALYQAALVAATGNKYFMRYYANKVCGRAKERRIKTKMRVKLAAKLLLIAWTLMKKKESFDPTYVNLT

SEQ ID NO: 157255 - protein, 318 aa, unidentified
MGGVNATIEVGKQQLVVQLGSQGEQFSEANEPRAIKRIAKRLFQAGCERVLIEGGSYQSVLIAGLRAAELPVVIVNPRRVREFARSIGQLAKTDKIDARILALYGEQTQPPLRELPDEQSQALRALWVRREQLIEMLVMEKNRLEHTAEKAKAVRHNLCSHIDYLRKQVKQADNDLDREVRNSALWDKYEMLNSVPGVGPVLSVALLSDLPELGRLNRGEIAALAGVAPFNCDSGTLRGQRRIDGGRSRLRRVLYIATVAAVRCNPALKPFYLRLRAAGKPAKVALVAVARKLLTILNAMLKTKTAWRPPCPARPELT

SEQ ID NO: 157256 - protein, 351 aa, unidentified
MPKARMESKPSSMIVVGGVDTHADTHTVAALDQVGRRLGCAVFPAHWAGYRALADWLAGHGEISAVGVEGTGSYGAGLTRWLSAHQITVVEVNRPNRAERRRRGKSDPVDAEHAAAAVLANTATALPKARTGLVESIRLIHATRAGAVKARTAARNTFTNTLRTSPDAVREQLQPLTRARQLTAATGYRATGDDPDSTVKRCLRRLAVRISQLSEEINAADHELDRLTRELAPTMRSRPGFGPETTAQLLITAGDNPDRIGSEAALAGLCGVSPVSASSGRTRYHRLNRGGDRQANRALHMIILNRLRHHPPTRAYLASHSLQGQATPHLRRVLKRYLVREVYQLLSQLQR

SEQ ID NO: 157257 - protein, 466 aa, unidentified
MKRHRRRPSAKPRPSRAVLEEINPNAAGLDCGAAEHVVAVPPDRDRRPVQTFGVFTGELHTLADWLAACRVTHVAMEATGVYWIPVYEILEARGVHVSLVNARHVKHVPGRKTDVSDAEWLRDLHMMGLLRGSFRPADDIVPLRAYLRHRTALLQGAAAHVQCMQKALVQMNLQLPLVVSDITGQTGMRIVRDLVAGERDPQVLARHRDPRCRASEAEIVAALTGNYRPEHVLVLTQHLALYDAHQAQLTDCDAAIETHLTTLTATVPESTTPLPPPRDPHRRVAKNEPAFEVRAPLHRLTGTDLSQIDGIGPYNALRLIAELGTDMRRWPTERHFTSWLTLAPRNKVSGGRLLSSRTQPSANRAATILRVAAMTLGRGDTALGAFYRRLAARVGKAKAITATARKLAIHVYYALKGDRPYVDPGAAAYDARFREQTLRRLQHRAQHLGFTLVSLNTGEILEPTVS

SEQ ID NO: 157258 - protein, 339 aa, unidentified
MKQSVKPSSQVLAGLDVGATELVVAILRDGQCESPCTLPNTPAGHRRLLKLLTRRKATARVCLEATGVYSLRLALTLERAPRVEAMLVNPRAIKDFQRARLTRAKTDRVDALGILEFLQRMEFVPWRPPTDPVLALQQLGRRLVQLRGELTREEARLHAIAYTPDRAGLIAADLAANIRHLKKRIKALQRSAAEVAAREPELAVQVERLCSVPGIAKVSALRLLGELLVLPRELKAKQWVAHAGLDPRPRQSGASDAPRQISRTGNRHLRHALFMPALVAIQRSPQIQATYEALLARGKKKKVAIIAIMRRMLHAIWGMLHHQQDFNPQLFHATPLPNS

SEQ ID NO: 157259 - protein, 419 aa, unidentified
MEQQIERCAGLDVHQGTVVACIRIAATGRKTRSETRTFETLPAGLRALRAWLQEQGATHAVMEGTGVYWIPVYTALEGALDLTLANAHHVRNVPGRKTDVGDAAWLAQLLAHGLLRKSFVPPAEVRRIRDLTRFRINLVRARATAANQLIKTLETYGLKIASVVTDVLGATGRALVRALADGVTDAAALGNCARGTLRSKRPELAAAVATPLAPHQRLLLDFALRRIEGADREVAALDEVIAAALVPHAALLDLVKTVTGLEVVSASALLGEIGVDMRAFADAHHLASWAGLCPGQRESAGKSKGGKTRRGNPYVKRVMTQAAWAATRVKGSYAQAKYHRLKARSSAGTALVAVAHKLLTAIYHMLLTGQPYRDLGAQHIERKDAARSARRLVQRLEHLGYAVDLKPNNSEGGSAMSRS

SEQ ID NO: 157260 - protein, 404 aa, unidentified
MGQVFVGHDWAEEHHDIDIRDGEGRSLGRARLSEGVEGVARFHALVGALVEHPSAVVVATETDRGLFVGSLVAAGYQVYAVNPMSVARYRERHSTSGAKSDPGDAAVLAELARTDRHHHRRVAGDSDLAEAIKVLARAHQSLIWTRQRQLNQLRSTLREYYPAALELGDLHGPDALGVLTVAPTPSLGRRLSRTRIGSAIARAGRQRRVEQRAAEIQAVLRTDQLSPPAVIGEAMGASVSALVAVVGEFNTQIARLEEQLSERFDQHPDAKVVRSLPGLGTILGARVLAEFGDDPNRYDSAKSRKNYAGTSPITKASGKSRVVLARYARNRRLADACYLWAFAAITASPEARSFYDARRAAGDTHNRALRALANRLVGLLHGCLRHDTPYDAHAAWDHRHQRAA

SEQ ID NO: 157261 - protein, 315 aa, unidentified
MRIPQAFMVGIDVSKVHFDVAVEGKRAVVRFDNDAPGRAALATAIAGAELAVVEATGGYEMAIVRALMAAGIAVAVVNPRQVRDFARASGRLAKTDQVDARVILHFARAMRPAQIPHIDDGRIALAALVARRRQLIDMAVAEKNRLEHAPQAVATLIGETLAALKSQLARVDAAIALAIEAEPDMAARRDLLLTVPGIGEVGAAVLIAELPELGAIDDKKLAALVGVAPVAHDSGTWRGQRHIAGGRATVRCALYMATLSAIRCSPAIRAFHKRLRAAGKPPKVALVAAMRKFIVMINTIIKRRTPWSEPQQHGC

SEQ ID NO: 157262 - protein, 317 aa, unidentified
MTIPSESYVGIDVGKTWLDVALWGSEEAWRVSNDEAGIAKIMEWVTALKPRLIAVEATGGYEQLAVQTMLLDSQPVAVINPTRVRALSKATGKLAKTDVIDARLIAEYAFKIHPDAQEPKKANEIRLNALVTRREQLVVMCTAEQNRLGTVLNSLQADISEHIEWMNVRINKLEEEINQLIDSLPEWKEQAARLDSIPGVGMITAMTVLAEMPELGQLDRQKIAALAGLAPFNQDSGKKRGKRRIFGGRKGIRRVLYMACLSATKCNPVIRSMFQRLIKKGKLFKVALTACMHKMLTIMNAMTRDRVEWRAPKPSPI

SEQ ID NO: 157263 - protein, 350 aa, unidentified
MNATTVAVDLAKNVFELALADERWKIIERARLTRAQFERWFDNRKVDRVVMEACGSAHHWARTLRARGIEVRLLPAQYVRAYVKRDKTDAADAQALLEAARANDIRPVAVKSIEQQALQALHRTRSGWMSTRTRRINTLRGFCREFGLVVPEGAATGLACIARYLADDRSGLPELLRPSMRLILDEIRLMEARIGQLEQALSQIAKHSPDCQVLQSVPGIGLLTSTAMVAAVADPRSFDSGRRYSSFLGLTPREYSSGNTRYLGRISKRGDRYIRMLLTHGARSVLRAATVAHRAGRPIDRLKSWALAVQARTNHNKAACALANKLAPIAWAVWVKQEKYQSASIKALSV

SEQ ID NO: 157264 - protein, 367 aa, unidentified
MFTERTAVGLDVHARSVRAAALDTVTGELVQARLAADTSVIVPWVLGVQERFGVAAAAYEAGPTGFGLARAIEQVGVRCVVAAPSKILRPAGDRIKTDAKDAILLARLLRMEELTAVRVPTPAEEAARDLARAREDARTDLMAARHRLSKLLLRHGLVYDKGAWTGVHDVWLRRVRREGLLGAGLGTLTAFDAAYDAAAAIQARKKRLEDAIEEMAADSQFTAVTTRLCCLRGISTLTGFALAVEIGDWDRFTGATIAAYLGLVPSEHSSGESRALGPITKTGNTHARRLLIEAAWHHKGSYRPGKTMKARWAKAPAPVAARGDAGNRRLHHRWQVLAAKNKKHTVANTAIARELAGWCWSLATMDT

SEQ ID NO: 157265 - protein, 341 aa, unidentified
MKKNLFFIGLDISKDDFAASIYPNPGQPIMTKEAIPNNPEGFEMLLLWLSDYHIDKKNCRICMEATGVYSQAIAYYLLFQGFPVSVEPPLKVKRAFDSVGHKTDPVDSKQIAEYAYRFQDELTSWQPRDEILEKIRQLLSVREQFTKQKVALDNSIQAYSRQRVQVALIKKAQKETLNQLKKQIARIDKELANLIKQDPEIFQRTNNLDSIPGCGMLLAVHLLVITENFTKIQNPKRLAAYIGIVPYQHQSGTSVFKKAKIRHFGPGPSRKLLRLAAQSVATHNVTFRRYYLRKLDQGKAKPLVLNNIANKLLKVACTIIRNNTRYIKDYRSINPMYLKSA

SEQ ID NO: 157266 - protein, 525 aa, unidentified
MVTGSKKRKSTGSKRRFIGKPTGQIQERVQGVGPEHFGIVAVDCAKRRSKWMLCDFYGKVILEPTSVEHTAGGLRVMTQRVAEVCKAEGLTDSIVAVEMTGIYHKPVYRAFRKAHFDTRIVHPFASNHYSQPLHPDEKTDDKDLEAIFHAAIKGYGLATLPVGEVYQSLQAVSRHRHNLVKQRAKLMVQIRRLLHQTMPGFADLFPDDHLYHRSIALPVALHFSSAEAIQRAGVNGIAKHLNKTKVRFQTRTIERIVAWSSTAAESSELAAMHTRQWQQLDKVRRLLGEQIVATEQEMASFLVKTPYILLLSVTGINVVSAGRLAGEAGPIEHYASARAINGRAGLFPSRYQSDEVDHADGSLVRQCNRKLRGAAMLVAENLIKCHPYYRGLSALWKQQKVDPRDRRCRIANRAMRMVYQLVGGRQLWRGKGVDREYLLAKLQEFHRVHKTPIEQSIRDLNEAFVWLPQSAYAAEAKPLEELARKKRRGVQRIGDLMVPLLIRLGVAIEEEESVKSKTSEARSSD

SEQ ID NO: 157267 - protein, 369 aa, unidentified
MGDRIRYVGLDVHKDGIVVAVAEDGRRGEVREYGRIANTPAALQRLAGKLGQEGVELRFCYEAGPCGYGIQRQLSALGHQCIVAAPSLIPKRPGERVKTDRRDAVNLAKLHRAGELTTVWVPDRGHEAMRDLVRARLDAVRALRRARQQLSGFLLRQGCHYGRPAWTKLHRRWLAGLRFEQAVHHIVLEDYIAAVEAAEARRDRLTAQIEAMLPDWELAPVVAALQTMRGMALVNAATLIAELGDLSRFANPRQLMAYLGLVPSEHSSGASVKRGSLTKAGNSAARRLLIEAAWCYRFPARVSRELRLRQEAQPRLIREIAWNAQLRLCARYRKLARGGKPANIVTAAIARELAGFIWAIARHVSPAAG

SEQ ID NO: 157268 - protein, 340 aa, unidentified
MNITQAGVDVAKAVFEVAVSDTPGSVCERHRLGRERFRRFFSAREATNVLMEACGSAHYWGRELEAMRHQVSLLHPGDVARYRDGNKTDRADAKALLEAARNAAIDPVPVKSLEQQAIAALHRMRQGYLQTRTARINAVRGHLREFGVVIPAGARGVVARAEAALSTEELPDFLRRALLDLLDEIESLRSKAEHLRSELEQLARAMPEATTLMSVPGVGVLTATALVAFVGDIHRFRSGRDFAAYLGLTPREYSTGQTRRLGRITKRGNSYLRMMLIHGARSALRAGAITNVPDDLRTWALGIARRRGFNVAAVALANKLARVCWRVWRDRRPFERREAA

SEQ ID NO: 157269 - protein, 398 aa, unidentified
MHVGWDWASQNHDVTVIDDTGTIHARFAIDHDEASLRTVLRDLALLGAPADLPVAIERPDGIVVERLLAAGHVVVPVHPNAFHAARLRWGAGRAKSDPADSYMLADYLRTDGHRLRRLRPLDSVTRELQALVRMRDDHVAARTAATNQLHALLEAHWPGANAIFSRLGSTIALAFLNDYPTPESAARLGEARLSMFCRRHSYRGGRPPAELLQRLRTAAIAPVGVDPVVLTELVRAQTTLIESALATIAQLDAALGALLLAHPKAGLLAPLPRIGEINLAQIIAEIGPLLDRCDNADQAAAACGVAPITRQSGKSRNVQFRFSSNARARVALTCFADNSRHSSRWAGHLYTTARQRGIRHPHAIRIVARAWLRVVWACWHTNTIYDPTHHAGEARHAA

SEQ ID NO: 157270 - protein, 428 aa, unidentified
MSEKNHTRLQEFRQLQKEIRGSKDYLIVGIDVAKERHSAFFGTATGKTLFRRLVFGNDREGFERLLLQAEAMRVQHGLKKVVFGLEPTANYHKPLGEYLLKGGHGVVLVSAKSVKRNRELLDGRWDKHDTKDSANVADLISQGKCLYYEYPEMKLRELRSLLMLKRRLKRQEHGFRVRIRNHLIAQYFPEFDRYFGRSESEGLAIVRWCLEPSVIEGLSCEEFVRLVAPGRRSIRQQERLRAIRQRASASIGCEVGEAVRFEAKVMVEGLKQVREALGAIEAKITEICRGFPEYEYLLTIPGFGPDVSSKVLGALGDPFRFDRGTQVLKMAGLDLVAARSGKRSDGVVPIISKNGKADLRYALYQAAMIASSRDREFIIWFTNRLRGRQREKGIKTRMRVKLSAKLLIIAWTLMKKREPFDPKYLITE

SEQ ID NO: 157271 - protein, 292 aa, unidentified
MAKDTLAVHLLPQDQLLSFPNTVQGHQCLCDHLAGQCVGNALLEATGGFERGVMTALAAAGIAVTRINPRRARAFATALGTIAKTDPLDAALLARMAQLVRAPVPVPDPLREQLRMLVQRREQLVQQRDDERRRLHQATLAVVRACLIEQIGDLRRRIQRMNQAIKQVRCQLDDALAHTLSTVPGIGEVTTASLMAYLPELGTLDRRQIAALVGLAPYNVDSGQHSGKRRIRGGRASIRRVLYMACWSVVRTQTSFKQRYQQLRAPGTRQARQGRHHRMHARAADPTQRHGP

SEQ ID NO: 157272 - protein, 341 aa, unidentified
MEYFAGIDVSLEESSVCVVDGTGKIVREAKVASEPEVLAAWFAESGLKFTRIGLEAGPLSQWLHAGLTAAGVAVILIETRHLKAALGAMKVKTDRNDARGIAQLMRMGWFRPVHVKTLPAQEVRALLIARQLLLRKLRDVELGIRGLLRGFGLKVGKVSTGKYEARIRELAAGHPMLEPVTAAMLQARASLRAEYAKLHRMLFRIVRADAVCRQFMTAPGVGPVVAVSYRTAVDDPTRFRKSRDVGPYFGLTPSKYQSGEVDRTGRITKVGDAMVRTALYEAANVILTRVTRFSSLKAWALRIAKQRGVKRAKVALARKLAVVLHRMWVDGTDFRWRKAPA

SEQ ID NO: 157273 - protein, 442 aa, unidentified
MKPKPQQKNKKAAEDLTPRHWREMNRKQRRETMRKMESQDLSLEVVHPDAAGIDIGNEFHYVAVPPSRDGQPVRRFGCTTAELKAMADWLKQCRIRTIAMQSTGVYWIAGFDILEQAGLEVYLVNARDTKNLPGRKSDVQESQWLMKLHTYGLLRNSFRPSQEIRTMRTYWRQRNDLVQSAGRHIQRMQKAMTQMNIQLANMLSDVSGVTGQAIIKAILGGERDPHKLAELRDVRVKASEEQIAQSLEGNWQQDLLFVLKQEQDGYEFCQKQMAECDRQLAQYLQEREDRSHGAPLPEEKRKGRLKKKKGNAPQFDLREGLFRMSGTDLTRIDSIDVMTATTIVSEAGYDMNKWETEHHFVSWLRLCPDNRISGNKIIGKGRLPTNNPISIALKMAASSLRLSNTYLGAQFRRLRTKLGLRWPLRPWRPSWPAWFTACCATG

SEQ ID NO: 157274 - protein, 323 aa, unidentified
MYVGLDVHKRICHGTMMNGEGKIVKQERFSNGPRGVDAFMGGVEGARVVMEAGYCWQPLYDRLEERGHDVRLAHPLKTKAIAQAKVKTDKIDSETLAHLLRADLVPESWVPPQELRDLRELVKRRAFLVQMRTKLKNRVHAELAKRDITPVRPPFTRKGMEVLQGLGIGAVSQLLPIIEVLDRQIGEASSVIEGMAVEHGDARLLTTIPGVGYYIALLLVAEIGDVDRFPSSEQLCSYAGLVPSVRRSGNSTIHGSITKAGSKWVRWALTQAVHVHIRFDTRLTRFYRRLAGKKAKQVAVMATARKLLKVVYWMLKSGEEYRP

SEQ ID NO: 157275 - protein, 398 aa, unidentified
MTESSDYESVQVFIGVDVGKDTHHAVAINRSGKRLFDKALPNDENKLRSLISDLKQHGQILLVVDQPATIGALPVAVARSEGVLVGYLPGLAMRRIADLHAGEAKTDARDAAIIAEAARTLPHALRTLKLADEQIAELSMLCGFDDDLAAQTTQASNRIRGLLTQIHPALERVLGPRLDHPAVLDLLQRYPSPEKLASLGEKKLAAQLCKLAPRLGKRLAADIAQALAEQTVVVPGTNAAAVVLPRLALQLITLRKQRDEVALAVEQRVLAHPLYPVLTSMPGVGVRTAARLLTEVACRAFASVAHLAAYAGLAPVTRRSGSSIRGEHPSRRGNKALKRALFLSAFAALRDPLSRAYYTCKMSQGKRHNQALIALARRRCDVLFAMMRDGTFYTPQAS

SEQ ID NO: 157276 - protein, 401 aa, unidentified
MKQKRVCGLDVHKDTVFCAFYDGEKKSEVKEYATFTSSIKEMGNEIRSHGIKEIAMESTGIYWIPIWNVLEDMGFTLTLVNPYQIKQMPGRKSDVKDAQWIASLLHKGMLRGSLVPGKRIRELRTYSRKYVQLQGKITGSLNAMERTLEMSNIRITSLVSNNSGKSVLDVIRKIIKKEDSVEELACCIHKRILNSKGEKVKLSLDGYIQEHHRLLLEMDYEQYELFVKQSQRMEKEMSLICETYYKEEFEILQTLPGAGKQASMQIIAETGADMKPFENSGKLTGWAGLRPRNDESAGKMKSTAITKGNKYLRRIMVQCAWAASRTKESHYQMQFQKLIIRKPRKKALIAIARKQLSVIWNMLYYKQCYDPNKQPVHNVNKLKNRIRYHQKQAERLETLCK

SEQ ID NO: 157277 - protein, 360 aa, unidentified
MRIQRTSVGLDVHARSVVACAIDEDTGEVIRHRFGYDPAAVLEWVRSLPQPAAVTYEAGPTGFALARLLTTAGIECVVAAPSKLQRPVGDRVKTDARDALHLARLLRLGEIVAVAVPSIEQETARDLVRAREDNRGELMAARHRLSKLLLRHGIIYDGKQAWTGSHDAWLRRQRFDHAGLQAAFDADYEAVQQVRARKDRLDAIIEQMAATSDYAPVVRRLGCLRGISTLTGFGLAVEIGNWERFTGSSIGAFVGLVPSEHSSGQSRSQGSITKTGNTHARRLLVEAAWHHRKTYRPGAVMHARWAAAPSLAVSRGDDGNRRLHQKWQHFTARKKRSTIANVAIARELAGWCWSLAVMPD

SEQ ID NO: 157278 - protein, 426 aa, unidentified
MLRSQIQKIESITPEVMIVGIDVAKKKHWARIFDYRGLELTKGFSFKNNIDGFNRLVGKLSEIKEEKGLEKIIVGMEPTGHYWKALAWFLKEQGVTVVLVNPYHVKQVKELDDNAQTKNDPKDAMVIARLVKDGRFSYAYLPEGIYAELRVLSTMRQQIRAKLNSAKNALVSILDEYFPEFTEVFKNLDGKAAMHILYYYPFPQDVRELGVEGIVEEFKKATKRAVGQKRAEKLYEAAKRSVGVKEGLAAAKIKIRLCIEEIRFFKKQLEEVEREMAVRLQETGIDRYILSIPGIGIVTAAGILGEIGDPSRFESWKQIRKYAGLNLIEDSSGERKGKTRISKRGRAMLRNLLYQVAVVMVSKNKEIKALYTYLKTRRENPLEKKQALIVVAVKVIKIIFALVKKKEEYDGKKVLGIFREKQIQAA

SEQ ID NO: 157279 - protein, 388 aa, unidentified
MPRQLNDSSRSLVALEQDATLIAVIEMSQSSWLVAGIVPGIERQPLKKLAPDQHALLQLLHRWQKEANEAGQVIKRITVAYEAGRDGFWLARWLRAREIEAYVIHPSSVPVSREHRRAKTDRLDTELLKRAFLGWLRGEPKHCSMAAIPTIADEDARRPSRERENLVKEATRLVNRMKANLARLGIRGFRPHLARAARQLQTLQTPEGAALPANTLAELRRDMDRLRFAKQQIKQIEAARIERLEREPAEQRHAMVRLLGRVVGVGVETADMLVHEVFARRLRDRRAVARYAGLTGAPDESGTKRRERGLAKAGNARVRRGMIQLAWRHLLHQRDSALAQWYRARTADARSRTRKIMIVALARKLLIALWRLLTTGEAPAGLLIRPAA

SEQ ID NO: 157280 - protein, 400 aa, unidentified
MIIVGIDVSKGKSTVCLLKPYGEIICKPFEVQHTEKDLEELANLLQKLDGEIKIVMEATGIYHLPILTFLLEEGFFISVINPFMMKRFARDNSLRGAKNDRLDSVMIASYGIEKWHKLKKYEVNDGIYPELRFLGRQYHRFMQTHVKHVQELTHLLDHTAPGLKAMFNSWNEHSNRDKLSDFVERFWHFDLITSLSREEFVEQYLLWAKEKKYHQSRSKAEKIYDLASNGIPTLSSRTPSTQMIIQEAINVLRIVNNSLYRILSRMKELAKSLPEYATVRSMGGVGDALAPQLIAEIGDVIRLHNGHALVALAGIDPPPYESGQFVGTHRKISKRGSPILRKIGFEVMRVLKSHKEPEDNAVYNYILKKEAEGKNKKLAKIAGLNKFLRIYYARVMEVYR

SEQ ID NO: 157281 - protein, 449 aa, unidentified
MERYAGVDWASDKHDVLVQDAGGEEVLAATFGHDERGLRALCNTLVRLGVVLVAIERPDGLLIERLLDAGLRVIAIHPNQVAAARPRFRASGGKSDRFDAFVLCELARTDHHRFRVLVCDSDDTKALRALSRAREDLVQARVELANQLRAELERFWPAATVIFAEIDSPIALAFLARYPSPPDAKALGKKRLAAFLARHAYCGRKTPAQLLGKLRDAPQGRAGEAEIEARRAIVLALVAALKPIVAKIAELTREIAHRVRAHPDGHVFLSLFRDPNSVVCAAALLSEIGDCRARYRSAEALAADAGMSPVAVESGKRKVACFRRGCDHRLRNAFATLADATRHWHPWAADRYATARARGQDHQRAIRTLGRAWCRVLWRCWQDNAAYDPARHRGLQDHIAVTIPDRSRPRLDLTATQRIAGAAVTHRAARRDEREALDGKPTSATRSEG

SEQ ID NO: 157282 - protein, 353 aa, unidentified
MSIKYVALDVHQASTAASVRDQSGRVVRRGILETTPADLIGFVSSIRRPVHLAFEEGTLAQWLHDLLREHVDDLIVCDPRQNALLLSGSKTDQIDADKLSELLRLGALRPIYHATDHLTTLRESVRAYDMLVDDSVRVMLRIKAVFRSRAIRAAGERLYGKADRAEWLQRLDQQPALRQRIESLFTQLDQLMELRERARRSMIDAAKATDGYPHIRSVPFIGPVRAAEIIAYMMTPHRFRTRRQLWAYSGLAVVTHSSADHRFESGLLVRRRVTATRGLNHNFHRVLKKVFKQAAFDASLHRGPLRTCYERMLQSGIRPDMARLTLARKIAAIVLAVWKRGVDFDQQRLMLTT

SEQ ID NO: 157283 - protein, 370 aa, unidentified
MLDTTTFIGLDVHARSIKAVSLDVMTGEVRAATFGYDAGAVAEWVRSVDPRARCVYESGVTGFDLQKRLSGLGVDCVVGAVSKMIKPSADRRRKNDRNDAEFLARMLSVGNVVEVWVPDDECEAARDLTRALEDARDDLSRSKQRLSKFLLRHGLVFDERTPTGRRKGNWTRAHWSWIESIRFAERADNDVLAYYVDAVRRAAEEKARLEGLVEAEARKPRWRKRVDSLRCLKGVDTASAADLVFEAGEFSRFRNARSFAAWVGLTPSEHSSGESDRRGAITKAGNKHLRKTLVEAAWHYLTCSGRPKGLAKGQAPDRGARRHAAKGVRRLVERREALLARGVHGNKANVATARELACWVWAVGLMAEEA

SEQ ID NO: 157284 - protein, 345 aa, unidentified
MQDTTIAVDVAKSVFEVAISQRPGRVSERHRLSRRRFARFLAEQAPATVVMEACGMAHFWGREARARGHTVRLLPPRDVRPYVRGNKTDRSDASGLLEANRNEAIRPVPVKSVDQHALTGLHRMRSTWIATRTARLNTIRGLLRELGLTIPAGARQVVPRVWELVSEPASELPEALRPVLAEAAREVAELERRIEEVEAQLEGIARQSPLVGRLRTIPGVGLLTATALVASVGDLRRFPSARHFASSLGLTPRESSSGSVRRLGRITKRGDPYLRTLLIHGARSVLHHAKRTDRPDRLRTWALERERARGHNKAAVAVANKLARISWAVAVREETYRSRPEAAPA

SEQ ID NO: 157285 - protein, 346 aa, unidentified
MKKIAYLAMDLHAHNCTLGQMDDEGFFKGNQEFPTSENNIIHALESVKAKEKYLTIEAGVLAYWAAQIANPCVSQVIVCDPRENALIYKNRYKRDKIDTRNLCRLLRLGELKNVYLPENDDRAVFKAAAQHYLDLRNQLTRLKQKLKAIYRHWGVINIFTDSVYSNCGRDKYLEQVKRLPIRNQLLRLYYLMEKTEAMRKSARKAMIQLGRKYPEIRQFVKIPGIADISAHVFDAFIQTPHRFARKSQLWKYCRLSITDRSSDGKPLGFQRIDSSGLGELKALSYRSFMAAMKGDNEVKRFYLDSLKRTHSRKHARLNTQRKILSVMYAIWKKGAAYRPELFTGSA

SEQ ID NO: 157286 - protein, 348 aa, unidentified
MNKSKKSAVAFHPCGIEVSQLTLVVALRAHDRDQARREFPNTRQGHSSLLRFLERCAGPVRVAMESTGLYGLDLALALHEAGVAVMVANPRAVRHFATAMMQRSKNDDLDAQVLREYAARMPFQAWRPPSTAALQLVAVSRRLEALTDMMAAEKNRRHAVSVCEALPVVIRRDIERSIQTQERAIERLTRTAQEFILADPELARRFELLLSIPGIGVTSAVHLLAELTMLPAGMDVRQWVAYAGLDPRQYSSGSSVHKKIRISKAGNKHLRRALYMPALVAAQHDPHLRAYYEHLQAHGKTKMAALIATMRKLLHAIYGMFKHDQEFEGAKVYALANASVPQPQEVLA

SEQ ID NO: 157287 - protein, 411 aa, unidentified
MHNRQNYLYVGVELHKEHHTAVIINCWQEKLGEIQFDNKPSAFSKFLLEVETYVCDGITVVFGLEDVGGYGRALAKYLVDHERIVKEVNPALSFLERKSQVMIQKNDSWDAECVARILVNKFNQLPDAKPNDLFWSIQQLVSRRNALVKAQSALKNQLHIQLNHHYPSYKKFFSELDGKTALAFWQQYPSPSCLEGANIKQLTAFLLDVSNNTCSVKKASEILKLVKEDGHTMKEYQETRDFLVRSIVRDIEFKKTEMKYIERELKQLVKLLDYQLETMPGIEFVTASALIAEIGDVRRFPNANKLARFAGIAPVYFGSGGKGKTHKSKQGNRALHAVFYNLAVQQVQVAKGSKMPRNPVFHTYYQKKLKEGKTKGQALVCIMRRLVNIVYGMMKYKTAYELPIVEEKEVV

SEQ ID NO: 157288 - protein, 340 aa, unidentified
MGLYAGMDLHSQNTFVGILEKGSMRRVYQKRVPNDLPHILYELEPFREELEGIVVESTFNWYWLVDGLMDAGYSCVHLANPSAMKQYEGLKHVDDRHDSFWLAQMLSLGILPQGYIYPKEERPVRDLLRKRSYLVRQRTSNILSLQSMIERQSGQRVSSNTLKKITEEQIKELFKEDHLVLSAMANISTMKALDQQIRIIEKAVKSSVKLRKEFECLLTVAGIGDILALTIMLEVGDIRRFEKVGNFSSYCRCVSSMRISNGKSKGKGNSKNGNRYLAWAFVEAATIARRYNERLNRFYQRKAAKKNGIVATKALSNKLARACYYVMRDQVPFKEEMLTP

SEQ ID NO: 157289 - protein, 355 aa, unidentified
MNQEKYIGMDVHQATISVAVMDSRGKLITESIVETKAATILEFLQGLRGSLSVTFEEGTSAAWLHDLLKPHVTRVVVCDPRKNALLKDGSKSDRIDARKLAELLRGNQLTSVYHGEHGMRTLKELGRSYLTITQDLTRVMSRIKALYRSWAIPCSGTSVYAPRHRAEWLDKIPEPGVRLRAGRLYQQLDLLQPVRQQARRDLLTESRKHHAVKLLCQIPSLGPIRAALLVAQLQTPHRFRTKRQLWAYSGFALETHDSGEYRYVRGKLQRNRERMTVRGLSNNHNPEVKNLFKGAAISASTHPGPLYDFYVALLKKGMRPTMARLTLARKIASITLTIWKKGVDFDATQLHRQEA

SEQ ID NO: 157290 - protein, 352 aa, unidentified
MNKDNTKYAGLDLGDKTSLVQIRDQEGEFVKEMRIPTTAVALEREFRGVGPMRIALEVGAHSRWVSRQLSSYGHAVVVADARKLRLIYENPRKSDQVDAEYLAKLVRLDPSLLSPIVHRGEAAQQHLAILRSRDSLVAVRTQLVNHVRGMVKSFGGRLSSCSTESFARKVWSELPDSLRPALEPVLGSIQELSERIHAYEQEIERLCAENYPETERLRQIKGVGALTALAFVLTLEDPQRFETSREVGAYLGLVPRRSQSGDADPEGHITKTGNPYLRRLLVGSAQYILGPFGAESRLRTWGLQLAARGGKAAKKRAVVAVARKLAVLLHKLWVSDETYHPFFPQRTAEPLT

SEQ ID NO: 157291 - protein, 338 aa, unidentified
MRVYIGVDLHSNNSMIVVIDETGKVLYEKRLRNDLGLIVSELERYRKRCAGVVVESTFNWYWLVDGLMEAGYEVHLANTAAIQQYKGIKHTDDRSDARWLAEMLRIKVLPEGHIYPKEDRAVRDLFRKRHQLVRQKTSQMLSIEDIVSRNAGVGISGNDVKTITESGLDQLLPDPLVARAAKSNLRVYKCLAKEVIDLERTVLSRAKAVPGFEELLGVSGIGKTLGLTVLLEAGDMERFPGVGNFASYCRCAGSQKLSNGKRKGKGNTKNGNRYLAWAFVEAATFAIRYNPRVKRYYERKKAKTNGVVAVKAVANKLSRACYHVLKEGVPFQVERAFA

SEQ ID NO: 157292 - protein, 400 aa, unidentified
MLSIGIDVSKGKSTVCGMKPGGEIVYAPFEVQHTREGMSELVSLLRSSGEEVRAVLESTGSYHCPVVAALLENGIFVSVVNSLRMKRFCSQSIRKVKTDRIDAMQIALYGLAYWQELQPARLPEDTYRELQLLARQYYQMTSLLIKAKVDFNAICDQVLPGMQELMSDHAGRHKLSDFVLRYCHTTHILEMGETRFRKDYCKWAEKKGYRNCERMAALIFATAQNGIPVLPNAPSTQIVITEAIRVLHTVEASRDAILTQMQALAKTLPEYSLVREMPCIGDTLAPRLIAEIGDVRRFHSKRALIAYAGIDAPPYQSGKFCANNRHISKRGNRYLRKTGYEVMQSYVMHKPANDPIFTFIEKKRGEGKSGKLAMVAGLNKFLRAYYGKVTELYRSSSAIE

SEQ ID NO: 157293 - protein, 406 aa, unidentified
MNVYVGIDWSTKKHDIVFLNEAGAIIACLTIPHQVAGFAQLERTREQLGVTASACLVGLETAHNILIDFLWGHGYEQVYVIPPTVVKGSRGRYGSSGARSDQRDAQLLADILRTDRAQLPRWRPDSFLTRQIRAKVSLIHYLTKQVVRTSLRLRSVLMRYYPAGLALFGGLTRQITLAFLLEYSRPEAAAGLSYEDFAAFMAGRGYPYRQWPKQFARLQRPQPIASAETVDVFAAEMVLLARQLWDLVRTNNAQKRALTQLFKGHPDQGVFASLPGTGDLLAPALLAKFGDDRQRFPHASSVQALAGTCPVTDASGKRRWVKFRRACDKEFRHFAQQWARSSLRKSVFAQAYWAQIRPRVGGDSDAYRRLANRWLAIAWKLWQTRQPYDEAYHLQQRAKRSQPRLK

SEQ ID NO: 157294 - protein, 362 aa, unidentified
MFMDIRSPFPYKATVGIDWADQKHDVFVRFANGDSYRRKIDSRPEALQEWLLELRSACAEGKIAIALEQRRGALFYHLCTHLNWIDLYPINPHSLASFRLTFFSSRAKDDPIDSQLLEELVRTHSDRLRPYQPESTTERKLDQYCRHRRSLLDLATKTELKLISTLKQYFPLAVNLFAAVGMSLIEPLVLTTKCLADQLRQFNKVIKEFDHKIKELFKSHPDHFLFENFPGAGEQLAPRLLSLFGSDRARWADATDIQKYSGIAPVIERSGKSVWVHRRLSRPKFICQTFHEFAQQSVQHSSWAKQFYQRQRDSGKSHHSAIRALAFKWIRIICACWKANKPYDESFYVQALAGKNSPLPMT

SEQ ID NO: 157295 - protein, 391 aa, unidentified
MFLLGIDIAKLNHVASCIDSSSNEVIFSNFKFKNDFKGFNSLLDKIRTFNAENLIIGMESTSHYGENLINFLFKQHFKVALINPLQTSHLRKANIRDAKNDNLDSLNIAKALSFAKLNFISKKNIDCFSLKKLTRFRSNLIKQRSKTKIQLTSLLDLLFPELQYLFKSKIHSRAIYSLLKKYPSAEEIAALKDDEISNLLYASSKGHFKKEKSIELKSLAKTSVGIKDTSISLHVVQLIELIELYDKQIKDIVSKISDTVDKMDTKLLSVPGINIIACAIILGETNNFENFSSSKKLLAFAGLDPKIRQSGNFYASSCRMSKKGSPYLRYALVFTAWNIVRHSEKFNRYYCLKRSQGKSHYNALGHVAHKLVRVIFTLIKKNIIYQEENLR

SEQ ID NO: 157296 - protein, 339 aa, unidentified
MKLTTVGVDIAKSVMQLYYIDAETGEIVNKPVKRVAFLEHFANRSPCLIGMEACGGSQHWARKLTAMGHQVKLMPGKFVKAFVMGNKNDAADARAIWMAVQQPGKSVAVKTETQQAVLGLHRMREQLVKFRTMQTNSLRGLLTEYGEVMGKGRTALDKAIPGVLERLVDRLPTILINTLREQWNGLVELDKQIAQIERRLQTWMKEDKACKAIAAIPGVGLLTATAAVATMGDAKTFRSGREFAAWIGLVPAQTGSGGKVQLLGISRRGDTYLRTLLIHGARSVLFHAKERGPWIEQLKNRRPLNVVVVAQANKTARIIWAILAHDRPYEKGYVSVKPV

SEQ ID NO: 157297 - protein, 346 aa, unidentified
MEHYVGLDVSLKLTAICIVDRTGKIEREGVVASDPETIAAFVKSHAPHVVRVGLEAGATSTWLWTELSKLGLPVICIDARHAKAALKLQINKSDRNDAVGIARIMQCGWYKEVRVKDLDSHAIKALLVSRALLVKIKRDIENQVRGLLKNLGLVIGQAKMNVFAVRAAELTDARPELTAAIEPLLKAREAVGQQIADLDRKVMRLARNVAQVRRFMTAPGVGPITALCFLATIDDPTRFRKSRSVGAYVGLTTRRYASGEIDWTGRISKCGDKMLRSYLYEAANVLLTRVAKWSALKAWGIRLAKRSGLRKAKVAVARKLAVILHRMWIEGSEFKWSSKEAANQLA

SEQ ID NO: 157298 - protein, 464 aa, unidentified
MTDVKRSSKRKKPTNSVPAALPVLQPMVAGVDVGSTQHWVCGPARADGETNVRVFGTTTLQLNELADWLVKQGVKSVAMESTYIYWIPVYELLESRGVEVVLVNARQLHNVPGRKTDVSDCQWIQLLHSCGLLRGSFRPTEAITRLRALQRQMANFVAERSRCVQWMQKALDQMNVQVHRAVADLTGTTGMAIVRAIVAGERDPARLATHRDRRCRKSVEEIAQYLTGTWREEHLFNLAAALRLYDSLQETIASYETHLLAQLEALQPPERQQEEVPRHPNPTKEKSIRNRGEQPLRTNLWRFAGVDLTRVDGIGGAVAQTVLTEVGPDVTAFPSEDHFVSWLRLCPRTPISGGKPLKKRRNGMGANRIATALRMAAVGIQRSKTALGASFRRIARHKGAAVAVFATARQLARLIYRMLRYGQDYVDIGEAAYEAKFQARRLAGISEAARSLGFTLTKNEATTG

SEQ ID NO: 157299 - protein, 351 aa, unidentified
MLIIGCDYHPSFQQIAWVETGSGECGGQQLQHSNGEAEKFYRDLKLRGMQVRVGMEATGHARWFERLLAGLQYELWVGDPAQIKAARVRKQKTDRRDAGHILKLMLEDRFPRVWVPGAENRDLRQLLWHRHRLVQMRTRVMNQLQAIAMNEGVRRKKGLWSKSGREQLESFPLAPWAQRRRQDLLELLDRLKPRIGELTTAIEQEAERRPEARRLMTHPGVGPLTALAFGLIVGPVERFGCSKQVSSYLGLVPREDSSGGRQQLGHISKQGNTLLRFLLVEAAQAVVRSDPEWRGRFLHLVMRRGRPIALVAMARKLAVCLYWMTRQGTEYKASPVSVRTWGSSKLGHGVK

SEQ ID NO: 157300 - protein, 329 aa, unidentified
MEEHIGLDVSMKETAVSIRREGERIWRGKCASDPRIIAELVRKRAPAAKRVVFETGPLSVWFYHALRAEGLPAICIDARHAKAALDMAANKTDANDADGLARLAEAGFFREVRVKGFDSMLTRTLVAARTRLVRITVELSNQIRGIMKTFGLLVPAGKGTTFEKNVRSLLIDQSELAPVVLPMLEAWRSIRIRAAELGRQLVADARQSQACRILMSIPGIGAITATSFATAIEDPGNFKKSRSVAAWIGLTTRRYQSGEVDYDGHISRRGDRHLRGLLYEAAAVILTRSSIDSSLRTWGLKLREGWLQTSCRGCGAQTGGDNAFDAQDR

SEQ ID NO: 157301 - protein, 456 aa, unidentified
MSKLSKPKEGDMEARRMVGMSKVNPNAAGVDIGAHEIVVCVTGKEDAQLVRTFGSYTADLKAIGEWLREYGVTSVAMESTGVYWIPLFEELEQQEFRCHLISSRSLRRVPGRKSDVLDCQWIQTLHAYGLLESSFRPEADLVALRTLLRHRAQLIQHRSPHILHMQKALLQMNIQLSQALSDVTGSTGQTIIRAIVDGERDPYKLAQLRNYRCKKDETEITKALTGTWREEHLFILKQALELYDFYTKQIEACDAEIERTYGLIRPDWAHEELSPLPSNKRHSHSKNAPKEVEVRKHLKRICGVDLTAVHGVSASLAQTIVIEVGTDMSKFPNEKHFCSWLGLAPKNDISGGKVLQSRTLKTRNRAGQAFRMAAGSMMRADCMFGVHYRRQKSRLGPAQAAVATAHLIARVVYRMLKYKVEYEPLSAAEYERHYQDQQLKYLKKKAAKFGLQLVPT

SEQ ID NO: 157302 - protein, 364 aa, unidentified
MRNSITWVGFDDAARRINVAVFVGNEANPHEEFAVENDSKGHSRLIRKLKTLPGEVRCVYEAGVNGYHLHRVLKQKGIPCDVAAPSLTPRRAGNRVKTDRRDAKMLAKLYRAGELTSIAIPGPEQESLRDLVRAREDAMEDQQRCRHRLSRFLLRRGIRFTAAKAWSRPHMKWMSEIRLDDPMAQAVLDDYRMALLESTERMKGLEEKIGQAAKAPQYQKLIGYLMGLKGVRELTAMTILAEAIDLKRFSNPRALMAAIGLVPSERSSGERELRGGITKTGNSHMRRVLVESAWNYRHRPVPGKWMRKRRAGLPQEVREIVHSADKRLNRRYWYLVHKGKDSRTAAVAVARELAGFIWSIGQVA

SEQ ID NO: 157303 - protein, 436 aa, unidentified
MPKTQTSQPLADPTPEIQFFCGFDWARHDHYFVLKTRSHRVLHEGYFQNSANGFQKFFECLEAHRNGETVALIIESTRASAVALLGMKDWITLYPVNPAVTRKLIELDGSGKGKNDARDSNLLCDYAIGNHEKLRVEHEHDPDILCLRELVGTEDELVAERTRLKNRITAQIAQICPDLAEMVCSKLDIKAYSEYLLRFDPREPVSDAKVKKHLKEHHVFGAKTLDSFLEKHRALQTLPLDGKLLAVHLEKLRSLVRRLQLIQEELCSCQSEIHAFFCALPCAEIYRSMAGLGDCLAPRMAALFGKNPEKTFANKREVNAYFGQSPVTQSSGGKAKERKKAGEHEKKTVNRRRSCNRFARQTTYLWSSSVARLGEDHAPWQRAFLKRCKERGDSTATRYRKLGQKLLAVLYTCLINNEPYSHDRYMNNIHTKPEIA

SEQ ID NO: 157304 - protein, 347 aa, unidentified
MRFYTGRHGFYCGIDLHARWMYVCILSHEGEIVYHQNLPASPEPFLKAVAPYRHDLVVGVECIFTWYWLADLCRSEGIEFVLGHALYMRAIHGAKVKNDKVDSQKIAALIRGGTFPMAYVYPPEMRSTRDLMRRRTYLVRKRADLLAHIQNTNSQYNLPEFGRKIAHKMHREDLAQAFPDLQVQRSIAIDVELIDHLDRIIDGLERDILRTATKHDPQALRILRSVPGIGKTLSLVILYEIHSIDRFERVQDFCSYARLVKCAHESAGKRSGKSWGKIGNAHLKWAFSEAAVLFLRVNPDGMKYKQRLERKHGKAKALSILSHRLGRSVYFMLKRNKTFEMATFLAN

SEQ ID NO: 157305 - protein, 419 aa, unidentified
MKVVYPICCGVDVHKTFLVATIIATQGIVPSYKKKRFSTFNNSILAFKQWLLDNNCLDVCMESTGKYYVPIYNLLEDSIRVTVANPKWVAAVKGNKDDVKDSKWIGDLFRLGLVPGSFIPSKCVRILREYTRYRFKLVSCKSSEKNRFQNAFTVCNVALDAVVSDMFGKSASSITDYLVNSDTFDPEHCISLLQRSLKKKADAVIESIEGFQMTEEQKERIRFVRKHLDFVDKLIADLDQTITGMVEPFESAISLLCTIPGVDRTSAITIISEIGTDMSQFSSSKRLCCWAGLTPGNNQSAGKKKSVRITRAGVYLKPALVQAAHAAVKSKTSAYYRIKYERIAKRRGKKRAIIAIARMMLTAAYHMLQTGEVFNPCDFYQVDMPQELRNKQKEKALKQAARLLIAHGVVLPEHIAFSA

SEQ ID NO: 157306 - protein, 387 aa, unidentified
MEKNRGRVVGLDVHPDSFAGAVVQGRDPASAVVLSTSMRVELGRLEQWALRHTSTEDTLVLEASGNAFAVAARLRAIGRKAQILDSHRAGKVGKAYCANDRVDAVKIARIYLSALSPIVWQPDEKTLERREIFSAYQGVVKESTRAKQQLRSMLNEHCVRLEKGFRLCHPKAITCLLKLREWTPARRMLLQQLHATLLAARARRTLLRRHMAQEIVAEETLMRLTRLCGINLITLYGVVAAVGDVRRFPHSKKLVAYLGLNPSVSQSGNFEGSGALKRHGRGALRALLIQSGKKLLEVNNPLQKWGLAVASRRGRNKAAVAVARKLCVALWHVLMGHVIGALERLDTLETKLSKFATEIGPAALRAFGYNNKADFVEKKLYVLRSYP

SEQ ID NO: 157307 - protein, 318 aa, unidentified
MSDSVFVGIDVSSQTLEVASSSEVKTWQVSNDAAGLDALVSRLLELKPALTVLEATGGYEFEAACAVQAAGLAVAVVNPRTARDFARAMGALAKTDALDARMLAAFARVLQQHPERERFVKPLADAELQRLQALVLRRRQLVQMITSERQRMRISHAAARPSIERVIEFLKTELADSEGDVADHVQRHHAELAAALASVPGVGAASVAVLLAELPELGKLDRRRVAALVGVAPLNRDSGQMRGQRTIWGGRADVRRTLYMATLTAVRHNPILKAHYERLLAAGKRKKVALVACMRKLLTMLNAIAKHGSKWDPTLHLA

SEQ ID NO: 157308 - protein, 399 aa, unidentified
MEPIVKSCAGLDVHKMMVMVTIRKETEQGIEEITQSFGTLKKERLKLCHFLKQHHIELAVMESTGVYWKSIYLSLVITGIKTQVVNARHVKNVPGRKTDVINSQWLASLGHYGLVRSSFVPAPQQEQLRLLTRRRDKQKKELSNEKNRLHKTLDDAGIRLGGFISDINGKSGQILVNGLIEGKPLCDLIKMVDPRLKADRSELMASIDETLTPSHLYILRNIKSHIEFLEKQLAELETLIIETIKPWNEALELLQTIPGTSVISAACLIGEIGDDMSCFDGMKGISSWAGLCPGNNESAGKRKSGRMRKGNKMVKTLLCEVANAAVKTKSQFKGKYQGLVIRRGHKRSIIAIAHKLLRIIYTVLSRRKAYFDPDINYEELMVRRNSPRWLQMMIKYNMV

SEQ ID NO: 157309 - protein, 379 aa, unidentified
MATTKQALLNDTSVTLMLYMALELSGAKWKVAVADGKRAASQHALVAGDVGGLLLLIDKAKKRCGVQGKVRVMSCYEAGRDGFWLHRWLLEQGIDNVVVDSSSIEVNRRKRRAKNDALDAAKLYEMLVRYVAGEKRVWRVVRVPSVQQEDERRLHRELERLKRERNAHVNRIRSLAVLHNVRLQRVGGKDWSERLEQLKGQLPAGMVAEIERQSARAKLVGEQIAQLEKSRQEQLQTMIEQQQDGPLLALLKLRAIGVQTAWVLVRELFSWRRFSNRRELAGCVGLNPSPYDSGASQREQGISKAGNRRVRALLVEIAWYWLRYQPHSALSAWFNRRFGGAGKRMRRVGIVALARRLLIALWRYVEQGVIPEGAQLKRP

SEQ ID NO: 157310 - protein, 447 aa, unidentified
MKALPILNPNAAGIDVGSEQLHLSIAGDEPVVFGTFTDEVYRLRDYLKAQGVSSVAMEATGVYWLYVYAVLEAAGLEVVVVNGRHVRNLPGRKTDMADCQWLATLHAHGLLRGGFVPPAAIRRLQDYQRLRADHIIGASSQVQKMQQALERMNIKFHDVISDLDGVSGLKVVRAILAGERDPQALLLLCDPQIQKKKGDRVVRSLKGTWAPEHLFALSQGLAAWEFYQKLLSQCDEQIEVVLRELAGPEPPPPTAPAEIPGKRTGKNTPQIQQLHQLLLRLCGGRDVTAISGIGDYLLLQLLAETGTELKAWATEKHFNAWLGLAPGSRQSGKRKGSVKVQRNRAGRLFCAGARSLVNSVDKALGGFYRRLAARKGGLVALKALARKLAELYYRVLRHGLAYAEQGLRAYEQKYADSQRRLLGKLAAKQGFKLVSLQLQAPPTGGTA

SEQ ID NO: 157311 - protein, 367 aa, unidentified
MKKVSTAAVKATKNFSQPKLTIGLDLGDRSSWYCVLDEEGEVVLEQKLSTTPKAMREVFGAMPRCRIALETGMHSPWVSRVLSELGHEVIVAHARNVRLIGESRKKDDRLDARTLARLARIDPQLLCPVKHRSAQAQADLTVIRARAGLVRSRTALINTARGLAKSYGERLRGCNPRNVNPEKAQGLSPELQAALAPLLAATEALSERIYEYNQQIAKIAKESYPQAARLEQVKGVGTLIALTFLLTLEDPHRFRKSRDVGCYVGLQPGRRNSGQSEPQMHISKEGDPYLRTLLVQGAHHILGPFGADSDLRRWGLKLAERGGKNGKKRAVIATARKLAVLLHRLWVSGEAYEPLRNSRPITMPAAA

SEQ ID NO: 157312 - protein, 427 aa, unidentified
MKYTQNEKILQVTEDTLIAGVDIAKESHYARAFDYRGVEYGKYLRFENNREGMTKFFKWAKDLMERHKKNKLIVGIEPTGQYWLCFAQYLKDNNIKVVLVNPFHVKRSKELDDNSPTKSDRKDPKTIAMLVKDGRYVEPIIPEGVYAELRVAMDIKDRLNKQIGMTKNQITRWLDIYFPEFNTVFSDWEGKAALITLREFPTPEKIAKKSAEEILSIWKKEVQRGVGEKRAIKLIETAKKSIGKKQGIKMAEYEIKTLIEQYEFLKKQIEEVEKKIEELIVEIPGVKELLEIKGIGINTVAGFIAEVGDIEKYEHPKQIQKLGGLNLIENSSGKHKGETTISKRGRKRLRRVLFNAVMALVAKNEEFRELHKYYTTRAQNPLKKKQSLIVLCNKLIRIFYVILKKGVKYDPIKMMKDIKRPALQEAA

SEQ ID NO: 157313 - protein, 381 aa, unidentified
MTTTATHHEQRNPTEATLFLAFELSEKTWKLGFTTGHGQKPRERTVTARHQERVLDEIVQAKRRLGLPDTAPVVSCYEAGREGFWLHRFLQAHGITNHVVDSSAIEVNRRRRRAKSDGLDVRKLLSMLMRYEQGERHVWQVVKVPSVEAEDQRHLHRDLETLKQERASTTTRIQGLLSSQGIRLTSLSKLPEQLEALRLWDGSPIPPGLRRRVLRVYAHHTFLSAQIAEMEVERRAQLQASTDARIDKVRQLMLLKGIGINGAWLLVMEFFGWRAFKNRREVGGLAGFTPTPYQSGESAREQGITKSGNRHVRWMTTELAWSWLRFQPDSALSCWFRQRFGGGGKRLRRIGIVAVARKLLIALWRFLETGVVPEGAVLKEA

SEQ ID NO: 157314 - protein, 346 aa, unidentified
MLYAGLDLSRKRLDVHVLREDGTTALVTAVSPDTDALGSLARRVAAEGKPVRATIESMNGARFVHDSLEFAGWEVLIADAQRVRGLAPLAAKTDKIDARVLAELTRRALVPEVWLPTPEVRAERERARFRLHLVRHRTALKNRIHAILIAFGHPCPMTDLFGVAGRELIHRLQLPEPWQTNLVESLVLVDDLTARVDALEVELKELGADHPSMRLLMTVPGVGWVLAYTIASEIGDVRRFASPKKLAGYTGLCPLVRQSGGKDRRGPLAKNGPAYLRWALIEAATHAARDPRYRQRYERTKQRLGRQRGAKVARVDLARQLAEAIWHVLTKNEPFHPAGPAMGLVA

SEQ ID NO: 157315 - protein, 373 aa, unidentified
MPRYSTAFGMDVHLRSTTVCALDAETGEAVARRFRGNPWGEVAEWMSGFPGPSLAAYESGYLGFAPQRELSALGVDCVVAAVSKVPRSAADLSSKNDRNDAARMAKAILSHDVTPVWVPSPEIEGLRDLAAAHDAATARLAAAKQRLLAFLARRGYVYGGTTPAGNPRKYWTYGFLRWLDKVRPADDGGIRALAALRNEVEAADEAREALLAEYRAAVAAGPLSAEVEALQSIKGCGFVLAAAFASEVGDFSRFRSGRQVTAYFGLAPKQRSSADSVRLGGISGAGNALVRRLAVEGSWRYAQAGHQPKLMPKGSGVPLEIRMHGRKGSERLLRRREEMLERGMPQAKANAATAAELVRWLWALGTMCREAGE
